United States Patent Application Publication US 2005/0228172 A9 - sequence listing, part 86

SEQ ID NO: 387526 - DNA, 609 bp, Homo sapiens
gttaacacaatgaagttaaattaaatgatgactagattcacttactgtaacagtctggcctgccttcagcacatatcttgaggtatatttataactgactgatgtgtctccaatttttctgatcatctcccagcctcccattggttgatcctacacacagaaaggagggtgaggggtgttacttcaaagataaagaaagttgtggaataatcaaataaattaatccatacaggcagttaaactaagaccgctttatggtcatcttcccacatttcaggttttcctactataaaaagaaaacacgattctgtcattttgtcaaacagtaacttcaacaatgagttaattagtaaggtacttgactttaaagaggacagaactggaagaacagggtatgaaccaaattaaatggtcaaattcacygctagataaggtgggtctttcaaatttacagcactatctagctgtcataatcacaatttttaaacatcaagtattggattacttcaagcttttaaaatagacacataagcttagaaacagaagaaaatctgtcattttccttctgcatctgtcccacttctgcccacattcagctctcatacatga

SEQ ID NO: 387527 - DNA, 590 bp, Homo sapiens
aattgataaatatcattgattctggaaagaaactgggtggctggagaataagagtggaaggagacttttttttttttaaaccaagtattttagcttgagtttgtgggaatcaaactctgagatagaaatgagtgcagaagatttgttggggagtgttctctggagataacacctgcaggaagtgaggaaagcagcactttttctttttttaatgtggggcaagtacagctgtccccagggctctgggagttctctatggtctgtcagggaatccctgggggctaagactgcagtggccaggttttgtgcttatttwctggggggtggattgagggaagagctatgtacccttggagtaccctggcctgaccatctttcaggacacgtcttggtcaaggctgtccacctgttgcccttggtccttgggcactgggagccatggttgctgctgcctgtccagctgggctcccttcctaggcctgcctgagaccagaggccttagaaacccacagtgcagttgcagctgagaactcagcctgctctacagttctgtgatgagctctggagttgggatggtccttcagcatcat

SEQ ID NO: 387528 - DNA, 596 bp, Homo sapiens
ttgaaacactataaattggaatacttgaagtcggttatctaggatttttatatcactcctcttccaacctcccgcttctcactgatgarggtttatttcttactttgaggggaagaatacacagcaactgtaaaaatgtaaaataaagtgagttcatctgattagtctgcaatctctctcttttcgtttgcatctggaaattctcaagtagacacatagaaacttgcagcaagcacgctttcttcctgtgtgtttgtctgcaccttccatgccattttccagccatgcttgtcttttgttaggaattagatggtcagaatgagaataatttaaaacattttttaaaaactttattttttaaggacacttttaggttcatagcaaaattgacagaaaaaaacagagatttcccgtatatccctcctgtccccctcacctggcctcctccattatcaacacctctggccagagtggtacccttgttacaatccatgagcctatactgacacatgattatcacccaaagcccagagtgtactttagggttcccttggagttgtatatcctaggggtttagacaaatatgtaatgacatg

SEQ ID NO: 387529 - DNA, 596 bp, Homo sapiens
ttgaaacactataaattggaatacttgaagtcggttatctaggatttttatatcactcctcttccaacctcccgcttctcactgatgagggtttatttcttactttgaggggaagaatacacagcaactgtaaaaatgtaaaataaagtgagttcatctgattagtctgcaatctctctcttttcgtttgcatctggaaattctcaagtagacacatagaaacttgcagcaagcacgctttcttcctgtgtgtttgtctgcaccttccatgccattttccagccatgcttgtcttttgttaggaattagatggtcagaatgagaataatttaaaacattttttaaaaactttattttttaargacacttttaggttcatagcaaaattgacagaaaaaaacagagatttcccgtatatccctcctgtccccctcacctggcctcctccattatcaacacctctggccagagtggtacccttgttacaatccatgagcctatactgacacatgattatcacccaaagcccagagtgtactttagggttcccttggagttgtatatcctaggggtttagacaaatatgtaatgacatg

SEQ ID NO: 387530 - DNA, 531 bp, Homo sapiens
tgttctggtaaacgtgagggactttggatagcaaatgggcaagataatgatattggccatagaaagaaccataaagaagagggaagggaagtggaaggtttcagaagggaagtgagaggattcatgtttgccttggaactgaagtgccactacacaccgactcttcttcccaagttaaattataaggagaatttgtwtttatacatttagatgtccttcaatttaatcctttataccagaaccatgttaattcagcccagtctttttctgatgggttactccctatctcctcctccatttggtgggaagagaagaggaacagacaagaggaaaaacaaactaaaaataaaagtactatgagaaatttatggctgggcgtggtggctcacactttaatcccagcattttggggggccaaggtggatggaacgcttgagtccaggagtttgagattaacatagacaacatggcaaaacctcatcactacaaaaaatactaaacattagccaggtgtggtggtacacgcctatc

SEQ ID NO: 387531 - DNA, 467 bp, Homo sapiens
agcaaacttattggacccaaagctctcatttgagaattttgttgactaaaagttataaaatatcagcaatttcatatggttcagcctaatattttatcactcttcctttttctattctaaaacaataatttttaataacgtaagctatacacatacatgctttaaacatacaacaccctgactatcatatagtggatatttcaagaagtaaatgttcagcatgtcttcacccccacttgaagacataatgtatgtattaggctgttctggcattgctataaagaaatacctgagactgtgtaatttataagaaargagctttaattggctcacggttctgcaggctgtacaggaaacatattgggtctacttctgtggaggcttcagggaactttgactcatggtggaaggtgaaatgagagcaggcacctcatgtgactgaagcaggagcaagaaagagagagcga

SEQ ID NO: 387532 - DNA, 580 bp, Homo sapiens
ggcttctcaaagcgaagggactataggcgtgagccaccgcgcccagactatgatagtttcacactgaagcctgacgctgctctgccttaggatttttcctgagttttacttccttgtcaggatgagttgctagttcmtattttctgttggatcttttagaaaggcgttactgatgagatcatggctttctcacaagaaatactactctggtgaaactctgttgaaattatcagtaccttaagtttccaatccttatcaagtacaatagttgaacatggcgtggtagctgaaagtgtaagaggcagaatttggcagactccacttcttcccatttcgatggttccaggttttttggcttcagccgaactaaagaatgtcctcacgagctgtgaattcacaggtcactacagacaatttttgaaactgaatcacactgtaatttttggcgtatgctctgtgagctgtgctgggaaggttcacgctgattccgtaataaatctcgggtttttactctatagcgaaaaattactctttgccatcctgaaggcaaagcagagtatgtacaagtagagtgtggaat

SEQ ID NO: 387533 - DNA, 593 bp, Homo sapiens
gtaaaaattggtccatgtttgatatgggcttctttgacttgccttctgttatttaattgaatgcagaacatgatagcaagacctagaattcatgtgacaatgatatttaatgcaagttcatttaatattaacattgttgaaaatttttccttgctgtaacattaaggataatctaatcacttggattactggtgcctcaggaataagattaacaatgagaataacatagtgatagtcttcaataaacagagcttaaaatggaatctatgacagtcaatgaaaagagtgactcaaagttctgagaccttattataccttgatactaagtaaccagttttacttaactcacctgagggggcatgaatgtggtataagaacayatgtgaaagtcatgcataatccaacaccttcacttccccgtctcagcaacacatatttacatcagagccttcgcaagccacctaaggctttcccttttcaatatttacttagtactaaaggcatgatcagtaggttataagcagaaacaaatggtaactcaaagagggagaaccatccaaaacttgaaaattaacccctgaaataaaacagag

SEQ ID NO: 387534 - DNA, 633 bp, Homo sapiens
gatgctccgggggacatgttttctcccccaaagtgatattcgtggaaatttgggggtagcctttgggggaagctgagaccttttgatcaaatggtcatatatgcctgtcactgaggcatcctggctcctttttttactttgacgccagggctgagtcttgtttccattgcccattttggaaatggcatgaggcccagtgaaggccctgagttcactgaaccactgaacccaggtcacagctgataccttcatatttctggctccatgagaaaaaataaagcaaacaaaaacaaacaaacaatcaaacaatacacatacaaaaggcccctattttggtacactattaacaggcttctctgatacttgtagtagaaatttaatacccttgtatgcaatgcacggaccatgcacagaacaggaaatcccatgayaatcaatactcacaaaataagttcatattcctgttttaaaaggagagctacttttgtagaaaatctttaggttcacagcaaaatcaggcagaaggagcagagatttcccacatcctctttccccacatatgcatagcccccttcactatcaactttctgctccagagtagtatgttggttacagtcattcaacctgcacgga

SEQ ID NO: 387535 - DNA, 560 bp, Homo sapiens
gattcctggcctagacaggaactcctgagctcaactgatctgctgcccttggccacccaaagtgctggttttacagagatgagccattgtggctggtctgagatataaatatgattgaaagggattatgaaaccggctgctgccttcatctgggtgagaccaatatcttctgagaggaagatgattattttattttatttttgtactggatgttggggaagcggcacctgggctgtcctgtatgtaaggcctttttctaatgcccggggtgtaacaggggcattttcccacatctcacacatgtccagagcttctcctaccacctccccaacaaagatctgtgtcattacagccatgtccatggcagtaacctggttctaggacactgacctgcacctgacggaawgcatcagacttctacagggtgcctctatccctttcccaccataaacacaaccacactggttattctgccaaccctaatgtgaagtgacttgtggatacagagtctattcatacagagtctattcatattgtagaaagtagagatcaatgtatgt

SEQ ID NO: 387536 - DNA, 609 bp, Homo sapiens
agatgcaaaccgaaatggtcactcctctaccagggatgctctgggagcatttttctctcccaaagtgacattcatggaaatctgcgtgtagccttcgggggaagctgaggtttttgaactaatggtcttatgtgcctgtcactgaagcccccccgtgtgttttttaccttgatggagggggtgagccttctttccattgcctgctttggaaatgccatgaagccccgtgaagccagccctgagttcactgagttgctgaaccgaggactcagcagctaccttcatactattggcttcatgagtaaaagcaaagcagagtaaagaaaacaaacaaataaacaacacaccaaccmaaggcccttatttcaatacacggtgcacaggcttctctgacaacttatagtataaatttaatgcccatgcctgcaatgcatataccacacacagaacaggaatttccaggataatcaatactcacaaaataagttcacatttctcttttaaaaatagagatcattttgtaaaaaacctttaggttcatcccaaaattgggtagaaggaacataggtccccaatatcctctcaccacacatatgcatagcccccttc

SEQ ID NO: 387537 - DNA, 609 bp, Homo sapiens
agatgcaaaccgaaatggtcactcctctaccagggatgctctgggagcatttttctctcccaaagtgacattcatggaaatctgcgtgtagccttcgggggaagctgaggtttttgaactaatggtcttatgtgcctgtcactgaagcccccccgtgtgttttttaccttgatggagggggtgagccttctttccattgcctgctttggaaatgccatgaagccccgtgaagccagccctgagttcactgagttgctgaaccgaggactcagcagctaccttcatactattggcttcatgagtaaaagcaaagcagagtaaagaaaacaaacaaataaacaacacaccaacccaaggcccttatttcaatacacggtgcacaggcttctctgacaacttatagtataaatttaatgcccatgcctgcaatgcrtataccacacacagaacaggaatttccaggataatcaatactcacaaaataagttcacatttctcttttaaaaatagagatcattttgtaaaaaacctttaggttcatcccaaaattgggtagaaggaacataggtccccaatatcctctcaccacacatatgcatagcccccttc

SEQ ID NO: 387538 - DNA, 623 bp, Homo sapiens
tgggctcctcagcaccctctccgcggaggtggcgggacagctgcatgtctctgggcatgattgtgacatgccagggatggataacmcatgggttgttgtctttaaatagggggaccaggtaggcctcgctgttctcctgaagtcgccagtggccgcacattggaagcgcaggtctgggttgatggcctgggtgatctcacgcattaggcattggaaggtcagcttgtgcagaagcagctgcgtggacttatggtacttcctgattttgtgcagtgccagggtgccaagcctgtggcggtgaggcttcttgatccctcatgtagccaggaccctcttgccagcagctttggtggccaacagcttcctgggggcctgccaggcggtggctttgaggtcagtctgcttaatgcgagccatggtgtagggctgtggcctttcccttgtcactgggctgagcctgctgaactggaagcagtgctggtaccagacagcaatggtgttggggctgtgggcaggattcagagtctgtgtgttgggatctatgcagaaggtgctcccatacacttagccccttccaacccagccccatacttaccagcttactgatcagtgggtctgaggtc

SEQ ID NO: 387539 - DNA, 623 bp, Homo sapiens
tgggctcctcagcaccctctccgcggaggtggcgggacagctgcatgtctctgggcatgattgtgacatgccagggatggataacccatgggttgttgtctttaaatagggggaccaggtaggcctcgctgttctcctgaagtcgccagtggccgcacattggaagcgcaggtctgggttgatggcctgggtgatctcacgcattaggcattggaaggtcagcttgtgcagaagcagctgcgtggacttatggtacttcctgattttgtgcagtgccagggtgccaagcctgtggcggtgaggcttcttgatccctcrtgtagccaggaccctcttgccagcagctttggtggccaacagcttcctgggggcctgccaggcggtggctttgaggtcagtctgcttaatgcgagccatggtgtagggctgtggcctttcccttgtcactgggctgagcctgctgaactggaagcagtgctggtaccagacagcaatggtgttggggctgtgggcaggattcagagtctgtgtgttgggatctatgcagaaggtgctcccatacacttagccccttccaacccagccccatacttaccagcttactgatcagtgggtctgaggtc

SEQ ID NO: 387540 - DNA, 623 bp, Homo sapiens
tgggctcctcagcaccctctccgcggaggtggcgggacagctgcatgtctctgggcatgattgtgacatgccagggatggataacccatgggttgttgtctttaaatagggggaccaggtaggcctcgctgttctcctgaagtcgccagtggccgcacattggaagcgcaggtctgggttgatggcctgggtgatctcacgcattaggcattggaaggtcagcttgtgcagaagcagctgcgtggacttatggtacttcctgattttgtgcagtgccagggtgccaagcctgtggcggtgaggcttcttgatccctcatgtagccaggaccctcttgccagcagctttggtggccaacagcttcctgggggcctgccaggyggtggctttgaggtcagtctgcttaatgcgagccatggtgtagggctgtggcctttcccttgtcactgggctgagcctgctgaactggaagcagtgctggtaccagacagcaatggtgttggggctgtgggcaggattcagagtctgtgtgttgggatctatgcagaaggtgctcccatacacttagccccttccaacccagccccatacttaccagcttactgatcagtgggtctgaggtc

SEQ ID NO: 387541 - DNA, 563 bp, Homo sapiens
tattccacactctacttgtacatactctgctttgccttcatgatggcaaagagtaatttttcgctatagagtaaaaacccgagatttattacggaatcagcgtgaaccttcccagcacagctcacagagcatacgccaaaaattacagtgtgattcagtttcaaaaattgtctgtagtgacctgtgaattcacagctcgtgaggacattctttagttcggctgaagccaaaaaacctggaaccatcgaaatgggaagaagtggagtctgccaaattctgcctcttacactttcagctaccacgccatgttcaactattgtacttgataaggattggaaacttaaggtactgataatttcarcagagtttcaccagagtagtatttcttgtgagaaagccataatctcatcagtaacgcctttctaaaagatccaacagaaaatatgaactagcaactcatcctgacaaggaagtaaaactcaggaaaaatcctaaggcagagcagcgtcaggcttcagtgtgaaactatcatagtctgggcgcggtggctcacgcctatagtc

SEQ ID NO: 387542 - DNA, 578 bp, Homo sapiens
attccacactctacttgtacatactctgctttgccttcaggatggcaaagagtaatttttcgctatagagtaaaaacccgagatttattacggaatcagcgtgaaccttcccagcacagctcacagagcatacgccaaaaattacagtgtgattcagtttcaaaaattgtctgtagtgacctgtgaattcacagctcgtgaggacattctttagttcggctgaagccaaaaaacctggaaccatcgaaatgggaagaagtggagtctgccaaattctgcctcttamactttcagctaccacgccatgttcaactattgtacttgataaggattggaaacttaaggtactgataatttcaacagagtttcaccagagtagtatttcttgtgagaaagccatgatctcatcagtaacgcctttctaaaagatccaacagaaaatatgaactagcaactcatcctgacaaggaagtaaaactcaggaaaaatcctaaggcagagcagcgtcaggcttcagtgtgaaactatcatagtctgggcgcggtggctcacgcctatagtcccttcgctttgggaag

SEQ ID NO: 387543 - DNA, 575 bp, Homo sapiens
cacttgctgacataaagcacagcaggcaggaatagaagagtcaacttaggggaaaaaaagaaagtgctttgtgatttcawtttggtgtctgcagtttggaaaacggttgatcagtttaactgttttcgtggtgactcacaaaaatacatatgagcgttgaaattctacagaagaacaacaatcggggaaacatttctgcaagctccaattactggaacccagacataagcctacaagctaagacagagctacaccaggcttcagcaggaaaccatacagatctcctgggaagggcttccctctctgaatgcagctgcctgtccacaggatgctctaggcccaggcaccttgattcctccagctggaaagacatagagaaacccctccacatcccattaaaatgccctaagatttagccaaggctcctatgaagcgatctgctgtcttcatccaggtaagggcaacttcgcattttaagacacgaagatcgtgggtaaatccaggtgggactgagatgcgggagctccggcgcacacactcctgtcattggaagatgaacgcggtacttattcctg

SEQ ID NO: 387544 - DNA, 575 bp, Homo sapiens
cacttgctgacataaagcacagcaggcaggaatagaagagtcaacttaggggaaaaaaagaaagtgctttgtgatttcaatttggtgtctgcagtttggaaaacggttgatcagtttaastgttttcgtggtgactcacaaaaatacatatgagcgttgaaattctacagaagaacaacaatcggggaaacatttctgcaagctccaattactggaacccagacataagcctacaagctaagacagagctacaccaggcttcagcaggaaaccatacagatctcctgggaagggcttccctctctgaatgcagctgcctgtccacaggatgctctaggcccaggcaccttgattcctccagctggaaagacatagagaaacccctccacatcccattaaaatgccctaagatttagccaaggctcctatgaagcgatctgctgtcttcatccaggtaagggcaacttcgcattttaagacacgaagatcgtgggtaaatccaggtgggactgagatgcgggagctccggcgcacacactcctgtcattggaagatgaacgcggtacttattcctg

SEQ ID NO: 387545 - DNA, 575 bp, Homo sapiens
cacttgctgacataaagcacagcaggcaggaatagaagagtcaacttaggggaaaaaaagaaagtgctttgtgatttcaatttggtgtctgcagtttggaaaacggttgatcagtttaactgttttcgtggtgactcacaaaaatacatatgagcgttgaaattctacagaagaacaacaatcggggaaacatttctgcaagctccaattactggaacccagacataagcctacaagctaagacagagctacaccaggcttcagcaggaaaccatacagatctcctgggaagggcttccctctctgaatgcagctgcctgtccacaggatgctctaggcccaggcaccttgattcctccagctggaaagacatagagaaacscctccacatcccattaaaatgccctaagatttagccaaggctcctatgaagcgatctgctgtcttcatccaggtaagggcaacttcgcattttaagacacgaagatcgtgggtaaatccaggtgggactgagatgcgggagctccggcgcacacactcctgtcattggaagatgaacgcggtacttattcctg

SEQ ID NO: 387546 - DNA, 575 bp, Homo sapiens
cacttgctgacataaagcacagcaggcaggaatagaagagtcaacttaggggaaaaaaagaaagtgctttgtgatttcaatttggtgtctgcagtttggaaaacggttgatcagtttaactgttttcgtggtgactcacaaaaatacatatgagcgttgaaattctacagaagaacaacaatcggggaaacatttctgcaagctccaattactggaacccagacataagcctacaagctaagacagagctacaccaggcttcagcaggaaaccatacagatctcctgggaagggcttccctctctgaatgcagctgcctgtccacaggatgctctaggcccaggcaccttgattcctccagctggaaagacatagagaaacccctccacatcccattaaaatgcccwaagatttagccaaggctcctatgaagcgatctgctgtcttcatccaggtaagggcaacttcgcattttaagacacgaagatcgtgggtaaatccaggtgggactgagatgcgggagctccggcgcacacactcctgtcattggaagatgaacgcggtacttattcctg

SEQ ID NO: 387547 - DNA, 607 bp, Homo sapiens
aaaataaaaattaaattaaataccagattttcctctacaatgatttttttcacgttctggcccaaattgcttcatgtcagagagcaatctttgaggatgttagaatggtaacacactctaggagccatatggaaatctagacagagaaacgcagaccaaagaaaccctgtctaacttctgcattcatttccacaccttcacctccaaagaactggtcccaaggtaacctttgtttatgactgaaataacataytgatctctgttttgtccttctctaaaatggaaatgcatataataataatatattttattttagataatattccatttttactttatttttcaaatgattaagaaatacagaaattaaaaacaaaatttgctctctctgtaggatttgaacattaaatattttgtataactgaaccctatttgtcattatatgaacaagtaattgatcatatatcttgaatataagataaactgtaacaaatgtatagcaacaataaaatggagttccagttttcaggatggcccataaaaaaagattccatgtcattactctgtcttaacaatcagtaaaaagctgaaaaagcaaaaaaatcta

SEQ ID NO: 387548 - DNA, 324 bp, Homo sapiens
tcaggaatgagtcagaaagtgtggtaatgtatcagttagcattcagctgccaataggtgtgtcagcacagttaacttttaattatctcacacacygtgaaactctaggtaagtggttccagatttggtgcagtaacaaactgatgttatcagagatgtaggcttcttcttattctcccttcaacctttgtatcatttctctatcttctatcatccaagatatgcgatgaatttttttttcccttaggcttactgccttatgggctagaccaagatagctgccacagagccacaatcattctctggcagaattgcattcatggca

SEQ ID NO: 387549 - DNA, 324 bp, Homo sapiens
tcaggaatgagtcagaaagtgtggtaatgtatcagttagcattcagctgccaataggtgtgtcagcacagttaacttttaattatctcacacactgtgaaactctaggtaagtggttccagatttggtgcagtaacaaactgatgttatcagagatgtaggcttcttcttattctcccttcaacctttgtatcatttctytatcttctatcatccaagatatgcgatgaatttttttttcccttaggcttactgccttatgggctagaccaagatagctgccacagagccacaatcattctctggcagaattgcattcatggca

SEQ ID NO: 387550 - DNA, 639 bp, Homo sapiens
gaattagcaaattcagggtcccaaaagtaacagatgctgtggaactggatgctctaaaaccaagtataacaaaatctcaggaaaataagcttctcaacgaaaaacttgattcacatgcaagccaactagaaaaaaagaaaatacagctttttaccatcaactgaaaggactaataaggaggggaacaaagaaaaactactttatatgtctgctagtttatgtacctaaaaagtagagattagggattaatttcatcatattgtttacaaaaatttgtaattcggctgggtgcggtggctcacgtctgcaatcccagtactttgggagaaaaaaatattaaaacttytgttactgcaaacctatgaattttgtacaaatctaaacagtgctaattttaaaagacctgggcttggagtggtggctcatgcctgtaatcccaacactttgggaggccaaggtgggcagatcacctgaggtcaggagttcgagaccagcctggccaacatcatgaaaccccatatctactaaaaatacaaaaattagctggtcatgggggcatatgcctgcaatctcagctacccaggaggctgaggcaggagtattgcttgaacccgggaggcagaggctgtagtgagttga

SEQ ID NO: 387551 - DNA, 639 bp, Homo sapiens
gaattagcaaattcagggtcccaaaagtaacagatgctgtggaactggatgctctaaaaccaagtataacaaaatctcaggaaaataagcttctcaacgaaaaacttgattcacatgcaagccaactagaaaaaaagaaaatacagctttttaccatcaactgaaaggactaataaggaggggaacaaagaaaaactactttatatgtctgctagtttatgtacctaaaaagtagagattagggattaatttcatcatattgtttacaaaaatttgtaattcggctgggtgcggtggctcacgtctgcaatcccagtactttgggagaaaaaaatattaaaacttttgttactgcaaacctatgaattttgtacaaatctaaacagtgctaattttaaaagacctgggcttggagtggtggctcatgcctgtaatcccaacactttgggaggccaaggtgggcagatcacctgaggtcaggagttcgagaccagcctggccaacatcatgaaaccccatatctactaaaaatacaaaaattagctggtcwtgggggcatatgcctgcaatctcagctacccaggaggctgaggcaggagtattgcttgaacccgggaggcagaggctgtagtgagttga

SEQ ID NO: 387552 - DNA, 373 bp, Homo sapiens
cctaggatagaagcttacattacctgcaatctcrgctcagtaaaatgagtcaatctctcctacggctagggcccaggcagcagaggagaatcatatcacctaagtgctaagacctgtggtatgtcacaggccattttgagggggcagaatgcaggcaaaagaggaaagtcacatcacctaggtaatgagttcagaggtaagtcacaatacctactgtgggcaggcccaggccatacagtcacatcacggaggtgctgggctcagtgatatctcacaatggctctgtgggcagggccctggctgaaaataagatacacatgacctaagcactgagcccagtgatattctacagcaccctctgtggatagggctc

SEQ ID NO: 387553 - DNA, 536 bp, Homo sapiens
gaatcccaaatgcagatgcaatctacagttgcaattgtgacagaacagtcagcacctgttaggatagtgattcatttcagtaggcaaagacttttctatctggaatccaccaatggaagagatgttgaccctcatgcctgggcttaaagccacaggtaaaatcatgaatccatactagtatgaaggtttcagaacagattgtgactctcgtgcataccacataaaacccttgtgtggtacagagagtgtcctaacagggctgaggaatcagatgagattataacacctgtatgcacatccagctgatagtaaaaaattgtcatcctcccacatgaacacagccctcttttgaagttcttaatttcrtaccctgtggcagtggaaagttggaaaactgactatcatccatggatccaatccacaggtgggttgtttaacctcaaacattcagcacacatgtgaggctgtgactccacaaagaggacagagtttgcaggagggattgaggctgtcatgtatggatctactctctcatt

SEQ ID NO: 387554 - DNA, 625 bp, Homo sapiens
cactaggttatgtgactctcctctttttcctgagccctacccacaagaggcattaagacatatctctgggcccattcaccttggtgatgtgaatctactccctgggacacccccgccccaggggtattatgaaatattgctggacccagcacctcgtgatatgactcttctcttttgcctgggcattgcatacatgtgtattgtaatatatcrctatgttaaacacctgggtgatgtgactttcctgcataagctctgtccataggcatatgatggtatctcattttgttcatcacctaggtgatgcgactctactcttttcctgagccctgcaaaaagaagagattgtgatatatcactgaactgagcaccttggtgatgtgactatcctctcttgctcaagtgtcacatattattggtattgtgacatacctctgtgaccaacacctatgggtaggaaaacttccacccagactcagcccaaggggccctcatgacttttttaaaagatatgtgacttgaaaaatgtgactgtcttctgcctataccctgccctcggggaagattgtggcatattactgaactaggcaacctagtgatgtgtctcttttgacaggggtttgcc

SEQ ID NO: 387555 - DNA, 625 bp, Homo sapiens
cactaggttatgtgactctcctctttttcctgagccctacccacaagaggcattaagacatatctctgggcccattcaccttggtgatgtgaatctactccctgggacacccccgccccaggggtattatgaaatattgctggacccagcacctcgtgatatgactcttctcttttgcctgggcattgcatacatgtgtattgtaatatatcactatgttaaacacctgggtgatgtgactttcctgcataagctctgtccataggcatatgatggtatctcattttgttcatcacctaggtgatgcgactctactcttttcctgagccctgcaaaaagaagagattgtgayatatcactgaactgagcaccttggtgatgtgactatcctctcttgctcaagtgtcacatattattggtattgtgacatacctctgtgaccaacacctatgggtaggaaaacttccacccagactcagcccaaggggccctcatgacttttttaaaagatatgtgacttgaaaaatgtgactgtcttctgcctataccctgccctcggggaagattgtggcatattactgaactaggcaacctagtgatgtgtctcttttgacaggggtttgcc

SEQ ID NO: 387556 - DNA, 529 bp, Homo sapiens
catcacatgtcccaaaacaaagaggatattgcgtttcttgtatgcacatccagccagctsttaggattgtcaccctaacacctggatacaacccattggtgaggtcttgtgtctcacatgcagatgcaatctacagtttgattcctgactgtcatatgtaaacacctgtccaaagttgggatgctgactcatttctagacccagctcatagacaagtgaggactctcctgtctgggtccagtcaatttgagaaatattgacttttctacctgggcttagggagcagtacaaaggtctcagggcaaattgtggctctcattcctattctacaatgatcttgggtagtatagagaatgtcctaacagggttcagcacacaggtaagattgtgacagtgatatccacacccagctgacagtaaaaattgacatctttcctcatgaatacagcccactgaatacagcccactgttgaggcattgaatctcataaccaaaggcagtggaaaattgaaacattgtctcttgcttg

SEQ ID NO: 387557 - DNA, 610 bp, Homo sapiens
ttacttgactctcctctcatgcttaggctctacccactggggtaattgtgacatatatctgggtrcagcccctaggttttatggctatcctcttttccatgatccctactcatagcatacattgtgacatatctctggttttctcacctagtttatgtgactttcttgtctatgcccttccatcacagggtattgtgacatattgctaggcccattatctagatgatgtgactctctttgcttgcctgtgcaccacccaaaagggacattgtgacacgtctctgaaccaatttcctacataatatgcctcttcattgctgcctgagaaatgcccccaaagaggattgtgacatgtctctgggcccagaacctgaatgttgtgactctcctgccttgacatagaggaaatattatgatatgtcactcggccctgcacacaaatgatgttactctcctgcctgggccttgcttatagaggggattgagacattttacaggtgaggaattaaagtgacatcattctcatttctcagcctttcctgcaggtaagattgtgacatattactcagcccagcacacagatgaaatttttcctcttgtatgcaaaccc

SEQ ID NO: 387558 - DNA, 530 bp, Homo sapiens
tatctctggttttctcacctagtttatgtgactttcttgtctatgcccttccatcacagggtattgtgacatattgctaggcccattatctagatgatgtgactctctttgcttgcctgtgcaccacccaaaagggacattgtgacacgtctctgaaccaatttcctacataatatgcctcttcattgctgcctgagaaatgcccccaaagaggattgtgacatgtctctgggcccagaacctgaatgttgtgactctcctgccttgacatagaggaaatattatgatatgtcactcggccctgcacacaaatgatgttactctcctgcctgggccttgcttatagaggggattgagacattttacaggtgargaattaaagtgacatcattctcatttctcagcctttcctgcaggtaagattgtgacatattactcagcccagcacacagatgaaatttttcctcttgtatgcaaacccagccaacaggggctattgtcaccataacacatgaataaagaccactgtt

SEQ ID NO: 387559 - DNA, 519 bp, Homo sapiens
tcacctagtttatgtgactttcttgtctatgcccttccatcacagggtattgtgacatattgctaggcccattatctagatgatgtgactctctttgcttgcctgtgcaccacccaaaagggacattgtgacacgtctctgaaccaatttcctacataatatgcctcttcattgctgcctgagaaatgcccccaaagaggattgtgacatgtctctgggcccagaacctgaatgttgtgactctcctgccttgacatagaggaaatattatgatatgtcactcggccctgcacacaaatgatgttactctcctgcctgggccttgcttatagaggggattgagacattttacaggtgaggaattmaagtgacatcattctcatttctcagcctttcctgcaggtaagattgtgacatattactcagcccagcacacagatgaaatttttcctcttgtatgcaaacccagccaacaggggctattgtcaccataacacatgaataaagaccactgttgag

SEQ ID NO: 387560 - DNA, 530 bp, Homo sapiens
tatctctggttttctcacctagtttatgtgactttcttgtctatgcccttccatcacagggtattgtgacatattgctaggcccattatctagatgatgtgactctctttgcttgcctgtgcaccacccaaaagggacattgtgacacgtctctgaaccaatttcctacataatatgcctcttcattgctgcctgagaaatgcccccaaagaggattgtgacatgtctctgggcccagaacctgaatgttgtgactctcctgccttgacatagaggaaatattatgatatgtcactcggccctgcacacaaatgatgttactctcctgcctgggccttgcttatagaggggattgagacattttacaggtgaggaattaaagtgacatcattctcatttctcagcctttcctgcaggtaagattgtgacatattactyagcccagcacacagatgaaatttttcctcttgtatgcaaacccagccaacaggggctattgtcaccataacacatgaataaagaccactgtt

SEQ ID NO: 387561 - DNA, 545 bp, Homo sapiens
tttggaggagaaaaggtgccctggtttttagaattttcagcttttctactctggtttctccccatctttgtggttttatctacctttggtctttaatgttggtgacatacagatggggttttggtgtatatcctttttgctgatgttgcttctattcctttctgtttgctggttttctttctaacaggtctctcagcttcaggtttgttggaattttctggaggtccactccataccctgagtgcctgggtatcaccagcagaggctgcagaatggcaattattgcagaacygcaaattttgctgcctgatcttcctctggaaggtttgtccagaggggcacccacctatatgaggtatctgtcggcctctactgggaggtgtctcccagttaggctacatgggggtcagggattgacttgaggaggtagtctgtccattctcagagctcaaatgccatgctgggtgaaccactgctctcttcagagctgtcagacaggaacatataaatctgcagaagctatctgctgccttttgttcagctat

SEQ ID NO: 387562 - DNA, 545 bp, Homo sapiens
tttggaggagaaaaggtgccctggtttttagaattttcagcttttctactctggtttctccccatctttgtggttttatctacctttggtctttaatgttggtgacatacagatggggttttggtgtatatcctttttgctgatgttgcttctattcctttctgtttgctggttttctttctaacaggtctctcagcttcaggtttgttggaattttctggaggtccactccataccctgagtgcctgggtatcaccagcagaggctgcagaatggcaattattgcagaaccgcaaatwttgctgcctgatcttcctctggaaggtttgtccagaggggcacccacctatatgaggtatctgtcggcctctactgggaggtgtctcccagttaggctacatgggggtcagggattgacttgaggaggtagtctgtccattctcagagctcaaatgccatgctgggtgaaccactgctctcttcagagctgtcagacaggaacatataaatctgcagaagctatctgctgccttttgttcagctat

SEQ ID NO: 387563 - DNA, 545 bp, Homo sapiens
tttggaggagaaaaggtgccctggtttttagaattttcagcttttctactctggtttctccccatctttgtggttttatctacctttggtctttaatgttggtgacatacagatggggttttggtgtatatcctttttgctgatgttgcttctattcctttctgtttgctggttttctttctaacaggtctctcagcttcaggtttgttggaattttctggaggtccactccataccctgagtgcctgggtatcaccagcagaggctgcagaatggcaattattgcagaaccgcaaattttkctgcctgatcttcctctggaaggtttgtccagaggggcacccacctatatgaggtatctgtcggcctctactgggaggtgtctcccagttaggctacatgggggtcagggattgacttgaggaggtagtctgtccattctcagagctcaaatgccatgctgggtgaaccactgctctcttcagagctgtcagacaggaacatataaatctgcagaagctatctgctgccttttgttcagctat

SEQ ID NO: 387564 - DNA, 601 bp, Homo sapiens
acaaatcttttataatcttttagaaattttgatatgtacagatgagcatcttaagawagctttgttgtgctttcattaaatgcttaattttaaggaacaccatatgatattcctttgaatttagttaatatttttacacagagtattcttttgcaaaattaattttttggtatttcaaaaatttgcttaaaactttcactttatttaatttaagacaatcttttactcctaggaaaaatgtagatttttatgccttcttataattttttattataaaattttactgtttttacacacgttgcatacacattcattttcagtagcctcaattacatgttataatggtaactttttgtaattttaactttaatgtaaaacctggtaagtggttttaattatgtgctaggagcaggtaaagtctgacttcttccagtatagttaggggcatggttactttaatatgtcactaggccttactaattgtgaagctggcaggttgacagtactcaagggccaaagaagcagtttacattaaaacatttagcaaacctaatatttgacctgcataatttagaccacctatttacatgtttaagatgtt

SEQ ID NO: 387565 - DNA, 601 bp, Homo sapiens
acaaatcttttataatcttttagaaattttgatatgtacagatgagcatcttaagatagctttgttgtgctttcattaaatgcttaattttaaggaacaccatatgatattcctttgaatttagttaatatttttacacagagtattcttttgcaaaattaattttttggtatttcaaaaatttgcttaaaactttcactttatttaatttaagacaatcttttactcctaggaaaaatgtagatttttatgccttcttataattttttattataaaattttactgtttttacacacgttgcatacacattcattttcagtagcctcaattacatgttataatggtaactttttgtaattttaactttaatgtaaaacctggtaagtggttttaattatgtgctaggagcagrtaaagtctgacttcttccagtatagttaggggcatggttactttaatatgtcactaggccttactaattgtgaagctggcaggttgacagtactcaagggccaaagaagcagtttacattaaaacatttagcaaacctaatatttgacctgcataatttagaccacctatttacatgtttaagatgtt

SEQ ID NO: 387566 - DNA, 410 bp, Homo sapiens
cccttagaaagccaggcctcctgtctctaagatggccatgggtttgtgcgacagaatataagccattttttctttagagtttcagggttaaagaggttccagtgtttcagaatgcactagaggggaatgcaaactgtagacggtttgttacctatctagaaaaaggggagacaaggctttcctcagtcccctttctctttttggtgtggcggaaagagaaaaagggcataccacttctcgaccttccttttttccctctggttcccagccaccatcatagatgttacccatggatgcgagcatgaccttcacccatgggtccagaggagctcsttggcaggacacgttatgctcaccttctcacctagctttccatcccgctcgttttctagatccactcagcccaaaag

SEQ ID NO: 387567 - DNA, 348 bp, Homo sapiens
tactctttgccttctaccataacagtaagcttcctgagaccctcaccagaaacagatgctgacacacacttcttgtacagtctgccaaattgtgagcaaaataagccttttttctttataaattatccactctcaggtattccgctatatgcaaaataattggagttggcaatttacttctaaaggcactatgttatgttggagagcagaaaaagctgtgttgggtaaatgtaaccaatttatattttccttctatgtgcctctttgcattggrctcacctggggcactgcacacacttatttgtaaatttttcactgatttgatcagtatgtttttgttacatttat

SEQ ID NO: 387568 - DNA, 595 bp, Homo sapiens
caaatgctgggcttcacttcctaatgagttctagcagactagtgtttccaccagtccctgacccatgccttctgaatctcccttgcccagggtcctcacagctgtccactatgtatgtctcagtctctgctgatagaggccacctaaaatgagagcagaataggcctcagaaaaagcacctaacaaccctactataagtatttcaaagaaaaccattcagattttctccaaggcttgtctgttgctgcttactgttcgtgagaatgctttctaagcagcaatagatttgagaatgtcattagccactactgtttgttttccttctmatgtcccgcattaaccaaaaccaaaatgaaaccaacaaaaagccttccaggatatagcttttgtatataggcctagctggctagcagtaacatttggactttaaattgagtcttgaatgatcttcagcggttacccagatagctcttggcatcaaaccccttggcatctcttccattccttttcctattcaaaatattgaggttaaaatacatcaaagtacagagggaaaaaaatcttaggtcttctaaaaataattgtttcatttaga

SEQ ID NO: 387569 - DNA, 611 bp, Homo sapiens
gattgctcagtcgtgatttaccaratccaagctacatatcacatcacattattcttataaatgtgtaaatgttcttgttatctggcacccgagtgtttttaattcagggtctaatcaaacttgctcagtggaatcctaaccacacagctaggacaagccagaagtgcctgacaccagggactctagcctttctcacaaagatttagcctggagaataagagccaccactaacacttcagcacatgttcgctatcacttggttgaaatatggccagggtccagctttgcatgacaatgaatgactcccttggccttagtgcatttttatttcctagaagaaagaaactagaaacaatgctttcttcatgtatgttaaatgcagcaggttgtatttaagaacaacctcccgtatgtgtgattctggatatagtttataaggcagttaagattatacatgtataaaagtcttttttataccattattagaatcaatacctatcaatatttccactttccacatttttttctgtatgaatatacatacaaagctaaatatgtttgcatatagatatacataggtagaaaggtaaacaaaaacccatacagaatta

SEQ ID NO: 387570 - DNA, 611 bp, Homo sapiens
gattgctcagtcgtgatttaccagatccaagctacatatcacatcacattattcttataaatgtgtaaatgttcttgttatctggcacccgagtgtttttaattcagggtctaatcaaacttgctcagtggaatcctaaccacacagctaggacaagccagaagtgcctgacaccagggactctagcctttctcacaaagatttagcctggagaataagagccaccactaacacttcagcacatgttcgctatcacttggttgaaatatggccagggtccagctttgcatgacaatgaatgactcccttggccttagtgcatttttatttcctagaagaaagaaactagaaacaatgctttcttcatgtatgttaaatgcagcaggttgtatttaagaacaacctcccgtatgtgtgattctggatatagtttataaggcagttaagattatacatgtataaaagtcttttttataccattattagaatcaatacctatcaatatttccactttccacatttttttctstatgaatatacatacaaagctaaatatgtttgcatatagatatacataggtagaaaggtaaacaaaaacccatacagaatta

SEQ ID NO: 387571 - DNA, 565 bp, Homo sapiens
  misc_feature (1)...(565): n = A,T,C or G
tcaggggctgttgtgacctattactaaacacagcacctgggtgatctgacttttctacactgcttgggttctgcccacaatatagattttaatktatagctcagagcagcacctaggtgatgttactctcctatcctgcctgatccctggatacattgtgtattgtgacatatcactgggtccaacagttaggtgatgtgaccctcctgcatgggccctgacaccaggagtattatgggatatctttgattcatcaccttggtgatgtgaccttcctcttctgcctgggacatgctaaaaacggggattgtgacacatccctgtaccagcacctaggcgatgtgaccgttcttttgcccgggccccatatactttgagtattttaacatattgctgggctcaacatccatgggatagtacactcctgcctgggccttgcccacagggagacttgtgacatatctctgcatgcatcacctagatgttgtgactcttcttttctacctgcaccctgccaacaggaaggattgtgacatantgctgggcttagcaactaggtaatgtg

SEQ ID NO: 387572 - DNA, 565 bp, Homo sapiens
  misc_feature (1)...(565): n = A,T,C or G
tcaggggctgttgtgacctattactaaacacagcacctgggtgatctgacttttctacactgcttgggttctgcccacaatatagattttaatgtatagctsagagcagcacctaggtgatgttactctcctatcctgcctgatccctggatacattgtgtattgtgacatatcactgggtccaacagttaggtgatgtgaccctcctgcatgggccctgacaccaggagtattatgggatatctttgattcatcaccttggtgatgtgaccttcctcttctgcctgggacatgctaaaaacggggattgtgacacatccctgtaccagcacctaggcgatgtgaccgttcttttgcccgggccccatatactttgagtattttaacatattgctgggctcaacatccatgggatagtacactcctgcctgggccttgcccacagggagacttgtgacatatctctgcatgcatcacctagatgttgtgactcttcttttctacctgcaccctgccaacaggaaggattgtgacatantgctgggcttagcaactaggtaatgtg

SEQ ID NO: 387573 - DNA, 565 bp, Homo sapiens
  misc_feature (1)...(565): n = A,T,C or G
tcaggggctgttgtgacctattactaaacacagcacctgggtgatctgacttttctacactgcttgggttctgcccacaatatagattttaatgtatagctcagagcmgcacctaggtgatgttactctcctatcctgcctgatccctggatacattgtgtattgtgacatatcactgggtccaacagttaggtgatgtgaccctcctgcatgggccctgacaccaggagtattatgggatatctttgattcatcaccttggtgatgtgaccttcctcttctgcctgggacatgctaaaaacggggattgtgacacatccctgtaccagcacctaggcgatgtgaccgttcttttgcccgggccccatatactttgagtattttaacatattgctgggctcaacatccatgggatagtacactcctgcctgggccttgcccacagggagacttgtgacatatctctgcatgcatcacctagatgttgtgactcttcttttctacctgcaccctgccaacaggaaggattgtgacatantgctgggcttagcaactaggtaatgtg

SEQ ID NO: 387574 - DNA, 565 bp, Homo sapiens
  misc_feature (1)...(565): n = A,T,C or G
tcaggggctgttgtgacctattactaaacacagcacctgggtgatctgacttttctacactgcttgggttctgcccacaatatagattttaatgtatagctcagagcarcacctaggtgatgttactctcctatcctgcctgatccctggatacattgtgtattgtgacatatcactgggtccaacagttaggtgatgtgaccctcctgcatgggccctgacaccaggagtattatgggatatctttgattcatcaccttggtgatgtgaccttcctcttctgcctgggacatgctaaaaacggggattgtgacacatccctgtaccagcacctaggcgatgtgaccgttcttttgcccgggccccatatactttgagtattttaacatattgctgggctcaacatccatgggatagtacactcctgcctgggccttgcccacagggagacttgtgacatatctctgcatgcatcacctagatgttgtgactcttcttttctacctgcaccctgccaacaggaaggattgtgacatantgctgggcttagcaactaggtaatgtg

SEQ ID NO: 387575 - DNA, 570 bp, Homo sapiens
ggtagggctcatgttgtccctgtctgacggctgtgaaagatgggcatactttaccatcatcttgaattttgtcccaagcatctaagtaacattttcgcagttgttcgataacctcatcatttagtatagtttggtgtcggattgcagcccattgactcattcccagtaactggtcagccgtaaygttaacagggggattagagccctgattaagacgaatgcgttcctggacagcatcaacccaccaagtcctgaattgtaaatattgggatttagataagactgattttgccaaaatttcccaatcatagggtaccaaacgtttatcctctgctagggcttttaatgtggaatggacaaaaggagagttggtgccatattgtttcactgattccttaaaatctttgaggaatttaaaagaaaaactttgccacgtagcaggacgtagctgaacctggcctggatggatggggtcaggctgaattaccacctgaacagcgggaatgcccggtattggctgtgccccaggagccggcaattgcagagcctgattatttacccgagcacctg

SEQ ID NO: 387576 - DNA, 471 bp, Homo sapiens
attctgggtatgtttgacaaagaagaatgttacacagaaccttcttgtgctacccatgtgaagtgttcttctctctcactttagtctcaattcccaaccttacaattaccacatactcacatacacagaaaaagaaaaattaacttattttattagaaggccatgattcacattttattctattacatcttttccatatygctgttataatagtgttgaagtgaaccctctttcaccagaagaatacctttgtgaatgtgaatagactgacactggagaagaccagctcagcacactcacttgaatgatccctttgtttttcaggcagtaaaaatgcctttgaggggggaaaataaagtgactgcggattaagcagacagctatacatggaaaaatatttgtcaattgtttgaagattacactgcatggtctacaacttttaaaatataaaatgcatagcataactattgc

SEQ ID NO: 387577 - DNA, 471 bp, Homo sapiens
attctgggtatgtttgacaaagaagaatgttacacagaaccttcttgtgctacccatgtgaagtgttcttctctctcactttagtctcaattcccaaccttacaattaccacatactcacatacacagaaaaagaaaaattaacttattttattagaaggccatgattcacattttattctattacatcttttccatattgctgttataatagtgttgaagtgaaccctctttcaccagaagaatacctttgtgaatgtgaatagactgacactggagaagaccagctcagcacactcacttgaatgatccctttgtttttcaggcagtaaaaatgcctttgaggggggaaaataaagtgactgcggattaagcagacagctatacatggaaamatatttgtcaattgtttgaagattacactgcatggtctacaacttttaaaatataaaatgcatagcataactattgc

SEQ ID NO: 387578 - DNA, 591 bp, Homo sapiens
tatagaaaaatatatatctactgtcagaagaaggtaacttgaagtatttgagagatgttctctaagaaactaaaaatatgtttagttttagattctgtaaaaaatgtttcttaagcatttttaattttcaaaaaaatttgagctcayattttgtcagcttagtatttctgaataatttaaataaaatagagtaaaatacacattaaaaatagcttttctggtaatacagcagttgaatttttagattaaaaaagtaaaattctacaaaattatatgctgaccaatttaatcagaagcttctttcttacaactgtgagaaatgacacaaagatttaacttttatgttgggtgggagagaaaatgattaccaggggctagaaaattgttgtttcactaatcaatgttgatttttattgctatattgtctcaaattatgttaataataatgtaatggccttgatccaaaaaatgtttaaaaactttattgtttcaatcagccaaaatattaaccaaaagaaggcatagaaataaaggtatctaagtcataatttatagtataaaattaaaatgtttctagaaataaaaaaagag

SEQ ID NO: 387579 - DNA, 591 bp, Homo sapiens
tatagaaaaatatatatctactgtcagaagaaggtaacttgaagtatttgagagatgttctctaagaaactaaaaatatgtttagttttagattctgtaaaaaatgtttcttaagcatttttaattttcaaaaaaatttgagctcacattttgtcagcttagtatttmtgaataatttaaataaaatagagtaaaatacacattaaaaatagcttttctggtaatacagcagttgaatttttagattaaaaaagtaaaattctacaaaattatatgctgaccaatttaatcagaagcttctttcttacaactgtgagaaatgacacaaagatttaacttttatgttgggtgggagagaaaatgattaccaggggctagaaaattgttgtttcactaatcaatgttgatttttattgctatattgtctcaaattatgttaataataatgtaatggccttgatccaaaaaatgtttaaaaactttattgtttcaatcagccaaaatattaaccaaaagaaggcatagaaataaaggtatctaagtcataatttatagtataaaattaaaatgtttctagaaataaaaaaagag

SEQ ID NO: 387580 - DNA, 591 bp, Homo sapiens
tatagaaaaatatatatctactgtcagaagaaggtaacttgaagtatttgagagatgttctctaagaaactaaaaatatgtttagttttagattctgtaaaaaatgtttcttaagcatttttaattttcaaaaaaatttgagctcacattttgtcagcttagtatttctgaataatttaaataaaatagagtaaaatacacattaaaaatagcttttctggtaatacagcagttgaatttttagattaaaaaagtaaaattctacaaaattatatgctgaccaatttaatcagaagcttctttcttacaactgtgagaaatgacacaaagattyaacttttatgttgggtgggagagaaaatgattaccaggggctagaaaattgttgtttcactaatcaatgttgatttttattgctatattgtctcaaattatgttaataataatgtaatggccttgatccaaaaaatgtttaaaaactttattgtttcaatcagccaaaatattaaccaaaagaaggcatagaaataaaggtatctaagtcataatttatagtataaaattaaaatgtttctagaaataaaaaaagag

SEQ ID NO: 387581 - DNA, 455 bp, Homo sapiens
tagactcattccagagatagtttgatgagtttcagaccaagattcagcacacctggaaggctgtgactcccctgaggggacagagtctgcaggagatattgaggctgtcatgtacgtatctatgccacagttcagattgtgactcatgcacttattttcaacctgcagtaggtgttgactcacataccaagaactaggaaatgtatgaaatttataatctcatcccagaaccttccttcaggtgtgattgcaacawacacctcttccaagcacctgagtaatttaactctcctgcctgagcttagcttgcaaatgaaattgtgacatatcactggattcagtacctaggtgatatgactctattctcctgctttggtgctgcccataggggacattgtgacatatcagtaggcccagattttttttttttttttgtgattgaacaacgctgcctg

SEQ ID NO: 387582 - DNA, 561 bp, Homo sapiens
aatgaaattgtgacatatcactggattcagtacctaggtgatatgactctattctcctgctttggtgctgcccataggggacattgtgacatatcagtaggcccagattttttttttttttttgtgattgaacaaygctgcctgtacccttctttctgaaggagattttaatgtaattattgctgagcatccaggtgatgtggctctcctacctggtgcctgccctcaggaaagattgtcacgtacatcttggcacagatcacagatgcaatgatgactctcataccttgaaccagccaataggaaggtattttttctctttaggcttagggaaatgggtaagatcctgggtctcctctttgtatgatggtcataaaggattaccacactttcatttatcttacaaagctctctggtggtatggagagtgccatcacagggcctagtgcacaagtgaaattgtgtttattgtatgcacaccccatcaaccattaagattgtcaccttcacacatagaaagagccaactgatgagtttcttaatcacacagctatgaggccc

SEQ ID NO: 387583 - DNA, 561 bp, Homo sapiens
aatgaaattgtgacatatcactggattcagtacctaggtgatatgactctattctcctgctttggtgctgcccataggggacattgtgacatatcagtaggcccagattttttttttttttttgtgattgaacaacgctgcctgtacccttctttctgaaggagattttaatgtaattattgctgagcatccaggtgatgtggctctcctacctggtgcctgccctcaggaaagattgtcaygtacatcttggcacagatcacagatgcaatgatgactctcataccttgaaccagccaataggaaggtattttttctctttaggcttagggaaatgggtaagatcctgggtctcctctttgtatgatggtcataaaggattaccacactttcatttatcttacaaagctctctggtggtatggagagtgccatcacagggcctagtgcacaagtgaaattgtgtttattgtatgcacaccccatcaaccattaagattgtcaccttcacacatagaaagagccaactgatgagtttcttaatcacacagctatgaggccc

SEQ ID NO: 387584 - DNA, 405 bp, Homo sapiens
tctgctgcttgggcttagggtcacaagtrtaatcatggatttatgttagcataaaagtcccagagcaaattgcaactcccacacataccttataaagccctcagtggtacagagactattttaacagggtacagcacacaggtgtgattgtgaagcttgtatacacatccaactgaagtaaagattgccatcttcttagatgaacaaagcccactgtcgaagttttgagtctcacacctggaggcagtggaaagtttgaaattgactttctgttccacagaagggtgagtgactgtaagatcaagattcagcacacgtgtgagaatgtgactccactacagaaatacagttcacaagagggattgaggctctcacacagattcagtccagtgttgagattgtgac

SEQ ID NO: 387585 - DNA, 499 bp, Homo sapiens
tatatttgcaacatagggctgaaaagtacatgactgtccatccagaccaagacaaggtaaaatctcagcactgtgttgaacactttgagctgtttctactcccactagggatgtagaagttaattgcaagggccaggatgggagccatttgtctttagatattactgacacatcagctcctgtakccataagcgcataaaatttatttcctttaatttatactacacaggtgagtctattagaggctagggttggcttagatagatttcccaggtgattgtgcttcccaaaacctttatttcctcatttctcctttcatggagaagggtgtaatttatagggaataagcaataattgagcaatatgttctcctggttcaaaagcccaaagatcttgtgacattaaaactacttgaatttctccttcataatcagagtcaacaactcctgggactacactaatgccctgtaagttaagacggcttttgcctaaaattagt

SEQ ID NO: 387586 - DNA, 237 bp, Homo sapiens
atcctgcaatgcacagcacagccctcatcaacaataaagagttaccagcccaaaatgtyaatcacatcaaagctgaggaggctgccgtattgcccagcaattctgttccaagatatatgtcccaggggagctccctccattcccacaaggaccaagcataatcgtgctcattgcagtactcactcactcagtgcagatctgttgaatgtgaactgtagcccagtcactttgccgtga

SEQ ID NO: 387587 - DNA, 365 bp, Homo sapiens
taattttagagctaataagcaaatatttttatatactagcaatgaatcatctgaagatgaaattaagaaagcacttccatttataatagcatcaaaaagaataaaactttttttacagctctcatttctttattgagatttccmatttgttgggtcaatgtcatcatattctcctgtaattatttaaataatgtttcctttcttttaccatgtttataatagcagtttgaagtctttgctaagtctaatatctaggctcactcacagtcagtttctattaactgctttctttttccctcagcatgggtcacatttttctgtctctttacgtgtcttaaaatttgttgttaaaaactggacatttg

SEQ ID NO: 387588 - DNA, 613 bp, Homo sapiens
actttatttgtcttcctttatgaagattaatctgctggcaagttttctttacacattcaatatatcatctcatttcttctggtctgtaaggtttctgctgagaagtcagctgttaatctgatctgtaatttcctttataggtgaataggtgctttttttctttctgttttcagaatttgctgtttttactttgactttagatagcctgatataatgttctatggcaaagtcatttttgcatagtatttgcctggggatctctgagcctcctgtatctggttgtctaaatctcatgctaaacttgggaagttttcaattattacttcattaaataggttttctaaactttttgatctctctttttccttaggtattccaataattcataagttcagttgcttcacattgtcccaaatgtcttgaaggcttagattattcttttttaatttttttctttgtttttatttgactggattatttcaaaagagttgtcttcaagttctaaaattctttcttctgtttggactagtctttttttwaaattttttgaatatattttgtatttccttcattgaattccttagtccagaatttgcttttttcccccaaagat

SEQ ID NO: 387589 - DNA, 588 bp, Homo sapiens
ggactggtcaagcttgcactcaggacccccagtggcaagtgcatgcaccagctgtgatggggaggccatgcagttctcaggcccctggcagaatgcttgggtgagtggtggctactgcagcattgaggtccagccacagggagggtggggtcaaacctagtggccaaggccttgmgtcccacttataccccagttctggtggggctcattccattttccctgctgttgcagctgacctggctgttctatcagacctggcagtttgtgcctggcctgcaactcagtcctgggccattggagcccctgccaagctcaagatcaagcctctgtggcaactctcctcctgcctaagtcccagagacagtgcctgcttctagcactgggggctgcagcccatgttacacttttcttctcagtcctgtttgcaggagtccacccctgacttgtgcctctgttctgcatgcagcagcccgagtttctctaacacctaggactggtgcagcgggttcctaggactgcacacagccttttaagagataagattgagaatagcatcttactgtttcttaggtttcagaaagggtgtgg

SEQ ID NO: 387590 - DNA, 559 bp, Homo sapiens
ccatgcagttctcaggcccctggcagaatgcttgggtgagtggtggctactgcagcattgaggtccagccacagggagggtggggtcaaacctagtggccaaggccttgagtcccacttataccccagttctggtggggctcattccattttccctgctgttgcagctgacctggctgttctatcagacctggcagtttgtgcctggcctgcaactcagtcctgggccattggagcccctgccaagctcaagatcaagcctctgtggcaactctcctcctgcctaagtcccagagacagtgcctgcttctagcactgggggctgcagcccatgttacacttttcttctcagtcctgtttgcaggagtccacccctgacttgtgcctctgttctgcatgcagcagcccgagtttctctaacacctaggactggtgcagcgggttcctaggactgcacacagccttttaagagmtaagattgagaatagcatcttactgtttcttaggtttcagaaagggtgtggaacccaggatgtgttctttccctgaagtagttcctt

SEQ ID NO: 387591 - DNA, 564 bp, Homo sapiens
ttagagaaccctaatacaatcagcataccttatgttccctcttgcttttattttgcagaatcatttgaaagaaagttgtaaatactgtttcaccttaaatatttcagtatgtgtctcctaacaaaaaaaaaaaaaggcattctatgtaatcatcatatacttttaatgcctaagaaaattaacattaattatataatatctaaatgcaggccatattgaaatattcccaattgtataaacacaattttattagtggttttattggattatttcagaccagaatatattccacgctcatatatttcatttggttatttttgtttctgtcgtctctttagatctagttgagataccctacttttctttcatgactctgaatttttgatatcttctaaatttttgttctataatcctttaaagtcaggtttattgaagtatcatttatgtagtgtaaaattcatcttttttagtgtatacttttatgwgtttttacaaatacattcggtgatgtaaccatcacaatcgagataaagaacatttctagctccccaaaaagttccattg

SEQ ID NO: 387592 - DNA, 619 bp, Homo sapiens
tatttctcagaaataaatctaagcactttagaggattctcaagtactacaatatttctacctacttaaatgcttgtctatctcaatgacagagaatatagttgtttttctttttccacctatcatcttaataaactctactttcaaaatgtctaccttggaaaagaactatagttcaaagsgagtgcacatgatcttcctattgaactttcagaatttttggtattgccagaagctctgaatgagccacttgtgtggactgcaaggtttctgaggcaaggttaatgtcaagacacaaagacgatgaaataagcagatgataatgggcactccatacccatgaaaactcagcactgtcagctttgagaagacagggtcacaacttactttcttcagtactcagtagtgcaatcccagatcccaaagtttcacgacgtacacattaacattttattgctgctcacactgttcaaggcagacagaaagagagaatgtgagctgtttttggtcacaaactcagtgttgatgagctgggtcaaaaaacaacacaggatttacaaaacctatgggagatattaaatgagcctgggactaagcacagaatctgtatgctatgtgat

SEQ ID NO: 387593 - DNA, 647 bp, Homo sapiens
ccatagctaaggtttctgccttttagtaaaggcaatgaagatgacttggcagttccttatatacccagctccttttccatagatagaaccagtaaacaaagagttggaaagaacaggcaaaagagaaatttctgggtgtgctaattaaatgatgactataagctgcagtggccaggcacttgctgtcctctgacatgcatgccagacccactataccccctcaagaacagcataattagagcaagggggaacagagtatcattccccaagcatttcttgtgttgaactggagacagttaatgaaactactgtacagtgctgtagtggcagatgatctgtgactgccctttttctaggcgcttaaactttcaacatctgaaaaattcttcttgccatttctkcagtagatatggtgtaaatgccacatgttcttactcataagtgggaattgaacaatgagaacacatggacacagggaggggaacactacacactggggactgtcgggggttgggtgaaaaggggagggagagcattaggaaaagtacctaatgcatgcagtgcttaaaacctagatatcaggttgataggtgcagcaaactaccatggcacatgtatacgtatgtaacaaacctgcacgttcagca

SEQ ID NO: 387594 - DNA, 564 bp, Homo sapiens
ggcctcagagacttgacaatggagaaatcgcaagatgctcacaagtcacgaaaagggaggcttctcagcttattgaggatgctagagtgttcaggcagggagttcgacagaggcagagggacacctagcaggtgtggagttcagccacccagacctctccaaggatggctgcaaatagcacaagatgtccacgaacactaataggcgtcctctgaaccacttgggaggtgtcactaataaaaagtggaaatcaaatggaaagaaaatttcacctctaatccttcttgtggcacctggctttttcagcacatatggtacataaagtttgttaatgtctggtagttatcgagtamatcagagttgattaaagatgtttcaactttatcttcatttttcagactttatagacatccatctgataactgagaataaacaactattttattggttgtggcagacagttcaggaaagaggttaagagaaaggaatacacagttgtctgcctatcttcgaatctgggctctgctgctactaactgtgtaatcttggcacattccatgacct

SEQ ID NO: 387595 - DNA, 426 bp, Homo sapiens
atcaaaagtcacggctaaacttatacatgaaccaagaccttaagctctttagtttgaagaagtattttgtttgggggtttctttaacaattaaaacaaatacatttctcaatatttttatacagctttttggaactcgctgaaaaccacttcaatcaccttaaagctctaatgctatcagcaaaacgtgttgcatgcaaatgatttgatcttaactgattagtaacttcatccaacagaattaaactcatagttytagttttaatgttatatattagattttgaatgcattctaacatacatctattttggagaaaaatactttattcctgcaacaaaatacttaacatgctagctaccttgtgtttctcatactatgtttaaattcatacagaaaaagcaaatacagtactaaaggtgtaggtac

SEQ ID NO: 387596 - DNA, 426 bp, Homo sapiens
atcaaaagtcacggctaaacttatacatgaaccaagaccttaagctctttagtttgaagaagtattttgtttgggggtttctttaacaattaaaacaaatacatttctcaatatttttatacagctttttggaactcgctgaaaaccacttcaatcaccttaaagctctaatgctatcagcaaaacgtgttgcatgcaaatgatttgatcttaactgattagtaacttcatccaacagaattaaactcatagttttagttttaatrttatatattagattttgaatgcattctaacatacatctattttggagaaaaatactttattcctgcaacaaaatacttaacatgctagctaccttgtgtttctcatactatgtttaaattcatacagaaaaagcaaatacagtactaaaggtgtaggtac

SEQ ID NO: 387597 - DNA, 426 bp, Homo sapiens
atcaaaagtcacggctaaacttatacatgaaccaagaccttaagctctttagtttgaagaagtattttgtttgggggtttctttaacaattaaaacaaatacatttctcaatatttttatacagctttttggaactcgctgaaaaccacttcaatcaccttaaagctctaatgctatcagcaaaacgtgttgcatgcaaatgatttgatcttaactgattagtaacttcatccaacagaattaaactcatagttttagttttaatgttatatattagattttgaatgcattctaacatacatctattttggagaaaaatacttwattcctgcaacaaaatacttaacatgctagctaccttgtgtttctcatactatgtttaaattcatacagaaaaagcaaatacagtactaaaggtgtaggtac

SEQ ID NO: 387598 - DNA, 513 bp, Homo sapiens
atggctagtggcagcaggcacaatgaaaccagcgtgatctgacttaggcaaatgtgttattctttagggaagtcatagaggtagcacaataaaagaaggcaacactcaacccaacaaagtttatcttcaatgatggcatcatcgaccctgatgatccagyagagaatttaataacctcattaatgttcataaaatcacaccaggtgggtaaccagtaaatctgtccaactggtaatgtcacagttgaatgaaagatccagggaggataatgacagcagaaaaaatgtgtcaccctagaactagcctagaagttggggtggagaaagtatgaatttgggccaaagttcacattgcaacaattgcagaaagagcacaaggctaattgtagacaaatcataatactgaaatatggtgtgtggagctcttaggacaaagcatcgaaaaaagacacaatgcttagagtccagttcacaataaaaaaaaaaaatagcacctgctcttaagaaattgcca

SEQ ID NO: 387599 - DNA, 513 bp, Homo sapiens
atggctagtggcagcaggcacaatgaaaccagcgtgatctgacttaggcaaatgtgttattctttagggaagtcatagaggtagcacaataaaagaaggcaacactcaacccaacaaagtttatcttcaatgatggcatcatcgaccctgatgatccagcagagaatttaataacctcattaatgttcataaaatcacaccaggtgggtaaccagtaaatctgtccaactggtaatgtcacagttgaatgaaagatccagggaggataatgacagcagaaaaartgtgtcaccctagaactagcctagaagttggggtggagaaagtatgaatttgggccaaagttcacattgcaacaattgcagaaagagcacaaggctaattgtagacaaatcataatactgaaatatggtgtgtggagctcttaggacaaagcatcgaaaaaagacacaatgcttagagtccagttcacaataaaaaaaaaaaatagcacctgctcttaagaaattgcca

SEQ ID NO: 387600 - DNA, 565 bp, Homo sapiens
ataaattaagtaaataagtttaagcattttcaagttactgcgaattaagtgaatccttaataaacacgttggctttaaaattactggtaaaatcaaaatagaaatgtcttcagaattatcagcatacctttttgtatgggttttatatttctctctgcttggtatttaaactatggtttggcacaaaaggttataagactataaacccagtcatggacagaatgatctttgtgtgattttttttaataaataaggctaatttaatattgttagtgtaattttcaaaaacagttgaatctgggttattgggaaaatatccatgtatttaaacttcttactgagatgaacacctgatactcacaggttataaaaatggttaacaaggaaatgataactagctttgtctaatatctcagctctcataagtaacctagataaactgctaaaatgaatgaaatgtaaagaggataaatgttataggtaaactctttatgtaatttaaaatattgaaattattttggatgctcattagatgkctgtgtcattctaagtaagaaaggattat

SEQ ID NO: 387601 - DNA, 516 bp, Homo sapiens
ggtctgtcttcaaaacttatagtttttccactaaactgggcattcccctggattttgaaccctgtctctgctacctattaacccttactggtaacagggtttatatttttcactggagacatactctttcttcatggtgtgtgatcctggtgggatggtcagtcagggtatcctggcacccctgccaagaaaagttgaagcagatccttcccaagtgtccctttattccttctacctgggtccttggggcttcccttatttctgccttgtctgagactcgtctggattttttttttcctttgatatgagccatcttacatatttctagtaaattctattcttagttaagtcatccagagtctgtttctattgctcataaaattcctaattacaacagttgtagtacacacctcatggaggcagtgggaagactaaatgacattttctttacatagcagttagctcaatacctastacacagtaagtgctcaataaatatcagttgctcttactacc

SEQ ID NO: 387602 - DNA, 591 bp, Homo sapiens
aatgcagtttaataagcattttgagtgtctactatatagaagkccatggatattaaaagatgagaaagtcatgttctcagccttcaaggggtttctggtccaggcaaatagatgcaataaaaggaattaaatttagggtgatgaaaaagttctggagatgaatagtggtgattgctgcacaatagtatgaatgtacttgaggccactgtactatgcaccagaaaatggttgagatggtagattttatgttatgtatattttatcacacacacaaaaagaaggaattagaaactctctcctctccttcttctgtcagagaaagatgaatcaaaataaatcaagtggcaccagcaccattccttgggcaagagaattagaagccaatgtgtgtgtttttcccatttgggatgctgtcaggtctaggcagatggtaaacactcaaaggcatctcagcaccatcacaggctgcgtattgttcctgaaggacaaagtcagagtcatgccagggggtaatgttctttcctggaaatgtactgactacagtgtctctgaggaaaattaactaatgattttgaaaagtgtaccctcttt

SEQ ID NO: 387603 - DNA, 579 bp, Homo sapiens
ccagcgttagccaaatacaatgccaccagaagattatgctgaatccacttgatccaatacaaacccttacctttaagaactaagaaggagataacacacccatcccccatcccctacttttgtcagtgattttccctacttgcagyggccatagcagaaacagaagcttctctgctccttgtgttcctgtaatagtgggaaatcagccaggacgaggccaaacacacgtggacaaccctcagctactatcctagcaaaacaagaggatgaaaaaggaaatgtccataatggagaaggaaaaaaattaattctccctttttctagttcagggttctgcaaactatggcccataagtcaaatccagcctgctgcctatttttgtgaagaaagttttattagaacaaagctatacccattcatctatatatcacccatggctacttttgagctaaagtggcagagttgggtagccgcaactgagaccttatggcctgcagagcctaaaatatttattatttgggtctttacagaaaagtttgccacctctgctgtcgttcctcatgccatgactggtagccc

SEQ ID NO: 387604 - DNA, 564 bp, Homo sapiens
aagctaaaagcttggcagggcagacaacatcaaccttgcatctagacctctggaacagtcccaaagtgggtgaagggagcagggagaacagttgccaaacaaacggggtctcttttttcccagagaattcaagactgtttttgtcaaagcttcaaagaatagaaagcatattaaatacatggagcaaacttcaacaaacaaaaccttccggcctttgaattcattgtaagtaacactcctaacayggcaagaaagtaggctgtgacggtttgggtgaaagcagaaatccacaaaaaaagctctgtgtaacatggtgttaacaaaacacagttgtttcactttagagagttggaaagaagcaagtgctgtatcattgaccaaatcttctgcagtggctccttataaatactactagtgccaccttctggtcatctgattctatggcaggcctcctgtcacaaggcctcactttccccaatccagcaaatgatgtgtattgtacaatcatggactcctacaaaagagatctgcagggttctctagaggtcgttacagattacagac

SEQ ID NO: 387605 - DNA, 564 bp, Homo sapiens
aagctaaaagcttggcagggcagacaacatcaaccttgcatctagacctctggaacagtcccaaagtgggtgaagggagcagggagaacagttgccaaacaaacggggtctcttttttcccagagaattcaagactgtttttgtcaaagcttcaaagaatagaaagcatattaaatacatggagcaaacttcaacaaacaaaaccttccggcctttgaattcattgtaagtaacactcctaacacggcaagaaagtaggctgwgacggtttgggtgaaagcagaaatccacaaaaaaagctctgtgtaacatggtgttaacaaaacacagttgtttcactttagagagttggaaagaagcaagtgctgtatcattgaccaaatcttctgcagtggctccttataaatactactagtgccaccttctggtcatctgattctatggcaggcctcctgtcacaaggcctcactttccccaatccagcaaatgatgtgtattgtacaatcatggactcctacaaaagagatctgcagggttctctagaggtcgttacagattacagac

SEQ ID NO: 387606 - DNA, 564 bp, Homo sapiens
aagctaaaagcttggcagggcagacaacatcaaccttgcatctagacctctggaacagtcccaaagtgggtgaagggagcagggagaacagttgccaaacaaacggggtctcttttttcccagagaattcaagactgtttttgtcaaagcttcaaagaatagaaagcatattaaatacatggagcaaacttcaacaaacaaaaccttccggcctttgaattcattgtaagtaacactcctaacacggcaagaaagtaggctgtgacggtttgggtgaaagcagaaatccacaaaaaaagctctgtgtaacatggtgttaacaaaacacagttgtttcactttagagagttggaaagaagcaagtgctgtatcattgaccaaatcttctgcagtggctccttataaatactactagtgccaccttctggtcrtctgattctatggcaggcctcctgtcacaaggcctcactttccccaatccagcaaatgatgtgtattgtacaatcatggactcctacaaaagagatctgcagggttctctagaggtcgttacagattacagac

SEQ ID NO: 387607 - DNA, 564 bp, Homo sapiens
ccaaatattacaaaccaacagctaaatcatactgaccagagaaaaattgaaagcctttttttataaaatctaaaacaaggaaaaggtatgtacctttaccactttagtcagcataggactggaagtctcagccaaagcaatttagcaaaaaaagaagaaaaaaatgaagtgtttccaaatkggaaatgaagaagtcaagttagccttgcttacagatgacatgatcttatatttagaaaaaaactaaataatccaccaaaaaaccattagaactgataaatgaattcagtaaagccacatgatacaaaatcaacatacaaagatcagtagcatttatatatgccaatagcaaagaatctgaaaaaataaatcaagaaagcaatcccacgtgctctagctacaaaaaatataaaatccctgagaatcaacttaacctaaaaaagtgaagatttacaaaaggaaaactataaaacactaaaaaaagaaattgaagaggacacaaaaaagtggaatattatcccatgcccatagattggaatatttaatatagttaaaataaaaata

SEQ ID NO: 387608 - DNA, 589 bp, Homo sapiens
tttagttgtttgctatacattccttagtgtctgttcaagacagacactattccttcaaaccaatttgtttattatgtctatataatggaaattttcctcaagtactmcaattggaaataaaagcatgtaaaatgtttcaagtgcagacagaagcagcagaatgtctatactaatgctgcctcagccacaaggaacaaagattctcaaacaagcaactcagttcaaatttaactattgaaatatgattttttttaccaaaaagacatgtacatctaaaaaacctccacattcacagaaaaactgaaaaaaaccttaaacagatacaatattattttattccatttctgcaccattagatcagacagatgtgttgagagtaatacatcagcatatatacctacaacaaacaacctacagaatagtgttgggagcatgaaagtgcctttcttggcatcttctttgactaggaggacctccaactgactgtttccatgaaggaatatgggcccagtgaggccaaaatcttttaatttttgaaagaagccagaaatctggatttttaaagtgagattacccaacatgaaatgct

SEQ ID NO: 387609 - DNA, 586 bp, Homo sapiens
caaagactaaccttcaggaatgtatttattaaatatgaaatatgagcattaagaatatcatacattttacatagaatattttggttccaacatgatttcttctctggaatcagtggtcagtccaatctcttgctactatcttacctgaattatgcactaggtaaggcattttcctgtagaaagcagcaagtaacyagaacaacctctgtgcaggaaggccctaacaacacgtattacactcctttttctgaattatattctgatgataataaactgaagtagtttaaaaaaagaaaattaattttattataagaaacacctaatgaagcttttattcacttatgacagagatttaccacatgatgagaacattctgggctcaaagaaaaattcagattctattccccactcaaaaaggaagtagatgtgacatggtttttaaggtgataaattagggaattaatgactagatcacaaggattgagacaaacattttaatctaacaagtatatataaaatattactgttgttatatccttccttacaaagaccaagacaggattaaaggatttactaaagactactg

SEQ ID NO: 387610 - DNA, 579 bp, Homo sapiens
ttcgtgccacgcatggacttggaactacacacacgtagtccaaaacgtgaaagtcaaaatgcagctttgccaagtggcagggagaaaggagagctgagaagatgaggagaggaagggcgcgctccaggctttccagcccgggtgcggtagacgtagccctgaaggatgaacccaggctggtagtagggcggcgggagggcggggggacctgtcagtcaagtccaaagcagaaacgcggcgccggatcccagtcagaggccggctggaacgcttcccacaggctcctggcgctccggtccccaccaggcgaccttgatcctggcgtgctcagcggagccagcgcagcgtcgggagctggagagacgcggggcgccggctgagcgctcctgccctctgcctctgggctagcctctggcccggcctcccggcctcccccagggtacgctctcccccaagmgcgaacaccagctttgggatcgccagcagccacgtctctgcttctagatctcttttttttttctttgagacttagttgatagctgtttaaggaattatgtggaggaaatctcacctccgacc

SEQ ID NO: 387611 - DNA, 537 bp, Homo sapiens
aaatatcttaactttcaccaaaaactctgtcttctgggtattttttgtttttctgcctttccagatttattttaaatacaacatttttgctgtttacatttttaaaagttacatttcaaaattgttcataattggacactttcataaaatgtaggcaaatgcagttttactttttaatgaaggacaagtctgttgataacattttgattcttaaaattttttttatcttataaaaatgaaacaatgcatttaaagtgtcttcagctcttatgttaataccaaattatacattttcttagcccatgttcaggagagacaatatatcttccaaattaagagaagctggcaccatttttaaaacaaggccttgaatctgctgtggtatgtgctggtaggaattttgtatgaagctgttattgaagtagatgacattaaggtcaaaggaaaaaaaaaacagaaaataatgtaatcctacagagctgctcttaagatcttgrgagaaaaaccacgtaggtaacatcaaacactagttggaat

SEQ ID NO: 387612 - DNA, 501 bp, Homo sapiens
tgacatttatcaaagaaatggtaagtgctgtcatccgtgggtggctggattaacatgtgggactacttatcaccaattttgttagggatcttagggaaattcctggatcttatattcacaagcaattgtataaatacttcccacagctcagagacctaataggatggggtcttagagaaacatcttttgagccacagacttctttgttaccagaaggaaaatgaaagaagaaatttaaataccacttgaagagaggtaaataaatgagaaatggggctgagagggcgggtattttttwaaaaattcattaaatggaaaaatccacaaatgttaattctggtagatttcttagaaattacatcagaggagcatgcttggtcttcccaccctcattaggcctcagtgacaggtacttgaacaactgagcccctaatgtgcatgctcccccacccctgaagccagtctctgccctcctcttccctcctcttgcccctggaagct

SEQ ID NO: 387613 - DNA, 565 bp, Homo sapiens
tattttcacaatggcaggatttcctttttcatggctggatagtattctattatgtgtgtgtatatagatacatatatgtatttatacaataattcactcatcaatggacacctgggttgtttacacatcttgcctatggtgaataatgatgcaatgaacatgggagtatctctttgagataatgattttgtttcctttggctatatactcagaagcaagattgctggatcttatggcagttctatttttaatttttaagagaaaacttcacactgttttttataatgtctgtaccaatctacatttctaccaacagtacacargaggtcccttttctccgcattctagccaacacttttatctcttgtctttttgataacagctattccaacaggtgtgaagtgatatcttgtgatttttttatgcattttcccaatgattagtgatgtcgtgcatcttttcatgtacctgttggccgtttgcatgtcttttattttttaagctgccattttcaggtcctctgtccatttttaaattaattaattaattaattaattaattgttt

SEQ ID NO: 387614 - DNA, 534 bp, Homo sapiens
acgtgaaatatcgtgtaactacattttgaattggtttctctgagcatagggggatcaatctgattatgtaaataatgcataaatcccaaacgtgcaaggtaaactttcatcagcctcagtaactcaggttgagctttaggcttgagatgtgaagagaaagctgattwctttgactaaacacatttggttattttttttgaattgcagttgagggaggcagagtgacatggtgcaggctaagaagagcactgaacggggtgtctggagccctgcatcctactcctggcctacccctttgtgatcttagataagccctttacttttccaggcttccactttccttacctgattcagaagggccaccaagccccagttttcctacctcctcaggatatgatgaaaatagaatgagacaatggatgtagagcaaaagctactcagggtgtgatagcaccctgccaagtgtacgttaccagtctgcaggaggatgattgcagaaagtaagagtaagtgtttagaaacttttatagcaat

SEQ ID NO: 387615 - DNA, 648 bp, Homo sapiens
ggaatctgttcctctttcccttgaatatggaatagcccgtgacagtgccatagaagtgatggtgtgccaattctgagcctaggcccccagaagctttctcttgctatcttagattcctgcccagctgtcctatgaacaagcaatgagctgccccacttgaggccagcccagatcagccagcccacagacaacttgataggtaactgtagattcactagtgagcccaactgggaccaaagaatcactcagcttagtctagtccaaattgctgacccatagaatcatacagtaaataaacgctattgtttaaaccactaggttctgggatgtgtttttatgcagcaggagcaaattaatccagggataaaatacaaagctggttgtgctaggtggtkggttgagtagttgggcaccaggcaaaatgatggcagagtcagtttgatttgatcacctttccagctcttctgtacccctccctccaaactaaccccaaagttgctcctggcttcctgatcccatgcagggagttatgctcttgcatgtctcccaccaccacaggtcaatgcctcatcagcatcctaaacaatggaactccttgggaaactgacgaaagcaaagactttgtccctcaggaaaaatgcacaactc

SEQ ID NO: 387616 - DNA, 458 bp, Homo sapiens
gggtggggtaggagaaaaagagatgactttctggaggaggtagaggatttctggatcttttgtgtgtgtgtgttgaaaaagaaataattcaatcgacatttacgaaaaggtttcaccaagaaaaatggattcatgtctttgtcttagtccattcaggtggctataacaaaatcctttacactgggtaacttataagcaacagaggtttattttgcacagytctgggggctgggaagtccaagaccaagccactggtgctgcctagtgggcgtttgcttcctgacactgtttttctagctgtgtcctcacacagtggaaagtgccaaggcggctctctgggatctcttttataaggcactaatctcattcatgagggatcttcctctgtggcctgagcatctctcaaaggaccacctcctaataccatcacttagaattttaacataaaatttgagaca

SEQ ID NO: 387617 - DNA, 615 bp, Homo sapiens
cacctccctctgcctcaggtcctaaactccactcgccacaaaaaacccactcacaggaagatggactagaaggsaaggcaagagatgggtggtgggagccacctgccacctttgcctagttgtgataagagtgggctcttgtcagttttctctgccaagcggggggcatcacttcttggccagctggaagtgagatttctgctcaaatttcattagaagaaaacttcataaccaagaacactggtgtcctcttcaggaaacggccctgtattttactgggggcagacttcaaagtggatatatccagaaccactttttttttcccacatgctcactaactttttgccatcaaggttggtggtagtgtccctttcacctggccatccgagacaggctgataaagaaaacaagtctatctggatgggtgggattttctctaaatcagagtgctctccctacttccccgggctgtctctctgattgcagcagaaattactcacactccttcttatagcaggacccttaactagaatatctgtgcctagcagttgccccctacactggcactggatacagtcacagctcccaccatgaatgttaaatgcaacacagaaa

SEQ ID NO: 387618 - DNA, 615 bp, Homo sapiens
cacctccctctgcctcaggtcctaaactccactcgccacaaaaaacccactcacaggaagatggactagaaggcaaggcaagagatgggtggtgggagccacctgccwcctttgcctagttgtgataagagtgggctcttgtcagttttctctgccaagcggggggcatcacttcttggccagctggaagtgagatttctgctcaaatttcattagaagaaaacttcataaccaagaacactggtgtcctcttcaggaaacggccctgtattttactgggggcagacttcaaagtggatatatccagaaccactttttttttcccacatgctcactaactttttgccatcaaggttggtggtagtgtccctttcacctggccatccgagacaggctgataaagaaaacaagtctatctggatgggtgggattttctctaaatcagagtgctctccctacttccccgggctgtctctctgattgcagcagaaattactcacactccttcttatagcaggacccttaactagaatatctgtgcctagcagttgccccctacactggcactggatacagtcacagctcccaccatgaatgttaaatgcaacacagaaa

SEQ ID NO: 387619 - DNA, 615 bp, Homo sapiens
cacctccctctgcctcaggtcctaaactccactcgccacaaaaaacccactcacaggaagatggactagaaggcaaggcaagagatgggtggtgggagccacctgccacctttgcctagttgtgataagagtgggctcttgtcagttttctctgccaagcggggggcatcacttcttggccagctggaagtgagatttctgctcaaatttcattagaagaaaacttcataaccaagaacactggtgtcctcttcaggaaacggccctgtattttactgggggcagacttcaaagtggatatatccagaaccactttttttttcccacatgctcactaactttttgccatcaaggttggtggtagtgtccctttcacctggccatccgagacaggctgataaagaaaacaagtctatctggatgggtgggattttctctaaatcagagtgctctccctacttccccgggctgtctctctgattgcagcagaaaytactcacactccttcttatagcaggacccttaactagaatatctgtgcctagcagttgccccctacactggcactggatacagtcacagctcccaccatgaatgttaaatgcaacacagaaa

SEQ ID NO: 387620 - DNA, 594 bp, Homo sapiens
tactttcagttattgtttttgtttttttgtgggatggggagttttcttgttcaaatttgggcacatgggtaatgcagtttcatttcacaattctcaataaagctacctgaactctgattgtattaggaacctccggctacttccctatcatacaacctgtaatatcagcctgtaattttcactgtgcagcagagacaggctttatgggctgggggacgcagcagagtttcatcttctgcctggttgccacaggctagcagtgtggaacrgagctcatgctcaaaatatcagaaagaatgtgagaacagcccccactcctgcccaactggagcttaggatgaggaaagcaaggggtctcctagcccttctttccgtgagccagcaaccaggttctcctggctgggctgctcagcaatcctttcaactacccagtctctctggacaaacagttgctcacccacaatatcctggggagtgatactgaccccagccctgcttcttagtcacaaccttctgcttcaaagttgtttctccaaagcaagctgctaagtcacaaatgaaaaccaagaagcaggggttagctccaataaagag

SEQ ID NO: 387621 - DNA, 590 bp, Homo sapiens
ccacagaattgtgatgaggactaaatgagatcatatgtggcagcacctgacagagtgctcaataaatgttgaatactgccttgtgaggctgaccccagtgcctctctctctgtctctccctgtcattctgtctctgtctcttgtcctcatgagctgtgtgtttctagtattaatacacaaagcatatttgcaatgattctttgctgaattattacagaagaaatttgatacatgacgcttgcatctacacatagtctccattctgtggccccatgccagatcactttcattcattttaggcagtcaattattgcctttagaactgaagcagggactctcttcaccctaaacagtatggttttaatcagctcaaaagcagacaagtgtcccaagcctcttgcctgttcatttttggacgttggtgttaycagtaaatagagacacttgggaagaacaatgaatagaacaggacccattctttcgctatgaagaatgaccttttgttagcttataacacaggctgcactttattataattattcatttgtggaatgttgactaagcctgaatccctggtatgaaattcaaat

SEQ ID NO: 387622 - DNA, 571 bp, Homo sapiens
tttgcacttaatataaacctaggccagatgcagtggctcacaactgtaatcctagtgctttgggaggcctagacaggaggatcacttaaagccaggagttagaaaccatcctgggcaaaatagcgagaccccacctctacaaaaaaataaaaaaataaatagccaggcatggtggtgcacacctggcgtcctagctacacaggaggctgaagtgggagaattgcttgagcccacgagttcaaggctgcagtgagctatgatggcaccattgccctccagcctgggtgacaaagcaagaccttgtctctaaaaatcaaaccagcaaacaaatgaaaaaaacctaaacttctttccttgggcttcaatgcccagcakgatctaacccctgcctccttctgcaactttatctcatgtctcacttcccttcatttactattggtttagtcaccctgagctcctcttggttgcccacgtatgtgagttctttaatacctcatggccttagtacatgtggttccatctgcctagaaagctctcactcctgcatttcccatgactgtttatttttttc

SEQ ID NO: 387623 - DNA, 534 bp, Homo sapiens
tcagagcaaagagaagaatgaggatggaagggaagaaaggcaaaaaacaaaaactttgctggtttgacctttcaaccagaaacgacctctggtcactgggaaaaagaaatctcagagctgtgtggctcatcccggaggagcttcatgcctaagggcacagccagagctctcctgcctgccatccaatcctggcaagttacttgtactcactgtgccttcgtgtcttcttctggaaattggractaataatccaccagaagctgttggaatcaaatgggtgcatacatgtaaaacttggctcaatgtgggtatgctatcactaggattcccccatccccacccctgggctcctagttcatagggagagggaagcctggttcccctgctgatatttggatatttgtttcttccaacacccatgctgaaatgggatcccagtgctgaaggtgggcctagtgggaggtgcttggatcatggggctggatccctcatgaatggcttggtgccctccccagagacatgagtgagttcatc

SEQ ID NO: 387624 - DNA, 620 bp, Homo sapiens
ataccttctgctttttctattataaagccccactgtggaatttctgtcacatttctctctgatgcttgttgattatggcttactattcccaaatgccttccttctgcccctcaaataaggcttccaatctcagaaccagcatcctcacctggcacctgttgcccacctcaagatgacaacttctgcctgctgaagaccccagaaccatgaccaagacaaatgaaaagttctaaatggtggagaagatgaccwgtgttgctggccccgctgaagattcagcctaaagcaatctacattgcatgttatctggagggacaaaggagaactaaagcacctacaaagaaactgcccaccttgactccctagggcgattcagagaggatgtcaactctcaggaattccccatgttgtttgctatattttgtctgggactatttaaaaaatcatttatgggaggcttccattcaaatgcacctggaacaagtagtatatttactgtcaggagctattagtacaaggagagctcatgggacagatgcattttgatggagagcaccctgaaatattggggattctttggacctctcattcaactggactaccaggaatgagccagttta

SEQ ID NO: 387625 - DNA, 610 bp, Homo sapiens
agcaacccctcttcaatgcctcaaattccaccaggagggttttgttcatttggctcctgaactgggcccctgggagagggagctccctaaacagttacccatcactaatatttcagtgtggacttgtttataggctcactttccccaaggatagcttgttaagggcagccttggatgggcagttgtggggtgcatcagttaagtacagaggggtatttttgggagacaggaggcctggatgggagatactggatgatgagaggacaacaggagaggaacgggcttgagagggaagaggagggtccatgagaacaaayttcccagccctactttcatttgtgctctaggctgggatttcttttcaggatagatgcagtcctgctggctgagtgcagcagatggtacagagaaggtgcttaaccaatgtctgctgagcaacattttcaatactagaactaatcatcattcccctaaggcaattaaaatccatctggaattaagaaaaattgctgggactggctgaaaggtggtgttatggactgaattttgtccccctcaaaaaattcttattgaatttggtgggggggacacataatccccaacgtgactg

SEQ ID NO: 387626 - DNA, 289 bp, Homo sapiens
gtcctgctggctgagtgcagcagatggtacagagaaggtgcttaaccaatgtctgctgagcaacattttcaatactagaactaatcatcattcccctaaggcaattaaaatccatctggaattaagaaaaattgctgggactggctgaaaggtggtgttatggactgaattttgtccccctcaaaaaattcttattgaatttggtggsggggacacataatccccaacgtgactgtatttggagatggggctttgggggaggtaattaaggttaaatgaggttacgatg

SEQ ID NO: 387627 - DNA, 562 bp, Homo sapiens
caacccacatgacttgaacaaaagggaatcctgtaacatgaggatcctgtaagtgaaaagttcacaagtagaagagttttcaggaacagctggaagcagaagcttaaacaatgtcactaggatatggttttcctctgtattactcaagtcattttcctccatattagtgtgattgtcatcaagctcttcccttctgatttcataatgcttgctagtagctcctgtcacatctcattggctccagtgggataatgggaacatttatgaaccaatcactgtgttcagataaactcaaggctttgattagcctggcgagrgtcacatgcctggctgcagagaaagaattggtttcatctgaagcacacagattgttgcctaggaataggggtacatcactaatggaaaattgggagcttctacaaaaggtagaacatatgtatggctgcatggtcaaaatacaaccaatgtccacactgacatgactctttcacaggtaaattcctgagtgataacctcagagtcagaagaggaaaaatagatagaggcattgttcaaggaagac

SEQ ID NO: 387628 - DNA, 479 bp, Homo sapiens
tagaaattttacagattagaatacaaagagctaaaatgatggggaaaaaaaacagaatagaataccccaaaactgtggagcaatttcaagagtttgaacgtaattcaaattagaaggagcaaagaggatggagcagaaaaatacctaaagtaataaccaccaagaaatttccaaaattaatgacatgcaccaaactatagatcttgggagctcagagtaacatcacgcaggataaatgccaaacattctacacctaggaatatcatattcaaacttcagaaaaaaacaaagacaaagagaaactcttgaaagaagccaaagaaagacaaacacctttgcctytacctataaaggagcaaagatgagaattacagtggacttctcatcagaaactatgcaagcaacaagagagtggagtaaaatatttaaagtgttgaaaacaaaacaaaacaaaacaaagaaacccaccaacctagact

SEQ ID NO: 387629 - DNA, 413 bp, Homo sapiens
gactctgctcaggataaatgctccatcttttgctcttctctctctctcggcttttatgccatcgccaatatcatcctccccctggtgctgtcagggaagctgggctygtaattcttccagggaaggcattagaaagaaagaaattaagttcaatcaaagtgtcaggcctgaattgtttgtgtgtggaggtgcaggtgagaggagcttaataagttcacctctgtgcctcagtcttcccctgtcttctctccccccctaccccaccatactgtaggcacttgaccttcattaggtgaccagaggggctaatcaaataaactagtcccaatcctgtatcagaagccaatcatagcagcagtctcaagaggatagacttggctataggaacatacatacacacacacactcacaca

SEQ ID NO: 387630 - DNA, 605 bp, Homo sapiens
tgcacaccttttgttagtcttatgaataataactaacatttactacaaatggccaaaaaaatatgaaaaatgctcaacatcactaatgatcagggaaacgcaaatcaaaagcacaatgtgataccaacttactcctgcaagaatggccataagcaaaaaatcaaataatggtagatgttggcgtggatgcggtgaacagggaacagttctrcattgctgttgggaatgtaaactagtacaactactataaaaaacaatgtgtagattccttaaataactaaacgtagaactaccatttgctccagcaatcccattgttgggtgtctacccgaggaaaagaagtcattctatgaaaaaggtacttgcacgtacatgtttaaagcagcacaattcacatttgcaaaaatgtggaaccaacccaaatgcccatcacacagcaagtggataaagaaactatggtatatacatacaatggaatagtactcagctataaaaatgaatgaattaatgacattcacagcaacctggatgaaattgaagactattattctaagtgaagtatcacaggaatggaaaaccaaacatcatatgttctcactcataag

SEQ ID NO: 387631 - DNA, 605 bp, Homo sapiens
tgcacaccttttgttagtcttatgaataataactaacatttactacaaatggccaaaaaaatatgaaaaatgctcaacatcactaatgatcagggaaacgcaaatcaaaagcacaatgtgataccaacttactcctgcaagaatggccataagcaaaaaatcaaataatggtagatgttggcgtggatgcggtgaacagggaacagttctgcattgctgttgggaatgtaaactagtacaactactatraaaaacaatgtgtagattccttaaataactaaacgtagaactaccatttgctccagcaatcccattgttgggtgtctacccgaggaaaagaagtcattctatgaaaaaggtacttgcacgtacatgtttaaagcagcacaattcacatttgcaaaaatgtggaaccaacccaaatgcccatcacacagcaagtggataaagaaactatggtatatacatacaatggaatagtactcagctataaaaatgaatgaattaatgacattcacagcaacctggatgaaattgaagactattattctaagtgaagtatcacaggaatggaaaaccaaacatcatatgttctcactcataag

SEQ ID NO: 387632 - DNA, 605 bp, Homo sapiens
tgcacaccttttgttagtcttatgaataataactaacatttactacaaatggccaaaaaaatatgaaaaatgctcaacatcactaatgatcagggaaacgcaaatcaaaagcacaatgtgataccaacttactcctgcaagaatggccataagcaaaaaatcaaataatggtagatgttggcgtggatgcggtgaacagggaacagttctgcattgctgttgggaatgtaaactagtacaactactataaaaaacaatgtgtagattccttaaataactaaaygtagaactaccatttgctccagcaatcccattgttgggtgtctacccgaggaaaagaagtcattctatgaaaaaggtacttgcacgtacatgtttaaagcagcacaattcacatttgcaaaaatgtggaaccaacccaaatgcccatcacacagcaagtggataaagaaactatggtatatacatacaatggaatagtactcagctataaaaatgaatgaattaatgacattcacagcaacctggatgaaattgaagactattattctaagtgaagtatcacaggaatggaaaaccaaacatcatatgttctcactcataag

SEQ ID NO: 387633 - DNA, 549 bp, Homo sapiens
catggacctcagcttctcctgagctcctgaggagagggactaatgaggagatggctctgctctgatggagcagaagccctgagctctggggaccaggactctatggctggtttgccattccatcattcatacatgaatcaagcccctactattctaggctctcttccaatcactgagaataaagtaagacaaaaggcagcaaggttcctatccccagggagggagagaggcagtaaacaagtgaacagataaatgagcattttccagggtcacaactgccataaggaaaataaagcaaggcagtatgatagagctcagctggtaaagaagaggtgtctcaatattagacagagtgatcaggatggtgcctcactgcaaaggtgactttttagctcagatacaaaagtagagaaggaaatggccacagcaataagtgggagatggaagagtatcccttgcgcataaaggatcgacaggtgaagattctgggacaggmcacagcttggcatattctaggaactaacagaaatccagaatgagctaatttgc

SEQ ID NO: 387634 - DNA, 532 bp, Homo sapiens
atttaccacccctggcactgagctaggcattgggcacgctgcagggagcctgcagatgagggcctgatcctcttagagcttagcatgcagcagagatgtgggcagggcrtgatctgaataggagagttcaggtggtcagcagaggacaagctaatgaataggggtcagggagggctttgccaatgaggtacagggtataggaatgtgctcaaatagagcactgaggtcaggttggagtctgctcagatgaggcaccctgatccctcaccttataccccttccttgaagtctttggagcttagcaagatgaacaaagatctccctaggctctgggctgtggccacacaaccagaaaacctctgcttagaatcacgaggctctccttcctgatatcagcagcgttgtgtttccttgccacctcctaaagtgcaggcagcctcatctatgaacagcaaagcattttcccagtaagaagaccgagcaacaaatccaaatgccagcccatacatctgattctggcctctttctcatt

SEQ ID NO: 387635 - DNA, 532 bp, Homo sapiens
atttaccacccctggcactgagctaggcattgggcacgctgcagggagcctgcagatgagggcctgatcctcttagagcttagcatgcagcagagatgtgggcagggcgtgatctgaataggagagttcaggtggtcagcagaggacaagctaatgaataggggtcagggagggctttgccaatgaggtacagggtataggaatgtgctcaaatagagcactgaggtcaggttggagtctgctcagatgaggcaccctgatccctcaccttataccccttccttgaagtctttggagcttagcaagatgaacaaagatctccctargctctgggctgtggccacacaaccagaaaacctctgcttagaatcacgaggctctccttcctgatatcagcagcgttgtgtttccttgccacctcctaaagtgcaggcagcctcatctatgaacagcaaagcattttcccagtaagaagaccgagcaacaaatccaaatgccagcccatacatctgattctggcctctttctcatt

SEQ ID NO: 387636 - DNA, 528 bp, Homo sapiens
tcatttttgctttcacattatgttccgatacaatcaaaactcctggacgaacctcttgaataaagtcctgtgaatgagcggaatcataggtcctgggcgcccgagtatgcggcgggtggactccggattcagaggcggtgtataaaacatacgctgcttcgggaactgcgagggggacgcggtgggagacatccggggacagaaggcytgaggagtctgccgctccaggcagggtcgtttgggtcctcaaactgggactattcctgatgcatttggaatgcaaagaaaaaaatcaaacttcgctcctgggccggcggccgcgcctggcctagcaagatttcggccacatttcttacgtttccgccaaagctgtgaacacaggcgaatgcagtgctggtccccggcctggcgcaggaaggagcgcaaggccggctttgcaaggaagccctcgcgcccaggcctttctatggttgcgttcccccaagtctcctgcctttcggaacctcgccctttggcaccccagacccc

SEQ ID NO: 387637 - DNA, 618 bp, Homo sapiens
tgctatcctactaacttaaagctattttgtggctaccccaactttgtaattatttatatgaacacatttaaaatctttaccttgataatatagggatactttggctttaaatttaatactccatttattcatgtattctttcaacaatgtatatcccatcagtgctgtgtaccagctacttgtctggattatgggaatatagtggttaagataacagcttctcccttcatggagtttacagactgataggaattggggaataaactattctataagttcggttcttttcttactccctcctctctactggaatcaacaaggaatgcaaaagctcaagtgctctgggtaaggctctccttcctccgggcttctacattatcattggcaggagcaaaggaaaggccgcagaactctgcatctcttggcatgttccttagccttccctcttcccctacacttcactactatcrctgtctactttgcaaccatcagggcagatattatgcctttgagccctgtttatgttagtcaccttaagaagtccaggactcctgggttatccttcctttgcccagaatctatccctttctgattctttgggtagtgagacaatccgtc

SEQ ID NO: 387638 - DNA, 544 bp, Homo sapiens
tcaatctttcacaataactgttgccatggtatccaggccttaaacacacatgaagttcaggactgtcagtcatgtgcatctccatagcaatcaaagttttctaagaagagaaagcattcaactcactttttctcattcatccaactttaataatgtcacttcaaaaggaatgagtaaacagatgctaattcatgaatactgataaatatgtttgattatytttaacatataaataaaaacccaaagaataaactatagagtagcatattaaaccaagaaaagtgtaataatttttttaaccaattgaagttagaatattatattcatttccaattttatttatttacctaaaacattttaaaagtaaacattcattatataaaggcctgtgacacaaaaaaatctaaaatcagtcttaaataaaaaatatttctatttggaaggtgataatgaaaacatggctctaccttctaattcccagctagatatttgggctttcacaaagttttataacaaacttaagtgccacattttttaaaagaag

SEQ ID NO: 387639 - DNA, 601 bp, Homo sapiens
tttggcagtttcttacaaagctaaacatagttttactatatgtaagatctagcaattatgctcctagatattaacccaagtgagttggaaacttatgtccacataaaaacctgcacatgaatatttatrgcagctttattcgtaattgcccaaatttggaagcaaccaagatgtccttcaataggtgatggataagcaaactgtgatacatccacataatgtaatagtattcagtgataaaaataaatgagcaattaagacatgaaaagatatggagaagccttaaatgcaactactaagtgaaagaagtcagtctgaaaaggctacatactgtgtaattccaaatatatgctcttatgaaaaatgaaaaactatggagacaattaaaaatcagtggttgtcaggggttcaaggagagtcagggagagataaccaggtggaggcacaggcactttaggatagtaaaactattctgtgtgatattataatgatggagtcatgacataaatttttcaaaacgcatagagctgtacaatacaaagagtgaatcctaatgtaaactgtgccttgtagttaataatagtgtatcaaaattggttca

SEQ ID NO: 387640 - DNA, 529 bp, Homo sapiens
ctttacttaacatatttagtctggtaaaccactaggaattaattttgatgtatgatgtgagatagataaagttttattttttcccagtagtgataatcaggtggtctaatactatttattcaagagatcaacctttctccacaattctgcagtatcaccttcatcataaatcaagtgtacataagtctcttctgatctctctattcttttccattgatctatttgtagattctcatggcaaataccatgcagtttttattatggtagctttgtaataagtcttgccacctggtagtggaagaacaacaacttttcttctggatttttgtggctattttatgtcctttgcatctacacttaaatwttagaagcagtttgtcaatttataagaaaaacattaggatttttgggttttgattgaaattgcatgcaatctatagatcaaatttgggaggactgacaattttataatattgatccttctaatccatgtacattggttgtatatagctctactttttatatacat

SEQ ID NO: 387641 - DNA, 397 bp, Homo sapiens
ttatttccaagaaattggaatgctggatctgtgaaaacaaaaataaagaacatggaaaatgttgcaaaactaaagtatttctctagatcattcaaattaattaagacaataattttgtttcttagaaacattcacatatacccaggcctgattacttccccaaatgytccctctttccattcctttttctccctactcacccctcaccccctcccaaaaaactcactatggctccactttccagagactagaaaaattgaaccctggctgttgaaaaaatgactatttttaacatctctaaaagtttcctaaaccttctctttatctcttttaattaaactttcttttctaaacaacccccccatctaattgaatcccagtggttttttttttgttg

SEQ ID NO: 387642 - DNA, 514 bp, Homo sapiens
ttccacccatcatatcattggactgagtgaaaactttcagaactctaatttaaaaaatgaatgcattcatgaatattactaacctaacatccagctgaataataattaaatacatggggctagcctgacagagggtggaaatgctttctttaacttttctctttgaaacattgctgattattttatgttttgttttccagagtcaagaaaatgtctctttttagctaattatagcttacagcaactgggtaaccttttgtgagcaaaattaaaacatctgcatttctccctacctgatttctctaaaatttggaaactattcatgagtatttgtattttgtggcaatatagttatttgcataagatcaataagaatctgttttcttttgtaacagaacacattggatacacyggttattttaccaaggctttggctggaatgttacatttttgaatgtgaccaaactgctttgaggaattgaggctgactttataaagccaatagacatgggaa

SEQ ID NO: 387643 - DNA, 596 bp, Homo sapiens
ctttcttcttcatgttattttatctcccttgttctctttcttttgttattaccataatgaacagaaaaatgaaatagaatagcatcctagaagtgggtatgagccyaaagagtgttaatgtaattcctctgcttttgtagacaaggtaactgaggcacaggaacttcagctgtgcttcaagatactatctttggtgagagaggtgcttctggggtttcagtggttatgtttaaagcaaaggtgcagagtcccacaacccccatgcagggtcttcagtgcctgctggtgttgtcaggatccaaacattcatatttttaaactattgtttaaatagtttaaatagtagattaggttctgcaggaaatgctgcgatagagattagtgtgcaatgggatcaacatctgtggaagggaaggaaagaagggcaggatttagcgaagaaagaagttgagttttgaggcagacttcctgaaggcttcaatggactgaaggcggggatgacccttcagagatgtcctgaccgtcacagtgggggccaagcccttattctctgacattgatcagttagtaggtacagatgccccaggtgaagcagt

SEQ ID NO: 387644 - DNA, 596 bp, Homo sapiens
ctttcttcttcatgttattttatctcccttgttctctttcttttgttattaccataatgaacagaaaaatgaaatagaatagcatcctagaagtgggtatgagcctaaagagtgttaatgtaattcctctgcttttgtagacaaggtaactgaggcacaggaacttcagctgtgcttcaagatactatctttggtgagagaggtgcttctggggtttcagtggttatgtttaaagcaaaggtgcagagtcccacaacccccatgcagggtcttcagtgcctgctggtgttgycaggatccaaacattcatatttttaaactattgtttaaatagtttaaatagtagattaggttctgcaggaaatgctgcgatagagattagtgtgcaatgggatcaacatctgtggaagggaaggaaagaagggcaggatttagcgaagaaagaagttgagttttgaggcagacttcctgaaggcttcaatggactgaaggcggggatgacccttcagagatgtcctgaccgtcacagtgggggccaagcccttattctctgacattgatcagttagtaggtacagatgccccaggtgaagcagt

SEQ ID NO: 387645 - DNA, 579 bp, Homo sapiens
gtgttaatgtaattcctctgcttttgtagacaaggtaactgaggcacaggaacttcagctgtgcttcaagatactatctttggtgagagaggtgcttctggggtttcagtggttatgtttaaagcaaaggtgcagagtcccacaacccccatgcagggtcttcagtgcctgctggtgttgtcaggatccaaacattcatatttttaaactattgtttaaatagtttaaatagtagattaggttctgcaggaaatgctgcgatagagattagtgtgcaatgggatcaacatctgtggaagggaaggaaagaagggcaggatttagcgaagaaagaagttgagttttgaggcagacttcctgaaggcttcaatggactgaaggcggggatgacccttcagagatgtcctgacygtcacagtgggggccaagcccttattctctgacattgatcagttagtaggtacagatgccccaggtgaagcagtccttttaggggctgacagctcaggcctttctggcactcgcaaaatcttcattcctgaagattcttcattcttgaaggtagatctggacagctta

SEQ ID NO: 387646 - DNA, 579 bp, Homo sapiens
gtgttaatgtaattcctctgcttttgtagacaaggtaactgaggcacaggaacttcagctgtgcttcaagatactatctttggtgagagaggtgcttctggggtttcagtggttatgtttaaagcaaaggtgcagagtcccacaacccccatgcagggtcttcagtgcctgctggtgttgtcaggatccaaacattcatatttttaaactattgtttaaatagtttaaatagtagattaggttctgcaggaaatgctgcgatagagattagtgtgcaatgggatcaacatctgtggaagggaaggaaagaagggcaggatttagcgaagaaagaagttgagttttgaggcagacttcctgaaggcttcaatggactgaaggcggggatgacccttcagagatgtcctgaccgtcacagtgggggccaagcccttattctctgacattgatcagttagtaggtacagatgycccaggtgaagcagtccttttaggggctgacagctcaggcctttctggcactcgcaaaatcttcattcctgaagattcttcattcttgaaggtagatctggacagctta

SEQ ID NO: 387647 - DNA, 549 bp, Homo sapiens
cagcagtagcagccacggtgactataactaaaaatcaccatgaagaatagtatgcagaaatgatatgattaggctattatgtgtgaagcatactaacaatttctattcatcagaataacataaaaattttaaactatgactaaatttactagygattatttctatctcctcacataacatcacaaatgtataaattcccagcacatacttggattcacacacgcatatacacacacacatacaaatttagaattagagtgacctaatttcttattgtaatttcatgaacatcttgccaatccaggctttatttatcacaaaggcaatgaaagaggaaagcgtcaaatatagtaaccttccagcatctaatgaccagtacactgtaaatccttcaagagcagagactatttcattagatttagctctcttaagacatttttataaagaattttttttaagaaaaaaattggtttacagaatcaatgaacaaaatgaactaaagaatggctaaaaagactttctgtatttagcttcctttgtttgtttctt

SEQ ID NO: 387648 - DNA, 404 bp, Homo sapiens
atgttatacaaaatagaaaatctttataccttagaagatcttcatggtgtcttggatagatcactgacaagtaatacttacgcagatcacttcctccccaaggcttcagcctgccaatggaaagaggtaagtgttgaacttactaaccaagttctcttctagttgcaaactccagaatatgatgatttatgcatgcaaagcacttacacttctacttattgcccgaacctttctctgaaaagaaaaagaaattgactggcatcaaaccaaaaagtctactgaytcaatgtttcagctgagcctagtgactcctgagcactgagccatcacttcaacaacatctccaactatcaaagaggacaactataaacagaagtcccaccaaaacgcacaggagcagaata

SEQ ID NO: 387649 - DNA, 585 bp, Homo sapiens
cagatttacaaagttttgaaggtacagcctattgttgtttactcaatgtattaaaatgtgagaacaaattacttaaaggtgaaggaccctcttgtctaatgatgtgaatagtcataacatacatgggagaaccaggttttcaaaaatgatatagtttcagaaacaccaccagcttgtgctaaagggacagagacagaacaaaatgaaagaaggctgtaagactcataaaattctacaagcaggaaaaggctgataaaactaatcagctacaaatatgtgctacctatcaagaaaaagaaaggataacttcaagaacaaaccctttggcccaaaagctggagccttgggtctaggatttagagccatggtgcagaggttggagcagtgcacacagaaaatattagtctcagacccagagcatggagcattgagtcactaagtgttattcataggccttgaaatgccgtgtttgycctgatgaacttcagaattgcttgggtctgatgaccttttccctccttccacttcccccttttagaatgtaaatgtctattactgttacatcatgatgcctgtatcatcatt

SEQ ID NO: 387650 - DNA, 529 bp, Homo sapiens
aggccgaggtgggcggatcatctaaggttgggagtttgagaccagcctgaccagcatggtgaaaccccgtctctactaaaaatacaaaaattagctgggtgtggtggcgcatgcctgtaatcccaactactcgggaggctgaggcaggagaattgctagaacccaggaggtggaggttgcagtgagcccagatcgtgccattgcactccagcctgggctggagcgaaactccatctcaaaaaaaaaaaaaaaaaaaatgacagtaatccagtagctacttggatgttcataatagagaaatggatgaataaactgttgtgtcatgttatgagaacatatgyatctactaaaaacaagtgacagcagttctttattgagatacgttttccaataaaaaaactcaacaaacttacatagtcatacaaaaaatgcagtctgttttcaccctttattaaatttaaatagagttcactcaggcagtggccaaatcttactcagcttctcaacacaatcagaatgtgtgtaaaat

SEQ ID NO: 387651 - DNA, 604 bp, Homo sapiens
aggttccttagcgtattctttatgtcagttaagtccaaaacgtgataagggaactaactatgtcagtggcaagtccagacaagaaggacagagatttgtgaattcctaggcgccaactggattctgacaaccagacaagtgagaacaggaggactcagctactttctttttcttgaggaccggaaatcagggaagatctctctaaaacagtagcattcaaatgcctgtgcagaatgcggactccttaaaggktgaagtgagttgctcagaaacatgcagctaggagatgggtaaaagaggtctcctgactcccattttggtgtttcttgtgttgatcaaactgcctctattagagccttcttggaatctccagaaaatactttgtacagagcatatatactgatcataataagaaatcatctggaactacattcttccattaaaaaaattttgaatggctgctatgtttaaggctctgtgttgggcacttaaagacccagcatctttctgttagccatctcttctttgggccaacagcctcctagtcagacaggtctaaaactccagcatcaactttgacacctgtattggctcattgtctgtc

SEQ ID NO: 387652 - DNA, 604 bp, Homo sapiens
aggttccttagcgtattctttatgtcagttaagtccaaaacgtgataagggaactaactatgtcagtggcaagtccagacaagaaggacagagatttgtgaattcctaggcgccaactggattctgacaaccagacaagtgagaacaggaggactcagctactttctttttcttgaggaccggaaatcagggaagatctctctaaaacagtagcattcaaatgcctgtgcagaatgcggactccttaaagggtgaagtgakttgctcagaaacatgcagctaggagatgggtaaaagaggtctcctgactcccattttggtgtttcttgtgttgatcaaactgcctctattagagccttcttggaatctccagaaaatactttgtacagagcatatatactgatcataataagaaatcatctggaactacattcttccattaaaaaaattttgaatggctgctatgtttaaggctctgtgttgggcacttaaagacccagcatctttctgttagccatctcttctttgggccaacagcctcctagtcagacaggtctaaaactccagcatcaactttgacacctgtattggctcattgtctgtc

SEQ ID NO: 387653 - DNA, 604 bp, Homo sapiens
aggttccttagcgtattctttatgtcagttaagtccaaaacgtgataagggaactaactatgtcagtggcaagtccagacaagaaggacagagatttgtgaattcctaggcgccaactggattctgacaaccagacaagtgagaacaggaggactcagctactttctttttcttgaggaccggaaatcagggaagatctctctaaaacagtagcattcaaatgcctgtgcagaatgcggactccttaaagggtgaagtgagttgctcagaaacatgcagctaggagatgggtaaaagaggtctcctgactcccattttggtgtttcttgtgttgatcaaactgcctctattagagccttcttggaatctccagaaaatactttgtacagagcatatatactgatcataataagaaatcatctggaactacattcttccattaaaaaaattttgaatggctgctrtgtttaaggctctgtgttgggcacttaaagacccagcatctttctgttagccatctcttctttgggccaacagcctcctagtcagacaggtctaaaactccagcatcaactttgacacctgtattggctcattgtctgtc

SEQ ID NO: 387654 - DNA, 562 bp, Homo sapiens
agtacatgtatgactactctgcaagatgtctggagaagcagcttctccagatgtgctgagctggaggtcagcatttaaggtgtcacccagatacctggtaattgaggatttgggttgtagggagctcatcaagggaatgtgtctgtgctcagtaccgagaactgagctatagaaatctccagggctggtggaggcaagagtaagagaagttggaaatgaagcagaagaagcaactgatgaggccacaagagaactagaaaaatgcgtaggaagcttaacaaggaayagacagaaaaaaaagaggacatcgcttaccccacccttcagtcagtctccctactcccactggcgactgatgacttgtcttgataaacccaatggacactttttttagatactttttttttttacccaccagcagcaattgacattaataatcattctccttcattttggaaaccactctcttcctttgtccatgatactcctctctgcttttccctttgtccttctgtctcctctcccaatgcttccgcctatcttctcccttagttgcccctca

SEQ ID NO: 387655 - DNA, 573 bp, Homo sapiens
aatctttttttgttgttcctttctttccttatcctttgcttccttactgcttatttttttctagatttggggatattttgtattccattttattttttatattccttctaaaattctcattaaaataccagtctaactctatgagatgtcatttaaaaatcttcggtgtctctttttcagtctgtccttcagtatacacatattaactcctatgtgtcatgtactgagtttggtgcaagtgacaaaaagacaagcaaaataaaagcaatttaacacttatagtccagagataaaagagaatttacaatacagtgcaataaatgctttgcttggtgagtgtaagatattactgagaacacatattaggagcaaaaaactcatttggtggggaccagagagggkttctttggagatagtgacatataagtgaaactttaaggatgaaaaagaattatccatgaaaagaggaggggtgaaagaatgtgtgaaggcctggaggtagtcagggtgtgtttgaagaactgaaagaacttcaagatgattaaagcatagaatgcaagaaggagaatgtgt

SEQ ID NO: 387656 - DNA, 548 bp, Homo sapiens
caaattgtccaaatcatttatctaagaggtagacaacccatgatatccctccttggtccaaaatgatacagcatagatgaggtttaagaaggctttccttatagctttgaaattcatagcagacctcaggctctccagattagcataatggtgaggtttctagactttctttgagctttattctaggccaagcttctctaacccgtggcccrtgggctgcatgcagcccaagatggctttgaatgtggcccaacacaaatttgttaacattatgagacttttgtagttttttttttttttctcatcagttaccattagtgttagtgtattttatttgtagcccaagacaattcttcttccaatgtagcccggggaagcccaaactggacacccgctgtactaggccacaacagtaccttttacatatagtaaaaattattaatcaactaatcttgtcccacaaatctcttacctttctacttttaaaaatacatagcacattaaaaaaaaattagttccctgaggaattgttagtttacatagccctc

SEQ ID NO: 387657 - DNA, 607 bp, Homo sapiens
gtaagttctccaaggttgggaatacaggtgcagtaataagaaccacattacaaaagtaagttaagccagaggatgttaagaaagtgaattagaccttgggacaatgagtttgccatttgtaacctgttagtggctggcagagacctcttggttggcctcactggactctgatttcctttacttggccttgttgccctctctctggtattcatttctcagctgggaaatgctgggttggtgacaacatgtggataaaaatccawttattcaccatttaaaaagtgtttgttgagtacatgctatataccaggcactattcagcaccagggggcacagtgtttgaataaagaaacaaaaataatgccttcatggactcacattcttgtgagagagacaggccaaaaacaacaacaacaaacaaacaaaacagagaaactcatacataatgtcagatagtaatagctgctatgaaaaaaaagtgaattatattaaaatagttgtagaaaaatgtttgaaagaacagggaaatactaaatcttacaacattttaccttacctataactaggcctgatagacatagattacatgtgaatatattcattcatt

SEQ ID NO: 387658 - DNA, 572 bp, Homo sapiens
ccttgcctgcaattctatttgattagatataaatgacaaagtaatttgggctcacatttgaacaaaaacctgtgtgcgtatgtgtgtgtgtgtttgggtgtatttgtggtaaaggatagtggtgggctgaaggggtaaaagagagatgttggggtggaaatcttctcaagctggtggtatcagcagattctcccaatccaagaagggatttgaaatactccctcaagcgcttgagagactccataatggaactggacaatttcccacggagatttcccacgaaacagggagtttccctgggaaacttctgtacaggccaggctaggtttcttcccaaatccagagaatcttggggctgcatggcaaataaaagcaaagagagtactggaaataggcatttgctttggtaaagcccagtactcatccagatttatttttcagttgtcatgctggtaaaactggttaatctaaaaaaaaataaaaaaaaaaatctctacaggagcctattctgtgtggggaggagcgacctagtgaaccaacagaaaaattwtatagatattcaactgttattg

SEQ ID NO: 387659 - DNA, 647 bp, Homo sapiens
catctttgaatagcttcttctttttctcaaggcaccaatttcaataacagttattactacccctcagtgtgcccgcttattgctggctcagtgatattatattaatatagcttgatgcactacataaatagagtaagaaaatgaggcaaaaccttgaaatttcccttcaatgcctgataagtttcagttctcacaggtgaagacaattgagacttcagagaaaacaaccaggaagaacttctgaatttgccttttaatatataccttatgtatgaattgcagccgacgacctcttgctttgcttgtcagattaacttcataaraaaaatcacttggaaatgcaaaacttcactgaacctttctttaaaaagtagcatattgccagagaattcttagccaagcatattgaagtgagaactgtggtttgttgtctgatatttaaaagtctacctgagctctttagtgcatggatactgaatattcaacaatgttctgaaatttccagtgttgctgcttgcttcagcactttcattctgaggatatgccagaattgcacattagcatttaaatggacagcgaagtcctgcagaaacctcatgatatatgtcacactggaaccggcttcaactccttcaggggctgcggag

SEQ ID NO: 387660 - DNA, 647 bp, Homo sapiens
catctttgaatagcttcttctttttctcaaggcaccaatttcaataacagttattactacccctcagtgtgcccgcttattgctggctcagtgatattatattaatatagcttgatgcactacataaatagagtaagaaaatgaggcaaaaccttgaaatttcccttcaatgcctgataagtttcagttctcacaggtgaagacaattgagacttcagagaaaacaaccaggaagaacttctgaatttgccttttaatatataccttatgtatgaattgcagccgacgacctcttgctttgcttgtcagattaacttcataagaaaaatcacttggaaatgcaaaacttcactgaacctttctttaaaaagtagcatattgccagagaattcttagccaagcatatkgaagtgagaactgtggtttgttgtctgatatttaaaagtctacctgagctctttagtgcatggatactgaatattcaacaatgttctgaaatttccagtgttgctgcttgcttcagcactttcattctgaggatatgccagaattgcacattagcatttaaatggacagcgaagtcctgcagaaacctcatgatatatgtcacactggaaccggcttcaactccttcaggggctgcggag

SEQ ID NO: 387661 - DNA, 378 bp, Homo sapiens
tctcaggtatttctttataacaatgcaagaatgaacaaatatagcatttttattaggctcatgtgatttcagacaaacaaggaacattagctatcacctagacaaatattcttgttttagatatgaggaaactgatacagtttaatttcagtaagaayggggggaaattcttttctatgatttgtatattatggaggcagtcacctttatattgagacactgtaacatatgatacacgagatgagatgatccttccgcactcctacaaagaatgcacaggtttgccacctaccatcgtgttatatggtatgaatccacgctagggcactatgtgtgaggaaaagtcggggaggatgaggctttacacctcagaaaagc

SEQ ID NO: 387662 - DNA, 630 bp, Homo sapiens
tatctttgtttctctgtatgttgtgtgtctgtttttctttggctgcttttaaggttgtttattgttagttgtcagaaacttgattatgatgtgacttgctgtggtgttctttatgtttattcttctttgggtttgttgagcgtcttggatctgtggtttaatagttttcagcaaatttgaaaaatcgttagccattctttcttcaaacagttttttctgtccctctctctctgatatcctctaggactccaattatgcctatattaggctactttatactgtctcactggtcattttcagtttaaaaaaatctttatgcttaattttggataattttgttgcaatgtcttaacgttgatatttttctttagtaaggcctaatctactgctaaaaccatacaataaagtttttcatctcagataatgcattttttaatctccagaagttctatttgartcctttttatatctgccacttctctccttatcatgattatgttctactctaccattttcaacatgtggatcacatgtatactagccatttaaatattcttgtctgctggtttcatcatacctgggtctgttttcttcattgatttttctcctggttaattatccttttttgct

SEQ ID NO: 387663 - DNA, 610 bp, Homo sapiens
ccatcacgccagaaggacagcatttcagactctgggaatttccctctggagggacttgaaagaatctgcaagctgctaagattaaaagagatgacaggtggtaagaaaactggtggtgaaaacacaccactcattttagtgtattggctttgaagagaagatcattagaatgtgaaaaacaataggtagaaattattctctagaatctgatgtatggagcccatcaaaggcagaaaagaagaagcctggggagaggggatattgctcatactaaagacagggcaaacctgtgggggaacagatgtaggagagccgggggcaataggtcagcactagaggcacaacagccttgctgatgggctccccttcctttgaaagaatgcaaaaagcggggagtgaaagaataagaaacmtgtattattgagctggacactctgcatggtactgtacgtggatttcatcaactggtcattacaagcaccgtgagttggatggtagtcctcattttatagaagtctttaaacaaatctattttatgcctaaataacttattaatatgccattctgctaataagtggcagacccagtctttttgaccccgaacccatga

SEQ ID NO: 387664 - DNA, 561 bp, Homo sapiens
gataacaacttaacgctgttgaataaacaacctaacaagcaaaaagaaaactaataaagactctgtgccttaactatgtccccaatttttccacattttgttgtttctatttacatttattgtactatgtcttgaaaagttgtagwtattattttgaattggttcgtcctttagtccttctatgtaagagtagcttaaacaccactgttacggtgttataatgttctgtgtttttctgtatatttgctattaccaatgagtttttttatcttcagatgatttctttttgatcatcaaaatcctttttctttctattgaagtactccctttagcatttcttgtaggacagatctggtgttgaaatccctcagcctttgattgtctggaacagtgtttatttctccttcatgtttgaagattatttttgctggatatgctattctactgtaaacatggcataaaggaatgctggcttttgttgaatgcttttactgggtctattgagatgatcatgtaatttttgtttttaattctgtttatgtggtgtatcatatttattga

SEQ ID NO: 387665 - DNA, 258 bp, Homo sapiens
gttaggtttggtcgtttaatcccagacttcttggaggctttgttcatattttcttattcttttttctttgtctttgttagattgggttaattcaaagaccttgtcttcgagctctgaagttctttctttggcttgttcaatgatatttcagagacttgccacagcattttgcrtttctataagtgtgtccattgtttcctgaagttttgaatgttttttgtttatgctatttatttaatcaaatatttctcccttcac

SEQ ID NO: 387666 - DNA, 552 bp, Homo sapiens
aagaagtccaaacaacactacgtaagaaggcatatgcatctaaaggttaaaagtcaagagaggaatcacttttaatttccattatgaaatatactgactggctgggtatgctggctcacgcctgtaatcccagcactttgggaggtcacagggagcagatcatttgaggtcaggagttttgagaccagcctggccaacacggcaaaaccccatctctactaaaaatacaaaaaattagccaggtgtggcggctcgtgcctgtggtcctagatacttggaaggctgaggcatgagaattayttgaaccccggaggcagaggttgcagtgagccaagatagtgccactgcaccctagcctgagtgacagaggaagactacgccaaaaaaaaaaagtatgtgtgtgtgtgtgtgtgtgtgtgtgtgtatacacacgctgatttggttaaatgcctagctttaccaataaagatatgtgagccaatgaagctatcaaactgataacacaaccacattgaaaggaatgaaaaattaatccaaataattattttattt

SEQ ID NO: 387667 - DNA, 620 bp, Homo sapiens
ggacaccaataggaggcttaaatatactgaactggaagaagttgtggtagggaattaatacggaaagaaaaaacttctgaaagggtttctgatgaaagaatttacaaactttgctgactagaaacagaaagaagagagaagaaatggttacaacttaattataggtgacatcaatattaatgagacatttaataattaacatacctattttacatgtataaagtatgtacctgatcaaaggaatgctctacttactaatatggtggtaacacagagcctgagaacatcaacctcagtgattttcaacctggaatgtgkgtaacaggctgttgcccctgttacccaccaaaatcccaccaaaatccccttctctcccagtgagaatcattgcatgcaatgataactattactgctgggaatgtgctgcatatgtggtccctatagtggcagaacactgatttaagtgatatcatttatattcagcaaagcttattgctccaactaagttttaaaacattttagtagcctaagagtaaaaattagagcaacaaaaataatcaaaaccaaaagtacaacacaaaacacagatggattgaagttgaggcttgaaggatgggtaa

SEQ ID NO: 387668 - DNA, 620 bp, Homo sapiens
ggacaccaataggaggcttaaatatactgaactggaagaagttgtggtagggaattaatacggaaagaaaaaacttctgaaagggtttctgatgaaagaatttacaaactttgctgactagaaacagaaagaagagagaagaaatggttacaacttaattataggtgacatcaatattaatgagacatttaataattaacatacctattttacatgtataaagtatgtacctgatcaaaggaatgctctacttactaatatggtggtaacacagagcctgagaacatcaacctcagtgattttcaacctggaatgtgtgtaacaggctgttgcccctgttacccaccaaaatcccaccaaaatccccttctctcccagtgagaatcattgcatgcaatgataactattactgctgggaatgtgctgcatatgtggwccctatagtggcagaacactgatttaagtgatatcatttatattcagcaaagcttattgctccaactaagttttaaaacattttagtagcctaagagtaaaaattagagcaacaaaaataatcaaaaccaaaagtacaacacaaaacacagatggattgaagttgaggcttgaaggatgggtaa

SEQ ID NO: 387669 - DNA, 648 bp, Homo sapiens
ttcagccataaaaaagaatgaaatccagtcagttgcaacgacatggatggaagtgaaggatattaagtgatataagacaggcacggaaagacaaatatcccatgtactcactcatatgtgggagctaaaaaataaataaataatctcatggatatagagagtaaaataacaattactagaggctgggaaaggaagtggagagaagggataaagagaggttggtcaatgtacaaaaatacaattagaaggaataagttctsgtgttcagtagcacaacacagtgactaaacagtaatgtattgtatatttcaaaataactacaagggtagtattagaatgttactaactcaaagaaacaaacgcttaaggcgatggacatcccaacaaccctgatttgatcattatacactgtatgcttatatcacaatatcacatgtaccccataaagatgtgcaactattacatatccataaaatttaaaattaaaaaaagatacaattctattgcaagaataaggaagaaaataaaaaaactaaacctatatccaccatcatagaaaattaatgttaatttaagcttgaaaaatcaccaaatagcaatacagaattcatatttagaaatataaataaaactatagaataatcagct

SEQ ID NO: 387670 - DNA, 501 bp, Homo sapiens
tattcaaaggtcattctttgttctgaaaatcagcatcaactaccagcccagtgacatactagctgctgaaagggtgccacacaaagaacaagaaggtactatctcacagttatagagttcacatccaaaaaggggcaaacagatgaatgaagactggagcttataaataatcctagggccaggcaaggacaccacagggcttgcaggtaagcaggaaaaacatctctaggctgagaatgtcagagcagcactgaaccttagacaccatcytgtccatgcctctcattttatagtcaggctcaaacaagtaaaataactggctcgagaccagagtctgtccccaaactcaggtcgttcaccccaagggaaggagcacttggtgttaccttccctgcagtttagtgagtcatgcccaggtcaacagagacccactcacattaacaccagcagaaagccaaggctacccgtgccccacccataggagtggggaaaaagaacatt

SEQ ID NO: 387671 - DNA, 501 bp, Homo sapiens
tattcaaaggtcattctttgttctgaaaatcagcatcaactaccagcccagtgacatactagctgctgaaagggtgccacacaaagaacaagaaggtactatctcacagttatagagttcacatccaaaaaggggcaaacagatgaatgaagactggagcttataaataatcctagggccaggcaaggacaccacagggcttgcaggtaagcaggaaaaacatctctaggctgagaatgtcagagcagcactgaaccttagacaccatcttgtccatgcctctcattttatagtcaggctcaaacaagtaaaataaytggctcgagaccagagtctgtccccaaactcaggtcgttcaccccaagggaaggagcacttggtgttaccttccctgcagtttagtgagtcatgcccaggtcaacagagacccactcacattaacaccagcagaaagccaaggctacccgtgccccacccataggagtggggaaaaagaacatt

SEQ ID NO: 387672 - DNA, 501 bp, Homo sapiens
tattcaaaggtcattctttgttctgaaaatcagcatcaactaccagcccagtgacatactagctgctgaaagggtgccacacaaagaacaagaaggtactatctcacagttatagagttcacatccaaaaaggggcaaacagatgaatgaagactggagcttataaataatcctagggccaggcaaggacaccacagggcttgcaggtaagcaggaaaaacatctctaggctgagaatgtcagagcagcactgaaccttagacaccatcttgtccatgcctctcattttatagtcaggctcaaacaagtaaaataactggctcgagaccagagtctgtcccmaaactcaggtcgttcaccccaagggaaggagcacttggtgttaccttccctgcagtttagtgagtcatgcccaggtcaacagagacccactcacattaacaccagcagaaagccaaggctacccgtgccccacccataggagtggggaaaaagaacatt

SEQ ID NO: 387673 - DNA, 501 bp, Homo sapiens
tattcaaaggtcattctttgttctgaaaatcagcatcaactaccagcccagtgacatactagctgctgaaagggtgccacacaaagaacaagaaggtactatctcacagttatagagttcacatccaaaaaggggcaaacagatgaatgaagactggagcttataaataatcctagggccaggcaaggacaccacagggcttgcaggtaagcaggaaaaacatctctaggctgagaatgtcagagcagcactgaaccttagacaccatcttgtccatgcctctcattttatagtcaggctcaaacaagtaaaataactggctcgagaccagagtctgtccccaaactcaggtcrttcaccccaagggaaggagcacttggtgttaccttccctgcagtttagtgagtcatgcccaggtcaacagagacccactcacattaacaccagcagaaagccaaggctacccgtgccccacccataggagtggggaaaaagaacatt

SEQ ID NO: 387674 - DNA, 447 bp, Homo sapiens
ttttttttagtaccaaccatgtaccaatcgctactcttaaggcacttggaatatatcagtgaataaaacaaagatccctgtcctcatagagcttggagtctggtgaggggaaaggggaagacaacacaagtcagggaagcaactggcatgttaggaaatggtgttatggaaatagaaaaagcagggcagggtgaagagagtgagaaatgtggggatggtggaggggtgtaatctgcagtaaatagggtgctcagggaaggcctagttgagaactgagatttgaacaaaagactagggggtgtgggaacgtccggatggaagtagtaactacagcaaaggccaatatgtacctggtatgttccaggaactayggcccttgcagctttggcaaaaggctggggctgagcaggagaggggagtgcagatcacaatgggccttttaggata

SEQ ID NO: 387675 - DNA, 464 bp, Homo sapiens
cacagccctggatgtaagtagataaagcataaaagaagtaaaggtcattagatatgagggggttaaggagctgtgaagccagactgacaagtggcttatccacatggactttgaggtcacccaggatgatggcaggacacagatgatggtgagccaagtaccaagattttcagtgatagatggtagatgataatgctagagggagtggatggtagataacaatgatgaagtaggctggaccacagccaaatgggagtggtctcagaaaacaatattttgttttgaaaaaggcagaaacataatggtttggttgtggcagtagggagctgtgataatgcaaatccatctttttctacctgtggtatgaggggcataggagatgaacaacctcttatctacattgcttgaaagtggctcatcatttytgggataaacccagactaagaaggagtcataaattcttc

SEQ ID NO: 387676 - DNA, 522 bp, Homo sapiens
agaataaaaagacataagctgcttgtattgagataagaatgcagagtttttgatttcagtactcaaactcccttcacctcccactgtggtgtttaaattacctctgcggaatcatcatttgggctccactgttttggttaaattgaaggataatccattttgcctcaatccttkttgaaaatcttaattaacctgcttttctgccttagataactatactttcttatgcttaataaagtttttattcagcagttatagattttatagatcctgtgtccttctgaccattgtagagtactaaagatgaggaagatttagaatactgataactttttctattgaccttagaatataccttaaaagaattcatatataatgattcacttttcatatgcattgttttttcttttgaaaactaatagagaaaaatattgtgttgattagctcatctgacaaataaacacatgtagaatgtgtcaagtgcacagatatctgactcagagctgtattctcagttgcctt

SEQ ID NO: 387677 - DNA, 658 bp, Homo sapiens
tttgctttgtctttgtcttttagtagcagaagataagtggataattgcatcaagtatatacttaggtaatttattaatggctgctgcttactatgctgtacccccattaccacacaggccccctttcttgttccakgtacagtgaccacatacacctctgctcacccctttttcttgccataatgtgcagaccccaatttagtacactctggctttaaagtctaattatatttcctttcaaaatttcagtttgttccaagtattataatcacttcctctttcatgtctctgccaacttctctatttagtattccttgtttcctgttcagaccaaatccttaatgaggagttggtttttccctgctccatgcttgtcatagtttttcatgtgcaccattaagagtatcttctgaatccaacttttatatatgcacaacatgcatgtagcaattttatacttgctgttatttccagtggttatgtgtgtctgattatgtacaggcaattaaaagaagttacttgttcgccttttgcaatttgtaaaatatctaaatctgtcttttgttacagtaagaaaaatttgtttatttctttttccttaacatctccctgttttttaggttttatggcaattggatatattccgacgaagcttgcg

SEQ ID NO: 387678 - DNA, 602 bp, Homo sapiens
tcagcactgtttttagcaactgaactggcttccttctatcacattaacactattaaaacttgataaagagttctttagagttaaaagtatttgaaacattagcagaataaaacttgtagaaagcaatttaatcaaaacactttcatttaataatgtctaaaaaggctttaacacacatacaayggattttacctgctaagagttggtttgcgtttttcctcagcacaatttagggtttagggcttgttttacagataagaaaatgaaagattcaagagcacaaacagttaagaattggaaaaaaattcagtactctagtatttctgcctttatatatacttacaagtcttgaaaatgcttttgccactgaatattttccaacaatttttttacattatttaaaattaagtgttattttacttttttcttttgactgtgaagtgaatttcaacaaggaagttcaacttgaaaacactgtgccctgaatatttttgtcatctttacaagaaaagtgctctccggggcaacttcctttgggtctagtatttcagccaatatgctatgagcaaaagacactgtgttactttactattgtatttctt

SEQ ID NO: 387679 - DNA, 602 bp, Homo sapiens
tcagcactgtttttagcaactgaactggcttccttctatcacattaacactattaaaacttgataaagagttctttagagttaaaagtatttgaaacattagcagaataaaacttgtagaaagcaatttaatcaaaacactttcatttaataatgtctaaaaaggctttaacacacatacaatggattttacctgctaagagttggtttgcgtttttcctcagcacaatttagggtttagggcttgttttacagataagaaaatgaaagattcaagagcacaaacagttaagaattggaaaaaaattcagtactctagtatttctgcctttatatatacttacaagtcttgaaaatgcttttgccactgaatattttccaacaatttttttacattatttaaaattaagtgttattttacttttttcttttgactgtgaagtgaatttcaacaaggaagttcaacttgaaaacactgtgccctgaatatttttgkcatctttacaagaaaagtgctctccggggcaacttcctttgggtctagtatttcagccaatatgctatgagcaaaagacactgtgttactttactattgtatttctt

SEQ ID NO: 387680 - DNA, 602 bp, Homo sapiens
tcagcactgtttttagcaactgaactggcttccttctatcacattaacactattaaaacttgataaagagttctttagagttaaaagtatttgaaacattagcagaataaaacttgtagaaagcaatttaatcaaaacactttcatttaataatgtctaaaaaggctttaacacacatacaatggattttacctgctaagagttggtttgcgtttttcctcagcacaatttagggtttagggcttgttttacagataagaaaatgaaagattcaagagcacaaacagttaagaattggaaaaaaattcagtactctagtatttctgcctttatatatacttacaagtcttgaaaatgcttttgccactgaatattttccaacaatttttttacattatttaaaattaagtgttattttacttttttcttttgactgtgaagtgaatttcaacaaggaagttcaacttgaaaacactgtgccctgaatatttttgtcatctttacaagaaaagtgctytccggggcaacttcctttgggtctagtatttcagccaatatgctatgagcaaaagacactgtgttactttactattgtatttctt

SEQ ID NO: 387681 - DNA, 564 bp, Homo sapiens
cttacaagaagctgaatgacttttgagtgagagagctacaaatgaaaagtctggcactaaaaataagaaaaacttcttttagcagcccatatgcaaagtcttccatggtgaatttctaagtttatgttcctattacttgaaatctaatgagggataaaytgtaggaaaagaaggcctccaaaataatggtataaataagttgttatttagcaaaatttgcatttattcattcacttatcaaggactgtgtgagcttaccaaaataaacaagattaacagccatgacagtatgaagtttacagtcatgtgagggagacagacaaggaaataagtgattataaaatgaacccatgactttaagatgggacaagtgtgggatatttggaaacacacaggagaagctaggctcaaccttatggaaaagcttcagaatgaaagtggcttctaagctcaaatctaaagggaaaagaacaggagttagataggcttaatgtaaaactcaaatagcacagaataaaggaaggcactccatctcctaaataaaattgtatcatgaaaattggt

SEQ ID NO: 387682 - DNA, 599 bp, Homo sapiens
cacgtgttggagaggtaacagggcatctgatcatatagggtcttacaggtcattgtaagaacattggctttttcctctgagtgaaaatggaagccattgcagcagtttgagcagataagcgatgtgatcagatttagatttttaaaggatccttctggctgctgtgtagaaaaagagactaaaggggtggagtagggaaggtagaagttcttgggctttttagagagttgtaacagtaatccaggaaaaagataatggtggctcatactaaggtgatagcagtggaagtgatgggaagtggttggattctggagttatatgtgtatgtaagtactatatttttaacttcttgttatggaaaatctcaaatacatacagaagtacagagatgaatataatgaattcctgtgttcctattcagtgaacctatcatatgttattatgtgtcaggcactttgcaacagctgcaagaattgccaacttgtatcaatcttcctccccaaccctagattggggagaaagcaatttgaagcaaawcccagataccatattgcatgtgtaaatatttcagcttctactactccaactgcttctgactg

SEQ ID NO: 387683 - DNA, 540 bp, Homo sapiens
agatcttctgtccaatttgtattttggactgtgygccaagaataatgctcaatcctttttaaagatccttttggcttctactccttcatatacataagtctgaaaggtgttaacaaacagaagaatttatctttaaggtttacatctaagttaagaaaaagtagtattatagttttatactatatgagtttatactatttttatattatatattcatatatattatatgagtatgagtttatacaattttttcttgtacttgatagcaagatttatacagatatgggatacagccattttaaaacacatgttggtttgtagtcatttatattttcagttaaaataggcattgattatttgacatatataagttgtctttagtaaataggcatcagaaaatagctatacaatatttttaaaatcagtaagatttatgagaaaagaagtagtcagtttactgaagatctggctcagcagtgacaaaaattattgttttgtagtaatttttgccttttgaaaatagctataaatttgacaact

SEQ ID NO: 387684 - DNA, 540 bp, Homo sapiens
agatcttctgtccaatttgtattttggactgtgcgccaagaataatgctcaatcctttttaaagatccttttggcttctactccttcatayacataagtctgaaaggtgttaacaaacagaagaatttatctttaaggtttacatctaagttaagaaaaagtagtattatagttttatactatatgagtttatactatttttatattatatattcatatatattatatgagtatgagtttatacaattttttcttgtacttgatagcaagatttatacagatatgggatacagccattttaaaacacatgttggtttgtagtcatttatattttcagttaaaataggcattgattatttgacatatataagttgtctttagtaaataggcatcagaaaatagctatacaatatttttaaaatcagtaagatttatgagaaaagaagtagtcagtttactgaagatctggctcagcagtgacaaaaattattgttttgtagtaatttttgccttttgaaaatagctataaatttgacaact

SEQ ID NO: 387685 - DNA, 536 bp, Homo sapiens
ggacaccagttctgctggattacagctgtactattataaccttaactrcctccttaaaggctccatctccacatacaaccacattgggggttagggattcaacaaatgaaattgtgggggcgggggggacacagttcaggtcttaacaggtgggtatcaaagccagaacccacaaaatgtggggcttttcttgttttgtgctgtgaagccaatacacaaaattgaaagtaagcatcaaacagtgcagactttagttgatggccatggacttgagaagtgggagtttggctcacacatcaacttctcagctcatgagagctgggaagtcacagatttagggcatctttaatgaaaggcttgtgcattaaaagcaagggggtaaatatgtcatttctgggactgggcaaagaacctcttgaaaacagagtgctgccttctttttgtccttttatgatttctttgagtcattgtcatcatgattgtcaactgtcatggcactggtgggagtgtcatttagcatagaaattagattataa

SEQ ID NO: 387686 - DNA, 582 bp, Homo sapiens
atgtgcttgataacagaactttaaaatctataaagcaaaaatactatcaaaataaacgaagaaataaactcccatttaaagtaaaaaatttcaaaactttaaatgatagaacaataacaaaaaataatcaataattagagaaaatttgaacaacactatcaactaactttacctgtttaatatttagggaatattgcactcaatgacaccagaatacccattcttttcaagtgcacatagaatattcacaaagctagatttcactccaagccataaaacaagtattaacaaatttaaggaactgaaatcttataaattgtgctatctatctgctgtgatattcaccaagaaatcaacaacaaaagatatttgaaaatcttataaatatttggaaattatacattacattttcaaacagctcaataactcatggatcraagaaaaaatcacaaggtaaaattataaaacatttagaactaaagaaagtggaataattcaaaatttgcaggaagcagtttagctagtgctttgaggaaaattcatagcatgtaatgtttatattcaaaagtaattgtctaaaat

SEQ ID NO: 387687 - DNA, 569 bp, Homo sapiens
agaagtgactacagtttgttaaagctaattagcctgcagtctaataaaatccattttttttttttgcttgcatgcaaggaataaattcagagaaagatgaaatgttggttaaacaagagggagaagaaattcaacttttgctaggcttgggttccctctgaaggattctgaggagggtcaaaggaaagcaagaaaagattggttgctgtttttaaagagggaattgaagacacagggattaaccagagattggctgctgtcttgtggcgagagtgactaaacaattggatatctcctataattaatgaaacaagcaaagcagatctgggacttcactggagagaaaccagtaatcactcaaagtggtgtcttcatgacattttacaactgcagcatgaccttgggagatacagtgttgttaaatttgcagctgactttatctgtgtctgtcttcccatcctgattaatggcaggttgctttttgcttttayagtcaaagccgattttcactcttcagtcctatgtagtttttgactctttcacaactaaaggaaaaatcagtaagatgg

SEQ ID NO: 387688 - DNA, 539 bp, Homo sapiens
ctactcacttaactaagtggtctttttgttaatcccctacaactaaatctctgtaatacccaatgtatttttccataggccacaagtgccagcagctgcacagatacttctctgtttagccagttctatttagcataacttccacaagagaatttaaagtctgttgtgtaaccatagcctcttcagtagaatctgttatgggacctatcatgaggcttacatttctaacattgcttcttttacttcaaaccatggaaaaaggacttgaaaaaagatgccttatagaggagtgaaggcctcctagcaatgctctttttaacccaagatgtgggttaagaggaatgagccaatattttgtttctgactgattatgaggcaacatatgtaccattaaagtttaacatctgcrttggaccttcatcttttatctaacaaagtatatgtttatccatgtacaaggctggctgcaaagtcttcacaaataaaagtatatcccataagtgcacataacagtccccttttcacttctattgttcata

SEQ ID NO: 387689 - DNA, 565 bp, Homo sapiens
ctactcacttaactaagtggtctttttgttaatcccctacaactaaatctctgtaatacccaatgtatttttccataggccacaagtgccagcagctgcacagatacttctctgtttagccagttctatttagcataacttccacaagagaatttaaagtctgttgtgtaaccatagcctcttcagtagaatctgttatgggacctatcatgaggcttacatttctaacattgcttcttttacttcaaaccatggaaaaaggacttgaaaaaagatgccttatagaggagtgaaggcctcctagcaatgctctttttaacccaagatgtgggttaagaggaatgagccaatattttgtttctgactgattatgaggcaacatatgtaccattaaagtttaacatctgcgttggaccttcatcttttatctaacaaagtatatgtttatccatgtacaaggctggctgcaaagtcttcacaaataaaagtatatcccataagtgcacataacagtccccttttcacttctwttgttcatagaggcataatcaagggagaaaaattc

SEQ ID NO: 387690 - DNA, 549 bp, Homo sapiens
tgttttgctgtagtgtggattacaaggactatctttctctgatgttctcagaagatcccatcttcagkttttatattgtaaaggggttgattgtcctcagtgaaacataaaatgttttctttgcctggtgaaaatatactgtagcataaaaatctactattataacatcagcccttttgcatgggaaagtttttatacaaccagaaaacatgcattaatatggatttagcaaacctaacattgattataaactattttagcaatttataagtcaccacaccaatatgtatttaatttggattattttatcttttctatgacaagtcatagaatgcacaacctttaataacaagagctttaaggactctgggaggacaaggtggctgtcctggttcttcatgagtcgatgcttaacattggacttatgtcttcttgaataccagttgtttctccaatttaggtgcatagcagtgataactaatgggttatcatagttaatttgacttaggccatggagtttattcaaattgtatatctaaacaattttag

SEQ ID NO: 387691 - DNA, 385 bp, Homo sapiens
tatcacacacacaacacatacacatatataactatgcagacagacagaagaagatccagtagttctaaattttttcatttaccagtttctaagtttcttaattggattactggctttagggtggagtccttggaagaaatggctaggaaaacatgcagtttctagggcctawtgagcaggaacatttggaaggcaaaacagattttgagagggatctgtccacttttaattcttggagttccatgaggaaaacagtgtgtgtgtgtgtgtgtgtgtgtgtgtgtgtgtgttgtcttgtttttgtttgtttgcttgtttgttttttgaaaatggattagtggtgccttctctgtttttccaaggaatcccaggatatcagaagtta

SEQ ID NO: 387692 - DNA, 593 bp, Homo sapiens
ggtaaaagtcacacagatatcaaaccagaaaggactcattcactaagctgggactcaaatctgggccaccactgtgaaaggacaaaaccttagctactgagttacagcactcagcagtctccattgcccttcccaggagtctagaatcattaattctgagcttgcaaagcctttyaactgctcaagataatttttagagtaactatgacatgaaccctaaaatttctattctctggaaggtggagtccaagagaaagtactgccacacggttacaaggtcaagctcccaaggacataaaacaagatggagttctcatccagctgttgttgttgttgttgtttttcaatccacttcagtgtgttcttgttcatttggaacattccattgtaagttatcttcagtgagatttcatcatttctgtaagactttgctgcctctgaggcctaatgtataagccagagggaactcagtttttcagaaattaaggatctcatttttactaaaatattggctttactttcaggttcccttgatgaacttagccaatgattttttcctacctaagtgcacaagaaaaatgaaacaaatgggt

SEQ ID NO: 387693 - DNA, 419 bp, Homo sapiens
caaggtcaagctcccaaggacataaaacaagatggagttctcatccagctgttgttgttgttgttgtttttcaatccacttcagtgtrttcttgttcatttggaacattccattgtaagttatcttcagtgagatttcatcatttctgtaagactttgctgcctctgaggcctaatgtataagccagagggaactcagtttttcagaaattaaggatctcatttttactaaaatattggctttactttcaggttcccttgatgaacttagccaatgattttttcctacctaagtgcacaagaaaaatgaaacaaatgggtagaacacaaaaatccctgtgaatttccagaagctaaattttacaacctctgcaatattaccagttactaccagtttctttctgacccaatcagatgtaa

SEQ ID NO: 387694 - DNA, 501 bp, Homo sapiens
acttcttttgcaacatgaatccttttttgatataggcatgaaactaaagcaaatagtggaagaataattgctaccatagagaaacattttcagagaaatacaaaaacaaaaacaaaatcagacagaaattacaatgtatgtcataaaattgtatcagtatgcctgcctctcctaccacccctttcacctcctccacctctttcacctctgccacccctgagacagcaagaccaactcctcgtcttcctcctgctcaacctattcaatagtgacaaggatgaagacctttatgatgatctatttccactaaatgaatagtaagtatactttctcttccttataattttcttaataacatttcattcctttagcttgcttattrtaataatacagcttataatacatataacatacaaaatgtgtattaattgatttttaatgttcttagtaagacttccagtcaacagcaggctgttagtagttaaatttttggagagtcaa

SEQ ID NO: 387695 - DNA, 543 bp, Homo sapiens
caatgtgcaggtttttgggtgaacttaagttttcaactttaatgtacttttccaggcctatttttaaagtcttattttatttttaattgacacataaataatccacatattcattgggtatagtatgatgtcttgatacatttaaacattgtgaaatagatatatttctacagtgaagagaccaaagtagtaatttttaaaaattacccacaaagaaaatctcagacccaggtgacatcaccacagaatgctgccaaacatttagaaaagaattaatgccaatttttcataaacttttccaaaaaatagaagaggagatgcaacttcccagcttattttacagggtcaatactgccctgatatgaaattcaaagacatcacatgacaaccacaagcaaaatctcttataaaaatgaacacaaaaagcctcaacaaaatgctgctaaaccaaatacagcaacctatagaaagaattatacctcatgacaaagtgaaattcattcaaggratgcaaggttggtttacaatctgcaaattaattat

SEQ ID NO: 387696 - DNA, 563 bp, Homo sapiens
gcaaagcaaagaccatagattttaactgtttttgttctcatgttttcctgaaagtcattttcaaagaactgtgtagttgctttcattataacacttacaggctgaccagcccagccaactacactgttctggagttgccttttttaaatcaggaagtagatttctgaccaaggttgaaattagaagatttctatgctcttattcttcaggatttaatgaagtatgcctctgaaacacttgtgtaaatcactcaacaaaagatgtagggtgctctccctccttctgggtatatagttcaaccttaggccaatttaccttaggaacaggcttctgatattgcccctattaggacctgaatattagcattaagctgagccatttctgggtcatctgtagggggaccaggaacaggttgtggccacctgttccctctgtggggagagttttctcatggaagccatctggcctgtctaataacagcagtataatcacagatggaaagtacacytcttagtagccagtcaaggttcctatgagtaggattgtgaatggctactagcctc

SEQ ID NO: 387697 - DNA, 510 bp, Homo sapiens
gctttgattcacctcatttgtttttccaaaacgtatacatttattcatttaatatcctctacacacacacacacacacgtttttcatctaaagtacttttttattttacccccaaaataaacaattgtacaattttcatgtttgccaagttagactaacagttgagcatccaaataagtaatgaaaaaatgtgctttaaaattggaaattttgacttcctacaacttctgaaattaatggaagatagtttccaaattcccaacagatgttaatttttcaaatttgtagataagaagtctgaattcctgggaactaccaggaaaacatagtttaggttcacctaacatttcrtaggattcatttttaaatgaattcttctcttcatacttgctgatatcttatgtggggtgttacttttatgataacttcctcagatccacaagatgtgtcttcaaattgatcttctctatggcatttcaatactcagaaaaacttataaaatttgtaaca

SEQ ID NO: 387698 - DNA, 543 bp, Homo sapiens
atgctcacctatagtcctagctacttgggagcctgaagggggaggattgcttgagcccaggaggttgaggctgccatgagctgtgatcataccactatactccagcctgggagagacaacgaaaccctgtctaaaaacaaacaaagaaattaacaaataaacacacacacacaactacaaggggcaaacaaaatccttctatgggctaaatttggcctataagaaactaggttagaatctctgtgaatgcaatcactactttacctatcataagaaatctaaagtgatgagaaaaacaaagaattaggaaggaaacccaggaaaaggttcaggccaaagcattacatgcaaggagcttctcatatattttcaytacgtgggaaagggtacagcatagggtcctctgagaatgtggacagcttgtgtaaaccaccttggcctaattgtacctatttaattagttctgtgtgtaggaagatagtaactatcagtgataatgacaatttcttctcaacttcaactttttttggttaattcagttac

SEQ ID NO: 387699 - DNA, 636 bp, Homo sapiens
ttcacttaacctgaacaaccgagggggaaaaaaacatgagtagagacttggacctgtggaaaaacatcaaaagacctactgttcttaacatcagagtcccaaaaggagaggagaaaacatctgaatctgatagagtgaagaaataatgtctgaaaattttcaaaagacgtgaagtacagacacatcagactaaaattctgtaaactaaagacaaagaagaaaaaaatcttacaagcaaccagaaagaaatggcacatggcctacagcagaacttaaatttgatgatattggatttcttatcagaaatcatggtgtagaaacagaaatttttcaaatgttgaaaaaaaaagaatatgagcgtgaattccgtattcaaaactattcaggaaagaaggggaaatagagatgttctcagataaagaaattatgagaattacttaaatgaataaaaagggagctctccaaacagaaagtaaatgctggcataagaaggaatataactttggaaagaaaaggaaaaaacataaacagataaaaacaggggtagatatgcattattctkcttcctaagagtttcttatatcatgtctaatgacaagataaattatatctgcttggtgctcaacgtatacagag

SEQ ID NO: 387700 - DNA, 660 bp, Homo sapiens
atataagatgtgagatttaggttaaggttaattttttttagctatgtatttccaatgcctccagtaccacttgtttaaaagctactctattaaatttccttgtacctttatcaaaatatcagttttgtaggtgtctttttctgagttatctaatttgatctatgtgtcaaaaactccaccaatactacattctctttattactgtggcaatatgttaagcttcaawaacaatgagagtaatttcttccagtttttaaaaaattgttttacctattctagttctttgaatttctacttaaattataaaataatcttgcctatatatacaaaacccttgctggtattttgatagaaattgtgctaagcctctgtatcaatttagtaaaagttgtcatgtttactatgctgagttttcctatctatgaatatggtatgtatcgccaatcttctttgagttctttcatagtcctatagcattcagcataaaaattctgtgcctggttatgtttaccccaagcattttactttttgtgcaattaaaaatagtgtaatttttatttcatttaatttttcatgtgatcatttgtactatatagaaatacaattgatttttgtatattgattgttgtatcctgtggtcttactgaacttgcttattca

SEQ ID NO: 387701 - DNA, 562 bp, Homo sapiens
ggcaggagagtattggaaaaggaatccagaagaccctctccactactcaggcagccactattcatctatttttaaagtaccccattttcaggccgggtgtggtggctcatgcctgtaatcccagcactttgggaggcgaggcgggggtggatcacaaggtcaggagaccagcctggccaacatggcgaagccccgtctctactaaaaatacaaaaattagccgggtggtgtggtgggcgcctgtaatcccagctcctcaggaggctgaggcaggagaattgcttgaaaccaggaggcggaggttgcagtgagcccagatcacgccactgcactccagcctgrgcaacagagcgactctgtctccaaaaaagaaaaaaagtaccccatgttcagcccctgtgccaaatttgcctaggttttccagctgacaatgaatactgggagttaaaacgcagagtattactatagttaattttctagggttctcttatgaaaagtatatgtaaacacattcatttaaaaatccttggaactcaatgtggaactttaaacattttgcaaa

SEQ ID NO: 387702 - DNA, 562 bp, Homo sapiens
ggcaggagagtattggaaaaggaatccagaagaccctctccactactcaggcagccactattcatctatttttaaagtaccccattttcaggccgggtgtggtggctcatgcctgtaatcccagcactttgggaggcgaggcgggggtggatcacaaggtcaggagaccagcctggccaacatggcgaagccccgtctctactaaaaatacaaaaattagccgggtggtgtggtgggcgcctgtaatcccagctcctcaggaggctgaggcaggagaattgcttgaaaccaggaggcggaggttgcagtgagcccagatcacgccactgcactccagcctgagcaacagagcgactctgtmtccaaaaaagaaaaaaagtaccccatgttcagcccctgtgccaaatttgcctaggttttccagctgacaatgaatactgggagttaaaacgcagagtattactatagttaattttctagggttctcttatgaaaagtatatgtaaacacattcatttaaaaatccttggaactcaatgtggaactttaaacattttgcaaa

SEQ ID NO: 387703 - DNA, 635 bp, Homo sapiens
agcatttgatacaggtgtggcaaaaatagaggagcagagaaaaggcatgcaagatatccttgagctttctgagtgaaaagtaagcaagcaatactttaaggggcaaacagggcacctcccaagcaaaaggaagagcgtgcagacagatgccacagacacagaataaagcagaaaacttgctccccaatggctacagcacaggtgactaagaagaaaatagtgtcagatgaaactgatgaaacggcagcaacacggaagactactaacgcgtgttttaaaacctttggctctcagtaatgagtaccaaccaatgaaaggtctgaaatccaacagcaggcacagtgatcaaacatgctgtattatgaaaaatcaagcaggccacaacatagaggaaggtctgaagctggaggaagatgatgatgaggaagacgagtaagtagaccaacaagtattgcaagcaagaaaaatctgaattaaggcagtaatgtaggaaaagaaagaaggaagagtwggttcaaagctgtgacaaagcagataccagtaacaccaatcaggagagggaattccagacacaagacagagatgggaacacaggtccgttttgaacctgagtgcaattaaaaatcagcatttag

SEQ ID NO: 387704 - DNA, 515 bp, Homo sapiens
agttcaaaagtaccttctggagaaactaagttacttaggttttgttttgaagcagtttgaaaatcacattagaaataaatacagtaatccacctggacaacatgtcggtatcccatctccacaaaaaatacaaaaattaatcgggtggtggtgcacgcctgaggtcccagctactcggaggccgaggcgggaggatggtttgggcctgggaggtggaggctgcagagagcgrtgattgcgctactgcactccagcctggataagagggagaccccgtctaaaaaaaaaaaaaagaagaaagacaaagaaataaaaacagtaagcgattcccacataaacgcactgctttgaggcactgaaaaataatcagcatatttcttcagttttgctaaagcctaagcaatgttattgcgcacttggggaatagaaagagtttaggggtgtgcaaaaatctcgggaaaataaaactttttcgaagggaaccaacgggttccatcccctaaatactgcacgag

SEQ ID NO: 387705 - DNA, 515 bp, Homo sapiens
agttcaaaagtaccttctggagaaactaagttacttaggttttgttttgaagcagtttgaaaatcacattagaaataaatacagtaatccacctggacaacatgtcggtatcccatctccacaaaaaatacaaaaattaatcgggtggtggtgcacgcctgaggtcccagctactcggaggccgaggcgggaggatggtttgggcctgggaggtggaggctgcagagagcgatgattgcgctactgcactccagcctggataagagggagaccccgtctaaaaaaaaaaaaaagaagaaagacaaagaaataaaaacaktaagcgattcccacataaacgcactgctttgaggcactgaaaaataatcagcatatttcttcagttttgctaaagcctaagcaatgttattgcgcacttggggaatagaaagagtttaggggtgtgcaaaaatctcgggaaaataaaactttttcgaagggaaccaacgggttccatcccctaaatactgcacgag

SEQ ID NO: 387706 - DNA, 596 bp, Homo sapiens
attgttcccatggatatcccttacagcaacatcctcaaccttgaatgtttgtaagaattccccagagagcatgtgaaaacagtctcccggacaccatccccacagattcagattcataagtcagggcagggcctatgaatttgcatttcaagtgagcccacagggttgtctgtgctgccagggtggtgaccacccttcgagtgacagagctgtctggcaagcaccctggttagagaccccagagagtgtcacatcaatagcctccccggtggtctgcctccctcagtactccctgcttctgcctctctaatttgttggctgctagaatgacctttctaacaccataatgtatccttatcttgtttaaaataatgttgactgtggcccccagctaattctacaatagctcaacatgacaccatcaatgatgtagtatcgtaggccaaatttgttttgttttgattacacttttcaactgtgccagcacaggcacatacacatctcctctccaggaattcctttttctcctgttagagaaaatctgaagatgatcagggacatgmcaagtcatatcggaaggtcagtgaggtgacatt

SEQ ID NO: 387707 - DNA, 414 bp, Homo sapiens
aaatgacctcctaaattggcagcctcctaaaccataccgcttttcaaaaatacaattccaaattaaaattctgtgtcaggaagaaaacattaaccgaattgcaagcgttcttatgagcctcatttaactcaggtgcatgaagttgagaaggcaaatttacataaagcttgttttgagtttctggcgggggcggggggagtgggatctatatatttataactgtgaaaaggctgtagctaaaatttagatataaaattacaaaattaaaattcagcattygctctagggcagtggggaggaagaacgagaaagctagctaaaattgagacagcataacagtatgtggattgcgtgccatgcaaacttattaggtttccttgattcaaagagggaaacctaagtggcaacttcact

SEQ ID NO: 387708 - DNA, 597 bp, Homo sapiens
gtagaatatttcttatcccaggagaggaggggtagtgagtggggaactcaagaagagattataagattttctactgcattctattgttatatttttttwaaaaatttcagcctgggcaacataacatgaccccatctctacaaaacttaaaaatttagccaggtgttgcggtgcatatctgtagtcctagctactcaggaggctaagacaggaagatcacttgagcccacccaggagttcaaggttgcagttagctatgactgcatcactgcactcagcctgggtgacagagtaagaccctgtctctaaaaaacctaaataaataatttttaaaaatgtaacgagcaaatatagcaaacatgcaccatggattactttcagttctataaatgtgtcatgctctctctttctcttccttcccccatatcatacctttgtattagccagggttcaaccacgaagaaaacccagtaagagatatatatagtaaagaactcttacatagaactatcatatgacccagcaattttattcttaggtatacacccacaggaattgaaagcaaggacttacacaaatatttataattcagtgttc

SEQ ID NO: 387709 - DNA, 597 bp, Homo sapiens
gtagaatatttcttatcccaggagaggaggggtagtgagtggggaactcaagaagagattataagattttctactgcattctattgttatattttttttaaaaatttcagcctgggcaacataacatgaccccatctctacaaaacttaaaaatttagccaggtgttgcggtgcatatctgtagtcctagctactcaggaggctaagacaggaagatcacttgagcccacccaggagttcaaggttgcagttagctatgactgcatcactgcactcagcctgggtgacagagtaagaccctgtctctaaaaaacctaaataaataatttttaaaaatgtaacgagcaaatatagcaaacatgcaccatggattactttcagttcyataaatgtgtcatgctctctctttctcttccttcccccatatcatacctttgtattagccagggttcaaccacgaagaaaacccagtaagagatatatatagtaaagaactcttacatagaactatcatatgacccagcaattttattcttaggtatacacccacaggaattgaaagcaaggacttacacaaatatttataattcagtgttc

SEQ ID NO: 387710 - DNA, 605 bp, Homo sapiens
ttgccattttaaaggagaaactgaggcaaatataatgattaaaccaggagattcctgagcaacattacaacatattcctgtttcatttgccttctatgcatcaaaatatcagtgcaatgttgtatgctattaggcaatacagaatcccagcactgtattatttcctgacattttagttgagcaaatacccaaaggaccttcccaggtggatgtaacttggctctgggcaattagtgtccaaagccacattaatgttgtcttcctgaatctgcaacttgacagtctgataaacaatagcactgagagagktgtgaacttccactatttatctcaatgggttgttaactttgaaacctaattatgatcacttaaatgccaacactcttaatcatttcactgctgatcactgtaccagaaacgtccagccacagtaatgtgcttcttcctggggctgctggactcaatggccatgtcctgatgtgtttttcagaatatcctcttgttagtaatgtcaacctcagactggctaaatgggtatattcagcacttgagttcttggttaagcaaagcacctatgattgtgctttaaacaaagaaaaggaatg

SEQ ID NO: 387711 - DNA, 545 bp, Homo sapiens
tcacttaaatgccaacactcttaatcatttcactgctgatcactgtaccagaaacgtccagccacagtaatgtgcttcttcctggggctgctggactcaatggccatgtcctgatgtgtttttcagaatatcctcttgttagtaatgtcaacctcagactggctaaatgggtatattcagcacttgagttcttggttaagcaaagcacctatgattgtgctttaaacaaagaaaaggaatgaatatctgttgcttcattttgtttatttctttttaaawactgggcttgatgacttttcttcatgagaatctcttaagtccttacagaaatcgaaatctttcagaataccagagtcatcactgggaataatgtaaaataagagcagagaggatgattttccaaaagtcactggcatgaatttacagtataattgaacttgagaaatttccaatatcatacacttcaactatctaaagcgggaaatattttatacagtctgaccaaaaccatgcagcctctctctttttttttttttttttttttt

SEQ ID NO: 387712 - DNA, 637 bp, Homo sapiens
  misc_feature (1)...(637): n = A,T,C or G
taaaatgtccatacttcccacagcattctacagactcaatgcaatctccatcaaaatacaatgacattgtgcacagatatagaaaaaaaatcctaaaaattcatttggaaccacaaaagacccagaatagccaaagctatcctgagcatgaagaacaaaactgaagaaatcacattacctgacttcaaattatactacacagttatagtaaccaaaacagcatgctactgacatcaaaacagacacatagaccaatgaaacaggaaacagaatccaaaaataaaaccttacatcaacagtgaactcctttttgacaaaggtgccaagaacttacactggggaaaggacagtctgtttaataaatgatgctgggaaaactggatatccaaatgcaaaagaatgaaactaggctgggcacggtggctcacgcctgtaatcccagcactttgggaggccgaggcaggcagatcatctgagmtcacaagctggagactagcttgactaacagtttgtccaacaaaccccatctctactaaaaatacaaaattaactgggcatggtggctcatgtctgcaatcccagctactctggacgctgaggcaggagaattgcttgannnnnnnnnnnnnnnnnnnnn

SEQ ID NO: 387713 - DNA, 605 bp, Homo sapiens
acaatttaccacagctattctggaagagcctgcaggtggaaggagctgcagtgtttctcatcagaaatgttaaatgaaaaaaaggatcagagatgaaccaaataagcaatgtccctgaagatccgaaacttagagatttcaaagtgttatggtgaaataataatagtagttgggtagaacatgaactgtagaataaaattggtgaaagggaatcagaaaaaaaaacagacataacagttgtttcttccagtttttagattgcctttcayagacaaagacttcttcctgtagatgtatcggtggcattagttgggtagggcgctttagttttgattctgggtatgtgcagtagggtagttgttgtatgatttctttggctgtcagtagtgtcaatggtgtctgtgatttcctcagtggcttaggctgaagttgttagtggaggctatggtgagactttgcttaggatggggaggccaggtgggccagtcctggggcccctgtaatggcagtggtgagctaagcatgcctgtccttgggtccccctggtggtgtacatgggcactggtattagtgggtctaggaagaccaattcttgggcctccagg

SEQ ID NO: 387714 - DNA, 605 bp, Homo sapiens
acaatttaccacagctattctggaagagcctgcaggtggaaggagctgcagtgtttctcatcagaaatgttaaatgaaaaaaaggatcagagatgaaccaaataagcaatgtccctgaagatccgaaacttagagatttcaaagtgttatggtgaaataataatagtagttgggtagaacatgaactgtagaataaaattggtgaaagggaatcagaaaaaaaaacagacataacagttgtttcttccagtttttagattgcctttcatagacaaagacttcttcctgtagatgtatcggtggcattagttgggtagggcgctttagttttgattctgggtatgtgcagtagggtagttgttgtatgatttctttggctgtcagtagtgtcaatggtgtctgtgatttcctcagtggcttaggctgaagttgttagtggaggctatggtgagactttgcttaggatggggaggccaggtgggccagtcctggggcccctgtaatggcagtggtgagctaagcrtgcctgtccttgggtccccctggtggtgtacatgggcactggtattagtgggtctaggaagaccaattcttgggcctccagg

SEQ ID NO: 387715 - DNA, 521 bp, Homo sapiens
gcattacccctcccctaaccccatgctgcacagcttatagctccaaaagagacccctttcttccacttgagacgagaacacaaaaaagtggggaggattttgtcttgcatcttggagaccaactcagccatagcaagatagggcaccaatcagagtcatgagagcacctttccaggtcctagctcccagatgacatttctaggcataccctgaacctgaacagaaccccctgcctgaagagaaggaaccagtcctggcagcatttgtcacctgctaactaaagagcccttgggccctaaataaccagcaatgattcctaggtactacwtcaaggatcttgagtgagactctaagacttgctggcttcaggtgagagtcagcacattcccagctgtggtggctgcagggtaggactcctgcttgagaaaagcagagagaaaagtaaaggagactttgtctcgtaccttaggtatcagcttggctacagcagggtagagtaccaagcaggttcttggggtccc

SEQ ID NO: 387716 - DNA, 513 bp, Homo sapiens
atttctgcctcagggaagatggagtwgatatacttttccttattcctcctgcaaaatacaactaaaagccctggatgttatacgtaaaacaaacataagaagactctaaaagatgggggggaaagggcaggtccactagggacctcaggacccaaggggcaacatggtgatgactttcttgggttttctttttgcgtcatccagtcaagatttgtagctgaaggagccagctactgtgtaacaccaatgggaacacagatgcacacacacaccgatccccaacagaaattccctcttgctaactaaaggcccaagaaaagcacagcagaagaagacagaaaaatcttggagagtaggtgcactactacagtcaaataccaccccaaccctaccagcaagggccaagagacaaggctagacttcaaactatacccttcaaacatcaatcaaaagaaagcaggagaggctatactaatatttgataatatagccttcacagcaaagataattact

SEQ ID NO: 387717 - DNA, 630 bp, Homo sapiens
tattttgtgtgtgtgtctgactcacttctcttgacatgatgtcctccagtttcatccattttcttgtaaatggcagaatctccttttttaaggctgaataatgttctgttgtatacgtttcatgattttttaactcattcgtccattgatatataccttaamtgtttagcataaaaaagaggaagtctcaagagaaataaaaatatattgaactgaaagaaaaggaaaatacaacataacatttataggatacagctaaagcaatgtggcaagagaaatttacagcaccaaatgcttagatcagaaaagaggaaatgtctcaaatcaataacttaagttctcatctaaagattaaaaagagaacagaataaacccacagaatcataagaaaagaaataataaaatgcaaaaattagcaaaattgaaaacaatagagaaaatcaattaaacaaaaaagttttttcttcaaaaagattaataaaattgacaaacctctagcaatactgacaaagagaaaaagagaggagacaatttaccaatatcaggaattaaacaagggatatcactatacacctgcagatatccaaaaaataataagcgaatactataaactctgcacagataaatttg

SEQ ID NO: 387718 - DNA, 571 bp, Homo sapiens
aaattgagttaaccacatggccaacaattcaattatgctatgcaatgaaacttcaataaaaattttagatatcaaagcttgggtgaactttcctggttagcaacactctgaatattgtcacacaccagagctggaagcagtaacatgatgaaggaatccacagggagaagataactggaagctatgcatttttttaatctggttctgagttgtatttttttgctatgttaaaattataatcataagtatagcactttggggcattctatgagtctttctagtgaattattaaacctgagggtagccatacgaacctttgaatatgtakctagttggtcagaaggaagggtggccccagagacccccaaacttgcaactggcatctgaaataagagcagtcttgtgcagggctgtgcccttaacattgattttcataaacgttttattgttatggtttgaatatgtcccccaaattaatgtgttagaaacataattgtttcacgtgtccgtgtgaagagatcaccaaacaggctttggtgtgagcaacaaagctgtttatttcacctgggtg

SEQ ID NO: 387719 - DNA, 571 bp, Homo sapiens
aaattgagttaaccacatggccaacaattcaattatgctatgcaatgaaacttcaataaaaattttagatatcaaagcttgggtgaactttcctggttagcaacactctgaatattgtcacacaccagagctggaagcagtaacatgatgaaggaatccacagggagaagataactggaagctatgcatttttttaatctggttctgagttgtatttttttgctatgttaaaattataatcataagtatagcactttggggcattctatgagtctttctagtgaattattaaacctgagggtagccatacgaacctttgaatatgtatctagttggtcagaagkaagggtggccccagagacccccaaacttgcaactggcatctgaaataagagcagtcttgtgcagggctgtgcccttaacattgattttcataaacgttttattgttatggtttgaatatgtcccccaaattaatgtgttagaaacataattgtttcacgtgtccgtgtgaagagatcaccaaacaggctttggtgtgagcaacaaagctgtttatttcacctgggtg

SEQ ID NO: 387720 - DNA, 620 bp, Homo sapiens
tgaggattcaaatctcttctaattctgtcaaatatataattgtaaaaatttattttccattaaaacttaatattagaatttatatataataattctcaggtgtcatgacttttaaagacttttgagataacttcctagattaattgaaatttggcattaatatatagatctctgctcagaaaaaaaatgggtacattcctaaagtacaaagcatccaatttatggagttatttttaccccagttttatgtcattttagcaccataaacaagggtctctaagttaaagactaatgggaataatagctaataagttgtattaaagtctttttaatacatttccyagatattgagaaattaaatgatttgcaaaatcagagggtttccaatgcttgcattttacaaaattatatgaggtcattatgaggtcatcagctgccaaataattaaaaatacttttgattatgaattactatattgttctggcatacaacttagagggacttcaaataactgaatgatagtcctatctcaaaacttcttccattccaccaacttttgccagcaagttttctcagcacccacccctaggttaagaaagaaagggaaaaagagagtgagg

SEQ ID NO: 387721 - DNA, 565 bp, Homo sapiens
tgtctttcaacatgccctatactagtcattttcctagaaaagaagggtaatagagttagaaaattcaaaaggtagaatggtaatagaggtaatttagttccatacccatcctctccaaatgttggaactgaaattcaggaaggttctgaagttttccccaagcttacgcagctattaatgttatatctgggtcttgaactctcttcctgattagagatcacaccatcccttttcccttgtgggaactgcccactcctcatttttacttcatgtggttctgatggaaataaccacacccctagctccaaaggtrggtatgtgaccaaaatctggcagagtagttcatccccctgctggttcaggaatggacttgtgacccaagttaggtcaatcagagtcacatggagactctgattggagcccatgggcagaggagttctactcatgccaaggctactcaaaggggagggcatgagcctggaggtttccggtcccaccctggggagaccgtgcctgagaaggaagcacacattgaataaagaaagagggagagggagatactgac

SEQ ID NO: 387722 - DNA, 565 bp, Homo sapiens
tgtctttcaacatgccctatactagtcattttcctagaaaagaagggtaatagagttagaaaattcaaaaggtagaatggtaatagaggtaatttagttccatacccatcctctccaaatgttggaactgaaattcaggaaggttctgaagttttccccaagcttacgcagctattaatgttatatctgggtcttgaactctcttcctgattagagatcacaccatcccttttcccttgtgggaactgcccactcctcatttttacttcatgtggttctgatggaaataaccacacccctagctccaaaggtaggtatgtgaccaaaatctggcagagtagttcatccccctgctggttcaggaatggacttgtgacccaagttaggtcaatcagagtcacatggagactctgattggagcccatgggcagaggagttctaytcatgccaaggctactcaaaggggagggcatgagcctggaggtttccggtcccaccctggggagaccgtgcctgagaaggaagcacacattgaataaagaaagagggagagggagatactgac

SEQ ID NO: 387723 - DNA, 591 bp, Homo sapiens
acaaccacaaatggctaatgagacgcagaactaaggatcaaatccaggtttcccgactctcagcgtcttttgctcttacagagtcttgtaattaaagttttaattttattttaaacccctgcatacaattcaatcagtttgggsctgtggaggtcctttggttttctgcctgaccttatttttctgtttctgactcctccaagccactgcattccatggggccacttgcttggggaaggggattgttcccagctcagctgcagctctaaaatgtctccttttcccttgaccgtttgttatcttgcttgtggacttcctatttcccctatccagaagagaagagtgagcttagctgggtccaggaaaagtatgtagatggttgtaaattaatttccatggtttcatcattattaatcttgtctgggtacatgattagaggccaatgacatactaattagtcactgtaattagcaaatgtcagagagggtccaggggctccatgggttagacacaaggggttgcctttgatagtggggtcattcaaggccagcctgcctcctgtcacatccatctttatttggctcattatcc

SEQ ID NO: 387724 - DNA, 479 bp, Homo sapiens
ccttccaaatggtaataaatcccctcggaccccaacacacttgtaatttacaacttggctaaaatgaacattatttcaagctaagcgtattctcagaggtgcaggagaatgtggcagctttcctgctgacagaggagtttctttttaaatgtcatgcattcactttcattacttccaartaattgctggaaaagatcggccgctggacagggctgcccactttacatcaccatgagtcaatatcatcatcatcaaaggagcccctgggagctggtttcagcctggggagggctcagccctcagttgcttgttccctgttggtctcttggctgtgcagataaaggtgcctccatcattctcctgggacagcttcaggtaagatggaatgttgtctatagatagcataacctatcatcactgccatcatcaaatatcattctgctgcatccattggatcataatgccgttgcctgcccagt

SEQ ID NO: 387725 - DNA, 646 bp, Homo sapiens
accctcctctcttcaataattagtttttatgcatccagattttttatacctgagctctcacatttacctcaagcgaggcacatgagtatccaactctccataaggttcccaatgcaagactttttctgtatcccaggtggcaaggcagagaaagaaaatccccgaaccaagctttccccaaaggcctggtggggctgggaggcagagacagcccaggaagaggtcttcacagggaagtggagagagcaaaggaggaagaaaaacaaacacagttttaattaaacacagtgtatctaaatcagggaggtatgttcagagagcaaggaagggtgaaatggaatttctagaagaaaacaactttcttcaccttcttagtttcattaacattgaaatgaaccccctgaggagmaggagccaggccctactgcaggggaggagagaaagctgccctgcgcctctatggggctttgtactctttggcactggatccaccaacacagggcacccctcctggagccagctcttgggggcatctgccctgcctgtgcatctgggggattcattctggccataggcagccgagaagtgggacctgtgtggtgggtgtcagggatgggcagggactcttatctgggcccatccagct

SEQ ID NO: 387726 - DNA, 466 bp, Homo sapiens
gaggccaaaatcctttaaaaagtcaacagatttgcttacacaataattgtatacttttatacatcagaagacatcattggcaaaatagacaaaaaacaaactgggaaaatatgtattgagcatgttaggcaaagatttataatatataaagtactcctacaaatcaataagaaaaagtaaatagkgaccaaattatgttaactggtgattcacaaaaaaatacaaatttttggtaaatgttaaaagaagatattttgcaatagaaaggaatgtatattcaatctttcaaatcccacttttcacaccttggaaacaatggtagcacgtgttttgagaatgtgtggaaattatgctatttgtgggtgtattagtctgttctcacactataaagaaatacctgagagtgggtaattcataaagaaaagaggtttaattggctcatggttctttgggctgtacaggaagc

SEQ ID NO: 387727 - DNA, 599 bp, Homo sapiens
cttatcttttctccagacccaccaaatcttatcagtcatgccatckgacttgaaatccatggttcataatctgtatcaagtctggatataattgagattattttagtacagttctctgcatgagggtcttcttgaaccaaagaaccacaaactaaaaagataagttatccgttccccaaacaccccgcatgcaatagtgagatagggacaaaataattaaaatagacatatttaaaaggagaggaacatgaggtgtgtagcattcactggtccatagcaattctgaaatccagctgagcacaggtcaggttctctgttttcaaactaggaaattttccttgatttgggctgaattttgcaatccaagaatgattccctagtctactgttcttttcagctcttggctctaaggttttcaatgggtgaaaatgaaagtggcttatcccactttaactcataatgaaccagtaaaaattgtgtcttcctgtaccaccactttgagctcagctggtttagacatctcagttctcaagggataatgtctccacaagagatcacaaatataataccactaaacaggaagctgagcccagaacctg

SEQ ID NO: 387728 - DNA, 599 bp, Homo sapiens
cttatcttttctccagacccaccaaatcttatcagtcatgccatctgacttgaaatccatggttcataatctgtatcaagtctggatataattgagattattttagtacagttctctgcatgagggtcttcttgaaccaaagaacyacaaactaaaaagataagttatccgttccccaaacaccccgcatgcaatagtgagatagggacaaaataattaaaatagacatatttaaaaggagaggaacatgaggtgtgtagcattcactggtccatagcaattctgaaatccagctgagcacaggtcaggttctctgttttcaaactaggaaattttccttgatttgggctgaattttgcaatccaagaatgattccctagtctactgttcttttcagctcttggctctaaggttttcaatgggtgaaaatgaaagtggcttatcccactttaactcataatgaaccagtaaaaattgtgtcttcctgtaccaccactttgagctcagctggtttagacatctcagttctcaagggataatgtctccacaagagatcacaaatataataccactaaacaggaagctgagcccagaacctg

SEQ ID NO: 387729 - DNA, 500 bp, Homo sapiens
tcctaaactcactgtcccattaaatattcctcccttagaaccatctaccaacaagatgatatggcttgtacagtattctatttttatttgttttaagagtgattatgctaaagggctgcttcaaacttttgcagattgaagaaagaggattactttccttgcctgtgaatagggttggtttctctagaagagcagaatggaagcaccttcaccattctataccaatggcatttctgagtggacaagctgaaattcagtaatgtctccaagcactgtggctctcctttcaaaatgaacttcgaggctgcyaaccctgcatgacatagcctacaggccactccactccctccctgttctcatcaaacaagagaagttgcacaagctggaggggcagctggatcacagtttatgctgcccccaggatgcatctttcatcctaatggtgcttattcagctgtggggatgcattggtatctagctgatttttgaaaaagtgcaaa

SEQ ID NO: 387730 - DNA, 587 bp, Homo sapiens
agaccgtgctacattttggtccatcaaccaaggtggaagctaygtttctttaaatcatcttccctatgcggtgctagactagaattggccaaaagaggaacctgtatgaggtttggaataacattaagtgaaactctttgtggtcagatacgtgacagatgcagagacagtagacagttttatatcatgctcactctcttctccatatctcactcttcctgatttctggcccaactgacagtcagcatcaattgccacatagttaaggccatcttaaaccttccagtgtttgctatttctctctcaggtgagaccaaccaaataactacctgtaagagtgcagacccatgagcttgagagcaaataaaaatagtctttgttttagtacacaaaccactaagttttggaatggctttttatgaagcagtaggtaaataatatgcttggtattaatagtggcagatgctagtaaatagatatttcaaatagataaaattaatatttaaatacatttgaccctgggaaacacaggtttgaacaatgtgaattcatttatacgcagatttttttcaataaaaattacatca

SEQ ID NO: 387731 - DNA, 587 bp, Homo sapiens
agaccgtgctacattttggtccatcaaccaaggtggaagctacgtttctttaaatcatcttccctatgcggtgctagactagaattggccaaaagaggaacctgtatgaggtttggaataacattaagtgaaactctttgtggtcagatacgtgacagatgcagagacagtagacagttttatatcatgctcactctcttctccatatctcactcttcctgatttctggcccaactgacagtcagcatcaattgccacatagttaaggccatcttaaaccttccagtgtttgctatttctctctcaggtgagaccaacmaaataactacctgtaagagtgcagacccatgagcttgagagcaaataaaaatagtctttgttttagtacacaaaccactaagttttggaatggctttttatgaagcagtaggtaaataatatgcttggtattaatagtggcagatgctagtaaatagatatttcaaatagataaaattaatatttaaatacatttgaccctgggaaacacaggtttgaacaatgtgaattcatttatacgcagatttttttcaataaaaattacatca

SEQ ID NO: 387732 - DNA, 588 bp, Homo sapiens
agaccgtgctacattttggtccatcaaccaaggtggaagctacgtttctttaaatcatcttccctatgcggtgctagactagaattggccaaaagaggaacctgtatgaggtttggaataacattaagtgaaactctttgtggtcagatacgtgacagatgcagagacagtagacagttttatatcatgctcactctcttctccatatctcactcttcctgatttctggcccaactgacagtcagcatcaattgccacatagttaaggccatcttaaaccttccagtgtttgctatttctctctcaggtgagaccaaccaaataaytacctgtaagagtgcagacccatgagcttgagagcaaataaaaatagtctttgttttagtacacaaaccactaagttttggaatggctttttatgaagcagtaggtaaataatatgcttggtattaatagtggcagatgctagtaaatagatatttcaaatagataaaattaatatttaaatacatttgaccctgggaaacacaggtttgaacaatgtgaattcatttatacgcagatttttttcaataaaaattacatcaa

SEQ ID NO: 387733 - DNA, 566 bp, Homo sapiens
tgaaatctcatgcaatttccatcatttctctattcactttcacatataaaaaagttcatagtctctctctcaaccaacttaaagctcttctccactccacagtgcatacatgccttaggctgggaacctgagcgaggaaggacattgtggtttcaaggcaggtttcttcactctcacttgcttcttcaatccacattgtccctcactttctaactgttgtttgtaactctctaaagagattaaagggcacggtggctttgtaacatgtcagcttagctaagcgggaactcaattcccagagtttcatctccatgaggttccaggttgaagaggctattagaaaartgtacacgagatataaaagaccatagtgaagaaacagccatgcttagcaccttcaggtttggtgtagggtgctagacactggcagtgcatgcatgtggcagctcactgatctaccagcttgtgttgctggtatggggcagcacctaggcttacagctcctacattgcattgctgtgtggggcaggacctgggcttacagctcttagagtgtgttgctactt

SEQ ID NO: 387734 - DNA, 518 bp, Homo sapiens
tgattgctgtccttgttgaggctcatattcttcatgttttgtagttttctcatccccaaataaaataaaatgtatcaaagtctagtgtttaccagaagacctcaaggatgaatgttccttgaccctacttccttctggtcaaatcttctgtttcaaggtgtaacagatatgggaggggggcagaaaatgctgggtagagaagggtggggtccccagtgagggctccacacaggtaaacgtgtgccatggtggtttgctgcacctatcaacccgtcacctaggcattaagccccacatggatcagccatttgtaatcatggacccaattttcacatcaaaggtggaataaaggattctggaaacayattcccctgaaagttggaggaagagcaaaaccaatgagggtatcacatcgaggccaagctttgcccttggatacacaactgcaccatgactgaaatcctgagagtggagtccaatttgagtgaaggcagatccatcaggctcttcaggccctg

SEQ ID NO: 387735 - DNA, 364 bp, Homo sapiens
tcttccttcatcttccaccatgattgtgaggcttccccagccatgtgaaactgtgagtccattaaaccccttttcctttataaattacccagctgcgggtatgtcattatcarcagcatgagaacaaactaatacagacccagacaggaggcaccatactggctacccatgactttctcaaacatgtttgacacggttagtaccacatttgaaataaaattagggcaatgttaaaaaaaaaaaaaagagcacacaaatgaaatccaaatttctagcttcttctgaactgtaaaaatatttggcaagtccatgtctgcattcttagaagacaacaattggatgtgtcttcatagaccatgtggcc

SEQ ID NO: 387736 - DNA, 607 bp, Homo sapiens
aaaaataggacattagagcaggcagaggacagaggggtacaacagagcaccgcctttcagcatggcttctgggcagagtgtgagctaggaagagccacagagataaaagattaggttatggaggcccttctatgctagggtcaagtgtttgaactttatccaccaggcaagcaggctggcgaaggtttttaaacatgagagtgacatgatcaaattcgtgtttcagagaaatgagtctgtataaagcattgaagtaatgtctttaagttcaaatacctcccaggctcaggcaggtaacaaaaaagaagggtttaaaacaatagtaaagaggagagattgtgatgaactggacaaaaatccgatgcctgagctaaaaaaaaaaaaaaaaaaaaaaaaccaaaatggcaagatttacccagttgttgctcggtgtggaccagtgaggtcagatcattcaattttttagcataaacaggaaatatggatttttacrtaaaatcatctgatttttcaatttttaaatcttattccaaagagtgttatggacattaaaaaaataagtaaaatgtatctgtggactgtaaaacaaaccatcgttttgtcactg

SEQ ID NO: 387737 - DNA, 618 bp, Homo sapiens
tttacaaggaggaaatttaagttacattcatgccaggcagtttactgatctatttacaaaaggtgtattgagttcccactatgtgtcagatacttttcatatattacttcatgggatcctagcctagcaggtaaggttgagtgttatgatgaacacctgacagatgaggaagctgagcctttgtgakatggggcattaatcctggtcttgcctcctcactggtgaatggatggatcatttttgataatatgtgaaaagttgcttggttgctgctaggccctgggaaaatgcaaggatttattgccatttttagattttccaaataaggaaccagagcagagagaagaatggcaagggaattgtggcctctacttggcccagtcagttggagtgttagtaccacaggactccaaagctcatcctactgcttcttcactgcagctggctccaattgtattaagtgctttacaggcacttttattgggtgggccttggctagtgtggttttcatttgcagctgaaatgcttgaggcttagaggtggtccatccagacccttctgctttgtataggctgaattgcatcctcaaaaaagatacactgaagtcctaacccttgt

SEQ ID NO: 387738 - DNA, 589 bp, Homo sapiens
gttctaacacattctcctatttattttcttcatggcttgtaacactccctgaaatgatcctatgtatttatttgcttatttacagtaggccttctccaccttggcactgttgacattttggaccagacaattctttgtggttggggctgtcctgtgagttgtagaaagtttcacagcatctttgggctctacccactagatgccagcagcactcctcccaggcataacaataaaatatgtttccagacttcgacaaatgttccctggggggaagaattacactgtttgagaggcactgattttaggcctgagtcttgaagcagggrttgtctatcttgttctcttttgtctcccccgcgcctggaatagtgtgcttacacagtgtcactaagtaaatgtacgttggcaagtagactgaagagctactgcagagctaagtttgctgttttgtaggaactcagaagagaagtaccccatctctggttggaaaacactccaggagaggcagcttcaaggagatggcatgtggatggaaatgtttagcaagagcaagctttatcctggtcaggggcaggcagtgggcattcta

SEQ ID NO: 387739 - DNA, 563 bp, Homo sapiens
gttctgtgatcctgagcaagtttctttcagtcttatttatttattttgttttacctatacaatggcaggggagtgtaactggccacccctcaaacttagtgccataaaagatcaacaacgatcagttattttgtacacaattattttcttttgggcagggctcaatggacatggcttgtttctgcttctcatggcaacagaaatagtcatgagattggagctggaggatgcatttccaaggtgacttgatcatcctagctggtgagttgatgctgactgttggcagggagttcagtggagtctgrcaaccagaatgcctccgtgtggccaccccagcttggtggtctcagagtagttgtgttaccggtggagggtgtccaggttcttggcattttgaacaaagaattggacaaaatgcacaaacaaagcaatgaaaaaaagcgtagatttactgaaatgaaagaacactacagagagtgggagcaggcttgagcaagtggctcaagagccctggttacagacttttttggtatttaaataccctctagaagtttcccattggt

SEQ ID NO: 387740 - DNA, 535 bp, Homo sapiens
ccaccaggcagtagctgtaccttttgtttgtcctcagcagtgcctctgtaaacccaagacaatgtccagcagagtgtagacactcaaatatttgttgatggagtgaacaaacatttaatttgggatgaatttcaaataaccttacttctctatgatcatattttmtttccttaaaaaacctcataattatgtggaaatatatatgaatgtataactgggagcatactcagaaaaaaaagaagttttgctaaaccacaatactctaaccagatgctatttacctgtttttgatcatttgcagcaatcatactttgatttttacggttgagtaggatcatatagtttaggagtttataatgaatttaaactcagaattttgtgaagatgatacagggactggaatggaaattctacattttgttttactttaactttcagcacaagggccctctagttctgatgtcaactctgagccctcttcattaggacactgggaagaaactgtagccagttccatgaagaaaaccattgactc

SEQ ID NO: 387741 - DNA, 535 bp, Homo sapiens
ccaccaggcagtagctgtaccttttgtttgtcctcagcagtgcctctgtaaacccaagacaatgtccagcagagtgtagacactcaaatatttgttgatggagtgaacaaacatttaatttgggatgaatttcaaataaccttacttctctatgatcatattttatttccttaaaaaacctcataattatgtggaaatatatatgaatgtataactgggagcatactcagaaaaaaaagaagttttgctaaaccacaatactctaaccagatgctatttacctgtttttgatcatttgcagcaatcatactttgatttttacggttgagtaggwtcatatagtttaggagtttataatgaatttaaactcagaattttgtgaagatgatacagggactggaatggaaattctacattttgttttactttaactttcagcacaagggccctctagttctgatgtcaactctgagccctcttcattaggacactgggaagaaactgtagccagttccatgaagaaaaccattgactc

SEQ ID NO: 387742 - DNA, 560 bp, Homo sapiens
atcttggctcaccgcaacttccgactcctgggttcgtgattctcctgcctcagtcttccgagtagctggaactacgggcatgcaccatcacacctggctaattttgtgtttttagtagagacagggtttctccatgktggtcaggctggtctcgaactcctgacctcaggtgatcggaggtcacctcggcctcccaaaatgctgggattacagcctgagccatggtgcccgctgatttttcttaaagctggaatgcttctgtgaagacaacccccctcaatagtccattgactaccctcaggtatacttggtatagaaaagacagaattaatgcttatgttttacttttatttaccgatttttaaacctttaaaagttacaatgagattttttccctacccttttccctttattctttcattttttctttcttcttttttcttctttctttccttccatctttgaccttctctctcctctctttctttctcattattagctcattcaaactattattaactatatttataacaaaaacatcttaatgcatttaactacat

SEQ ID NO: 387743 - DNA, 566 bp, Homo sapiens
ttgtatggatgggcgccttagctagatgagaccccaggatgggtctcatgcattctcctcctccactgagtctcmgcttgcctcatgtgagggttgatggctttggctttactccaacttcctgcatcttctctgactgtgtcctgattttgaccatgagccttgttcttgacaactgccttgtctctggtcctggactcctaccagccctccctcctctgaggaaaccagacctgagcaggcagctcctgcagcttttcacctcgacttatctccccagccagaacttttgcttaatttgcttactgacatttcacactgatgtgcggggactcatcaattgagttccaagcatatgcatgactcacatgcatttgaagagtatgtggaggagggagggaaaaaatgagagagagaggattttagtcatataagtcatcaaagagcctaccaggcttgctttggttttgtttgttttagaaaatgactggaggccataatgtttgaacttttttattgtgaagtctgctgagaattcaagcagggccaaccccagatacttctct

SEQ ID NO: 387744 - DNA, 566 bp, Homo sapiens
ttgtatggatgggcgccttagctagatgagaccccaggatgggtctcatgcattctcctcctccactgagtctccgcttgcctcatgtgagggttgatggctttggctttactccaacttcctgcatcttctctgactgtgtcctgattttgaccatgagccttgttcttgacaactgccttgtctctggtcctggactcctaccagccctccctcctctgaggaaaccagacctgagcagkcagctcctgcagcttttcacctcgacttatctccccagccagaacttttgcttaatttgcttactgacatttcacactgatgtgcggggactcatcaattgagttccaagcatatgcatgactcacatgcatttgaagagtatgtggaggagggagggaaaaaatgagagagagaggattttagtcatataagtcatcaaagagcctaccaggcttgctttggttttgtttgttttagaaaatgactggaggccataatgtttgaacttttttattgtgaagtctgctgagaattcaagcagggccaaccccagatacttctct

SEQ ID NO: 387745 - DNA, 566 bp, Homo sapiens
ttgtatggatgggcgccttagctagatgagaccccaggatgggtctcatgcattctcctcctccactgagtctccgcttgcctcatgtgagggttgatggctttggctttactccaacttcctgcatcttctctgactgtgtcctgattttgaccatgagccttgttcttgacaactgccttgtctctggtcctggactcctaccagccctccctcctctgaggaaaccagacctgagcaggcakctcctgcagcttttcacctcgacttatctccccagccagaacttttgcttaatttgcttactgacatttcacactgatgtgcggggactcatcaattgagttccaagcatatgcatgactcacatgcatttgaagagtatgtggaggagggagggaaaaaatgagagagagaggattttagtcatataagtcatcaaagagcctaccaggcttgctttggttttgtttgttttagaaaatgactggaggccataatgtttgaacttttttattgtgaagtctgctgagaattcaagcagggccaaccccagatacttctct

SEQ ID NO: 387746 - DNA, 577 bp, Homo sapiens
gctcatttccttttatcactgaataatgttccattatatggatgtaccatggtttatttattcatttgcctgttggagacaacttgcaagcttctagtttttggtaattacaaataaaactgctgtaaacattcatgtacaagtttttgtgtggacataagctttcagctcatttgggtaaatacccaggaaacatgagtcctggattatayggtaagagtatctcatgttttgcaagaaactgccaaattgtcttcaaaagtggctataccattttgcatttccaccagcaataaatagcaataaatgagagttcatattgcaccttatttgcatttggtattttaaattttagctattcttataaatgtataataggatcttatgtgtttgctcctagtgttttaatttgtaattccctaatatgattactaaacctatgcttatttgtcatttgtacattttctttggtaaggtgtctgttcagatcttttaccccctttttttttaaattgggtagtttgttttctcattcttaagatttaagagttctttgtatatttttggctacaaggtg

SEQ ID NO: 387747 - DNA, 447 bp, Homo sapiens
tcatttttctctttcacagattgtgctgctcatgttgtatctaaaaattcatcaccaaactcaaggtcacctcagtacttttctttgttatcttcttagttttgcactttctttagatctatgcttcatttagagttaatttatgtaaaaagtataagatctgtgatttatgtatttatttttgcatgtagatgtccrgttgttttagcaccatttgttgaaaagactaccttttttcattgaattgcctttgctcttttgtcaaagatcagttgactatatttgtttgggcctgtttctgggctatatattctgtttcattcacctgtttgtcaattcttttaccaaaacaataatgtcctgatggctgtacaagctttaccgtaagtgttggagttgggtagtgccagtccttgactttgttcttcttcagtattttataggcta

SEQ ID NO: 387748 - DNA, 447 bp, Homo sapiens
tcatttttctctttcacagattgtgctgctcatgttgtatctaaaaattcatcaccaaactcaaggtcacctcagtacttttctttgttatcttcttagttttgcactttctttagatctatgcttcatttagagttaatttatgtaaaaagtataagatctgtgatttatgtatttatttttgcatgtagatgtccagttgttttagcaccatttgttgaaaagactaccttttttcattgaattgcctttgctcttttgtcaaagatcagttgactatatttgtttgggcctgtttctgggctatatattctgtttcattcacctgtttgtcaattcttttacyaaaacaataatgtcctgatggctgtacaagctttaccgtaagtgttggagttgggtagtgccagtccttgactttgttcttcttcagtattttataggcta

SEQ ID NO: 387749 - DNA, 536 bp, Homo sapiens
tcagaaaaaatacctatagggcactatgcttagcacctggatgatgaaataatctgcgcaacaaaattccatgacatgagtttacccatataacaaacacacatgtacccctaaaactgaaataaaagttaaaagaaaaaaatagaagaggctacagaaaattcatggaaggcacaaggaaaagatatgagagaggaagagaagaaagaaagagacaagatacacaggtggcattttttaaactataaagtaggaaaatatgtgtcaagggctaagaggctatrggaattcagagtaagaagaaatcatacagaagtaacacaacgaggttcgcatttgatatgtttcttctttttgctttgttctttttaacgaaaagcaacaggtgattttgtgaaagtcagaaaacaccagtatccttgtgatctcatcctagatttttctgtcaactggatccactctaattaataaagaatgcatttctgaccccattccaaatatgtgaaattagaagacatgattgcatatataataat

SEQ ID NO: 387750 - DNA, 536 bp, Homo sapiens
tcagaaaaaatacctatagggcactatgcttagcacctggatgatgaaataatctgcgcaacaaaattccatgacatgagtttacccatataacaaacacacatgtacccctaaaactgaaataaaagttaaaagaaaaaaatagaagaggctacagaaaattcatggaaggcacaaggaaaagatatgagagaggaagagaagaaagaaagagacaagatacacaggtggcattttttaaactataaagtaggaaaatatgtgtcaagggctaagaggctatgggaattcagagtaagaagaaatcatacagaagtaacacaacgagsttcgcatttgatatgtttcttctttttgctttgttctttttaacgaaaagcaacaggtgattttgtgaaagtcagaaaacaccagtatccttgtgatctcatcctagatttttctgtcaactggatccactctaattaataaagaatgcatttctgaccccattccaaatatgtgaaattagaagacatgattgcatatataataat

SEQ ID NO: 387751 - DNA, 583 bp, Homo sapiens
cttcaccttttcccctctcttgacagcttcctgctccaccttagggatcattccatgttgtcctcactaggcaaaaatatagtamtcaaccaaacaaataaataaaactgtaagataatttcaaatagttctatagactgactgtttatgtgcctccaaacttcatacgtttaaacctaatcccaaatgtggggggacataatatagatgtgatagtatttggaggtgggttttagaggtagattagcatctatactcaagaatgggattagtgccattataaaataagccccaaagaactcccttcccctttcgccatgtgaggtcacagtgaggagatagctgtctgtgaatcagaaggatgtcctgatggaaatggaccatcccaggcaccgaatctgcactcaccttgatcttggacttcacagccttctaaactgtaagcaataaattactgttttttataagccacccattctatggcagtttgtaatagcagcccaaatgaagtaaaacaaatagtgataaaataatgaaaaataaacaaagagcagtcatagaataagtccaaggtggatctttc

SEQ ID NO: 387752 - DNA, 613 bp, Homo sapiens
tatatcttttcctttggaaacagagacttgaactgtatggccagtggtagctcagttcagagagaaatgtgtctggcttcccttcctctcctgggcaccaccatcttcccagcttcagtccaggaagactcttctgatttttctctcctgagctccctccttctgttcaggaggcactgcagraacatcccccacaaggcttctggcattcccctcacgaagggctgcaggcaccttgttatctccccatccgcagtatccttacagcaaggctccttcgcccaaaaagcagaaaaagccttagatacgagggcaggaagggcgggctacacacccctgaatctacaatcggactgcttatgttcaaattcagttctgacactaattcttaactaattccagtcctaggagacttgggcaagtcccctaattactttaagcttcaatttctttacctgtaaaaccagggatggtaataatagttaatgaataataaagagtcaataaataataaatgagagtaaaaataggactcacatgtgcaaacatgtataatatattacaaagatatgctgtatgcatttattacacagatgactggagtttaggaacc

SEQ ID NO: 387753 - DNA, 595 bp, Homo sapiens
aaccaccttttgagctcagatctcctaaagaccaagtgaacagatgacttccaatgattccttcctcaaaaaatgcycaggcccttgcctctgtaaccctccctgtaatcattacaatcactctgttgcttccgcttgtccccatctgctccagaccaatccccagtgcaagttccatatttacaataagtacttgattgtttactaaatggtgaatgacactgtcctatgctacactagcctgctggtttggtttgatttccatctccacttctagggtagaaataggaagctcaaatgccaatattggcagaccgccgccaccatgacatcccactgaaaatatcaaatggagttttgtgcttccaagctaacatatactggggacaagctgatttttcctttttttttttttcttgacattgacatttctttctttttttatgttgacactgattcccaaaagataacttagtatgtaacatccatgcttgatagggtgcaattatggaacattcaacagagaaggacaaatgaggtaatgcatgacaaggacaagtgggacaggggctccaacaaatagtagatatagttg

SEQ ID NO: 387754 - DNA, 654 bp, Homo sapiens
gctttaaattatttatgaaatttggaaaagcattaataaaagtatctgaagtgaggaaagtgttggtcctgctttcctggtgctggtcagacttcaatttgattgaacatataattaagcacatattatatatcaaatccttggagcagtgtacacagattttaagaggactcagcaaacagggaactatgaccacagcctgggtgacagagagagagactstatctcagaaaaaaaagagagagagagaaaatggatagtggtaatagttgtacaacattgtgaatatccttaatgctactgaattgtacatttaaaaatgattaaaatggtaaatattacatatattttacaattaaaaaaatcaaagaaaaaaagtaaaaacaatctgaaaactatgacatatgtgaaatggttgaaaagatgagagcatttggcctgaggtcatggtacttaatatgcatgtctaattatatgcaattctagttgaggaagagccttcctcctggaaaggagagaaagtttcaggccaatatcttgtgacttgtgaaagcaaagatttgaagcaagggcaggaaagtaacttaggtatggcaaggacaaaggtgtatgcatgcacactctggtgcctggtgtacatgtgtgagcaaaaca

SEQ ID NO: 387755 - DNA, 654 bp, Homo sapiens
gctttaaattatttatgaaatttggaaaagcattaataaaagtatctgaagtgaggaaagtgttggtcctgctttcctggtgctggtcagacttcaatttgattgaacatataattaagcacatattatatatcaaatccttggagcagtgtacacagattttaagaggactcagcaaacagggaactatgaccacagcctgggtgacagagagagagactgtatctcagaaaaaaaagagagagagagaaaatggatagtggtaatagttgyacaacattgtgaatatccttaatgctactgaattgtacatttaaaaatgattaaaatggtaaatattacatatattttacaattaaaaaaatcaaagaaaaaaagtaaaaacaatctgaaaactatgacatatgtgaaatggttgaaaagatgagagcatttggcctgaggtcatggtacttaatatgcatgtctaattatatgcaattctagttgaggaagagccttcctcctggaaaggagagaaagtttcaggccaatatcttgtgacttgtgaaagcaaagatttgaagcaagggcaggaaagtaacttaggtatggcaaggacaaaggtgtatgcatgcacactctggtgcctggtgtacatgtgtgagcaaaaca

SEQ ID NO: 387756 - DNA, 660 bp, Homo sapiens
agattttctaggcaacctcagaatgctaatatgtttaacatcaactattgcctccttgttctgagatggcatctaagatatggagatgtgtctttttctgtctttactctcaagtacttctggaatttcactatttttctgagtttgggcagtagctaggaaaayatctatgagacaaagatagctggttacttccccaatatctcttctcccagatgataaatatttttgctaagcatagggccattcagccaaagggttggtttcctaatttctcttgaagctaggtgtagacacgtgtctatattctggtcaatcgtatggagtagaagtgctgagttgtaacttctgagtcaggcccttggcatacaataagcctaggttccctttctcttcttgacttcctattggctgggatgtggactcgatagtgggagctcccattatctatgttagaccactatctatattaaaccactgtattagaccacaaggtgaaaaatgcatgttgacattggcagagcaataagaacttccatatcagcctgacatggtatacttggctacctacatactcagttacctaagagagaaaaagcttttatctggcgtgactgtgttgtagtaggcaaagggaatgttaactggtgaaccctttcc

SEQ ID NO: 387757 - DNA, 660 bp, Homo sapiens
agattttctaggcaacctcagaatgctaatatgtttaacatcaactattgcctccttgttctgagatggcatctaagatatggagatgtgtctttttctgtctttactctcaagtacttctggaatttcactatttttctgagtttgggcagtagctaggaaaacatctatgagacaaagatagctggttacttccccaatatctcttctcccagatgataaatatttttgctaagcatagggccattcagccaaagrgttggtttcctaatttctcttgaagctaggtgtagacacgtgtctatattctggtcaatcgtatggagtagaagtgctgagttgtaacttctgagtcaggcccttggcatacaataagcctaggttccctttctcttcttgacttcctattggctgggatgtggactcgatagtgggagctcccattatctatgttagaccactatctatattaaaccactgtattagaccacaaggtgaaaaatgcatgttgacattggcagagcaataagaacttccatatcagcctgacatggtatacttggctacctacatactcagttacctaagagagaaaaagcttttatctggcgtgactgtgttgtagtaggcaaagggaatgttaactggtgaaccctttcc

SEQ ID NO: 387758 - DNA, 531 bp, Homo sapiens
taattgctttttctccccttaactacaactttaaaaaaatacccttaacaatgtaacakcacacacacacacgtacacacacttctcatattcttagaatattgctttcactttatatacaacacctggcatcggacagcttggaggaggcgttttaaatatactgtgctcccttgcagatgttttgaaagctagtggattacaaaatattaaattggaaaattttccttctatgttgtatttttgggggactcaaaaatctctagtctccaggtcttaagacctgtgatatagtttggatgtgtgtccctgcccaaatcacatattgaaatggaatcccaaatgttggaagtggggcccattgggaagtgtttgggtcatgaggggaggcggtttctcatgaatgctttagcgccatctcccttggtactgtcctcatgatagtgagttctcatgagatctaatcatttaaaagtgtttagcatctccccactctctctcttgctcctgctttcagtcacgtgcctgctc

SEQ ID NO: 387759 - DNA, 613 bp, Homo sapiens
cagcaactcctgcaattgcctcagttcctggcaccaaatttaaatgggcttttgatgcttcgaaaatttgttcttttaatttggaaatgtctaaagtgagattatcttctcttccctgtagatggcgtctaaccatgtcccagtgatgctcagactcattataaatttggggtgtaatacaaaaatctgacgtattccagtcacattgtaactggaaacgatgttctaagctcatgagtctgtctcccatccaaatgacagtttgtctaagatcattaatttgatttgccaatttttgatcaatactagattgtgaattccacaatcttgtagaattyttttgccaatcattaacaaagtttactgactgaacagaagagtgcaatgcaactcctgctacagcagccgtagctgtgactgcaattaatcccataatcactgcaattaaagtaaaaatgaatcttttggatctatttaaaacaccttttaatacttcagtcaaaatatggacggatggtgaggcctcccatggtcggtccatggacacagggatccacacgccctctcttgctctcaccagcagaatacggtgttgccaattaaaagttgaatc

SEQ ID NO: 387760 - DNA, 613 bp, Homo sapiens
cagcaactcctgcaattgcctcagttcctggcaccaaatttaaatgggcttttgatgcttcgaaaatttgttcttttaatttggaaatgtctaaagtgagattatcttctcttccctgtagatggcgtctaaccatgtcccagtgatgctcagactcattataaatttggggtgtaatacaaaaatctgacgtattccagtcacattgtaactggaaacgatgttctaagctcatgagtctgtctcccatccaaatgacagtttgtctaagatcattaatttgatttgccaatttttgatcaatactagattgtgaattccacaatcttgtagaattcttttgccmatcattaacaaagtttactgactgaacagaagagtgcaatgcaactcctgctacagcagccgtagctgtgactgcaattaatcccataatcactgcaattaaagtaaaaatgaatcttttggatctatttaaaacaccttttaatacttcagtcaaaatatggacggatggtgaggcctcccatggtcggtccatggacacagggatccacacgccctctcttgctctcaccagcagaatacggtgttgccaattaaaagttgaatc

SEQ ID NO: 387761 - DNA, 185 bp, Homo sapiens
ttgccaatttttgatcaatactagattgtgaattccacaatcttgtagaattcttttgccaatcattaacaaagtttactgactgaacagaagagtgcaatgcaactcctgctacagcasccgtagctgtgactgcaattaatcccataatcactgcaattaaagtaaaaatgaatcttttggat

SEQ ID NO: 387762 - DNA, 613 bp, Homo sapiens
cagcaactcctgcaattgcctcagttcctggcaccaaatttaaatgggcttttgatgcttcgaaaatttgttcttttaatttggaaatgtctaaagtgagattatcttctcttccctgtagatggcgtctaaccatgtcccagtgatgctcagactcattataaatttggggtgtaatacaaaaatctgacgtattccagtcacattgtaactggaaacgatgttctaagctcatgagtctgtctcccatccaaatgacagtttgtctaagatcattaatttgatttgccaatttttgatcaatactagattgtgaattccacaatcttgtagaattcttttgccaatcattaacaaagtttactgactgaacagaagagtgcaatgcaactcctgctacagcagccgtagctgtgactgcaattaatcccataatcactgcaattaaagtaaaaatgaatcttttggatctatttaaaacaccttttaatacttcagtcaaaatatggayggatggtgaggcctcccatggtcggtccatggacacagggatccacacgccctctcttgctctcaccagcagaatacggtgttgccaattaaaagttgaatc

SEQ ID NO: 387763 - DNA, 588 bp, Homo sapiens
atgttctaagctcatgagtctgtctcccatccaaatgacagtttgtctaagatcattaatttgatttgccaatttttgatcaatactagattgtgaattccacaatcttgtagaattcttttgccaatcattaacaaagtttactgactgaacagaagagtgcaatgcaactcctgctacagcagccgtagctgtgactgcaattaatcccataatcactgcaattaaagtaaaaatgaatcttttggatctatttaaaacaccttttaatacttcagtcaaaatatggacggatggygaggcctcccatggtcggtccatggacacagggatccacacgccctctcttgctctcaccagcagaatacggtgttgccaattaaaagttgaatcaatgcaagtaagcaatctacaattttcacaggttatagtctgggagtctggtttaataactatatttcctacaactagcatataagggggctttacgcaactttgtaaaggaactgttagactggaatttaggtcgatagtataaaatggcttacaatctcttgtttctaaagtttgatttccagaccaaattct

SEQ ID NO: 387764 - DNA, 588 bp, Homo sapiens
atgttctaagctcatgagtctgtctcccatccaaatgacagtttgtctaagatcattaatttgatttgccaatttttgatcaatactagattgtgaattccacaatcttgtagaattcttttgccaatcattaacaaagtttactgactgaacagaagagtgcaatgcaactcctgctacagcagccgtagctgtgactgcaattaatcccataatcactgcaattaaagtaaaaatgaatcttttggatctatttaaaacaccttttaatacttcagtcaaaatatggacggatggtgaggcctcccayggtcggtccatggacacagggatccacacgccctctcttgctctcaccagcagaatacggtgttgccaattaaaagttgaatcaatgcaagtaagcaatctacaattttcacaggttatagtctgggagtctggtttaataactatatttcctacaactagcatataagggggctttacgcaactttgtaaaggaactgttagactggaatttaggtcgatagtataaaatggcttacaatctcttgtttctaaagtttgatttccagaccaaattct

SEQ ID NO: 387765 - DNA, 588 bp, Homo sapiens
atgttctaagctcatgagtctgtctcccatccaaatgacagtttgtctaagatcattaatttgatttgccaatttttgatcaatactagattgtgaattccacaatcttgtagaattcttttgccaatcattaacaaagtttactgactgaacagaagagtgcaatgcaactcctgctacagcagccgtagctgtgactgcaattaatcccataatcactgcaattaaagtaaaaatgaatcttttggatctatttaaaacaccttttaatacttcagtcaaaatatggacggatggtgaggcctcccatggtcggtccatggacacagggatccacacgccctctcttgctctcaccagcagaatacggtgttgccaattaaaagttgaatcaatgcaagtaagcaatctacaattttcacaggttatagtctgggagtctggtttaataactatatttcctacaactagcatataagggggctttacgcaactttgtaaaggaactgttagactggaatttaggtcgatagtataaaatggcttacratctcttgtttctaaagtttgatttccagaccaaattct

SEQ ID NO: 387766 - DNA, 412 bp, Homo sapiens
cggctctgctacatattcgcaatgtaaaccttccgtttctttctgggattttttccttgtgttttcattacaatctattatacagcttccargggcatcagaaactgaaacgctatctttttctgtttgaaatggttctaaagctgctttaataatggcccaatcattccatactgtaagtggaatgatattacccttcctacctgcttgttttagttccttaccaattcttttccaatcttttagatctaaagttccttgttctggaaaccatgggcaaaattgttctattatttgaaatagcttgattagattttttgtagatactttaactccccctctttttaaaagaattttaataaagctgagataagaggcatatttacttttaattttacttttagtttgcccc

SEQ ID NO: 387767 - DNA, 568 bp, Homo sapiens
aacacaccatctctgaaccatagcagtgatatttgaaaaaggaggttgttttaaaacgtaagtctgggccgggtgtggtggctcatgcctgtaatcctagcactttgggaggccaaggcgaatggatcacctgaggtcaggagttcaagaccagcctgaccaacatggtgaaaccctgtctctattaaaaaatacaaaaaattagccaggcgtggtggtgggcacctgtaatcccagctacttgggaggctgaggcaggagaatcacttgaacctgagcagcagaggttgcagtgagccragattgtgccattgcactccagcctgggcaacaagagctagactccatctcaaaaaaaaaaagtaagtctgatcacgtcactcctctgctaaaaactctgcaatggctccaaaactctgactgctaggtcaagaaactataaagagtaaagatggaagcagagaactgctgagtggctagcgtaatactaatcaaagtgagagatggtggtggcaaatggtaactgtaggagagttaagaagtggacagactggagatattttgaaag

SEQ ID NO: 387768 - DNA, 597 bp, Homo sapiens
atcacttgaggagtttttggcaaaaaaactgaagtttgagaccagcctgggcaacatggtgaaatctcatctctacaaaaatacaaaaaaattagctgggaccaggcacagtggttcatgcctgtaatctcagcactttgggaggtcaaggcaggcagatcacttgagaccaggagtttgagaccagcctggccaacatggcgaaaccctatctctactaaaaatacaaaaattatctggtgtggtggctcatacctgtaatcccagctacttgagaggctgaggcayaagaatcacttgagcgtgggaggcagaggttgcagtgagctgagttcaggccactacactccagcctgggtgacagagtaggaccccgtctaaaaaaaaaaaaaaagtcaacagatgaggagttggtttttatagatgagcaaagaaagtggtttcttgagatgaaatctactcctggtgaagatgctgtgaacattgttgaaatgaccacaaaggacttaggatgtcacataaatgtatttgataaaacaatggcagtgtttgagagattgactccaatttcggaagacgttctactgtgtgtaaaat

SEQ ID NO: 387769 - DNA, 564 bp, Homo sapiens
gaaagaaggaaacttaaaaagaaaactatcactaaaaatccacagagaagggcttctgaatctcaccaggatagagtaacagcaactgaatgtatcaatcttcctgccttaaacacctagaaaaccagatatgaaaagatggttttcagacagtggacaataggtagggcagggctgtggtctctgagagaagggaaaccagccagatgagccccacagttggcccagatgaaggcagyctctgggctgcaaggaagggagagggatctaaagagagcacagaatggaggagacagagatggagtgcagggaggcctggacagttagaatttgcagaatcaagcacaagggaggaggagctgttggcggggcagtgcgcctgagccctggagacctgaggctgagggctgattgcaacatgtgtgcaaggcagaaaagcacttccagaaaggaatagaacaattcctacaggaaacacagacccagaaatagttcatattcccactcacctttgggagtaggaaaacagtagcaaagtgggatgagagatgttcaaggaactgc

SEQ ID NO: 387770 - DNA, 528 bp, Homo sapiens
aagaccctacttctaagtaaggtcacattctaaggtaccagggttaggacttcaacatatctttgggggatggggggcaaaattcaatacataatatttggtatggcagtaatttctttatatagcagtaagtgaatctctgaaaattgacatgrccactttctcactctaatcccttaaaggcaacaggaccagatcagaggtcctggcacaccctcatttccatgtaaatagccttgaccacagaaatctgggaaagagacacattgaagaacggcattcactcatctaaccttaccgcatgtcttctctgcttgacttagcgcaggtttggcagtaaactggggaaaaagcaacttgaatggaatccaaggcatcgttctcttccacctgtgaaacggaccaatctctatggtgtggcctgcacagagctgcttcaggactcaccactgttcacagcctcttagaagtttagaagagggaagcctttccttttaaaaattataattaaaagtacatttacccttc

SEQ ID NO: 387771 - DNA, 539 bp, Homo sapiens
tctggttgtcaatttttatttgacatcttcccagaaaacccccccacctcctccctttttctggacttgtccctaccccatggttgctactttttactgtacttgaatactgaattcttgggcatcttttatttacctaaactgtrggcaaaataaagcaggaagaggaaggtttaattatagacagagtttcatcaaataaaaggttactatcagttttctaatgaaactccaataatctgaagataggaagggaaatcaaaaacatcagttttctgtccaatgttttaagtgtttctgcctaagccaagaaaatatctaatgtgttaggagcttcatcttaacagtggactcctgtggtgaccagaatttggctgcatttcaaaataataagcatttgcttccgaaggctgtttaaaggaaataaaaaggcataaaagctccaccgtccaatatggtttgtattagaataaattgattatctaaaacctaacgtgatcagaactctgccaaaagcctggcaagcaacaattgttgac

SEQ ID NO: 387772 - DNA, 591 bp, Homo sapiens
gacaactttgatgctacatgaattctgccattttgctagcactgatatggctytttggtccaccactccattacaactattaaccctatttatattaatttttgttacaaatcttacaaaggcagggtgcttctgggcatttaggatacattctattttaaggctgtatacttgattttcgtaaatcattcttggaggcccaattatcatccctgtccatcttgtcccaggtcttcatcatcttctaaaccccagctaactatgccacctcctacccttttctggccttcttcgagttcttccatcagttggaaacttcgagagacttttactcctgatcctgtggtgactgccatcttgcatcactgttgccccatgttttgtataatgaaaaaactgagcaatagaaagcaggtagtgatataagaagtcaacaccgagaaataagaaaaacagaaagcaaagggaaactaagcaggacagtatgtacttcagaatcaattattggttgccacctttcagaggatggagaagataggtattatactttgttatcttttgaaatgtggtcttgaaacttgatttttaggg

SEQ ID NO: 387773 - DNA, 591 bp, Homo sapiens
gacaactttgatgctacatgaattctgccattttgctagcactgatatggctctttggtccaccactccattacaactattaaccctatttatattaatttttgttacaaatcttacaaaggcagggtgcttctgggcatttaggatacattctattttaaggctgtatacttgattttcgtaaatcattcttggaggcccaattatcatccctgtccatcttgtcccaggtcttcatcatcttctaaaccccagctaactatgccacctcctaccyttttctggccttcttcgagttcttccatcagttggaaacttcgagagacttttactcctgatcctgtggtgactgccatcttgcatcactgttgccccatgttttgtataatgaaaaaactgagcaatagaaagcaggtagtgatataagaagtcaacaccgagaaataagaaaaacagaaagcaaagggaaactaagcaggacagtatgtacttcagaatcaattattggttgccacctttcagaggatggagaagataggtattatactttgttatcttttgaaatgtggtcttgaaacttgatttttaggg

SEQ ID NO: 387774 - DNA, 551 bp, Homo sapiens
cagggttaggacttcaacatatctttgggggatggggggcaaaattcaatacataatatttggtatggcagtaatttctttatatagcagtaagtgaatctctgaaaattgacatggccactttctcactctaatcccttaaaggcaacaggaccagatcagaggtcctggcacaccctcatttccatgtaaatagccttgaccacagaaatctgggaaagagacacattgaagaacggcattcactcatctaaccttaccgcatgtcttctctgcttgacttagcgcaggtttggcagtaaactggggaaaaagcaacttgaatggaatccaaggcatcgttctcttccacctgtgaaacggaccaatctctatggtgtggcctgcacagagctgcttcaggactcaccactgttcacagcctcttagaagtttaraagagggaagcctttccttttaaaaattataattaaaagtacatttacccttctctcttttgtctttttccccagttccttttgctaagtcagtctggtgctcctttttgtcaa

SEQ ID NO: 387775 - DNA, 551 bp, Homo sapiens
cagggttaggacttcaacatatctttgggggatggggggcaaaattcaatacataatatttggtatggcagtaatttctttatatagcagtaagtgaatctctgaaaattgacatggccactttctcactctaatcccttaaaggcaacaggaccagatcagaggtcctggcacaccctcatttccatgtaaatagccttgaccacagaaatctgggaaagagacacattgaagaacggcattcactcatctaaccttaccgcatgtcttctctgcttgacttagcgcaggtttggcagtaaactggggaaaaagcaacttgaatggaatccaaggcatcgttctcttccacctgtgaaacggaccaatctctatggtgtggcctgcacagagctgcttcaggactcaccactgttcacagcctcttagaagtttagaaragggaagcctttccttttaaaaattataattaaaagtacatttacccttctctcttttgtctttttccccagttccttttgctaagtcagtctggtgctcctttttgtcaa

SEQ ID NO: 387776 - DNA, 613 bp, Homo sapiens
ttctgcgttaatcgcctcttagtttgcatgtaaattaaagtgggtataaatttgacttcagaactgccctcagctactactctcagcacactgcctgtggagcagccctgctctgcaggagcagtcacagagctgcaggactgctggagctgtaactccgccacttcaatacctaccgctggcttgcccttgaattccatcctggctgaaccccaatttggggatcatctgccctgcatcaactttgtacttccatattgtagcatagtcttccctagyagtgtgtgagatacatgtgccataaacagagttcaacacttaacaagtggttaagtctgagctatcagtgataacttctttcacctttcttaaacctttcttaaggcacaggtaactaactcctccattttaaggatagcggcatatctcatgctggcttgaaaaaacaaagtgtggttgcatacggtgacttaggacaactaacttttcatcccaaaggatgtgggagaaatacttgttgctgctgtccctggcacccatctggtgtatgagtcagttgtgccttggccccaggtggggcctgcaagatgattaaggcacaaggctgccaatc

SEQ ID NO: 387777 - DNA, 669 bp, Homo sapiens
tgtttcactatcaaaagaatgtccttcagattcttctgggtttttggtgggtttttttgtttgtttgttttttggtctttcagattcttaaaaaattttcctggaatagttaaaatagacaataccatgagaatttcaatatttatgctatcattgcctcttctaattggtcttttagttctagtaatatttattttttcatttcagtgggaatttcagttaatgtcagttacagtctttattacaggaagagtagaattatraaaataacactctagtgttttaaataaatagacatctgacacacattcttaaggctttatataacttattcaagagaaatttaaaacatacacaataaaattaaaaggcacactgagattttcatagtgtcataagaactggacctggtaaatcaggggatgccttgatgagagtatatgaataaaagaggatctcctctgctaaacacagatttcttaaacaaaggaaggcttctttctttcttcagttacttaggaaataagcctaattttgctttcttcaataacactggctttatgactattaggaaaataatgaaatgaaaggttctttttctgtaagatttggatgtgaattttcataattattttaaatttgttatgctgaagacttaagacatatgac

SEQ ID NO: 387778 - DNA, 533 bp, Homo sapiens
cattcaattgcagttagtacccagatcacgaaagagaacactgacaacatcccagaaactaagaataactactaacttttagcagtattgattagttttggttatttttatacttcatacaaatggaattatacactatgaaaccttttgtgtctagttttttccacatccaacattatgtttgtgatattcagccattgttgttagctayagataattttcactgtagtccattagataaataccataatttgtttatccatttgactgttgatggacatctggatattttcaaatttgaggtgactaggaattagactgcaatgatcattatggtatttgtctttgggtaaatatatgtatacacttctgttgggtatataccctgaagtggaatttctgtgccataaggtatgcatatatcctggtttagatgttgccaaacagtttcccaaagtggttttcatctacttatactcccaccagcagtttatttgagttccagttgttccacattctcactccagaagatc

SEQ ID NO: 387779 - DNA, 545 bp, Homo sapiens
gcagcccccatcccctaaagtattttaggattcaatgaaaaaacgtagataaattgattaatacagcacccacattgtaattcaagattcaataaatataggttatcatttctgtacagctttcccctttcatgtcaattcctatttgatacaaaaatttccccagctgtgttactttgcattttacttaatcctgaaataaactaaggaacaggttacactagagggggtacytaaatcaacctgaggacaaggacggccaaggagaaattacaggtgtttgatatccaccccactcccccaacctttaatggcttttttaagtttctatagggtagcaactattttatgcatctcaatataggatggatgaaggatatgaaaaacagatgaatcttatctagcacaatgcctattcccactatggtcattctcaataatcagattattggtcatagatgggaatttagagatcatgcagtacaaacttatttgtgtaagtaaaaaaaaacgaagctcagggtcgataagtgacttgcccaaca

SEQ ID NO: 387780 - DNA, 660 bp, Homo sapiens
cttggtacacaacaggaatacaaactctgagtcttcccacccaccattttacctgcaaagcaccgatagctgcgctctggaagcgcagatctgttttaaagtcctgagcaatttctcgcaccagacgctggaagggaagtttgcgaatcagaagttcagtggacttctgataacgtctaatttcacggagcgccacagtaccaggcctttaaaaaattaataaagaaactgttaccaaaaacataamtagcacaaaaaggtaagtgggcagcttcaaagaaatgcagtaatctttcaaaaaataagccacccaacaattcttcagcttcagtatcaaatttcactgatcaacttaagatgtgaacattcaaatctagtaacaatacctttaaagcaaaaagcatgaaattaaaatgcattcttagcaagaaattcatcaaagccctatttattttcattttaaaaagttattcatgtatataaaccttgggaaggtattagctgtcaggctaatgaagaagttggctcccctcaatttagcaccactctccttccctacaccctctattatcttaagagcccttaaagatgaccaacacaacccaatgaacttcatttaaaaatctgcttgtggcattcaagttctatttcccagaatac

SEQ ID NO: 387781 - DNA, 660 bp, Homo sapiens
cttggtacacaacaggaatacaaactctgagtcttcccacccaccattttacctgcaaagcaccgatagctgcgctctggaagcgcagatctgttttaaagtcctgagcaatttctcgcaccagacgctggaagggaagtttgcgaatcagaagttcagtggacttctgataacgtctaatttcacggagcgccacagtaccaggcctttaaaaaattaataaagaaactgttaccaaaaacataactagcacaaaaaggtaagtgggcagcttcaaagaaatgcagtaatctttcaaaaaataagccacccaacaattcttcagcttcagtatcaaatttcactgatcaacttaagatgtgaacattcaaatctagtaacaatacctttaaagcaaaaagcatgaaattaaaatgcattcttagcaagaaattcmtcaaagccctatttattttcattttaaaaagttattcatgtatataaaccttgggaaggtattagctgtcaggctaatgaagaagttggctcccctcaatttagcaccactctccttccctacaccctctattatcttaagagcccttaaagatgaccaacacaacccaatgaacttcatttaaaaatctgcttgtggcattcaagttctatttcccagaatac

SEQ ID NO: 387782 - DNA, 611 bp, Homo sapiens
aatgtccttattacttacttttacagtctgtaactcttaaaaacaactaagctagtaatgtacaccaattagtatgtgttctgggtccagaagaaagatttaagaaaataagcctggcctctaattttttacttaggattttccaggaaaattcgggatggaagataagcatatgatcatcatcatcatgaccaccatcataattattaacatttattgtgcccttactatgtgccatgcagtgttgaaagtactcacacatactaacccatttagtcctcacaacaaccctctgacagagggttcagtaacttgcccaagactatactgctagcasatgctacagcctgatgcaaatccaggcagtttggctctagagctacactaatttaccacgatgctttaagatgatggattgtcatctctgacatagatgaggtatttaactgttggctatggcttctgtacctaaatacataaaaaacagtaagaggcagaagaatagctggaagatgttacaggtggccctggtaagtataaataaagccagtgaaaaattaagggtccacagcatttaatttaaagcctgtcttaatagaggaaatactgaa

SEQ ID NO: 387783 - DNA, 547 bp, Homo sapiens
ggctgttttttccaaatgcccaacacttattgaatgttgatttagaataaactgccatttggagatcctgtaattatggttgtctttgcagctttcttcatgatcagggagaaatctagacttaatttgcctgtcttcaaacttcatgtaattgctttgtttctttaaaggctgtctcaagttccttcaccttaatggcaacaattcagagatccaaccataatatatatccatctcaaattgatttctcactgtcarccattctagctccctaaaatcctgaaatctcatatttggagggaaccttagaggataaccctctaatctgagcaatcagcatgttttgttcctcagatctttcttgcctctttttagaataatatttgtaaatatataaaataaaatgctaggattaaaaagtaccaattatattaaaatacaaaaaaagacataggaatatatgagttttcttattaacaaaataaaaaataagattttgtggcagatccaaaagctatcataatttcaaagtaacagaacatacata

SEQ ID NO: 387784 - DNA, 500 bp, Homo sapiens
cagatctttcttgcctctttttagaataatatttgtaaatatataaaataaaatgctaggattaaaaagtaccaattatattaaaatacaaaaaaagacataggaatatatgagttttcttattaacaaaataaaaaataagattttgtggcagatccaaaagctatcataatttcaaagtaacagaacatacataatatgtaaagaatctgcagcaaatgtaatgtaacataaaagtatctgtgatttatattagtgtattagtctgttcttacattgctaaaaagaagtacttgggactggataatttataaagagmagaggtttaatttactcacagctccacagtctgtacagtaagcatggtggtggaggcctcaggaaactcacaatcatgatggaaggcaaaggaagcaggcacatcctacatgtctggagcagtagaaagagagagtgaagggggaggtgctacacactttcaaacaaccaaatttcatgag

SEQ ID NO: 387785 - DNA, 564 bp, Homo sapiens
gacccccttactccaaattcaaagtcagtagcagtgttatactaccacatttatggttctctgcaggtgggagaggttctcttcttttaaaaacccatgtgattacaccgggcttattttgatggtccaggaggatcttctcatctcaatttccttagtataaccacatctgcaaagtttctcttgtcatataaagcgtcatgttcacagttttttgggatyaggacacgtatttcgttgtggggggggtgcattatcatgcttaccacaaagcccttttggaggttacccttcagtgaaggaaataggcctgcatatacataattttagctaatatgcagtgcttcaaaatgagttactaatacccataggtgaggatgaggcttaaggaaagcattacaaaaggggttgaactttaactgagttttgacatatgaagaagaagagttcaaaatgggaggtaatggggattaaatgtgaaaaagagggcttggggacaaattctggatggcatgccaaagagatagaaggcttctgagcagaaaagagacatagtcaaagcca

SEQ ID NO: 387786 - DNA, 574 bp, Homo sapiens
aagattagttaagtgaatgggtacaggtgaaggggaaaataaatagaagaataaataaacaaacaaaaacatgagtggagccttgcatggatcattgataacaagtgccataaactgaaacacatgattaactcaaccttgccacataaataatttttaatgaagttttaccagtctaagcaaaagaagaaaacctattcatagcacaaaatgtgatccttgatccttgttatatcctgccttgaatttgtcttttgttttatgagtagtaatcatatttcctcaactaatttttaagaacctaaaggaaggataatggattgtaatttcttttcttgtcctttatagtgccaaggactgtaaactcctcatgacattcaacctgtgctcttctaatgcaggggtttttgtctttgtttakgcactgctcctactatgctatgcagcaggcaccgttctaggtgcttagggtgctttggtgtgtcctaagcacctagaacagtgcctgttgcatagtagcagcagaagatgttcttgatgaataaattaagttagctttttgaaagcagtatca

SEQ ID NO: 387787 - DNA, 559 bp, Homo sapiens
ttcagtcttaacaaaaagctgtctgtgtctccagactagaactactgacctgccctaagctctcatggattgtgtcactacagctgatgtgkaattcatacagcgctagttggtgatactctatcttttgtttaagcttaagctgtgagtactttttatttcatttctcctaactgtgttcaacacaagctccatgagagaagcccactggaggctctataatataccctgggttggcatgtgtaattcaggaaagaactaattgtgattatctcatgttctcccaactcctcagattagagatggggaaactgaggcacagtgagacaattagactgctctgtggtcacaccagcaggcagtgacagagctgaggttagaacttatgtctcatgtcttggctgtggatacagaaacagccctatatattggctctagccccaacagcttcttttctgagaacagtactgactgccaggattctggaggaagacatgcctatacataccctcagaggcaggtctgcagacctcaatctcagctttggaccctggtatgg

SEQ ID NO: 387788 - DNA, 531 bp, Homo sapiens
aaacatgacaccaccaaagaaagctaataaaaatacagtcaccaacctcaaagaagtggagatccatgaattgcctgagaagctcaatgagatgcaaggaaacccagataaacacctaaaagaaatagggaaaagaagatatgagtaaaatgaaaagtttaataaacagaaaacataaaacgaatcaaacaaaaattccggagctgaataatgcaatgacagaaaagagactcattacattcaaggtaaactcaataatgatatcagcaaatttcttaacggaaactttgcaggccaagaaagagtgggatgaatatttaaagtgccaaaagaaaaaacaacatggmaactttgatggttaataatgagtgtaaacttgattggattaaaggatgaaaagtattgttcttgggtgtgtctatgagggtgttgccaaaagaggttagcatttgagtcagtggactgggaaaggcagacccaccatcaatcgtggtgggcataatctaatcagctgccagtgcagccagaata

SEQ ID NO: 387789 - DNA, 445 bp, Homo sapiens
tatcatgtaccttatagatatgtacacctactataaacccacagaaagtgaaaatgaaaaaaataaaaactacatagactgggtgaatggataaacaaaaacaaactagacctaatgatatgttgcctacaggtaacactcttaaccaataaaacacatatagtctgaaaataaagggatagaaaaagatattctgtgcaaatggaaaccaaatgagagcaggcaaagctatatttatatcagacaaaataaatttcaagacaaaatttataacaaatacaaaggtcattatataatgataaagggatcaatttaacaaragggtatagcaattgtagatctgtatttgcacccaacactggagtagccagatttattagataaatattattaaagcaaagtgagagacatagctaaatacaataatagctggagatttcaacac

SEQ ID NO: 387790 - DNA, 620 bp, Homo sapiens
attttaaaaatatgttgagaaaaacagaaatgacactacaacctgccaatgatcaaggaatgcagcaaagggagttctgagataaaaagttaatagaaataaatgcctgtaataagaaaaaagagacctcaaatgaacaacctaattttagacctcaatgaaccacctaactttagacatcaatgaaccagcaaaagaaaaacaaagtagtccaaaaartagcggaaggaaggaaatactgatgaataaagctgaaataaaataaagacaataaaaaacatcaataaaactgagttgatattttttcttttttcttattatactttaagttttagggtacatgtgcacaacgtgcaggttagttacgtatgtatacatgtgccatcttggtgtgctgcacccattaactcgtcgtttaacattaggtatatctcctaatgctatcccaccccacaagaggcccaggtgtgtgatgttccccttcctgtggccatgtgttttcattgttcaatttccacctatgagtgagaacatgcggtgtttggttttttctccttgtgatagtttgctgagaatgatggtttccggcttcacccatgtccctacaaaagacatgaact

SEQ ID NO: 387791 - DNA, 502 bp, Homo sapiens
aaaactactggaagaaaacaggaaaaatatctccttggcattggtcttgacaatgattttttcaatatragaccaaaagcccaagcaagaaaataaataaacaagtggcctgcaccaaactaaaaagcttctgcacagcaaagaaaacaatcaacaacatgaaaaggcaattcacagaatggaagaaaatagtttcaaaccatgtatcagatacgagttaatatccaaaatttataagaaactgtcacaactcaaagacaaaatgaaataataggtaactaaatttataaatttgaattgaatgagcaaagggcttgaataaacattttttccaaagaggatatacaaatggccaacagctatataaaaaggtgcacagtgtcactaatcatcatggaaatgtgactcaaaatcacaatgagatatcacctcacacctattaggtgtctattaccaaaaaacatgaaataatgtgtcagcgagagtgtggagaaaaggaaat

SEQ ID NO: 387792 - DNA, 594 bp, Homo sapiens
cctttctccctgagttactctgtaagggcagtcaaggatcaatagtgagaaaggcagaagtcttgacaagraaatcactttttggatcctctgacatcatggtagctgcctcttttcctggctactttcaaaaatttgagcctaaatttctttttcctttctaaggttattgacagctggaatccaatttctgagagttctcatttagtttctctgacttgccttgcaaaccacatttctgacaaccaactcatatcttctgtggaggcctatcttttgtgtatcccttttcttgccaaaacaaagaagattctctctttattttctgctctggctcagtctccagcagcccagcatcagaatttctgttaggaggcgtagaccaaggcttacccttgcttcatcctcttttgagattccagatgtaaagcaaatggtgaaaacaacatagttccctgtactttggaatctggctgaaaaggatggccatatgggggagattttacttgtatttagacttgttccaaccacaaaattaatagaagaataataaagatgggaggggagagattagagaccacagttttgtgagag

SEQ ID NO: 387793 - DNA, 594 bp, Homo sapiens
cctttctccctgagttactctgtaagggcagtcaaggatcaatagtgagaaaggcagaagtcttgacaaggaaatcactttttggatcctctgacatcatggtagctgcctcttttcctggctactttcaaaaatttgagcctaaatttctttttcctttctaaggttattgacagctggaatccaatttctgagagttctcatttagtttctctgacttgccttgcaaaccacatttctgacaaccaactcatatcttctgtggaggcctatcttttgtgtatcccttttcttgccaaaacaaagaagattctctctttattttctgctctggctcagtctccagcagcccagcatcagaatttctgttaggaggcrtagaccaaggcttacccttgcttcatcctcttttgagattccagatgtaaagcaaatggtgaaaacaacatagttccctgtactttggaatctggctgaaaaggatggccatatgggggagattttacttgtatttagacttgttccaaccacaaaattaatagaagaataataaagatgggaggggagagattagagaccacagttttgtgagag

SEQ ID NO: 387794 - DNA, 457 bp, Homo sapiens
atgtccttctcacattgcaaaataaaatcatacttttccaatagtcccccaaagtcttaactttccagcatgaactcaaaagtcccaagtattgarcccaaagtccaaagttgcatgtggagatgtttcttctacctatgagcctgtcagatggaaaaacaagttatttactcccaaggtggaatgatggtacagacattgggtagacattcccatttcaaaagggagaaatcagccaaaagaaaggggcaatattccccacacaagcctgagaaccagatatggcagtcattagattttaaagctctaaaataatctcccttgactccatgtcccacatccagggtacactggtatgaggggtggatgctatactgtgggcagttctgcccctgtggctttgctagatgcagcgcttgtggctgtcctgatgggttggagtccagtgcctggactg

SEQ ID NO: 387795 - DNA, 539 bp, Homo sapiens
tttcatattatagattaaaaaacaaaacaaaacaaactaaggcccaaaattacttggaagtttagttcattttcagatcaaaaacccagatttcctgattgctaatccagaaaacttttttttaaaactctatgctgcatcttcttataaacttcttcttaaaatattttggcaaggatactttctctcttatagcaagaatggaaatggaggtatccctggtaattgcttatgcatggaccactgcaatgatacattttgtggtatacagaaaggcagtggaacaatcccagatttcagaagttggttgataaaatcaacatacaatgttaagagaaaatatatttatcttcctgaagataaatcaagcagcttgatcacagcttgatcagttgtgttaacatctgtagggagaatgtgtgaatcagtaagagatggaatcattatggacacagagagaaacaagatgtcagagagatcccaggtggcacagtgtatccagcaaagtytaagcaccaccagaatttgaagacacccaa

SEQ ID NO: 387796 - DNA, 492 bp, Homo sapiens
attttgaaatataaaatacattgttgactatattcactcaactctgctatcaaacaccagatattatttattctatctaactgtatgttggcagccattaatcaacctctctcatccttcaccacacttcccattctctgctaaccatctttctattctttaccttcatgagaacaacttttttagctcctacaaatgaagctggaagccatcattctcagcaaactaacacaagaacagtagaagatgtgatatttctcttgccgtgcytggcttatttcatttaacctgcagtctcatccattttgctgcaaatgacaggatttccttcattttaatagctgaatagcattttatcaggtatgcataacacattttctttgttcattcatccattgatggacacttaggttgatttcatatcttgactattgtcaatagtgctgaaaaccatgagggtgcaagaatccctttgatacactaatgttcttt

SEQ ID NO: 387797 - DNA, 557 bp, Homo sapiens
aatataaacttttacctaagacctatatacatcaaatatcctcaccttatttctgattccatctccatcatttaaccttctcatcattgtgtatagaataaaggaaggagcagagatgaggggtggaatggaaaaatgaaatgggattargatgaagaatgagtaggaggtagaacacggtgagagtaaggagaaaaataaaggtgaagaatgtcttttacaacttgatatggtttgcatgtgtgtccccacccaaatctcatgtttaattttaatccctaatgttgaagatggaccttggtcagcagtgattggatcatggggacagatttttcatgaacggtttgtcaccatcccctttggtactgtcctcatgatactgagtgagttctcgctagaactggtcattgaaaagtgtgtgacacctccacccttgctctctcttgctcctgcccctgccatgtgagatgtttcactctccctttgccttcctccacgactgtaagcttcctgaggactccccagaagccaagcagataccaccatcatgctttctg

SEQ ID NO: 387798 - DNA, 434 bp, Homo sapiens
gcaagatgacagaatagaagcctccaacaatcgtccctctggcaagggcaacaatataaaaactatttacacagaaaaaatatacctttataagaaccaaaaaccaggtgagcactcacagtacctggtttgaacttcayattgctaaaagaggcaatgaagagatacaaaaaaagcttctgaattgccaacactgcccctccaccacacccccggtagtggcagcatgaagtggagaacatctctgggcaccagaggagggagagcactgcagttgtgaggcattgatctcactgctgtcctgttacagcagaaagaaaccctggaccaaacttaaatgatacactcccatggaggcagtattcaaaccagccctaggtagagggaaattgccacagatcatgagttcaaaacttgagttcccacacacctca

SEQ ID NO: 387799 - DNA, 544 bp, Homo sapiens
agcacacatcaaaaataaaacacagaccaatatctgtgatgactattgatgcaaaaattctcagccaaatattagcaaaatgaattcaacagtacattagaaagatcattcattatgaccrgtgagattaatccctgggacgcaaggatgactcaacatacgcaaattaatcaatgtgatacattatataaacagattgaagaataaaaaacatatcatttcaattgacgatgaaaaggcatttggtaaaattcaacatgccttcatgattaaaaccctcaagtaactggggatagagggaacatacctcaacataataaaagccataaacaacaggtccaaaactagtatcacactgaatggggaaaaactgaaagactttcctctaatagctgacacatgacaaggatgcctactttcaccacctgtccttcagcctaaaactggaggtcctagctgggagtatcagacaagagaatgaaataaagggcatccaaatgaaaaaaaaaaagtcaaatatccttgtttgcagaagatatgatct

SEQ ID NO: 387800 - DNA, 544 bp, Homo sapiens
agcacacatcaaaaataaaacacagaccaatatctgtgatgactattgatgcaaaaattctcagccaaatattagcaaaatgaattcaacagtacattagaaagatcattcattatgaccggtgagattaatccctgggacgcaaggatgactcaacatacgcaaattaatcaatgtgatacattatataaacagattgaagaataaaaaacatatcatttcaattgaygatgaaaaggcatttggtaaaattcaacatgccttcatgattaaaaccctcaagtaactggggatagagggaacatacctcaacataataaaagccataaacaacaggtccaaaactagtatcacactgaatggggaaaaactgaaagactttcctctaatagctgacacatgacaaggatgcctactttcaccacctgtccttcagcctaaaactggaggtcctagctgggagtatcagacaagagaatgaaataaagggcatccaaatgaaaaaaaaaaagtcaaatatccttgtttgcagaagatatgatct

SEQ ID NO: 387801 - DNA, 610 bp, Homo sapiens
ttacaacagtttagtaaactcatttttccaaaactagaaagttgttacaagtaatatatttaaaggaaaattgaatttccccttaagcattaatactcaaaatgtcacaaagaacaaataccaaaatgaaatttaaaatatcatactggaaactgaactcccttggaaagacagttacatattagaatatgtattgtgcatgttgaatggacatttaaaggtggtcaatgactccctttctatccctaagtaaaaatgctcttttaaattaaatcttcaagcattcgyttgttccttttggaatagttatattctaggaaattccttaatttctgttatttctcatttcaggtaagaacagttaattactctgcctgtgtttagacagtattctttgcaaaactccatggtgacactaccatagttcattgcagttcccattaaatagaaaatttccaggttaatttgtgtttctctaggtcacactgcagtagaattttaagtaagtcatttctctagtcttccttcttgctcagtgtttaagggcttcaaactcccttcatgtttgttattttttccaattctttctttcatgattttgtgcaatata

SEQ ID NO: 387802 - DNA, 574 bp, Homo sapiens
caggacataaactcagtactgagtcaggtggacctgatagatatctacagaactctccaccctaaaccaacagaatatacacacttcttatcaccatatgacatgtacactaaaattgatyacataatcaggagtaaaacactccctatcaaatgcaaaataactaaaattataacaaacactattttggatatcagcacaatcaaattagaaatcaagactaagaaattccctcaaaatcatacaattatatggaaattgcataatctgctcatgtatgacatttgggtaaataatgaaattaaagcagaaatgaagaagttatttgaaactaatgagagcaaagatacaatatactagaatctctgggacacaggtaatgcagtattaagaggaaaatttatagcattaaatacccacatcaaaaagttagaaatatctcaagttaacaacctatcatcacaactaaaagaactaaagaatcaagaaatcaaatctcaaagccagcagaagacaaagaaataaccaaaatcagagctgaactgaaggagacagagatgtgaagaaacaacca

SEQ ID NO: 387803 - DNA, 446 bp, Homo sapiens
ttcctcaatggcttaggctgtggtttttaatggaggctgtggtaaggcttcgttggggatgggtatgtgcatcctggcagtccagtcctcaggcatcagtggtggtggtccaaaggtttcagtcttcaggcttctgggcatcatgcatgggcactagtggtattgatttcagatgggctcatccttgggccttccagtcgtcatgtttgggtgctggtggtggtgggttgagacagcaggatgtggtcccccaagcagcatgaagagagtcagcattgacagtagcagtggtaaggcaaccttcagrcttccaagtaggttacacagctaccagtagtagaggcacttagctggatgggcaatcaccatatccctaagtgatatgcatcggttagtgctggcattagcagtagcaagcagggtggaccaggccccaggtcccaggc

SEQ ID NO: 387804 - DNA, 299 bp, Homo sapiens
ccagctctgacgtatagtctatagagaatgttgatatttttgtagaccgtggttgaaatgccacctgttttcagatcctttgcagggctattctgtgctatctggtggtcagtctgggatatggccaggagtccacacttggcttcattcccacatgttcagtatgtaattaggatgaggtccacacagactggacaaagacaggagtttatacaattacgttgtagggtcattttccatcatttttcagtgtttgcccccttcccagkgttcccattttcaatccttgtccagaaaca

SEQ ID NO: 387805 - DNA, 562 bp, Homo sapiens
gaacaaacactacagatgtggcattgccatgtctcagccacagctccacaaaacaaaaggaaggattcttccctcggaattttgacacctccagctccacttctgaagatgttgctttgcttttgcctctgcctgagacagcccaggggtgaggcatgagcaaatagataaaatggaaagaaaaaaattcctggaggattttccccattctctttgagctttaaaagtttccttttccactgtgtgagcaagaactagagagcmtttcctagctctctctaagctcacaccacagtggtttgggttatgttttgttaaggaggatactagaaggaaaataatatccaccttatcactgtttggtggtggtcagattctggtcacctctgtcctacataacacatacacctacacatacatacaaacacagacacacacacaatcacactatgtatataatatacatgctattcagaatcctcaccatctacccatgcattttgtcaaagttttatagctgagttcagtgagaattaataaaaagaagtgtgtgattactcca

SEQ ID NO: 387806 - DNA, 562 bp, Homo sapiens
gaacaaacactacagatgtggcattgccatgtctcagccacagctccacaaaacaaaaggaaggattcttccctcggaattttgacacctccagctccacttctgaagatgttgctttgcttttgcctctgcctgagacagcccaggggtgaggcatgagcaaatagataaaatggaaagaaaaaaattcctggaggattttccccattctctttgagctttaaaagtttccttttccactgtgtgagcaagaactagagagcatttcctagctctctctaagctcacaccacagtggtttgggttatgttttgttaaggaggatactagaaggaaaataatatccaccttatcactgtttgrtggtggtcagattctggtcacctctgtcctacataacacatacacctacacatacatacaaacacagacacacacacaatcacactatgtatataatatacatgctattcagaatcctcaccatctacccatgcattttgtcaaagttttatagctgagttcagtgagaattaataaaaagaagtgtgtgattactcca

SEQ ID NO: 387807 - DNA, 513 bp, Homo sapiens
taataagcatacagattagaaacaaataaataaagccctcttattttcagatgacatgattatcatgttaggtattcacaaagaacaacaaagaaaccactagaacaaataagtgactttaggatcaccatggaccayaaggtaaattttttaaaatcaagctaggaatatacaatttaaattttttaaaatgtcctttaaaatagaccagagacaccataaaattattttgcataaatcttccaaaatgtatacaagacttgtgtattagtctgttttcacactcctgataaagacatacccaagactaggaagaaaaagaggtttaattggacttgcagttccacatggctggggaggcctcagaataatggtgggaggtgaaaggtacctcttacatgacggtggcaagagaaaccaagaagaaggaaaagcagaaactcctgataagctcatcagattttgtgagacttattcactatcacaagaattgcacatggaagatcagtcccc

SEQ ID NO: 387808 - DNA, 513 bp, Homo sapiens
taataagcatacagattagaaacaaataaataaagccctcttattttcagatgacatgattatcatgttaggtattcacaaagaacaacaaagaaaccactagaacaaataagtgactttaggatcaccatggaccacaaggtaaattttttaaaatcaagctaggaatatacaatttaaattttttaaaatgtcctttaaaatagaccagagacaccataaaattattttgcataaatcttccaaaatgtatacaagacytgtgtattagtctgttttcacactcctgataaagacatacccaagactaggaagaaaaagaggtttaattggacttgcagttccacatggctggggaggcctcagaataatggtgggaggtgaaaggtacctcttacatgacggtggcaagagaaaccaagaagaaggaaaagcagaaactcctgataagctcatcagattttgtgagacttattcactatcacaagaattgcacatggaagatcagtcccc

SEQ ID NO: 387809 - DNA, 513 bp, Homo sapiens
taataagcatacagattagaaacaaataaataaagccctcttattttcagatgacatgattatcatgttaggtattcacaaagaacaacaaagaaaccactagaacaaataagtgactttaggatcaccatggaccacaaggtaaattttttaaaatcaagctaggaatatacaatttaaattttttaaaatgtcctttaaaatagaccagagacaccataaaattattttgcataaatcttccaaaatgtatacaagacttgtgtattagtctgttttcacactcctgataaagacatacccaagactaggaagaaaaagaggtttaattggacttgcagttccacatggctggggaggcctcagaataatggtgggaggtgaaaggtacctcttacatgayggtggcaagagaaaccaagaagaaggaaaagcagaaactcctgataagctcatcagattttgtgagacttattcactatcacaagaattgcacatggaagatcagtcccc

SEQ ID NO: 387810 - DNA, 573 bp, Homo sapiens
ttttgtgagacttattcactatcacaagaattgcacatggaagatcagtccccacgattcaatgacctcccccgggtccctcccaaaacacatgggaattccaggagatactattcaagttgagatttgggtgggggcacagccaaaccatatcaacctatgtactgaaaactacaaaacactgatgaaggaaaatgaagaaattttaaataaatagagagatatttcacgttgattgactgaaaggttcaatattatttacaatattattacaatgttaattcttctaaaactgatcaatagattcaactaaaattgacacaatataatggcaaacatttttgtagaaattacaaagatcattctaaaatttataaagaaataaaaaggaactgaaataaccaaattttaaaaagaagaacaaaattggaggaattactctatttaatagatttattataaagctacaatatttaaaacatagtatatttgaagaaatgatttacrtattagaattaatggaacaaaatagtctataaattgaaccatatagaaagtcaattgatttttaga

SEQ ID NO: 387811 - DNA, 648 bp, Homo sapiens
attcagcaggcagaaggaataactttagcaataaaatattgaaacaattgacatcataaaatggtccattgggtattgattatctctccaaaatgaattttgctcctgtccattgtagagtatcaatggcatttggttagaattgagtttacttcccaattcaagatgaacatttaatggccraggcccaccattattttctcagtaatgtttattgcaaacacaggcctaaacacatggttgttttctgaacacactgactcagaagtcccctaatcgtcccaaaactgaggggtcagatttggatgattatggaaggagacatgcttcttaagagtaacgaggaagtgggtaatccatgttgctgaggaccaccatcttgtagacatgaaggaagccattttagcatggaacaacaagtcaggagaggttaagaggggagtaatgagtcaaaaaaattgaggtaaatcaagcaagagccttgatcacaccttttatgaaatttgctctcccttgaaatatgggagatatgagtcaataataaatcttcttttagctttgcatttattttatctgggttttctattacttaccctttcccctacacacacaaacacacacacacacactctaacataaagcatattg

SEQ ID NO: 387812 - DNA, 597 bp, Homo sapiens
ttttaaaagaatgactaaagggaaacaaaaaataaaaaagaaacaaatggcaaaatagcacacctaaaaacaatcatatcaataatgatattatatgcaataaactgaataatccaatcatatgacaggaattatcaggataaatttgggaaaagtcaattgtattctgtccacaagagaagagtttacaacacacaaacataaatgggttgaaaatataatattagaaataatatttccttaaacaataaacatcagaaaggaagagagattatattaataagattcaaactagatttcaaggcaaagaatgttactagagaaaaagagagagagaggtcttataatgataaaactgccaaaacataaagaagttataaatactgtattttgtgyctaatgagagagctttaaaacaggaagccaaaactgtcaagatttaagggagaaacagacaaatccacagcacattttggaggtattaatagacatggttggtgatattcatgcatgtttctttgtaactaattggacaattagagaaaaaaaataactcattgtagatcctaaggacattatcagtcaccttaacctaat

SEQ ID NO: 387813 - DNA, 570 bp, Homo sapiens
ctctaaaagtttaggaagaactgaagatactcagtaaacaagaaaaaagaaaataatgaattaagaataaaaatatagagaataaaarcactggagtaggtcatctaaaccatctaaaccaaaagctaattatttggagagagcaatagggtaaaattctgagacaaacagtcaaggaaagaaaaagaatgatgaaaattgacaaactatagaaccaaataagatgggtaataatttcatactgtagaagtaaagatgaaattattagcaaaaacacacaagtggatttgaaccagaatgccggctataaacctcaccttacaacacagagtagagaaggaggtgtgtgggtgggtggacggggtgcagcactctgtttccaccagctcccaatcctagcaggcttcaagctctgtgctttctccggctggttcctggctagcgtctacctcacactgagcaggacagggattcccctggataaggaggaggaggaaaagagctccacacagcaattcctcagccccatcccggctaaggcaggtgcccttcattgtttttggttgctaa

SEQ ID NO: 387814 - DNA, 570 bp, Homo sapiens
ctctaaaagtttaggaagaactgaagatactcagtaaacaagaaaaaagaaaataatgaattaagaataaaaatatagagaataaaagcactggagtaggtcayctaaaccatctaaaccaaaagctaattatttggagagagcaatagggtaaaattctgagacaaacagtcaaggaaagaaaaagaatgatgaaaattgacaaactatagaaccaaataagatgggtaataatttcatactgtagaagtaaagatgaaattattagcaaaaacacacaagtggatttgaaccagaatgccggctataaacctcaccttacaacacagagtagagaaggaggtgtgtgggtgggtggacggggtgcagcactctgtttccaccagctcccaatcctagcaggcttcaagctctgtgctttctccggctggttcctggctagcgtctacctcacactgagcaggacagggattcccctggataaggaggaggaggaaaagagctccacacagcaattcctcagccccatcccggctaaggcaggtgcccttcattgtttttggttgctaa

SEQ ID NO: 387815 - DNA, 570 bp, Homo sapiens
ctctaaaagtttaggaagaactgaagatactcagtaaacaagaaaaaagaaaataatgaattaagaataaaaatatagagaataaaagcactggagtaggtcatctaaaccatctaaaccaaaagctaattatttggagagagcaatagggtaaaattctgagacaaacartcaaggaaagaaaaagaatgatgaaaattgacaaactatagaaccaaataagatgggtaataatttcatactgtagaagtaaagatgaaattattagcaaaaacacacaagtggatttgaaccagaatgccggctataaacctcaccttacaacacagagtagagaaggaggtgtgtgggtgggtggacggggtgcagcactctgtttccaccagctcccaatcctagcaggcttcaagctctgtgctttctccggctggttcctggctagcgtctacctcacactgagcaggacagggattcccctggataaggaggaggaggaaaagagctccacacagcaattcctcagccccatcccggctaaggcaggtgcccttcattgtttttggttgctaa

SEQ ID NO: 387816 - DNA, 570 bp, Homo sapiens
ctctaaaagtttaggaagaactgaagatactcagtaaacaagaaaaaagaaaataatgaattaagaataaaaatatagagaataaaagcactggagtaggtcatctaaaccatctaaaccaaaagctaattatttggagagagcaatagggtaaaattctgagacaaacagtcaaggaaagaaaaagaatgatgaaaattgacaaactatagaaccaaataagatgggtaataatttcatactgtagaagtaaagatgaaattattagcaaaaacacacaagtggatttgaaccagaatgcyggctataaacctcaccttacaacacagagtagagaaggaggtgtgtgggtgggtggacggggtgcagcactctgtttccaccagctcccaatcctagcaggcttcaagctctgtgctttctccggctggttcctggctagcgtctacctcacactgagcaggacagggattcccctggataaggaggaggaggaaaagagctccacacagcaattcctcagccccatcccggctaaggcaggtgcccttcattgtttttggttgctaa

SEQ ID NO: 387817 - DNA, 621 bp, Homo sapiens
tcagtatatatttttcctcttttgtagttgctgcttttttcctatttctttaagaaatcagctcaactccaaggtcagcctgatgttctcttgtttcctgctaaaatagttttcattttaatatcaatttaaatatgaattccatctgaaatttgattttgtattttgtctgaaataggattccatgtacactttgttttccagaagagaatataattacatagcaccaaccaccaatttttccactgaactgtattaattaatatagttttttgttaggtcttgatttttgaaatataaattccccagatttattcttccagamcatcttcactaatcctgtgcttttgcatttctgtaattttagtatcattgtatcaatttctaaaaaaaactttcttggattttgaattttggttgagatttaaatgaatttatagaaaaattttggaaatattgacatcttcacaacactgaatgtttcaatatgtgaacatacaattgggaaatattgctcctctttcattagatttatttctagtatttgatattattaatattgcgatattgtattgatattgcaatagtaagtggcaacttttagaaatatacattttccag

SEQ ID NO: 387818 - DNA, 621 bp, Homo sapiens
tcagtatatatttttcctcttttgtagttgctgcttttttcctatttctttaagaaatcagctcaactccaaggtcagcctgatgttctcttgtttcctgctaaaatagttttcattttaatatcaatttaaatatgaattccatctgaaatttgattttgtattttgtctgaaataggattccatgtacactttgttttccagaagagaatataattacatagcaccaaccaccaatttttccactgaactgtattaattaatatagttttttgttaggtcttgatttttgaaatataaattccccagatttattcttccagaacatcttcactaatcctgtgcttttgcatttctgtaattttagtatcattgtatcaatttctaaaaaaaactttcttggattttgaattttggttgagatttaaatgaatttatagaaaaattttggaaatattgacatcttcacaacactgaatgtttcaatatgtgaacatacaaytgggaaatattgctcctctttcattagatttatttctagtatttgatattattaatattgcgatattgtattgatattgcaatagtaagtggcaacttttagaaatatacattttccag

SEQ ID NO: 387819 - DNA, 467 bp, Homo sapiens
catgatgatgaagcacactattaatcagaacatttagtgccttcactaggcaccagtgctgtgcagggacaacacttatttcaacaaaagagtcaggtcaattgaagccttcctgttgtgattaaccctcagtgaggagtgtgtgcatgtgtgcgtgtgtgtgtgtgtgtgtgtgtgtgtgtgtgtatgrgagagtgtttgtgtatgtgtgagagagagagaacacatttctagatcaacacatttctaattgttacccatgggatgatttgcccagccactccacttaccatgatcaaaagctgatcttcagttttgactgaccttgcaaggtacaggggagagaagaaaaaaaaagctcatcagaatgggaattccaacaggagatatctaaataaaggtgggaccctatggagctgggttccctgataatggataatcccattttaatacaacttcttcccatt

SEQ ID NO: 387820 - DNA, 557 bp, Homo sapiens
tgtcccagctgtgcaaggttttgtcactcagtgggcactgtaactgtcacttcaaaaattaattccaggcttctctaaggccagctgtttcaggatagtggggaacacagtaagaccactgaattccatgaacaaggacctattactgcacttctgttgtgaagggagttccttgatcagaggcaatgctgtgtggaacaccatgaaagtgggtacaaacrcctgtaagtccacagatggtagtttatgaagaagaattgtattcagggaaggcaaatttatattcacacttaaatgtcttttccaataagaatataaataatgtcccttttatgatggaaatgaacaaatgtaatcaatgtgttagcaggtagctggctgatcaccctgggaatggggccatttcagggactcagtggtctctgctgctggcagattgggtattcagtggtggccacagctgggttggccttgatgagtggaagtccgtgttgcagagtccacttgtaacctccatccctgacaccatggccactttgttcacgagcccaatgggc

SEQ ID NO: 387821 - DNA, 557 bp, Homo sapiens
tgtcccagctgtgcaaggttttgtcactcagtgggcactgtaactgtcacttcaaaaattaattccaggcttctctaaggccagctgtttcaggatagtggggaacacagtaagaccactgaattccatgaacaaggacctattactgcacttctgttgtgaagggagttccttgatcagaggcaatgctgtgtggaacaccatgaaagtgggtacaaacacctgtaagtccacagatggtagtttatgaagaagaattgtatkcagggaaggcaaatttatattcacacttaaatgtcttttccaataagaatataaataatgtcccttttatgatggaaatgaacaaatgtaatcaatgtgttagcaggtagctggctgatcaccctgggaatggggccatttcagggactcagtggtctctgctgctggcagattgggtattcagtggtggccacagctgggttggccttgatgagtggaagtccgtgttgcagagtccacttgtaacctccatccctgacaccatggccactttgttcacgagcccaatgggc

SEQ ID NO: 387822 - DNA, 437 bp, Homo sapiens
ataatgttcactaatttagtaataaatgtttaaaagaaaagaacacacacttgtgtgcactcacagccccccaccacacactcttctttattgatgtattgaggaaagatgccagaktcctgtaagtgatttatttgtttgacttcaggatccagtttatactgagagcctaatgcaatgaatgtctgaaagggagaatatattcctggtcttttcctgacctctcccacagatataagtgaatgaaaaaggttgaagccgaaagtgaggcaagccagtgcttccctgtctttctgttatgcggggcaagccagtgcttccctgtctttctgttatgcttattcagctctgactggctctgtgtacatcttggttaatatcctgacttcattctcactactacttcctattgataccaatctagaagacaccaagca

SEQ ID NO: 387823 - DNA, 538 bp, Homo sapiens
aaaaaataaataaataaagctagttaaacgagacttattttcatgggttactctataataaaatgaataaaattggttttcagcactaaattaagaacaagctgaccatctacagcagccctcatagcctggaaagataaagagctgtaggatggcaaatggttgctatacattatggatacacccctgtaatgactgtgaagtaccataaacaacactcagggtgccatttaactggtttcctttatcttcgattccttgtttaraggcactgaagttcatcagggtgaatctgtggctggcagttaccaggataaaacagtagtattatgtttcagggtcctgatgaaatgaacgagtgggctttagcctccgcagaatctggaggaatatagcataagcctcattaagcataacaggtgaacaatcatgttattgtgggcctcattacccttcatcatttgcctatattttcagagggggcatagattattagaaaaatgtcaagggaacaggacttactgggaaggagaatcaa

SEQ ID NO: 387824 - DNA, 538 bp, Homo sapiens
aaaaaataaataaataaagctagttaaacgagacttattttcatgggttactctataataaaatgaataaaattggttttcagcactaaattaagaacaagctgaccatctacagcagccctcatagcctggaaagataaagagctgtaggatggcaaatggttgctatacattatggatacacccctgtaatgactgtgaagtaccataaacaacactcagggtgccatttaactggtttcctttatcttcgattccttgtttaaaggcactgaagttcatcagggtgaatctgtggctggcagttaccaggataaaacagtagtatyatgtttcagggtcctgatgaaatgaacgagtgggctttagcctccgcagaatctggaggaatatagcataagcctcattaagcataacaggtgaacaatcatgttattgtgggcctcattacccttcatcatttgcctatattttcagagggggcatagattattagaaaaatgtcaagggaacaggacttactgggaaggagaatcaa

SEQ ID NO: 387825 - DNA, 584 bp, Homo sapiens
agagagagaaggctgcctcccattccctgctgagtaaagacttgacatacagccagtctgactggtgtcagtgtcctagaggaaggggtggctgtcatgaaggaaggtaaaaggaagtcagctcaagttttcgtgtgttgctgaaggttgagtrtgagctaccatgatcatgtagaccccttgagagccccaaattcagggagagactaccttcactcacaggctcttttcctttttcatgtagctccaccatgggctcatgagggggggatttaggggaagggtgggagatcaatggggaattccttgtgcaggactgcagggaggaatcaattgtctctatggaaggcacaaaaccttggccccactgcctggacacttctctcataaggagcaaaagtcttaagtactaggggaatagggcaaaaagcccagtcaaagctatgtcattgttgttggacaaaggagagaagaaacaacctctcaacctatgggaagtaccaagaaaaatctcagagctcatgatcctataccagtaaaattagaagctttccaccgctggagagaggaagaaaattctggct

SEQ ID NO: 387826 - DNA, 632 bp, Homo sapiens
gacgagaatgctgagaaagaactcgtgaaatgataaatacaaaagtaaatgtaagataatttttcttattttaaatggctaatagataattgattctgtaaagcaaaaatattaataacaagttttaaagttaataaagtatataaaagtaaaatgtatgacaaaaacagcataaaggataaaatagggatagacaattataagtttcttaaactacatataaaatggtatgtgtttatgaatgtaaaccatgataaaataaagatgtgtattgaaaactctaaggctatacagaaacataaggaaagaggcataactaataagcccttagtggggatgaaatggacaatataagcactgttcaactgacctaaaagcaataagataaagggaaaaataaaacaaaagaatggaacaggaaaaacacaacctgcagaatggtagatttagatctaactacatcaataattactgtaagtgtrgtataatcttatcaaaaaatgcagaagcaattgaaaattcttataaaaaactgccactttacatgatccacaaaaattaactgaaaatgaattattgacctaaacataaaacctaaagcataaaaaaatgagaaggaaaaaaccaaaaac

SEQ ID NO: 387827 - DNA, 555 bp, Homo sapiens
tggtactttcatttcttagtttagagataataattggttcttcagagcttaaacaattctctagtcctctaataaatgtataggtttagatgctgcagctttatctggcttatacaattcttttcttaatttgcaatgttttgaagacagggataatgacaaatatatctttgatcatttttggcatatgatgccttgcttgtaagagattttcaatatgtatatgttaaaatagtaaaatatttagatcatatggtccaaagagagtcctagaagccaccagatcttccaaaatccattgtttcctaacctcccttcactctaaagaaagcgagcccctggcattttggtcagtctaatagtctacttgaagatgacgatgataactaaattkttttgaacacctgatacatttgatctttttcaccttagccatcctattgagtaaagagtacattctgattttaacttacatgttctgttgacatgtgatgttcagcacttattcaaatgtttattggccatttggatccactcttttgcctattattgtct

SEQ ID NO: 387828 - DNA, 571 bp, Homo sapiens
atgattgtattagtccattctcatactgctataaagaagtgcttgagactaggtaatttataagaaaaaggtttaaatgattaacagttccttatggctggggaggcctcaggaaacttaaaatcatggcagaagaagaagcaaacacatccttcttcacatggcaataggagaagtgctgagcaaaggaggaaaagcttcttataaaacgatcagatctcatgagagctcactcagtatcacaagaacagcatgagggtaacagcccccatgattcaattacctcccactgggtccctccccaacacatggggattatgggaacagcaattcaagatgagatttgggtggggacacaggcaatccatatcattatgctccagcttctcccaaatctcatgttctcacatttcaatacaaaatcatgcccttctaacagtcccccaaaatcttaactcattccagcattaagtcaaaagttcaagtccaaygtctcatctgatacaaggaagtctcttctacctattagcctataaaatcaaaatcaagtcagttacttccttgatacagt

SEQ ID NO: 387829 - DNA, 571 bp, Homo sapiens
atgattgtattagtccattctcatactgctataaagaagtgcttgagactaggtaatttataagaaaaaggtttaaatgattaacagttccttatggctggggaggcctcaggaaacttaaaatcatggcagaagaagaagcaaacacatccttcttcacatggcaataggagaagtgctgagcaaaggaggaaaagcttcttataaaacgatcagatctcatgagagctcactcagtatcacaagaacagcatgagggtaacagcccccatgattcaattacctcccactgggtccctccccaacacatggggattatgggaacagcaattcaagatgagatttgggtggggacacaggcaatccatatcattatgctccagcttctcccaaatctcatgttctcacatttcaatacaaaatcatgcccttctaacagtcccccaaaatcttaactcattccagcattaagtcaaaagttcaagtccaatgtctcatctgatacaaggaagtctyttctacctattagcctataaaatcaaaatcaagtcagttacttccttgatacagt

SEQ ID NO: 387830 - DNA, 485 bp, Homo sapiens
gtacatgtctactgaagttgatagatgtctactgaagttggtacatgtctactcgagtgagtacacgtctactggagtgagtagatgtctactggagtagatatgtgtctactggagtagatagatgtctattggagtgagcatatrtctactgaagtaagtagatgtctactgcagttggtagatatctactggagtgggtagatgcctactggagtgggtcagtatctactggagtggggagatgtctactgtttggtaagtatctactggagtgggtagttgtctattgttgggttgatggctactgaagtgagtttaagagtgacgggactttgaagaaaaaaaggcatgctctatatgcatgcatttttatattctaaatattcataatttggaatattgggtaatttcttcaagactagttgtggaagcttgtatatgaattctcaattccttatttcaaaagttcagcagatgttctc

SEQ ID NO: 387831 - DNA, 588 bp, Homo sapiens
tttttaaataaaacaaatttttctacctgtctatatgcatcagcttggtcttttctactgtgcaaatgaagaaagaaatgttgggtacttgctatttggttgaagaccctgaggctaagggctaagatttttactataatatagtgttggttgagtaaacagaagsgtgcatatcattctaaagtatattcttcctgagaaatgagttgcacacctgccacctccttgctgatgagaatgaagagtacactcagtgccaagtgaaacatattggatgggcacaggagagaggacaaattcgctgagcttgagccattgatacgtgagtccttgggaagaaaaagttggcaagtgccgggtgtgaatggttaaaaatagttcttcctttaattagttgcaggaaaggaatgataatatgcttatttttgtgggttcctagacaacaggaaatttaaatattgtactgaatttattttactaagatttttgctttaaagattaattttaaaataaggaaaatagcgtccacttaaagtttgtgatttatctcaggcactttgctttctgtttgtttatatttttttgctt

SEQ ID NO: 387832 - DNA, 588 bp, Homo sapiens
tttttaaataaaacaaatttttctacctgtctatatgcatcagcttggtcttttctactgtgcaaatgaagaaagaaatgttgggtacttgctatttggttgaagaccctgaggctaagggctaagatttttactataatatagtgttggttgagtaaacagaagcgtgcatatcattctaaagtatattcttcctgagaaatgagttgcacacctgccacctccttkctgatgagaatgaagagtacactcagtgccaagtgaaacatattggatgggcacaggagagaggacaaattcgctgagcttgagccattgatacgtgagtccttgggaagaaaaagttggcaagtgccgggtgtgaatggttaaaaatagttcttcctttaattagttgcaggaaaggaatgataatatgcttatttttgtgggttcctagacaacaggaaatttaaatattgtactgaatttattttactaagatttttgctttaaagattaattttaaaataaggaaaatagcgtccacttaaagtttgtgatttatctcaggcactttgctttctgtttgtttatatttttttgctt

SEQ ID NO: 387833 - DNA, 360 bp, Homo sapiens
cactttgctttctgtttgtttatatttttttgctttttcataagagtaaacttttttttataattctcaaaatcttgtattttctccagaaagaacaaaaaaaaataaaaagaataacaaaggtacaaattaaatcattgccccatttgcccacagaagatagaaatcataaatgggatagctttttaaatgtgtttgttttctacaatgtttagactcatygacaatgaatagtgctaaaatgatatacttttctaggcacattcttgtgcacatctgtgagaaataaaaaagcacttggtatttttcactataccttgtttcctgcttgaatctaaacattaacatacacgtagatat

SEQ ID NO: 387834 - DNA, 592 bp, Homo sapiens
gcattttgggtctaattagattaagcagccaacttcagaaatcccaaaaccagcaacaaaaaaatccactcttaaaattctgttcctctagaaccactcccagtgccaaaatctgtattagtgtcctctagagggatagaactaataggatagatgtatatrtgaaagggagcttatgaaagagaattgactcacaggatcacaaggtgaagtcccacaataggctgtcagcaagctgaggagcaaggaggccagtccaagtctcaaaacctcaaaagtagggaaactgacagtgcagccttcagtctgtggccaaaggcccaagagcccctggcaaaccattggtttaagtccaagagtccaaaagctgaagaacttggagtctgatgttcaaggcaggaagtatctagcacaggagataaatgaaagccagaaatcccaagaagttgacttctctcaccttcttctgcctgctttattctagttatgctggcagctgattggatgatgcccatctacattgagggtgggtctgcctctcccagtccactgactcaaatgttaatctcctttggcaacaccctcacagaca

SEQ ID NO: 387835 - DNA, 622 bp, Homo sapiens
tcttgtctaattctgatcttagggaaaatcattcattctttcaccattaactgtaatatcactttcaaattttgtaaatgacctttatcaggttgaggaagttttaccatattcttctttttctactttgctgagagcactttccacaaatggatgttggatttttgtcagatacttttatgcacktattgagatgatcatgtttatttttttaatttttttaatatattgaattacattgatagacttctgaatagtaaaccaaccatttattgctatagtgaaccacattttcccataatgtattttctttttatgtatgtttggaccaattagctaaattttgttaaggattttagcatttatgtttatgggggatatcagactattcttttcttatctggtaatgcctgtttttctggttttggtatcaggtttctggtttctggccctaccaaagggattggaaagaatttcctccactttaatatttttgaatagttcaaatagaatatattctgctattaggtacataaatatttaggattgtgatatctttttcagtaatttactttcttatggttataaacatatctgacgtatttctggtaatgtactttaa

SEQ ID NO: 387836 - DNA, 585 bp, Homo sapiens
caccgtggaacatcatggggtgcacttccacacacctagactggacagcccaccacacacctaggctctatggtacagcctgctgctccaggcaacaaacctgtacagcacattactgtgctgagtactgcaggcatctgcaacacaatggtaagtacttgtgtatctaaacatagaaaagggtcaataaaaatatggtataaaagatttttgaaaatagtacatgtgtctaggatacttaccatgaatgaagcttgcaggactggaagttgctctgggtgagtcagtcagtgagtggtgagtgaatgtgacatcctgggacataactgtccactactgtagactttatcaacactgtacacctaggttacactaaatktatatgttttcattcatcaataataaattaaccttagctcactgtaacttttttgttttataactttacttttttagcctttttgactcttgtaataacacttagcttaaaacacaaacacactgtacaactttacaaaaatattttctttatttatatccctactctataagctttttttctattttgaattttttaaactattt

SEQ ID NO: 387837 - DNA, 585 bp, Homo sapiens
caccgtggaacatcatggggtgcacttccacacacctagactggacagcccaccacacacctaggctctatggtacagcctgctgctccaggcaacaaacctgtacagcacattactgtgctgagtactgcaggcatctgcaacacaatggtaagtacttgtgtatctaaacatagaaaagggtcaataaaaatatggtataaaagatttttgaaaatagtacatgtgtctaggatacttaccatgaatgaagcttgcaggactggaagttgctctgggtgagtcagtcagtgagtggtgagtgaatgtgacatcctgggacataactgtccactactgtagactttatcaacactgtacacctaggttacactaaatttatatgttttcattcatcrataataaattaaccttagctcactgtaacttttttgttttataactttacttttttagcctttttgactcttgtaataacacttagcttaaaacacaaacacactgtacaactttacaaaaatattttctttatttatatccctactctataagctttttttctattttgaattttttaaactattt

SEQ ID NO: 387838 - DNA, 585 bp, Homo sapiens
caccgtggaacatcatggggtgcacttccacacacctagactggacagcccaccacacacctaggctctatggtacagcctgctgctccaggcaacaaacctgtacagcacattactgtgctgagtactgcaggcatctgcaacacaatggtaagtacttgtgtatctaaacatagaaaagggtcaataaaaatatggtataaaagatttttgaaaatagtacatgtgtctaggatacttaccatgaatgaagcttgcaggactggaagttgctctgggtgagtcagtcagtgagtggtgagtgaatgtgacatcctgggacataactgtccactactgtagactttatcaacactgtacacctaggttacactaaatttatatgttttcattcatcaataataaattaaccttagctcactgtaacttttttgttttataactttacttttttagsctttttgactcttgtaataacacttagcttaaaacacaaacacactgtacaactttacaaaaatattttctttatttatatccctactctataagctttttttctattttgaattttttaaactattt

SEQ ID NO: 387839 - DNA, 540 bp, Homo sapiens
gccatgaaacatatgaaaagatcaaattcactagtattcagacaaatgtaaataaatatacaataatatataacttcgtatcagtcagtctgaaaatatataagctacaaaaactatttccaatagggtatgtgtggtaaagaatactttcaaacatttctgatgaaagtgagaaaygatactacttttgtttagaaaataatctgacaacatctatcaaattataaagaataatatatatacacatatattttaacaataaaacttcactcttcaatttaacctatagaaattaaagtactagaacataaagaggtttcttgcaaaattatttgaattagaaaaagaataaacaaaatgaatatgtatacaaatataatctatatacatatatatatatgaagtactatatatatagtacataagtgaagagagaaagagagactaattcattgggaatagcatgccaggagggatttccatgaaaaaaattaatgagagaatgatgatgcaaaaatctataagcctcaccaccatggg

SEQ ID NO: 387840 - DNA, 540 bp, Homo sapiens
gccatgaaacatatgaaaagatcaaattcactagtattcagacaaatgtaaataaatatacaataatatataacttcgtatcagtcagtctgaaaatatataagctacaaaaactatttccaatagggtatgtgtggtaaagaatactttcaaacatttctgatgaaagtgagaaacgatactacttttgtttagaaaataatctgacaacatctatcaaattataaagaataatayatatacacatatattttaacaataaaacttcactcttcaatttaacctatagaaattaaagtactagaacataaagaggtttcttgcaaaattatttgaattagaaaaagaataaacaaaatgaatatgtatacaaatataatctatatacatatatatatatgaagtactatatatatagtacataagtgaagagagaaagagagactaattcattgggaatagcatgccaggagggatttccatgaaaaaaattaatgagagaatgatgatgcaaaaatctataagcctcaccaccatggg

SEQ ID NO: 387841 - DNA, 540 bp, Homo sapiens
gccatgaaacatatgaaaagatcaaattcactagtattcagacaaatgtaaataaatatacaataatatataacttcgtatcagtcagtctgaaaatatataagctacaaaaactatttccaatagggtatgtgtggtaaagaatactttcaaacatttctgatgaaagtgagaaacgatactacttttgtttagaaaataatctgacaacatctatcaaattataaagaataatatatatacacatatattttaacaataaaacttcactcttcaatttaacctatagaaattaaagtactagaacataaagaggtttcttgcaaaattatttgaattagaaaaagaataaacaaaatgaatatgtatacaaatataatctatatacatatatatatatgaagtactatatatatagtacataagtgaagagagaaagagagactaattcattgggaatagcatgccaggagggatttccatraaaaaaattaatgagagaatgatgatgcaaaaatctataagcctcaccaccatggg

SEQ ID NO: 387842 - DNA, 532 bp, Homo sapiens
aaaatctataagcctcaccaccatgggctaagatgcaatggggcctcaaataaacttgaaaggcagtctagaccacaaggactgcaacacctaaagcaagtcctagggctgaactgggctgagacaatggaccgggagagtacatgacctactgagataccaactggggtggctaagagagtgctggcatctctcctcccctaaccccaggctgcacaattcacagctccaaaacagacccttctttccttcttgaggagaggatgtcaaagagtgggtatgagtttgtcttgcatctcgggtaccagctgagccacagcatgataaagcaccagtcagaaktgtgaggcccctgttctaggccctagctcccaaatatttgtagacataccctgggccagaagagaaccaaaggaaggaattcactgtcttgaaggaaagaactcccctcaggaaggatccatcacctgctaactgaggagtccttgggccatgaataaccagcagtgacacccaagtattatgttgaggg

SEQ ID NO: 387843 - DNA, 586 bp, Homo sapiens
tgggagaaagtaagggaggagaacaaaagtctgtctggtaatccagaaaattattttggatcttgtccaagaccatcaaggaagtacctctacaagtctgctggaaccacagcacttctggatttgggtttccccctaaagcagatacagcttagatcacaatagccaagtcctttagaatttctggaaagttttcccaagaagggcaagtaagcccagactgcaaagactaaaagaaatccctacttcttcaatgcccagacactgaagaatatctactagcatcaacaccatccagggaaacataaccacaccacataaactaaataagtcaccaggtaccaatcctggggaaacagagatatgttwcctttcagacagataattcaaaacagctgtgttgaggaaactcaatgaagttcaagataacacagagaaggaatacagaattctatcagatacatttaacaaagagattgcaataatttaaaatacaggagaaattatggagttgaaaaatacaactgaagaatgcatcagagtcttttaatcacagaattaatcaagcagaagaaagaattagtga

SEQ ID NO: 387844 - DNA, 540 bp, Homo sapiens
ccttcaatcaaactgacaatattaaccatcaaaggtccaccccttgtcaacttgaactcatacacatctcctgaaattatacataatctccaaataaagacaataatgaggtgataatttggctaataaaatacagctatcccttgtacaaccagaagcacattaatccttaamctaaatgctatcacataaagttaacaacacttaaatgctaatatgaagtcaacaaatcttatgtcacatgaaaaggaaaaagaaatgagataaaattaagattttttttagtagaagtgtatacatgcacaaacctattcttaacaaaataaaaaatatattcatgacaattacagtccttgtttctgcaactggtcacattgtcatggctggttttaatgactactttcttctgctacccattctgtattccctttgccttctgcaagcacctcagggggtcatgcttttttacttctggtggagtgacccaaaccttcatgcctgaagagtctgggccatttgtagtcctgcctgggttgggcc

SEQ ID NO: 387845 - DNA, 573 bp, Homo sapiens
atgggcccattgggcaatgacaggggtggctggggaaagaagctgagtggtgtccacagagtgagtcaccatttgattattaaaatcctcctctgctgaggtcacccactgataagtattcacatgagatacaaatatcttcacagtttttgaccactcagagaggtccatccacctacctgttccccaaatttccatgtcaccaattttccaattatacttcttccaagtccctgacgatccagccaaaccgttgggtacagctcatggattagtatataatcacacatctggccatttctcttttcaagcaaagtgcacaaccaggtgtattgccagaagttgtgcccrctgagatttcccttcaccactgtccttcagagatgccctagagaggggctgtagtgccgcagctctccacttttggatggtgcctgcatattacgcagaaccatctgtaaaccaggcccttctattcctctgtcaactgatcatagggaacttcccatgaggccatcaatgcaggctggggagagaaggcagggtggaatgagtggcaaccatgggcatttg

SEQ ID NO: 387846 - DNA, 427 bp, Homo sapiens
tttagcttttgggttaggaaagaaaatctttgatcttatgtacctgcctcagacttcttggtatattatggacatttttacttcactatgtaaaccagacaggaggttttcagagatgcagaaagataactgcatctttctgtggaatgttagaggaactttatatttcatatccaggaaggagttyggttgataatccaattcctgtgtttccatcaatgtcatatgcactttctcctgactacatattaaccagacaatgtgttgtatctcatgatatctgattaaaataatgtgaacacttctatttaacaataatagtttcaattgattccttcaatattggttacattttactctataatttttaaaaaaaaatgtattctggctccaccatttgtacataaactgaaaatgtgaagatcat

SEQ ID NO: 387847 - DNA, 575 bp, Homo sapiens
gggctcttggacacatggaacagagacaacccaaagcactgaatctggcctggggcagcagtgcatggactcacgcacagagtctgaaattgttcttgcccatcgctgaccgtgggttccattgcccmctttcctgaatagagggttctctaaagttatcccctttctactcccctttcacattgggcatgttatgggcaggtgacgtattttttatcttattgataccatggcacaaagattcatatctagccttgatgaagaggtctgcaagtctctagacatcctggcatttgaatgatgtgcagaataattggaggttaccctggggtcatgtcttttggggagagagtatgtacaggaaatatacacaggaatattcaggtgacaaaaaagaaaagaaaagaaaagaaagactgcaaacaaaacagtactttgtgccacaaataatgataatttctccttccttaggaacagtacctctaaattttaatggagcacaagagcaccttgagtagatactacattgcctaggattccttgcattcagatgtgaccctgtgatcacgtcccag

SEQ ID NO: 387848 - DNA, 587 bp, Homo sapiens
taagagacttgtgttagatccaaagacataaataggttgaaagtgaaagaatagaaagataycacatgaaaatatttactaaaagagagcaaaggtgactggaactaatgtcagacaaaatagagtttatatttaaaatgttacagaagacaaagaatattatttactaacaaggttcaataaagcaaaaaagatataaaagtatgaataattatgcatctaataaaacaccatcaaaatatataaagcaaaacttaagagaattaaatggagaaatagttctacaatagtatttgaagatttcaataatctgcttttattatgaatagaataatcagattgaatataagtatagaaatagagtacttgaacaacaaaatatgccaactagatctaacagacctatacagaaaattccaccccaaaacaacagcctacacatctgtctcaagtgcgcacaggacgttctccataatagaccatatgttaggccacaaattcaggctactattaaaaaaagatgaaaataacaagtgtcagaaaataaggggaaacattggaactgttgtgcaccgttggcatgaatt

SEQ ID NO: 387849 - DNA, 587 bp, Homo sapiens
taagagacttgtgttagatccaaagacataaataggttgaaagtgaaagaatagaaagatatcacatgaaaatatttactaaaagagagcaaaggtgactggaactaatgtcagacaaaatagagtttatatttaaaatgttacagaagacaaagaatattatttactaacaaggttcaataaagcaaaaaagatataaaagtatgaataattatgcatctaataaaacaccatcaaaatatataaagcaaaacttaagagaattaaatggagaaatagttctacaatagtatttgaagatttcaataatctgcttttattatgaatagaataatcagattgaatataagtayagaaatagagtacttgaacaacaaaatatgccaactagatctaacagacctatacagaaaattccaccccaaaacaacagcctacacatctgtctcaagtgcgcacaggacgttctccataatagaccatatgttaggccacaaattcaggctactattaaaaaaagatgaaaataacaagtgtcagaaaataaggggaaacattggaactgttgtgcaccgttggcatgaatt

SEQ ID NO: 387850 - DNA, 421 bp, Homo sapiens
atgaataattatgcatctaataaaacaccatcaaaatatataaagcaaaacttaagagaattaaatggagaaatagttctacaatagtatttgaagatttcaataatctgcttttattatgaatagaataatcagattgaatataagtatagaaatagagtacttgaacaacaaaataygccaactagatctaacagacctatacagaaaattccaccccaaaacaacagcctacacatctgtctcaagtgcgcacaggacgttctccataatagaccatatgttaggccacaaattcaggctactattaaaaaaagatgaaaataacaagtgtcagaaaataaggggaaacattggaactgttgtgcaccgttggcatgaatttaaaatgttgtacccacgatagaaaacagtatagtgg

SEQ ID NO: 387851 - DNA, 501 bp, Homo sapiens
gcgctgctgcactggcatgtcctgattttcatgcagcatcttcgtttatgcttcagccgcctcgtcaggacctactgttcacttcagtcaacaaacatggaaaccgaggctcggagcagttgcatcatctgcccacagtcacagtggcatggaagcattctggcagaggaaggagtggagcccagattcaaattcaagcctgactctcaagtctggcttgcagaggtgtccgctgagttattttacactcttgagggttaggtgcctgggcttcagaaggagaacgaatttgaagctaagaattagccttgagggtttggtaaacagccrcccctaacttctttgcacaatacagaaatcttaggaatttttctgatgggagtatttcagattgctttgctgtctgctgttagcttcttgaaaacagtataattcagcaaatatttatctaatgcctactttatacaagaaaactaaaaacagctatgtagggaatataaa

SEQ ID NO: 387852 - DNA, 518 bp, Homo sapiens
gttaggtgcctgggcttcagaaggagaacgaatttgaagctaagaattagccttgagggtttggtaaacagccgcccctaacttctttgcacaatacagaaatcttaggaatttttctgatgggagtatttcagattgctttgctgtctgctgttagcttcttgaaaacagtataattcagcaaatatttatctaatgcctactttatacaagaaaactaaaaacagctatgtagggaatataaaggggagtaaaaagtaatttttgttcataaacttgtgttatataagccccatgaagagcttttttataaggacaagaaaaatawaaaaataactataattcaagtgagacgagaaagtaacataagaaacaaagtctttggtttcaccagaggactgtaattccaccttattggcctctaaggttcccaggggacttgcagtaggcacttaataaacactggttgacttattgacagtgtacagggagagctcagatagcaaaccatctaagta

SEQ ID NO: 387853 - DNA, 610 bp, Homo sapiens
tctatgcctgtttcacaagagcactgtacaaattgaaaaggagttaattttaaaatatttaagatacctagggagaggyatcattagtggatttatttaatgttaacttcagattggttagatcaattaatttatgcttctgagttcaaatttatgttctcaacatattagatacctttttaacatagtgaccacagtcctcagcaacataatttttcagcctggaaaagtaacttattatcttcctatttgctttttctgttaccaaaatgttagtttagcacatctttggtataccaaatgaggacaacaagtacaaaacattcagcatatttttaagttatcagggataaggataactctttgtttcttggcatttctatgattattttttcctgttgccatgagtaaacttatttgactttgtctttcatgtagtattcattatcaaatagtactcaatcaaaatattccagatttttcatattggtcttcatgatacaccaacaagtctttctataggatattttccatagctttggcaataatgtacccagtaccatatattaaaagatcatatttggcaagttttctttctctggggtaagta

SEQ ID NO: 387854 - DNA, 585 bp, Homo sapiens
aacttgagatcctcttcgtgatcctctgtatacatatatacatatatatgtgtgtgtatatatgtatattctcacaaatatgatctcaaattatacatttatatgtatatacatatatatatatatacatataacaagaaatgtgagatccttggatatctatgcttctagaagtaaacctaaagcaactgcaaagctgaaaatgcagttgaagaaaacaatccaaacatactgctaaaattatccagtttcagcttccaaaaattatgctactttattccagctcaaattattattattccagtatctggatacacctgaagctctgtataatgggaagatgaaagagccttaggaaaataaatattttcaggttcagccctttgcaaccctggaacataattcttgacaaagaattatccttgtcttacattaattttctgaakcttgtttctgttactctttatcaaagagacaaatcattcttggatattacttcagtataagtataagcgtaagtataagtcagctgctgacttgttaactgttgttttcctgattcacctatactgaagtaatacccag

SEQ ID NO: 387855 - DNA, 648 bp, Homo sapiens
actccatctgggatttgtggttacctaggtctaccccatattcagagaggagaatggagccatcaaaatactgacatcatggaaagagggctaatggaggttcctttgagtgtgtggttaatgttctaccttggtcttagccttttgcatttatatgggcacattcaagatactcacaccacacaagcatggcatataagcagaaggggaacaaacagatgttttttcccccctggtatgacagggccgtaactaaagggtgctgcagaagctatgtcacactgatctcagctggtctttactttagcatctgtttttttttctagggctccctcaaaagggatatccctaactaacccatcagggccttctctcccayacatcagtccatgtagaaacaacaaaggaatttgattgtgctagttttctgtgtaagcccccacaccaggcttgttagcagaagcctcctccttcacccagcctggctggcttccccttcgcagtcaggagtcttcatttaagtcccttttaatgagaggagctgagagctaactcaatagtcccaaccttcctcttaaaggaatgagctccaccctcccacaacagctacttccaacagcattcctaataagactctgtaatgttttc

SEQ ID NO: 387856 - DNA, 596 bp, Homo sapiens
ataaccagctctctttcactgaggtagaatttttgaaatgctgctgtattgcacctgtcattttgcgtatgacatctttggtaagcagcaggggcaaaattggcaatatctctcagccgcagagtgagaggtacacacatttactcaggtgttgctcttcactcatgggctttatcacacagctttggaaactgtccaaaatctgtgacttttgccattttaaacactgatttcctattataagaaatgagatgattcatgtttgcaaacagtggttctcaaagcatagtcctcagatcagcagcagcaacatcagctgggaacatgtttgatatgcaaatcctcaggccacaccccaaaatttgaatcagaaactggaagagtgggggcctaccaatctgttgtaacaaccttcccagcgcytcattgcacactgagagatacttagcagaagagcagattttacctgcacactagttggataacacagaggagaagctgtcctgtgctcctggaagtcttaacaaagcactgtaacattcactaaacaatctcccacttgctgtgcgttcttttaatcacaacccaaagatacc

SEQ ID NO: 387857 - DNA, 577 bp, Homo sapiens
aattttgaaagcagcaagagagaagcaattcatcgcwtaaaatggaacccccatacagccatgaataaatttcttaatagaaaccttgtgagccaggggaaagtggaatgatatattttaagtgctggaaaaaactgccaatcaagaaaattatattcagcaatattgtccttcagaaatggagacataaagactttttcatataaacaaaagctgaagcagttcataactgttagatctgccttacgagcaatgctaaagggagttcttcaagttcaaatgaaaaactgctaattagtaacatgaaaacatataaaaatataaaattcactggtgtatgagtgtatagtcaaattcagaatattcagaatattccaatactgtaattgtggtgcacaaattacttttaaactctagtataaaagttaaaagacaaaggtagtaaaaataactatggataaagtgatttgttaatagatacacaatataaaaagatgtaaattgtgacaccaataacatgaaatatgaggggggagatacaaaagtgtagagtttttgtatctaattgaagttaaat

SEQ ID NO: 387858 - DNA, 607 bp, Homo sapiens
acttacggtaactactttaaaaactctagtaaatattcaaaagagaaaggaatcaaagcatatcatcacaaaaattcctcaaatcacaaagacagaaagagagcaagaaggaacaaaaaaaaatacaacagtcagtgaacaattcaaaaaatggcaacaataagttcttacctatccatacgtacttcaaacataaatagattaaatactccaatcaaaaaatatggagtagcttaagggacttaaaaagaaacaagatctagcaatattctgcctactagtgactgcctttagctttaagaacacatagtctgaaagtgaaggggtgggaaaaaaaaaaaaaagaactccatacaaatggtaaccaaaagagagcaggagtggttatacttaaatcaaacaaagtaaattttaagtcaaaaaatgtcataagagacaaagaaggtcattacataaaaataaaagtgtcaattcaagaggaagagataagaattataaaaatatatgcacccaatatcaaagcacttaaatacataaagcaaacwttaacagatttgaagagataaataaagagcaatacaataatagtagaagactttaataaccc

SEQ ID NO: 387859 - DNA, 390 bp, Homo sapiens
ttctcatttttcaggatagatcacatgtttggtcacacagcaagtcttagcaattttaagaagattgaagttattccaagtatcctttctaacaaaattaaaatgtaactagaaatcaatgacaattagggatgaaaaaattcacaaatccatgaaaattaaacaacatattctcaaataaccatggagtcaaaaaagaaatcaaagaggattttttaaaaaatctcacaataggctgcacatagtggcttgtgcctgtaatcccagcactttgggaggcccaggaaggtggatcatttgaggtcaggagctcgagaccagcctggscaacatggcaaaaccccatcactactaaaaatacaaaaattagccaggtgtgttggcgcacat

SEQ ID NO: 387860 - DNA, 556 bp, Homo sapiens
ttgtttcaaaagaacgagggtgatggctttaaaaaactatttctaaaacttacccagtgaaagttacatcataaaaactgatagacaattcctttattactttcctaatttttttatttttatataaatgacagcatttaaaatccatgtcattaggaggcttatattgtgaaaattgttgcatctctgtaaagacttaagatgtctcagtgctgaattctctaagtttattttctayatgtttcataggtttaatgacaacaaagaaaatatcttagttaaaaaacatgccttaaaatcagaatcctgggaacttgcttcatgagtcagaaataaaaaatttgtagagggttaaataaaaaccctaaacataaagtgcctaacaaaaagattataaaaccctcaagtgtggaaaaatacacacacatagattagatgtgagtgtcttaaagttctcaaagaaacagtatcattgtgtattcacacattcttgcccagtctacacaactgtatttaaagtgcatattttaatatttgctaatgcaaatggcatagt

SEQ ID NO: 387861 - DNA, 503 bp, Homo sapiens
aatgacattctgctaggtgcagtggcacagttataatcccagctgctaaggaggctgaggctggaggaccacttgagcccaagagtttgaggctgtagtacacaatgatctcccttgtgaatagcccctgcggtccagcctgggcaacatactgagaccccatctctaaaaatataataataataatgacattataatcagccctgtttataaaacamccctgaaattaaccagaaaaagatttgaaatgtacaattatatctactgtaattgtctatgatactcatcccagtgtagagagcttttaagtattttttaatgtattataagtatgtatgtgtgtattcagacacacccacacaaacccacgcacacgcatacacacttttttaaatcacaattctaagaggtttggagacctcagacctcagaccacacattactgagtgagagacgttgaaaagaattgagcaagaagctgaaaaagctctcaaattagtcac

SEQ ID NO: 387862 - DNA, 607 bp, Homo sapiens
acatttcagaggcagtgaatagaatcatttggtgagatggattttgctaacgaagttaacagaagaagaaactggatacctaggttgggcaaattggagagaccatgttagtagaggtacaggcttcatcctcttggcagtgagtaaaacctaaaggaawaaagcaatgaggcaaatgccatttgccacacttaagaaggactctggtggtttgtaaaagagacattctcttgattgcagttaatgggttcctctgatataaaaatccctgttttgttttcacttcagagtatatatccacccatcatcccatttcttgtgaacatttttactaattagtgtattacactatatcatttacatgatggaaaaactgaggtattttttaaaatgtcaatactgaaaacatttcctaaccgcctcctgtgttctagaagaaggaatccactgataacgttgagtctcagcctgtgatccaacaactattctgtggtccaggttcgttgaccaaagcagcatggatggctgtttccaggagcctgcactgtatcaatcatgtagcaatgatagtcaatgcaagcctaagctagcagcagtgttgggaggg

SEQ ID NO: 387863 - DNA, 562 bp, Homo sapiens
atccacttcctccatgtccttagctttatatttccctctagcacaatagcctaattttatgaatccaaggtggtagtaaacccgcttttaatcattactattgtagaytgcctgacataaatttgagaatcaatgaaaagaaagaaaaaataagttagtctttaatggacccatattaattattaaagcattcttctaacaaatttgagatccttaaaggcaggctgagaaaatgtccctgtatctaggaaattaagtagggtttcttggacaaaaagatattgtcatttctccctgccccttgtttaaacaatgtagaaaaatatttgttgatccataagccaatgagtaatttttaatttgcaatggatttattacgatctacacggaaaattgtaaaaattaactacattaccagatttcttggttctgaaaaatattattttatttctctttgactatcggtcaacttgtgttttcgtataatctgatgcatattgataggaattgaaagcttgcgctgttcaaagtaaaacaaaataatacaattctaaaataaatt

SEQ ID NO: 387864 - DNA, 632 bp, Homo sapiens
cttgctgggtttccacacttgattagcattagactgtaccctttctgtcaaattatacttcaacagaagttgccaatactttgtcaaaactaagcgtaaaaatggacaatttcccctgtacctttagatcttcattctgaagcttcccatgtatacatgataaataaattygtaagccttttctccaattaacgtgccttttgccagttgattttttagtacaacttccggggtcaagggtcttagcccctacgatggattgcatactggtgtgaaagttcctttaacaatgggtttgtttgatggtaggcatatgcatcttttgctgtattaaacatcatgaaattatacttcaaagcagtttcctgaattatacatccacaaacaatgtataaggaatctctgacagtcccgtgttgaacctgtttacactcagaaacttagcaaatggtgaatatttgaataggattccagtacatttttcaccatacttcatgaatatagttaagattcacataaaaattaacataacattatacactcaaacaatagcttttaaatatgtttgtctctttagaagttttatgttaataattctgcttgtacctatataataaacatgcatcttctgc

SEQ ID NO: 387865 - DNA, 576 bp, Homo sapiens
aaggaagagagagaaaaagatacaggttgaatatcccttatctgaaatgctttgactagaagtgttttggattgtgtattggtcagggttcacactccctctagagggacagaactaatggaatagacatatatataaaggggagttatattaacttccgtgatcacaaggtctcgcagtaggccatctgcaggctgaggagcaaggagagccagtctgagttcccaaactggagtccaatgttcgarggcaggaagcatccagcacaggagaaagatgtaggctgggaggctaggccagtctctcttttcacatttttctgcctgcttattttctagccaggctgagtgctgattagattgtacccacccagattaagggtgtgtctgcctttcccagttcactgactcacatattaatttcctttggcaacaccctcacagacacacccaggaacaatattttgcatccttcaatccaatcaagttgacactcagtattaaccatcacagattggattttttttaaattttttattttcaaattaggaataccaacttgcatgtcactggagca

SEQ ID NO: 387866 - DNA, 576 bp, Homo sapiens
aaggaagagagagaaaaagatacaggttgaatatcccttatctgaaatgctttgactagaagtgttttggattgtgtattggtcagggttcacactccctctagagggacagaactaatggaatagacatatatataaaggggagttatattaacttccgtgatcacaaggtctcgcagtaggccatctgcaggctgaggagcaaggagagccagtctgagttcccaaactggagtccaatgttcgaaggcaggaagcatccagcacaggagaaagatgtaggctgggaggctaggccagtctctcttttcacatttttctgcctgcttattttctagccaggctgagtgctgattagattgtacccacccagattaagggtgtgtctgcctttcccagttcactgactcacatattaatttcctttggcaacaccctcacagacacacccaggaacaatattttgcatccttcaatccaatcaagttgacactcagtattaaccatcacagattggattttttttwaattttttattttcaaattaggaataccaacttgcatgtcactggagca

SEQ ID NO: 387867 - DNA, 617 bp, Homo sapiens
aattagttgatggaatttagaataactgattaatatattaatggctctaatggagaaaataaacaacatgcatgaaaaaaatgagtaatggaagcagaaatatacacagtctaagaattaaaaaaaagtgttagtaatgaaaaactccataacrgaaatgaagaatatcttctttggattcatgagtaaactcgatgtggctaatgaaaaattattgaaattgaaattaggtgaaaagcaattttccaaacttatatgcaaagagataatgaatgataataattgaaagaacagaacaccaaaacactgtggaactatttcaaaatcatgaaatatacctacttggaataccaaagagaaagaaatggagaaggaataattaatgaaataatggtcaagaactcctaaaatcaatagcagacacagaacacagatccagaaagctcagagaacaccaaacatggagggaaaacaacaacaataaaaaaatactgcatctaagaatatctagtaatagagtggtgtaaaatatttaaggtgttgaaagaaaaaaaaaacaccactaatctggaattctatattcactgaaattatcctttagcagtaaagcagaaata

SEQ ID NO: 387868 - DNA, 617 bp, Homo sapiens
aattagttgatggaatttagaataactgattaatatattaatggctctaatggagaaaataaacaacatgcatgaaaaaaatgagtaatggaagcagaaatatacacagtctaagaattaaaaaaaagtgttagtaatgaaaaactccataacagaaatgaagaatatcttctttggattcatsagtaaactcgatgtggctaatgaaaaattattgaaattgaaattaggtgaaaagcaattttccaaacttatatgcaaagagataatgaatgataataattgaaagaacagaacaccaaaacactgtggaactatttcaaaatcatgaaatatacctacttggaataccaaagagaaagaaatggagaaggaataattaatgaaataatggtcaagaactcctaaaatcaatagcagacacagaacacagatccagaaagctcagagaacaccaaacatggagggaaaacaacaacaataaaaaaatactgcatctaagaatatctagtaatagagtggtgtaaaatatttaaggtgttgaaagaaaaaaaaaacaccactaatctggaattctatattcactgaaattatcctttagcagtaaagcagaaata

SEQ ID NO: 387869 - DNA, 617 bp, Homo sapiens
aattagttgatggaatttagaataactgattaatatattaatggctctaatggagaaaataaacaacatgcatgaaaaaaatgagtaatggaagcagaaatatacacagtctaagaattaaaaaaaagtgttagtaatgaaaaactccataacagaaatgaagaatatcttctttggattcatgagtaaactcgatgtggctaatgaaaaattattgaaattgaaattaggtgaaaagcaattttccaaacttatatgcaaagagataatgaatgataataattgaaagaacagaacaccaaaacactgtggaactatttcaaaatcatgaaatatacctacttggaataccaaagagaaagaaatggagaaggaataattaatgaaataatggtcaagaactcctaaaatcaatagcagacacagaacacagatccagaaagctcagagaacaccaaacatggagggaaaacaacaacaataaaaaaatactgcatctaagaatatctagtaatagagtggtgtaaaatatttaargtgttgaaagaaaaaaaaaacaccactaatctggaattctatattcactgaaattatcctttagcagtaaagcagaaata

SEQ ID NO: 387870 - DNA, 583 bp, Homo sapiens
tttagtattttattttttatttttttcttagcatttccatttctctactaatattaccatctgttcttgtatattctttacctttattgttaaaattcttaacatatataattattttataatttctgtcagataatttcaatatctgtgtcgtgtcttagtctaactctgatgcyttgttatgtcttgcccttaagaatgtcttacaatattttgctggaagccagacatgttgcatcaggtaatggaagctgagataaatgagtctttaatgtgagaatttatgttaacatagctagaattttggctttgtttaaagtttgttgtgtctagagttaccagaatattcaaatttctctagtactttttcttttcttttctcttgttttcctatgttttctcctcataaatagggtgttttcctatgttctgctcctcataaagaatccgtgtgccctttccccgacaatactagagttatcctagaagtttcttggttatatactttcagattccacagagcaaaattctatgtatatttcaaaccatagttaaagtgccactcttgtcttgattactctgg

SEQ ID NO: 387871 - DNA, 539 bp, Homo sapiens
cctttctagctcaatgttctgccctgcaggaccactggggtgaagatcacacactggctctgggggacttaagtctcatcctttgaaatctaagtggaggcaactctgctcccggggcttttattatctgtgagcttgtggagttggcaacatgcagataccaccaaagttttctgtctgtgcctttcagagaggtggccaatgcagcctgtgctacatgagggcccacctaarctttacctggggcagctgtgtgtaatgccagagagcaaggcattgaggcaaactgaggtcccacagactctgacagtctctcctttgaaaccactcttccctgaaggcccttacgctttgagcctgtgataagagagttagtcctaataatccttaaattgctttcagggtaattattccattgtcctggataatagctcctggcttctgtttagatggttgatccacactaatctccttattaaacagtcacttgcccacacccttagtgttctttcccaaagaggctttctcgttcattataa

SEQ ID NO: 387872 - DNA, 557 bp, Homo sapiens
ctatcatcccacctcagcctcctgagtagctaggatgacacctagtgtgcacaccaccgcacctgtggtttttttttgtttgttttttgttttttgtttttttttaagatacagaggggtatgtgtctccttatatgactcaggctggtctcaaacacctagcctcaagcaatccccccgctttggcttcccataatgctaggatagcaagcatgaatcaccactcctggtccccagtatttcttttgtattgattaattcatktcacatttttataacatttaacatttgcagcaatattaattcaaatgaataaactaagttgcaaacatcatggtacactgtagtaccatgcaactgtatcaaagatgtctaaccctttaatatgtcaacactgcccacacctatggccaaccacctcttcatagattaccaaggaaaagaaatcataggtaaatgttatgaaatatacgcatgtaacagactaacatggctgaactagataattgattttagagacattggtgaggtaaatctgtaatgaccaattgaatctg

SEQ ID NO: 387873 - DNA, 472 bp, Homo sapiens
ataatgctaggatagcaagcatgaatcaccactcctggtccccagtatttcttttgtattgattaattcatttcacatttttataacatttaacatttgcagcaatattaattcaaatgaataaactaagttgcaaacatcatggtacactgtagtaccatgcaactgtatcaaagatgtctaaccctttaatatgtcaacactgcccacacctatggccaaccacctcttcatagattaccaaggaaaagaaatcataggtaaatgttatgaaatatacgcatgtaacagactaacatggctgaactagataattgattttagagacattggtgaggtaaatctgtaatgaccaattgaatctggtttcatcccttgtcaactgtattttattcacaattttgagaataggtgargcatagtataatttgattgtgaacataaatctggtgcctgtgaataggaaaaaaag

SEQ ID NO: 387874 - DNA, 619 bp, Homo sapiens
ttcatcccttgtcaactgtattttattcacaattttgagaataggtgaagcatagtataatttgattgtgaacataaatctggtgcctgtgaataggaaaaaaagactggataaatattaggagggatatggagaggtgaaaaagaatgaagaatattaaatagttcccatctgcactgcataatttctcagtacattattttaattaattccatacagyaccataattgtatatttttgtacactttcagtcatttgtcaaaagtactttatggttttttttttaacagtttttctacaatgcctactttatttcagaaatcaggcacttaatacaaattcattgaagattgaaccaattttatttttcttcacagacataacttttacttcttctttaattttctttcatagtttttgatggatgggagacttttctaatttaaatgaaatggaaattgttttaggtcaaatgtataattgtgctaaatctttccatgtttgataagctattcagcaataaatttgtacactatttagccagtattcctagacactttatcatctcctttttctagtaaagcatttgaatcctaggatccagcaaaagataacactt

SEQ ID NO: 387875 - DNA, 377 bp, Homo sapiens
tgcagtacttgaagcattttaatarcattcacttgcttttggcgttttcaacatatttatatcattcatattgtccagaatctttccagaatcattttctacatcgtattctgtgcctgaggaggctgaacttcatggactgagtcaataggctctctgacccttgaacttctcactggatttaggccgtctgaagagaaaattagggggcaggctgacagtaagggtgaagtatattcctggctcattttttgtctggttgcagactagctatggctaattcgcaactgaagttgtagttcctgtcaggtggccatctgagactacagcattcccttcaggttgtgggaatctctccatcttcctcactccttgaa

SEQ ID NO: 387876 - DNA, 574 bp, Homo sapiens
gccagtttcattaataattgataataggttaacttataaaacaaagttaggttggtagagattaatcaaagtattaatccacagaaaaaataattatttctccttttcagaatactataaattcagtgttttcttaatactcatatatctgcaaggtgagtcagaagaaatgttgttctgaaggggtgatgtttataagatggcacaataggaaattttgaactcttcccccccgccatgaacacaccagttcaacaacaatacacagaaaaaaaaaaaaaaacatccctctataaacaattcggaaacttgttgagaggctattggaaatgggacagcatgaagccagtcacactgaagctggtggggacacagcgccwtgcaatcaggaagaaagccctgattcccagcttttctgtggggttggaaaaagttggactgcattttcaattttcaaatttttcaagggtttccaaggctctggcttttgtcttgcctgtgtcagagtactgacggtatctagcatactgtagatgcctgggagccacagaagaaagatggtattttttactaa

SEQ ID NO: 387877 - DNA, 574 bp, Homo sapiens
gccagtttcattaataattgataataggttaacttataaaacaaagttaggttggtagagattaatcaaagtattaatccacagaaaaaataattatttctccttttcagaatactataaattcagtgttttcttaatactcatatatctgcaaggtgagtcagaagaaatgttgttctgaaggggtgatgtttataagatggcacaataggaaattttgaactcttcccccccgccatgaacacaccagttcaacaacaatacacagaaaaaaaaaaaaaaacatccctctataaacaattcggaaacttgttgagaggctattggaaatgggacagcatgaagccagtcacactgaagctggtggggacacagcgccatgcaatcaggaagaaagccctgattcccagcttttctgtggggttggaaaaagttgractgcattttcaattttcaaatttttcaagggtttccaaggctctggcttttgtcttgcctgtgtcagagtactgacggtatctagcatactgtagatgcctgggagccacagaagaaagatggtattttttactaa

SEQ ID NO: 387878 - DNA, 561 bp, Homo sapiens
gaaaacttaagagacttaaaggactccatcacatggaattccatgatggaattctcagaagaagagaaagaaaaggaagatattttattcaaagaaataatgaccaaaacttcccaaatctggggaagaaaatgagcattyaaatccacaattccaatagacccaaataaggtgaagacaaagaaatccacactgaggcacataagtgaattgtcaaaagtcaaagacaatgataattttcaaagtagcaaaaataaatgatttgccatgtactggataattccttaagactatcagtgcatttctaagcagaaatcttgcaggctagaagataatgacaggacacagtccaagtgctgaaagaagaaagctacccaccaagaacgtaatacatagagacactgtccttcaaaaatgaaggggagataaagatgaaaggtaggttaaaaaaaagagaatagatcacatgttaggtcacaaaacacaccttaacaaacctgagaaaaattaatcacaccaagtgtcttttctgaacacaatgaaactagaaatcagtaggag

SEQ ID NO: 387879 - DNA, 561 bp, Homo sapiens
gaaaacttaagagacttaaaggactccatcacatggaattccatgatggaattctcagaagaagagaaagaaaaggaagatattttattcaaagaaataatgaccaaaacttcccaaatctggggaagaaaatgagcatttaaatccacaattccaayagacccaaataaggtgaagacaaagaaatccacactgaggcacataagtgaattgtcaaaagtcaaagacaatgataattttcaaagtagcaaaaataaatgatttgccatgtactggataattccttaagactatcagtgcatttctaagcagaaatcttgcaggctagaagataatgacaggacacagtccaagtgctgaaagaagaaagctacccaccaagaacgtaatacatagagacactgtccttcaaaaatgaaggggagataaagatgaaaggtaggttaaaaaaaagagaatagatcacatgttaggtcacaaaacacaccttaacaaacctgagaaaaattaatcacaccaagtgtcttttctgaacacaatgaaactagaaatcagtaggag

SEQ ID NO: 387880 - DNA, 550 bp, Homo sapiens
aaaataaaatttgaaattaaaaaaaagaattacatattttatttttttcatatcccttgcatcttttccagtctgctgcttaactcagtatactatatgatactctgttttatttaaattttagattatgacttgtattaatgttatttatgtgttgatataattttatattatttatatatacatagtttttataatttttttctccaattacctaatcgaaaattcacaaagactattcgataactaatasaattagttatcaaacttaatctaatggttccatctagaatatggaatgcagaaactgcccagtcaatgtgaggtagaagtctgaatctttgtgttgttttcaaatttgataagaatgtttatagcattttggcatcgagtttaacatttatattactatttagaaaatacttgatattactacaataacttgtgttctattcttagcttgcaaacttgtgtaatgaatgattgccgtgtttctcacttgaatatattttcagatgtagacgtaatcttgcatattgaattcctgatt

SEQ ID NO: 387881 - DNA, 550 bp, Homo sapiens
aaaataaaatttgaaattaaaaaaaagaattacatattttatttttttcatatcccttgcatcttttccagtctgctgcttaactcagtatactatatgatactctgttttatttaaattttagattatgacttgtattaatgttatttatgtgttgatataattttatattatttatatatacatagtttttataatttttttctccaattacctaatcgaaaattcacaaagactattcgataactaatacaattagttatcaaacttaatctaatggttccatctagaatatggaatgcagaaactgcccagtcaatgtgaggtagaagtctgaatctttgtgttgttttcaaatttgataagaatgtttatagcattttggcatcgagtttaacatttatattactatttagaaaatacttgatattactacaataacttgtgttctattcttagcttgcaaacttgtgtaatgaatgattgccgtgtttctcacttgaatatattttcagatgtagacrtaatcttgcatattgaattcctgatt

SEQ ID NO: 387882 - DNA, 532 bp, Homo sapiens
gctaagttttgttttgttgaaatttattctttatttaatattaaaatagaatggctgaagtagtactccattcatttggtggtatatgaagtaagtgaaagtaagatacatcaataaatttgttagaaaagaagagagctatgatagcataacaaatatttgaaaaacagtgaagaaagcacaaattttgagtrtcaataaacacagaatattcaggcaagagaggaataaacagcggacaggaagtattgaagatatgtttgttttaaacgggtagattctaaaatgcaggataaaaataacattgtcttctctttttttggaaaacatatatacttacttttttttctcaacttttaagttccaagatcatgtgcaggatgtgcagatctgttacataggtgtgccatgatggtttgctgcacagatcatcccattccggtattaagcccagcacccattagctgttcttcctgatgctctccttccgcccacccccacaccctacacaggccccagtgtgtgttgtttc

SEQ ID NO: 387883 - DNA, 519 bp, Homo sapiens
actcctgcaagaatgtccacaatcaaaaaatcaaaaaaaaaaagtagatgctggcatggatgcagtgaacagggaatacctctacaytgctggtgggaatgtaaactagtacagccactatggaaaacagtgtggagattccttaaagaactaaaagtagaattaccatttgatccagcaatcccactactgggtatctacccagaggaaaagaagtcgttattcaaaatagatacttgcacacgcatgtttatagcagcacaattgcaaaatcatgggacaaacccaaatgcccatcaatcaatgagtggattaaaaaactgtgagagagatatatatatatggaatactatccagccataaaaaggaatgaattaacagcatttggagtgatctggatgacattggagactattattctaagtgaagtattctaaatgaagtaactcagaaatggaaaaccaagtattgtatgtcctcactgatatgtgggagctaagctatgaggacacaggcata

SEQ ID NO: 387884 - DNA, 574 bp, Homo sapiens
atgccatcctcccacacattttatgtttttgatgtmacaatctgcatctgattatattatgtattccttaacaaattatcctagacattattatctttaatatttctgtcttttaacctgcatactaaagatatagtaatttacacaccaccattacaaggttagaatattctgaatttgactcgtacttacttttaccagtgagtcttacactttcataagtttctgtactatgaaatatcacccttttctttcagcttgaagaattccctttagcttctcttgtaaaatagatctggtgtttcaccttttgttttaattatttatccctctttcatttctaaggaacagttttgccagctacaatattcttggatggtaggtttttttgtttttttttttttttccttcagtatttcgaacatgtcatcctacactctcccaacccataaggtttctattgagatttctgttggtatttcttattggaactctctatgtggatgtgatttgtttcttttttcttactgtgttcaagattatctctttgactttgatttgtaaagtttgatta

SEQ ID NO: 387885 - DNA, 587 bp, Homo sapiens
tggtgctataagggccagtctggggagtggggcctcagggagtaatagcctggcactggacaagcctgggtcctatgcctacaggtgccaggttgatgcctgaaggcaggggtgctgacttcatgccagggtgagcctgaattggggagctgtgtgggttgacctggcttagggctggttggaaatctagggctggcttggaagctggaatcacaaggtcttgtctggcagtgagtaggtctgatacttgtatctacagggaccagccaggaggctgaatctgaagatgctggcctgatgactaggcttggagtgcatggcatggcactagggcagtcctgaagcctggtgccttaggtatcagtctagtgctgaaggtaaaatggaggtcagggctgtcaggtagccttgccctgaggcaagacttgtgaataagtctgttggggttggcctggtactggggcagggtgagtgctgggtcaggtccaaagtctggagctatacaggcctgcccaaaactgtgttttactatagtgggcctagtaytggggactgaaacaacgtctagtgctcatttctctctcttt

SEQ ID NO: 387886 - DNA, 566 bp, Homo sapiens
tctaaaacctttttaatcaatgaagccttgaatttgactggaacttttctttgtgtaccactacactttccctaaaagttgtctctgctttagacatttgttagtagtgccaatttgagagacatttgccaaataatgtgtggatgaatttttagcgctttcaaagaaaagaaacacaaggtagcctaggaatttatagggaatccattatttctttatgtattgtaattagactaaataaatggccctttagtaacattttttccccaccctgcccctctaacttccttctttctcttgttctgtcttcttgccttttgaggtgttaaagcaattaagtaaaaaaaaaaaaaagaaaaagaagcctgacttgtcatctttcatggtgactggaaaatcaatattcagcctcytccagtcagagaaggctagtaaatccaaagattggaccctttaacatgaacgatttgcaaaaccaatttactgggaattacttaaaaatgcccatgccaaatctattagttataagactgaaaacttataaaattttattctagcctcatatt

SEQ ID NO: 387887 - DNA, 565 bp, Homo sapiens
ccaatttactgggaattacttaaaaatgcccatgccaaatctattagttataagactgaaaacttataaaattttattctagcctcatattttcctattttgaatgcatgtaggttgattttcttatttgatatacatgcatttaatcaccattaattgtwgtttcaaaatgttctcagtctgaatttaatttatgtttagcttcctctcttctttcatattgttttaaatgtattttctccaaaactagctatcatcactttattttttaatgtattgataaggactttcatattcaaaccagcctctcttaatccgtaattcaaaacaaaacaatggaattggagaaaagaaagatgtttaacaccaacaaatttcaagtgagacagacaatataagatagaatacaggaggaatccccaataaatgtgaagcagatgaagctagattaaaacattccaatctttataagacttcaactttataccaattagaatatgggtaccagccgacttctatgtgaatgattttggggatgagggggaaacagacactgaaatttcat

SEQ ID NO: 387888 - DNA, 631 bp, Homo sapiens
tagtaaatccaaagattggaccctttaacatgaacgatttgcaaaaccaatttactgggaattacttaaaaatgcccatgccaaatctattagttataagactgaaaacttataaaattttattctagcctcatattttcctattttgaatgcatgtaggttgattttcttatttgatatacatgcatttaatcaccattaattgttgtttcaaaatgttctcagtctgaatttaatttatgtttagcttcctctcttctttcatattgttttaaatgtattttctccaaaactagctatcatcactttattttttaatgtattgataaggactttcatattcaaaccagcctctcttaatccgtaattcaaaacaaaacaatggaattggagaaargaaagatgtttaacaccaacaaatttcaagtgagacagacaatataagatagaatacaggaggaatccccaataaatgtgaagcagatgaagctagattaaaacattccaatctttataagacttcaactttataccaattagaatatgggtaccagccgacttctatgtgaatgattttggggatgagggggaaacagacactgaaatttcattttcctcacacagcaaagtc

SEQ ID NO: 387889 - DNA, 607 bp, Homo sapiens
ggcttaatctctaaaattatccctttaaaaagagtcattttgttaaaatttcatggctacttttaagtttattttaaatctaccttcagtactaagctacttcattcttctggaagttttctttyctcttggtttctatgacactgcactcccttggtactcctgtttgcactctactttaattttcccaccttttgaatgtaggcttctctccatttacaagtttttttttttttaatcgcaagacttcaaatatcaccttcgggtggctaatgccaaagtccatgcttctattccttctctcattccggaacacaagacctgcatttctaaaagtctgttaaacattttaccatagttgtctccaaccttttcaaatacagtttatctaaatagggctcactttattttccaatccaccttttaccttaaatataatcatattctctaattttgaatattatttaatgatactttatttgactgtatcctgcaagctctcaaatcttgaacttttactctctgcctcactctccattctctgtcaagtaaggttcaaattctttaaattctatctttcaaactctctcacatttctctgcccttt

SEQ ID NO: 387890 - DNA, 610 bp, Homo sapiens
tgggtgccttatgcagttgggaagtgatggaagaagcacaaagtaagatcatgtggtgtactattctgatttgtagagataggaaggaagagaacccagcctgactaggcaaatatctagtactacctgggtagcaaaatcacatgaagctaagccgtgctcagtggcagcccaggcaggtatgtggctaaaggtttgagaaattatggccctgagagaatgggaggaagcacatgaaatgtgttcaatattcaacaaagaccataggacatgtttactacattgtttctcyttgatctttttgatgttgtccattaggatataggtacatgattactgatgaggactataaaaatatataagatttttatattgaaaaataaaattaatactttatatcagcggtccctaaccttttgggtactagggacttgtttcatggaagacaatttttcaccagactggggtggagggatggttttgggatgattcaagtgcattacattttctgtgataaaaacatttattgtctttttcttttgaaaaactccaaagccttgtcttttaacgcagggtgcttgctctccatgtagcaaagcagttttgatgg

SEQ ID NO: 387891 - DNA, 610 bp, Homo sapiens
tgggtgccttatgcagttgggaagtgatggaagaagcacaaagtaagatcatgtggtgtactattctgatttgtagagataggaaggaagagaacccagcctgactaggcaaatatctagtactacctgggtagcaaaatcacatgaagctaagccgtgctcagtggcagcccaggcaggtatgtggctaaaggtttgagaaattatggccctgagagaatgggaggaagcacatgaaatgtgttcaatattcaacaaagaccataggacatgtttactacattgtttctccttgatctttttgatgttgtccattaggatataggtacatgattactgatgaggactatraaaatatataagatttttatattgaaaaataaaattaatactttatatcagcggtccctaaccttttgggtactagggacttgtttcatggaagacaatttttcaccagactggggtggagggatggttttgggatgattcaagtgcattacattttctgtgataaaaacatttattgtctttttcttttgaaaaactccaaagccttgtcttttaacgcagggtgcttgctctccatgtagcaaagcagttttgatgg

SEQ ID NO: 387892 - DNA, 532 bp, Homo sapiens
aacatttattgtctttttcttttgaaaaactccaaagccttgtcttttaacgcagggtgcttgctctccatgtagcaaagcagttttgatggtttcatagcttcgttgaatagccggttgccacatattatacaaagcgagcttggagaatgtgaatcacctgttgcaatgaactcataatttaagtaggactcttcgtatttcttttaaatgcagctttctttttgttggcagttttagtgtcttctgctttctcatcattgggtctttctcccttttcaaagaatttctctatggytgttttttattcgttttggctagggttagcttgcgggcttaccaaaactgtgactgagacaagtgcacagttcgggaaagaggcgtggacgaaagtggtaaataaaataataggcaggccatacacagactaaaataagtgtcggattctgacttaaaacctgccatcagatgcagctgtacaattgaagtacatcaactcacttgccactataaagcctgacatcagaggcag

SEQ ID NO: 387893 - DNA, 532 bp, Homo sapiens
aacatttattgtctttttcttttgaaaaactccaaagccttgtcttttaacgcagggtgcttgctctccatgtagcaaagcagttttgatggtttcatagcttcgttgaatagccggttgccacatattatacaaagcgagcttggagaatgtgaatcacctgttgcaatgaactcataatttaagtaggactcttcgtatttcttttaaatgcagctttctttttgttggcagttttagtgtcttctgctttctcatcattgggtctttctcccttttcaaagaatttctctatggctgttttttattcgttttggctagggttagcttgygggcttaccaaaactgtgactgagacaagtgcacagttcgggaaagaggcgtggacgaaagtggtaaataaaataataggcaggccatacacagactaaaataagtgtcggattctgacttaaaacctgccatcagatgcagctgtacaattgaagtacatcaactcacttgccactataaagcctgacatcagaggcag

SEQ ID NO: 387894 - DNA, 588 bp, Homo sapiens
tccgttaggcatcagtgaatgaataattctataattattctataatttatatgggtaccaaataagtcaaggccagaaataaaatagccaatattatttgtttagaacctactatcatctagaaattggtataatttctatggatacaaaattcattaagagtaaaacttcatactcaagagattcacagtataatgggagatacataaaagtttataaaaagaatatgatcttcatgattactaagtaaaactaaccacagaatattattggaatagggaagagaaacawtaaaaaagtcttggaagtagcacaagactctttaaggagaatatagttaatctagtgttaaagaacaaaaaagaatataagcaggtagataaagcaggcaaactaatgaaaggaaatgatatcatattgctcaaacaattagaaaaattagagtgtaaggtatatcatgggtcagcaaacagtttatgagagggaatggtaagaattgaagttcaataattaaggaggagtcttatgtgctcagtttaagaatttgagctgaatccccaaggcaattggaagcattgaaaaataaga

SEQ ID NO: 387895 - DNA, 475 bp, Homo sapiens
tgttttttttttgttttttttttttcagagagtacaggaaatcatgaatgttcggtccatcacagttaaccaggattctttacccagacactgattaaggacatgaataactcttgakaagtgacttcaactagggacacctgacaatgtttggaactattttcaattgtcagtactaaagaatgttacacatctagagattggagaccagagattctgctaaacatcctacaaagcactcgacatcctccctcccccgaacaaaaaagagtataatttagcccaaagtttcaatagtactgaagatgacaaatcctgttctagagggagtttaaaactttgcctgtagatggagcttaaaattgttaaggattgcagggatttgtatataaggaacaaatgagatgctaaaggatatagtaaccaatggaaatatttcatacaaaagatggaaacaactgtttaaacaaactgt

SEQ ID NO: 387896 - DNA, 475 bp, Homo sapiens
tgttttttttttgttttttttttttcagagagtacaggaaatcatgaatgttcggtccatcacagttaaccaggattctttacccagacactgattaaggacatgaataactcttgagaagtgacttcaactagggacacctgacaatgtttggaactattttcaattgtcagtactaaagaatgttacacatctagagatyggagaccagagattctgctaaacatcctacaaagcactcgacatcctccctcccccgaacaaaaaagagtataatttagcccaaagtttcaatagtactgaagatgacaaatcctgttctagagggagtttaaaactttgcctgtagatggagcttaaaattgttaaggattgcagggatttgtatataaggaacaaatgagatgctaaaggatatagtaaccaatggaaatatttcatacaaaagatggaaacaactgtttaaacaaactgt

SEQ ID NO: 387897 - DNA, 595 bp, Homo sapiens
ttacacactactaagtaataaatgtgaaatcaagatgtgcttgattacaaaggcctgcttctcatatcattataaaataatccatttttccaatacaaaatttatgtattttttcagttcagaatgcaagccagataccagcaataggaaaaggtaccatctmaggcttccagagctctaataaataaataatttcaacatggaaattagacaaggattttgattggtacatcaagtaattaaatttaaaaagtgtcttgattaactattgtgtttcaacatcaattcaacaatagaaaatataattactcagcataaccaattatattttattaagggatgcatgatgttataaatgagaaaaatgcatttataatgaatttattttagtttttataaaactagtaatattaaaggtaaatgattggcaaaccattgttcattcgtctattgtttgttgaagaattttgttttgaaaggtaattatatgcagagtactaacttgaatatttctttatgcagaaaggaaacttatacatagtcctgaaccctcaaaaatcatatttttacagggcatttattgtgtgtggagata

SEQ ID NO: 387898 - DNA, 595 bp, Homo sapiens
ttacacactactaagtaataaatgtgaaatcaagatgtgcttgattacaaaggcctgcttctcatatcattataaaataatccatttttccaatacaaaatttatgtattttttcagttcagaatgcaagccagataccagcaataggaaaaggtaccatctaaggcttccagagctctaataaataaataatttcaacatggaaattagacaaggattttgattggtacatcaagtaattaaatttaaaaagtgtcttgattaactattgtgtttcaacatcaattcaacaatagaaaatataattactcagcataaccaatkatattttattaagggatgcatgatgttataaatgagaaaaatgcatttataatgaatttattttagtttttataaaactagtaatattaaaggtaaatgattggcaaaccattgttcattcgtctattgtttgttgaagaattttgttttgaaaggtaattatatgcagagtactaacttgaatatttctttatgcagaaaggaaacttatacatagtcctgaaccctcaaaaatcatatttttacagggcatttattgtgtgtggagata

SEQ ID NO: 387899 - DNA, 595 bp, Homo sapiens
ttacacactactaagtaataaatgtgaaatcaagatgtgcttgattacaaaggcctgcttctcatatcattataaaataatccatttttccaatacaaaatttatgtattttttcagttcagaatgcaagccagataccagcaataggaaaaggtaccatctaaggcttccagagctctaataaataaataatttcaacatggaaattagacaaggattttgattggtacatcaagtaattaaatttaaaaagtgtcttgattaactattgtgtttcaacatcaattcaacaatagaaaatataattactcagcataaccaattatattttattaagggatgcatgatgttataaatgagaaaaatgcatttataatgaatttattttagtttttataaaactagtaatattaaaggtaaatgattggcaaaccattgttcattygtctattgtttgttgaagaattttgttttgaaaggtaattatatgcagagtactaacttgaatatttctttatgcagaaaggaaacttatacatagtcctgaaccctcaaaaatcatatttttacagggcatttattgtgtgtggagata

SEQ ID NO: 387900 - DNA, 595 bp, Homo sapiens
ttacacactactaagtaataaatgtgaaatcaagatgtgcttgattacaaaggcctgcttctcatatcattataaaataatccatttttccaatacaaaatttatgtattttttcagttcagaatgcaagccagataccagcaataggaaaaggtaccatctaaggcttccagagctctaataaataaataatttcaacatggaaattagacaaggattttgattggtacatcaagtaattaaatttaaaaagtgtcttgattaactattgtgtttcaacatcaattcaacaatagaaaatataattactcagcataaccaattatattttattaagggatgcatgatgttataaatgagaaaaatgcatttataatgaatttattttagtttttataaaactagtaatattaaaggtaaatgattggcaaaccattgttcattcgtctattgtttgttgmagaattttgttttgaaaggtaattatatgcagagtactaacttgaatatttctttatgcagaaaggaaacttatacatagtcctgaaccctcaaaaatcatatttttacagggcatttattgtgtgtggagata

SEQ ID NO: 387901 - DNA, 597 bp, Homo sapiens
tgtgtgtggagatacatatagtaatgaaaaatttataagttgcttacagaaaactatggttgaggaatgtgactggaataatttaatgagaaattcacagaagcaatcaatggacagagaagcatattagagaaaatgatggccaaattaayaacctaaataaagcatttgaggtgaaaagcaacaattttaaaatgaaaatgatattggttgaacatggcaagagcaatgtttggcctataatttcttctggttttcagtaaaagttattactagaattttgaaagaaaaatattgaaaccctagaattgtatgttcaattaatccatcagttatgaaaagtgaataagttctagagatctgctgtacaacatataaataaacatgtagatatataaactatagataagagtacaatattgtgttgtacacttaaaaatctaagagggtagatctcatattaaatgttctttccacaataaaacccaaaaataagtaataataaaaaattttaaagtttgtcttcatcaagctaacattttttattgccttgtaaacaagtactaagcctggtactaggtgcagggtattgcaaga

SEQ ID NO: 387902 - DNA, 597 bp, Homo sapiens
tgtgtgtggagatacatatagtaatgaaaaatttataagttgcttacagaaaactatggttgaggaatgtgactggaataatttaatgagaaattcacagaagcaatcaatggacagagaagcatattagagaaaatgatggccaaattaacaacctaaataaagcatttgaggtgaaaagcaacaattttaaaatgaaaatgatattggttgaacrtggcaagagcaatgtttggcctataatttcttctggttttcagtaaaagttattactagaattttgaaagaaaaatattgaaaccctagaattgtatgttcaattaatccatcagttatgaaaagtgaataagttctagagatctgctgtacaacatataaataaacatgtagatatataaactatagataagagtacaatattgtgttgtacacttaaaaatctaagagggtagatctcatattaaatgttctttccacaataaaacccaaaaataagtaataataaaaaattttaaagtttgtcttcatcaagctaacattttttattgccttgtaaacaagtactaagcctggtactaggtgcagggtattgcaaga

SEQ ID NO: 387903 - DNA, 597 bp, Homo sapiens
tgtgtgtggagatacatatagtaatgaaaaatttataagttgcttacagaaaactatggttgaggaatgtgactggaataatttaatgagaaattcacagaagcaatcaatggacagagaagcatattagagaaaatgatggccaaattaacaacctaaataaagcatttgaggtgaaaagcaacaattttaaaatgaaaatgatattggttgaacatggcaagagcaatgtttggcctataatttcttctggttttcagtaaaagttattactagaattttgaaagaaaaatattgaaaccctagaattgtatgttcaattaatccatcagttatgaaaagtgaataagttctagagatctgctgtacaacatataaataaacatgtagatatataaactatagataagagtacaatattgtgttgtacacttaaaaatctaagagggtagatctcatattaaatgttctttccacaataaaacccaaaaataagyaataataaaaaattttaaagtttgtcttcatcaagctaacattttttattgccttgtaaacaagtactaagcctggtactaggtgcagggtattgcaaga

SEQ ID NO: 387904 - DNA, 517 bp, Homo sapiens
ccattactcaaattactaatatgcttcccattgcaagtatgtgttgtttgcagtacttggaaatcttttactcctatttttcccttttcattctttattcatattattcccaagctattcattcaacamatgaatagcatgaggataatatggacacacactaaataccaggcattagaaatgcagcagtgaatacaaaacaaaaaaacaaacaaacaaaaaagtctaggacctcttagagcttgcattttagagtaatggaaacaatacattaacgatatagttattgcaatagaatgccatgaagtgataagtgcaatacaaaaaaaatcaggatagaaaatagaatggaaagcaagtgcaatttaaaatagattgtctagcgaagaccttctcaagaaggttacatttgagcagcaatctaaatcacaggggagtatgtgaatacctagaatagagtggtctaagaagagagaacaacctaacaaaagccctgaaaggaagaggcagcatcata

SEQ ID NO: 387905 - DNA, 522 bp, Homo sapiens
aagatgactgtgatacaaagttatttaaaccatgcatttaatatcagcagccttaagaatgttattgcaatatcctactgggcaaagactaaatttctatacattcaatcatttggcagattaaaaggattctgcaaatgtattatggcaaatattaagggatacatgggaarcaactagcttttcactagtaagatataagacagtgagatggaaagtaaaatatacttctttgccacttagggtccatctctctcctcttgctcatgcatgcacatgcatatgcacacatgtatacactctaatgcatagaacaaatgaattaaatataaaaaagagaagacaaattatgagacagatgactattaacacagaaacaccattcaacattaaagaacatggtttttttctctttttagttagataatactgtatttattttggtagaatttttctgtcaagggaaaaatgtatttttagtagaatatcataagctcaataccattcaagagcaatgacaat

SEQ ID NO: 387906 - DNA, 603 bp, Homo sapiens
ccatttagttggcaatgaggaagtataacagactaaattcaaatggattttattaagaaacaggaagaaagttttacagcaaatatatgatgttttaaattaaactttttgccattataaataatgctacaataaaaagattcttacatatagcattactcaactttagaattaccaaataaaggatgttaacttttttatggctcttaatgtatctcaagagggtcattccaatttattcagcaaatcaataaagtatatttgagtcaaaaccacttgggcaattaatattattttgttaactattaccaaagttacagctgtgaaaggatgcctctatgctttaatttggttgttaacaagattgaacatatttacacactggtttatttccttctgtaaattatgtattgcaaggatgcattttatatactgtgagaactctttatatcagagatattytaaataatgacatgacttttcagtttaattattaaaaaaaaaaaaaaacaaaaaaacctgaaagtaagcaggttaaaacaaaagaaaacagaggctctctttttttccctctttagtggattgtactcattattacagctc

SEQ ID NO: 387907 - DNA, 564 bp, Homo sapiens
agaaattgacacaagaacaaactaaaaactcagaygatatcatttgctttgttttattctgatgtaattaataagttctagttttataataacaaagttagtcccagattatgggagcatgtaagataatagaaacattgaattttgaaagaataatattatcgaatatttcataaattttaactttatttttcaagatacaactaacatcttcattttgacagctttttaaaactggcattcaatacttacaaagactaacccatgaatgacataaaatattatttttattatcctagaagaggttctttatataatatatacagtgtagagattttttaaagataattttatctcctattcattgtagctattgatcagtagttgcaaaactattatggcgtcaagattagaggatataaggctatacaaagaaactttaaaagtttagacaaagacttgtattttagaggtatatgcatttaattactgaaagttagtaacaattatgtgaataaggtgaagtggattaatcattgtttctaaagtaagagtcctaaataa

SEQ ID NO: 387908 - DNA, 564 bp, Homo sapiens
agaaattgacacaagaacaaactaaaaactcagacgatatcatttgctttgttttattctgatgtaattaataagttctagttttataataacaaagttagtcccagattatgggagcatgtaagataatagaaacattgaattttgaaagaataatattatcgaatatttcataaattttaactttatttttcaagatacaactaacatcttcattttgacagctttttaaaactggcattcaatacttacaaagactaacccatgaatgacataaaatattatttttattatcctagaagaggttctttatataatatatacagtgtagakattttttaaagataattttatctcctattcattgtagctattgatcagtagttgcaaaactattatggcgtcaagattagaggatataaggctatacaaagaaactttaaaagtttagacaaagacttgtattttagaggtatatgcatttaattactgaaagttagtaacaattatgtgaataaggtgaagtggattaatcattgtttctaaagtaagagtcctaaataa

SEQ ID NO: 387909 - DNA, 565 bp, Homo sapiens
atcaatttttcaaaacttggaagtaccatctaactctcttagttctgctagaaggataaaatagcagagttaaaaagatacgggctttagaattaaaaatatcctaatttgatttctgtctctgtttcatacttgagtaaattacataatctctacctggattactcatatccaaactggtattaactgtactcaacctggagcaatgttgggaggattattgatggtacaacttctgagcagagtacccagaacataggagctcctccaaatgtgtatgctgtgattattattcctgttggcatcatcttcattgatgatgagatttgttattttctcagagaccaagagaggtcagtttttagactrtaacttttccttcctctgagataacataaaagtccctcctaaccttaataatcaaaaaaatattaccagttggatacagtttgaaacatcatcagcagttattcattgaacttgatgaaaatgctgcaactctttgtttcgatccctatggtattttgaaacctgtaggcattattatattaattaaattctgcat

SEQ ID NO: 387910 - DNA, 586 bp, Homo sapiens
aatactacaatctggaaaaaaagtaatgtaccatacttaaaacagaatgtaatgaaaaggaatactgtataaaacagaatgttaaagactgctaggtatacagcagtaaacaaaagttaaaaaccctgccctcatggagctagtgttctggcacatacagtaaattctgcttagaattcctaatttttttttcaatggaggaatcttattaggtatttagaattattggctgtgaactwtgtcatttttttcagtggaaaaatctcattactcaagacgcctcatatgatactttattcaaatatgagaaaaattctgaaattctgaaagaaagaacagtcattctttgagaaggaagaaaaaaagacatttataaaaaataactgcttatgacaagatattaattagaaggactaaattggccacttttgaagattttccatccactaagtggcatttttattgagtttctagtcttctactttaaaactattctttcaaagcttcgaagtctttcctttatgtctcagcacaaacacctttacacatatatgggtgtgaaaacagacataccttagagatattt

SEQ ID NO: 387911 - DNA, 589 bp, Homo sapiens
ttaggcacgtggacacattgaaagttgaggagagcagaatttattaaaagaaagctctcagcaaaaaagaggggttctgccaataggctcccaccccacagattgaatactatgccaccacacacgagctgacaaggccaggttcttctgcagaaggtgcaaattcctgatggctccactgtgttctcccagtgtgcatgtcaggccccagtcwgttgcaagcatccccagataagaccctgggcaggttccctcatctgcactaaagcatctgatgtaaacacttgtggggcaggccggagattctctggggactctcctacatctgcctctttcatctattagcatgattatttattgaggataatttctcagaaatgaacttatttagtcaagattatacacattttttaagaccccgtatgaattgcttggaagtttataccaatttacagtcccacctaaatctctaacatgtcatgagtgtgaactttaattaatattaactactttgtttttattatttattttaatatttattaagctgaaggtgaggaattataactgctctttaactgtgttcctttga

SEQ ID NO: 387912 - DNA, 622 bp, Homo sapiens
cctgcagtagtctaaaatgatactgaagggtacatatagtttctctagggggccgagtagcaaattaaatggagataacattgggatcattgaccttgaattctttaggttattaaatgtggtgctaatttctgccatcctaccttcctcttcactccagatatgtaatgttttatttcatttactatcctggttagggaagggcaattttatgggtttccactttgtcatacctcctaagaatactcttccctgtaggctaagtatgtgaggggttgttctaactgcaraatataacaattccaattgtacacttgagcactggataactgaacagttagtaagtcccccttgtctactgtgagttggatttttagacaggactctatttatcatagggttccaataaacccccactccagtaagaagctgtgatgatggcttaatgtcaactcaggccccagttctccagctgttttaatattcctcttacttcagtgtacagtgacccaagtaaatggacacagctccccttgggaaggactgggggagtcattacagtatgtaattgccacgatgctgcaaagtcctcttacaagggaccaggccactctgttagtca

SEQ ID NO: 387913 - DNA, 640 bp, Homo sapiens
ttttatatatttaacttgaagaaaaaaataaaatcagyattaatcaaccttgagcaaaaagtgctattgtactaaataaatattctacaatggaagttttctgccaaaatgttcatttataatgaaggttaatttggtatttttatgatggtgactatgcatcctctaaagtctgccaatatttactgagaaaactcctaggctaccccaaagtgtaaaagtagcaatgtttttctgaactaagaatggaaaagcatccctttttttttctcttgcataaaataattcatgcagcaatgggggtgcgaggtaaaataaacatttactgccatcgagagacttaaactcaataaatgatgttttaaaatcagtctgtaaagatagtataaattgaactgtaatttaactgaaacattgtggacacttaaaataacccaaatttattgagagctcacaagttgtcagatattttgcacagatcacaatgtatcctcacaatgaattgtgagtttagcactattatttttcccatattctacattagaatactgagggttagaatgattaggtactgtatccagatttacaaagctattaatttttagtgtctgaatttgaacccaagcagtctaactttaca

SEQ ID NO: 387914 - DNA, 585 bp, Homo sapiens
gacctggagcacaggatggaatgagacagcacagcagtccgaaatgggtaatggctcaaagatagagtgaggattccttttcatccttttagaataaataaaattgaatttgaaaatgtaacagtaaggtttgttaaaaatctcccaaatcaataataatattacattcttttctccttgtctagactgargcttttcttagctctgaatctgggcaaacaccattctctcttctaagaacttaattcttttttgcctttaccttcttagaccccatacctacactgtaaggtataagaagatatcaattgtattcagagggttgcattttctaaatagagtaggcaatcaatagatatttgttgaattgcctctagtgggatgcccttcccccacacatcttttctcaccgtggacttctttcctacctggctccaaagttcaggaattacaatccagtttttttctctttttagattagaccaacttgtcccaaaactttgtgctatagaaaatgaccttaaaagatactctgaaaagaaaaaataattattccagagttaaataggtttgggaaatgtgtta

SEQ ID NO: 387915 - DNA, 645 bp, Homo sapiens
tgatgtgggagttggttaggcagaggagaatgtaaagattgacacctaggtttctgtcacaagccctggtagttctatttaccaagatacataagattagagctgaagaaaatgtggagaaaagattaagaattgaatatatatgatgttgatgatgtcacttgaatataattgggctggagttcagaaaggaattatagtttaacaatataaatttggaagtcttcaacctagaaatggcatttgaagctataaaagtggaagaragcgtaatgagaaagggtacaatgagacacaaagtggactgtgaacaatcccttaggaatttcactatttaaagttgaggtagagaagagccaacaaggaaactgagaattaggagcttacagggaaaagagaatagagccagcaggatgtggtgtcataatacccaggaaaagacctgctttcatgaaagaggaaggaatgagaacagagtaagtggtgaactaacccttctggagatgatgattataaaatcttgaaacatttttttttttgcaaatttgaaggcacagacagtaatgcaagcgttcaacccatgaaaggtgggaactgaacctgttgaagctgggtgagaggttccaggttgtctattatactttc

SEQ ID NO: 387916 - DNA, 645 bp, Homo sapiens
tgatgtgggagttggttaggcagaggagaatgtaaagattgacacctaggtttctgtcacaagccctggtagttctatttaccaagatacataagattagagctgaagaaaatgtggagaaaagattaagaattgaatatatatgatgttgatgatgtcacttgaatataattgggctggagttcagaaaggaattatagtttaacaatataaatttggaagtcttcaacctagaaatggcatttgaagctataaaagtggaagagagcgtaatgagaaagggtacaatgagacacaaagtggactgtgaacaatcccttaggaatttcactatttaaagttgaggtagagaagagccaacaaggaaactgagaattaggagcttacagggaaaagagaatagagccagcaggatgtggtgtcataatacccaggaaaagacctgctttcatgaaagaggaaggaatgagaacagagtaagtggtgaactaacccttctggagatgatgattataaaatcttgaaacatttttttttttgcaaatttgaaggcacagacagtaatgcaagsgttcaacccatgaaaggtgggaactgaacctgttgaagctgggtgagaggttccaggttgtctattatactttc

SEQ ID NO: 387917 - DNA, 461 bp, Homo sapiens
gcaatagaatcttatacaataaaatgttggaaacataaaaaatgaaaaggcaagaaacacagtgcactgctttggagatgttaatgcacttttttaaatctctgataatgatatcatccagaagtatcaaggattatacatatagccaactttttaaatgctatgccctagtgcaaaggaaatgtgttttccatacaaaaccactacatccrgatatgttgagccatatttccagataccctttaccagcactccactttcgctttgcattaaaacaaaatttacttagaggcctcacaaataatagctctctagtgtccaattattgcttgcaattcaaggaaatgtctacttatggaaaggcatcaggccaatcacaaagtcaagcaatagcctttgtaactcagtcctacattttgatcattttcctataaaaactttcagcaggatactatacatgg

SEQ ID NO: 387918 - DNA, 461 bp, Homo sapiens
gcaatagaatcttatacaataaaatgttggaaacataaaaaatgaaaaggcaagaaacacagtgcactgctttggagatgttaatgcacttttttaaatctctgataatgatatcatccagaagtatcaaggattatacatatagccaactttttaaatgctatgccctagtgcaaaggaaatgtgttttccatacaaaaccactacatccggatatgttgagccatatttccagataccctttaccagcactccactttcgctttgcattaaaacaaaatttacttagaggcctcacaaataatagctctctagtrtccaattattgcttgcaattcaaggaaatgtctacttatggaaaggcatcaggccaatcacaaagtcaagcaatagcctttgtaactcagtcctacattttgatcattttcctataaaaactttcagcaggatactatacatgg

SEQ ID NO: 387919 - DNA, 606 bp, Homo sapiens
tgtgtgctgcagcacatgtgaaaatgaccttacaatgtggataaaatattggagtattcctaaagaatggagagggattttgaacaaaatagttcataagtatgctggggcgggttaataaagtcatgaaactaagtcatttcaaaacaaatggagatttgtttatctcagtaaatgcactgtaatccaatacttccttaagccataattttgaggtcatcagtgattgtccccccttccttgcatatcaattaatgaggaattccaatgcattctgtttctaatatttatccttccatttatttatttctcttcatatctgttcctaccagtctaacaaagaatagctaagatttataatatgcttactactaagtgccagacccagtactaagtacattcataaactaattcttacaattgtcctacaattcttaataattattgctattatatctttttaaatgataaagagtctggaatgtggagttttgtaacttgctcaatatcacataggaactaagtggaagagsaggtgtttcaactcagacaatctcattcgatagcctgcactcaaccattccaacacatactttttcaggctgc

SEQ ID NO: 387920 - DNA, 608 bp, Homo sapiens
gaagttgacataaaacatacatccgtacaaggcgatttgtacatttatgtttttaagtgaattttaattgattatatcaatgaaaaattttgcatggaagaaaatatgttagattaaagtttgaaaatgttcactgaaatgaagaaattcagcttctttaaaataatccactagatattatgatattatattatgtaataataaaattatatactattatgatatatataatattaaatatcattttatattatatatcatctataatatatattataatatataatatatattaatataatacatacaaaatgcttaaggtaacgaagaaaccattttttaastatgaatgtccttttggagtatggaagtcaaaacctgcaggagccctcagtcttgggaagaggcagactagctgaatgccacatgcagagacattgcactgctggagtcaactaagaaaaatcaaggcacaaagtcaaaggtgtggaaggtagagcaaccctatacattccagaaagtgttcttgaaatgtcctgaaatcctgatatgtgaagtcctggttgagtagacactaacttatgttttaaatgcctatttaatatctg

SEQ ID NO: 387921 - DNA, 608 bp, Homo sapiens
ctgatcccagcctatgtcactatagccccagtcktgtgatttgtaagctataatgataaattattgttgctttaaattagtgaattttggggtggtttttcctcagtaatacttaactagtataaaagtcctgagaggaatttagcatagaaattttaagaaggaaaaatacaacagtacttttaaaacagtactttgctgtacacacatttttttcctccaaagaaaccagtgaagtaggtaaaacagattgatgtggcaccttatttgcaaaatttagttttgttccaagggagtgactagcactacgtatattcagtaataatggtgttattaaaagtattaagagtctcaaaaatcatcctttcaagtttttaatctcctctccaattcctttgccatatattggccatggtaatcattctaaatcacaaatgttttcttgtcaatttgctgccaaatcattcatttgctctttggataaaatccaaaatccttaacattgtgtaaaattccttatataatcttctgcatcctgcttcctttgctatctttatttcttaacatgcttttcctcttttccattatattcttttgccataataccg

SEQ ID NO: 387922 - DNA, 628 bp, Homo sapiens
tcataagttagtatccagctgttgaggctatccaacttggcaaaggaagtaattattacatgaaattaggaacaggttattaaattgcagaagagctcatgatctatttatttctttttttcataaacttttaaagtttagctatttatttctatcattatacaattttatattttttagagcaggacactgtgcaattgaaatttgaattagtaattgactctgaataggtcatttaatgttttgcacccaggagaacttgttcatgatcaagaaagarcagcaatgctgaaccacatcggcaagccaagaagaaaatagggcttatgtctgtgttttgactctgtcatatgagtcacatttctattacacttgaaaggagctgacaaacttctggtgtgttctccaaatgtcacacttagctaagtacaatttatatcttttgggttttccagtgattaggtattcttatttaccgtcatatttttgccttctccatatcacctaaatacaaggccaagcaaaagaggaattcgtgattttaacaaggaaaatgttcagttgtgctgccaagtcttctgaagaacacacactctttttcccagttgtataaaatacatacagtaca

SEQ ID NO: 387923 - DNA, 481 bp, Homo sapiens
agagcttgttatagagaacaaaaaataaaggaacataatatggctgaaagttcacaaaaggaacagattattttatgtatatcaggtatgttgaggaagtaagaacattggcaactttttttctgcaaggcagtctgtgcacatcaactggtcattatttttaacagttgttttctaaaaagtacagacacccatatagccaatcacccataactgctcctttgatagctgaagaactactagccttcgaatatacagaataataccagattttcatcttcaattactacaactagcagcaaccattgaattaaaatagagcaaagtaaaaacatttcaaaaaatgattttagttaaatatttgtaaagtcacataagaaattctatttyctagcagacaaatcatattacagaagtacagatgggaaacctgtaaaaatccaatgtggatagttgttctttgctcctttttttttgttgc

SEQ ID NO: 387924 - DNA, 746 bp, Homo sapiens
aagtaatgcaaaaaatgtcagtgtcttcgttcactttgctacaacaggataccatagactaggaggtttaaacaacaaagacttgtttctcataattctggatgatggggactccaagatcaaggcaccagaagaggacctgccacctggttcatggatggccattttcttgytgtgctctcacatgacaaaaaagaaggtaaggctgagcgccatggctcatgcctgtaaccccagcattatgggaggccgaggagggtggttcatttgaggtcaggctacgaaaccagcctggctaacatggagaaaccccgtctctacaaaaatacaaaaattagctgttcatggtggtgcatgcctgcaattctagctacttggaaggctgaggcagaagaatgaacccgggaggcggaggttgcagtgagccaagattacaccactgcactccagcccgggcaatacagtgagactctgtctcaaaaaaataaaaataaaaaaagagggtgagagagctctctggggtcccttctataagggtacaaatctcattaatgagggccccatttatattaccttttcacctcacaaagatcccaccacctaataccatcacattgagagttaagatttcaacatatgtatctgttggagggggacacaaatattacacacatcacaagtgcacataatttatttatattattttgttttgttatttttatttatacatgatagttacacatatc

SEQ ID NO: 387925 - DNA, 624 bp, Homo sapiens
catctttaatatccattgactatggcatatggaaaaatatgtctaaaagaaaaattgacctgttagaagtgcagagaaacttttctctaaagaactcatgacactgtcttagaattttgcatgtaaaagaaatcagagaaggaagcactgggacacactgctagatgaactaatatttgcttaaccttaaaattgactttggaaagaacttcccagggaatatggaacccttgaaacaaaygagccaacatgttcagaaagaagctgtgtgacaggctttccatggcttcgaccttgaaggtaaacacaacggcaaagagccccttggtgttcctggaacccaaatttactcaagtggacaaacttgctaaagtcacattaatagagagcagtggacattcagtagagaccctgaagctcaaatgaaagagaaatgggacttgaactatgttacacgagcatgtttctagaaaagaatgcccttctgcgaaagtaaaaatttaatccatatgtgggaataagaaccataaaggaaagagtttaagcatgaaggagttttaatttatattcctactcatctcttatgttggcttgggattccgagacttggaagaaggtatggtg

SEQ ID NO: 387926 - DNA, 608 bp, Homo sapiens
taagaacatttcttcatagacaatagtccctggataaattcagctagaaaatgttgtgggtcgcattattatagactcaaaaagtaaagtaycatccaaactctgagtcaagcatgcatttttggctttagctcatatccacttatcccactacttcaagggctctagtgtgtttaacacgtccatctctacagtttttttcctccctgtgagaattaatttattccttctaccatacttgcttatcttggactgactcctagacctggacatcattccaatgacagtttggtgatatgatgcagggtatctagcttgtttctccagtgtttgttgatttaagcatgccagacaatatcctaatgttcaaaaccctgaaaggtagccttcacaaatattgcacatccattatgcactataaattctggaaggatatacaggtatagttcctttccaggaaagaaacagaaaagcaatcttaacatgagtggatcacaaacacacacagagccagagaaagatctaaacttttccttcctgtacatattgagttgccttttatacataaataaaacctttcagccgggcacagtgtctcacgcctgtaa

SEQ ID NO: 387927 - DNA, 558 bp, Homo sapiens
agaacccagaaataaagctgcatacctacagtcaactgatctttcacaargtagacacaaatatacactggggcaaggacattctattcaataaatagtgctgggaaagttggatagccatatatagaagaatgaaactggacccatatctctcaccatatataaaaattaactaagatgaaaatcacacgtacatgcacacacacacgcacacacaccattgactattactcaactatacaaaagaataaaatcatgtgggctttttttgcagtaacatggatgaaattggagtctattaagagaaataacttagaaacaaatgtcaaataccgcatattctcgcttataaatggtagctaaaaaatgtgtacacatggacatacagagtggaataacagacgttgaagactccaaaaggtgggaagttgaaagtggggcaagggatgaaaaattacccattgggtacaatgtacattactcagctgatattcatataacaaaactgcacttgtactccctaaattcattttttaaacctcacaatatctacaaagg

SEQ ID NO: 387928 - DNA, 568 bp, Homo sapiens
atatcaatgaataatacaaagatttgtaagaatttgcaaaaatcatcacaggtgtaatcaccagctaggtgtcaagcatttttttwaaaaaaagatttattcaagtacaacacacatacataaaataagcaaaagtatactaatttttttttttttgagatggagttttgctcttgttgcccaggctggagtgcaatggcgcgatattggctcactgcaacctccacctcccgggttcaagcgattctcctgcctcagtctccagagtagctgggattacaggcacctgccaccacacctggttaatgttttgtattttcagtagagatggggtttccccatgctggccgggctggtctcaaactctcaatcacctcaggtgatccccctgcctcggcctcccaaagtgctgagattacaggcgtgagccaccacgcccagtcaagtatactaatcttaagtgtatatctcagtatttgtttgtagatatggaagtgacatatctacatgtcaagtgacaccaactcttacacgaaattgtgtgattttctgactccaactgcatgtc

SEQ ID NO: 387929 - DNA, 639 bp, Homo sapiens
tatataattatatatatgattataggtctacattgcacaatgtgtaactaaatgactgtagtaagaacgcttaaagtgttctttgtaaaccctacagcacagctgctcaacccttatttatcatgcatgtttcatrtatacttaactatattttcccatgttcctcaatcactgtgattactggcaaactaacaccttcatgatcttttaggcaataccacatccttttaatttgagggaatgcctttacactgtactctttagacattaaaacctgactatcttggcagtgcaaattctttgatcttgatccttggttacaatggagtatcctggtttcttctccccaggcctctagatggggctgctgatcccttgtcaggactctttattttcacctatatcttacatatgattctcaaccttaagactatggatcattttaatggacaacaagggcctaactatttatttgacccaaataatatgacccagtactggtgggagattgaggaatatgatgtccagcatgtctctgtctcacctggagtcacactggcctaaaagcttgttgcaccagcttcaagtctggtttccaaacatcctataataacataaatcccaagccacagcaatctg

SEQ ID NO: 387930 - DNA, 639 bp, Homo sapiens
tatataattatatatatgattataggtctacattgcacaatgtgtaactaaatgactgtagtaagaacgcttaaagtgttctttgtaaaccctacagcacagctgctcaacccttatttatcatgcatgtttcatgtatacttaactatattttcccatgttcctcaatcmctgtgattactggcaaactaacaccttcatgatcttttaggcaataccacatccttttaatttgagggaatgcctttacactgtactctttagacattaaaacctgactatcttggcagtgcaaattctttgatcttgatccttggttacaatggagtatcctggtttcttctccccaggcctctagatggggctgctgatcccttgtcaggactctttattttcacctatatcttacatatgattctcaaccttaagactatggatcattttaatggacaacaagggcctaactatttatttgacccaaataatatgacccagtactggtgggagattgaggaatatgatgtccagcatgtctctgtctcacctggagtcacactggcctaaaagcttgttgcaccagcttcaagtctggtttccaaacatcctataataacataaatcccaagccacagcaatctg

SEQ ID NO: 387931 - DNA, 589 bp, Homo sapiens
ggatgggggtggaatttggactggactgtgcacacatacaaggaaaacaatatgaagaaagagaggaaatagacagctgtccccaaaccaaggagagaggctgggaatggattcttccctcacagccttaagaagaaatcaackctgacagcaccttgattttgaactcttcaattctaaaactgtgagacaataaactgctgttgtaaagccacccagtccatgacactttgttatggcagccatagcaaactgatacagcctatgaatagagtaaaatgtggaatagcctctagagataaaatagaacaaataagaacaatgaaagaagggagtctaaatcgaaggtaaacatttccctcagccatacaagttttagtctcaaaaacataattagaagttgctatcaggcctacattatatactgttgtatgtgatctatcatttcttgtctttggtaatagtctcagaaaacacacataattcacatcatggatcttgatcagtgttcaaaataattcattttatgatctcaataaatgttgaattaaaagagcatctttaatatgggtgagttgaaaatatgtca

SEQ ID NO: 387932 - DNA, 571 bp, Homo sapiens
gaaaagaacatggatggatgagttgttagtggtggagcaggactgaggaatctgcagctgcgaatggcccagtcacaatgcatatggtcatggagrgaggtagctgcttctgaagaacacagagacccttcaaatattagagctatcaggtgtgaagaaaagtagaaatgatgcatgagacaggcattaggtcactggaaaatctatatgaagaataagtgacaaccacatctgcttacagctacccctcaggcaaaaccaagtgaagctaaacttaatgaaaacaaatacagacagagacgcttctgaaaaatttaatgaacactttgatgggacctagtgtgaaagttgaggtccaaaaataaatgttcagtgttctcttatttggggcattcgaaaaaattaaaattcagctcctacacatacatacacacagaagtatagatgctcactagcaaataagccacacccatatagatgcagcaaagtattttcattgctttattatcaagtacaaatcgacaacctagaaaaaccaccatttgaagaaaggaagaacttaaaagaaaat

SEQ ID NO: 387933 - DNA, 529 bp, Homo sapiens
gagacccttcaaatattagagctatcaggtgtgaagaaaagtagaaatgatgcatgagacaggcattaggtcactggaaaatctatatgaagaataagtgacaaccacatctgcttacagctacccctcaggcaaaaccaagtgaagctaaacttaatgaaaacaaatacagacagagacgcttctgaaaaatttaatgaacactttgatgggacctagtgtgaaagttgaggtccaaaaataaatgttcagtgttctcttatttggggcattcgaaaaaattaaarttcagctcctacacatacatacacacagaagtatagatgctcactagcaaataagccacacccatatagatgcagcaaagtattttcattgctttattatcaagtacaaatcgacaacctagaaaaaccaccatttgaagaaaggaagaacttaaaagaaaatgatcaagataaacaaatagaagagacatgacccagagaaaatagatattaaggagagaaaagactattctatcccatta

SEQ ID NO: 387934 - DNA, 589 bp, Homo sapiens
ggatgggggtggaatttggactggactgtgcacacatacaaggaaaacaatatgaagaaagagaggaaatagacagctgtccccaaaccaaggagagaggctgggaatggattcttccctcacagccttaagaagaaatcaactctgacagcaccttgattttgaactcttcaattctaaaactgtgagacaataaactgctgttgtaaagccacccagtccatgacactttgttatggcagccatagcaaactgatacagcctatgaatagagtaaaatgtggaatagcctctagagataaaatagaacaaataagaacaatgaaagaagggagtctaaatcgaagrtaaacatttccctcagccatacaagttttagtctcaaaaacataattagaagttgctatcaggcctacattatatactgttgtatgtgatctatcatttcttgtctttggtaatagtctcagaaaacacacataattcacatcatggatcttgatcagtgttcaaaataattcattttatgatctcaataaatgttgaattaaaagagcatctttaatatgggtgagttgaaaatatgtca

SEQ ID NO: 387935 - DNA, 575 bp, Homo sapiens
gacagccactattcaaagggaatcaaatttacaatattacaatgcagagcatctcctacctccccatgcactgtgtttcttcaagagtctagaaatgcttaagtaggacatgaaaaaagaaacataacaaattgaaattattagattagtgtctttaacaaggactaaggaacagctgattcattcatgcattgaactgtttttaagtcctaagatgcacaatatactgtgggaattagtaattcaattttcagatcttatgcactttacgaaatagaattagtgaaacatcactatttgtttttttaaaattaatcagattcataaacatttaaaaacttcacagtttgagaattataggtcagrcattttatacaatgatcctcaattgtaattttctgatatttttctcatgattatgatgggtttttgggaaagggagtctacagaggtaaagtgccatcttcatcatatcatatgaagagtacagtatcaatataatgtatcactgtttacataattaactgatcatatagtttggggtagcatctgtcaaatttatccattgtaaagtt

SEQ ID NO: 387936 - DNA, 626 bp, Homo sapiens
ttttgtaaagccaggaaggggtcacatcacagaaattgtaatgtgctatcttggatggccatcgagttttatcttacttgccagctgctttcagttgattgtggctttctgcagcaaaccgtggagacagattkgtaggcagagtatgtgctcagtggagactgtggcaaatgcttgttgatagctatgaaaggtgcccattgggtaggagcaacaggtctgccaagtatttgcctaggattcagaggttttgcaatgtagttctgactttcatcccttagtgctatttagcaagctgttaaagattttgattatcacttgagtagtgaatacaagagtgttatttttcttgttaaagaaatgcataagaagtcattaaaaataacaattatgaataacataatggaccttatagaaaatgtagatacatgtgttcacaatttttttcaatttgattgaaagcaagtcagatcattaaaattgggtagtaaactcaacagtttaagccacaaatacttcaaaatatagattacaaaagaatgaaaaaattcaaatagggtgattagttaatcaggcctgtattcatcagagaagtaaccatcaatgaagactggacagaaattttt

SEQ ID NO: 387937 - DNA, 561 bp, Homo sapiens
gaaattgtttgatatttattagaatttatgtaattgcctcacttcagactttagaagtgtatccacgaactcagcagatatcctgtctttctaaaaaaattacaaaatattttgatagaaattttaattttaaaatgccattattaaagtgtttttgaagcggaggctgagaaagacactagctacaataactacaacagttaccattcaaataattgtagatagattgccatatctcttaaaacaactttgctagatagatattaaatgtgtctgagtctaaaagacaagcggaagtataatcagctcaggaaacaattgtatgcataatagctaaaaagacaatgatgaataatgcatatgttatttacataattacttgcattagggttttttgtgtgtctggttctctaggagaagatagaatgctgtaaaagccatgagattaaaataaatatgattacataaataatttgttcttttgaagactcatttttgccagtgatataatattatwtggaattagtccgaggacatggagttcttgagatctccaaccca

SEQ ID NO: 387938 - DNA, 578 bp, Homo sapiens
cttattgtttaatcagctgattgataaacatcagtacttatatgtatttgtaagttctggcaaatgtgttctttttgaacttcagagtcttgcyattacgatcagcttaatgtactggttctttatttgcttatttctgactttttgactcaactcccacccaacacacactttttttttttgttaagtcgccatatacattcagtcgtataatgtgtgtgtgcatgtggctatcctttaaatggcaactatggtcacttcaatcagcatgttagcatatagcaataataaaatgataaaacatctgcagaaaagttttccaagaatttttcatgtaaatcttagaatatagaaaactatgctaatttctgttgtactttcctctaatgtgctgttgcctcactttcttctattatttattcttataaacattttactaaaaatggaaaattgtatgatgatattaacccagtaatgtgcagccaacaaactttatacagcattgaaacctacataaatgggtgagggaaaatgctgtgaatttgggaagaataaggataataaaattggtttaaatc

SEQ ID NO: 387939 - DNA, 547 bp, Homo sapiens
ttgttcctcctggggttgtggaagctggggtattcatagaacaagatttttttcctgtaattggttgagaattcctctctgatactcccaggtatcgtggcctacctcatgtgaaggcaaagatctgttgtcagaaaaaaaaaccctcagattcttgtagcagtatggtgaaggcttacagcatagactgatcgtagactggatataggctgtgcaccaaaactcatggactccagcaatcctcccaccttggcctcccaaagtgctgggattacagacttgagctccagtgcttggcataagtaatagtttttatattttttgtttttatacatgtctttttcgtttttttacatggcttttttatttatgtattcttaatggcttttcatacaacaacactgatttaaccaaacaaaaacaaattcagttagttttccttccaagatgacagcacttcctgctctcctactyactggtcatatggtctgagatatggagaaatagaaaggacaaaaaagagcactagaaaatccagtctactata

SEQ ID NO: 387940 - DNA, 555 bp, Homo sapiens
ctgtggacactccttcaggctacagcgttattgttctagtctgatcagccaactcctgtcagaccactgtagcctgtgaaactgatccatgtcatgtgtctggttttctggaccatttgcattctgacaatgaggagcgttttttcaaaggggagtcaaccgtggcctgataatcaaggtatttgatggagtttttatgtgttcctgatatggtttggatgtttgtcccctccaaatcttatgttgacacgtaatccccgaagttggaggtagggtctggtgggaagtgtttggatcatgggggcagatccttcatgaatggcttggtgcaatccttgcagtaatgagtgagttcttgctccatgagttcatgcaagatttgagtttttaaaagggcctggagcttcctgctatctctcttgctgtctctcaccatgtgatacatgggctccccctttgccttcggccatgtttgtacgtttcctgagtcctcaccagaagcagatgctgrtgccatgcctcttatacagcctgcagaacgacgagccaaataaa

SEQ ID NO: 387941 - DNA, 592 bp, Homo sapiens
gctctgccattctggggtacttactgccactgcacttgccctcactgagtctgagatactcccaaccctgaccatctcaaggcctagagtcactactacatagtacctcatccaatgggacctgagttatcactgagccctactggctcagcttcccaaattgcagccataccctgcttcccaggctcaaacctctaaagcattccttcctccccaaactcaggccagggttgtgccctccccccaggggtataatctcagcaacaattccrcccctgggcctgagctactagcgggtgccatagagtcacagatcctggctctgtgggcaacctacatctaaccctgccacaaagagcaaacctgcaccccaagacccaggtgccatgataagttcatgagactgtgaacctaagaccacaaccccacaactgcttaaagcacttgcacctgtaatccagtgccactgcagatgcttgtaggctatgtcagacccaacaccaagagagatcccctcagctaagtcccctcattgagaagaaaacaacaggaggaccacaaaagccctttatactgaggatattaacaacca

SEQ ID NO: 387942 - DNA, 592 bp, Homo sapiens
gctctgccattctggggtacttactgccactgcacttgccctcactgagtctgagatactcccaaccctgaccatctcaaggcctagagtcactactacatagtacctcatccaatgggacctgagttatcactgagccctactggctcagcttcccaaattgcagccataccctgcttcccaggctcaaacctctaaagcattccttcctccccaaactcaggccagggttgtgccctccccccaggggtataatctcagcaacaattccgcccctgggcctgagctactagsgggtgccatagagtcacagatcctggctctgtgggcaacctacatctaaccctgccacaaagagcaaacctgcaccccaagacccaggtgccatgataagttcatgagactgtgaacctaagaccacaaccccacaactgcttaaagcacttgcacctgtaatccagtgccactgcagatgcttgtaggctatgtcagacccaacaccaagagagatcccctcagctaagtcccctcattgagaagaaaacaacaggaggaccacaaaagccctttatactgaggatattaacaacca

SEQ ID NO: 387943 - DNA, 592 bp, Homo sapiens
gctctgccattctggggtacttactgccactgcacttgccctcactgagtctgagatactcccaaccctgaccatctcaaggcctagagtcactactacatagtacctcatccaatgggacctgagttatcactgagccctactggctcagcttcccaaattgcagccataccctgcttcccaggctcaaacctctaaagcattccttcctccccaaactcaggccagggttgtgccctccccccaggggtataatctcagcaacaattccgcccctgggcctgagctactagcgggtgccatagagtcacagatcctggctctgtgggcaacctacatctaaccctgccacaaagagcaaacctgcaccccaagacccaggtgccatgataagttcatgagactgtgaacckaagaccacaaccccacaactgcttaaagcacttgcacctgtaatccagtgccactgcagatgcttgtaggctatgtcagacccaacaccaagagagatcccctcagctaagtcccctcattgagaagaaaacaacaggaggaccacaaaagccctttatactgaggatattaacaacca

SEQ ID NO: 387944 - DNA, 556 bp, Homo sapiens
tgccactgcactccagcctgggagacaaagtgagaccctatctaaaacacaaaacaaaacaaaacaaaaattgtaaatatacrtgtgcattcaatatcggaacacccagatatatcaacaaatattattaggtctaaaggaagagatacattctaatacaataagagttggggacttcaacaccccactgtcagcattgaatagagcatctacacagaaaatcaacaaaggcagatcgaatttaaactggactgtagaccaaatggacctcacagacatttacaggacgtttcacccaatagctgcagagtagacattcttttcaccagcacatggaacattgtccaggatagaccacatattaggcccacagaacaagtctcaacaaatttttaaaattttaaatcatatcaagtatcttttcagatcacaatagaataaaactagaaatcaataacaagaggaactttcaaaaatgtacaaatacatggtaattaaacaacatgctcctgaattaccaataggtcagtgaataaacaaagaagaaaatttaaaa

SEQ ID NO: 387945 - DNA, 657 bp, Homo sapiens
ggcatctgccaccagtcgctgctaatttttgaatttttagtagagatagggtttcgccatgttggccaggctggtctcgaactcctgacctcaggtaatccgcctgcctcggcctcccaaagtgttgggattacaggcatgagccatcacgtccggctggaagtatatatatttttaatgtttcttgattatacctttctcctctgatttgccttagatcagatttgccttagatagattgcagaaaatgtattttacaggtatttttttagcacctatggtattctgttttcaaacatkcaaatcttggctctgtcatttataagctctataactcagcacaagttgctaacttctcctggaagaaaacttccgggagaagaaaaaagaaaaaagaaggaacttctcagtttccactctaaaatgaggacagctaaattgtgaagactaaaggaggatgcatgtgaagttcttagaatagcaagcacccttgattagtactcaggctggcacagccctggggccggggaatgtgctgttaaaggagtcctctgtggtctagtgaagttacatgccatttgggaaataggaaggctgctcttagtaaacaccattttcagcagtatagtggtgtcctgggaaagaataaggcctctg

SEQ ID NO: 387946 - DNA, 349 bp, Homo sapiens
ttcagaaatgatcaatgtttctgacatccacttaattcaaggccccaggggatgataaaaggtgatatggggtaagatagcacctggtctagtgtgagcagggaagtcatgcccagtgcagatgggaagccgggtgtcrtgggataacacggtacccaaagagccaatcacagctctgccatcaagccagctcatgacccagagccgctggaccactgctgtcactcccaggtgtaaaatgcatgttgcaagggtcatcttggtaaagcagagtccatgtgacaccaggacttagacttggacaggagactttctgtcttgtgccatcacttttttgtttgtttttgag

SEQ ID NO: 387947 - DNA, 623 bp, Homo sapiens
gtatcagcctttccttcctctttatggctgaagaatattcctttgcatgtatagaccactttttctatgtccatttatccatcaatggacacttgtgttgctcccaccttttggatattagcacagtgttttcagtcacaaaaacctgattttgagaactgtttctgtacttgtgagcttttggactttgggtaacttaatttgtgtaatcctcagtttcctcatccttaatagggggataatgataktgccttcattgtagagttattgagttaaatgactatattcaaagcacttaacacatagtgcctctgtaaccatttgttaccatcagcacagtggtgctggagagtttgtttttagaatcaaatagccctgtgttcatctagtatgtgactaagggaagttatttgagttacagtttccttatttaaaaaatggaaataataacacactattttatttgacaaatgtttattgatatctactctcaatatctgcattattctatgagatgggatacaggtgaacaaaacagaaaaagtaatccatgccctcgtagaacttacattctagtggtgtgagaactgaaacagaaataattctcaattgatgtattaaac

SEQ ID NO: 387948 - DNA, 512 bp, Homo sapiens
ctatttggtgtcaagatgacaagtggctgggaggtgtggggtctgtgtaggaagtctcccacatggccacactgagaatgtttattgtagaaagggaacttttgccctgtgaagtcacctcctccgagtcaccagtagctttctgatattctatcacaggaaattcctggtggtccacaaaagcagtcttctgagtgcagctgcagagagagacagaaaataattgcygaatttgacagtaaggtctggggatctgtgttcaggggtggctagcacctgggctgtgtgagctgcaaactgggaggctctttgaacaatgtcagaataatccaaggaacaaaggtcaactgacctctcattgtaatgcatgtaatgcaaagaaaaaggtactggaggatgtcttttgtgtttcaacaaggtagctagaaattatatttagatttggttgttttgaagctgtagtaactaaacaccaccctgccccatcttacctagcacttaatattcattat

SEQ ID NO: 387949 - DNA, 512 bp, Homo sapiens
ctatttggtgtcaagatgacaagtggctgggaggtgtggggtctgtgtaggaagtctcccacatggccacactgagaatgtttattgtagaaagggaacttttgccctgtgaagtcacctcctccgagtcaccagtagctttctgatattctatcacaggaaattcctggtggtccacaaaagcagtcttctgagtgcagctgcagagagagacagaaaataattgctgaatttgacagtaaggtctggggatctgtgttcaggggtggctagcacctgggctgtgtgagctgcaaactgggaggctctttgaacaatgtcagaataatccaaggaacaaaggtcaactgacctctcattgtaatgcatgtaatgcaragaaaaaggtactggaggatgtcttttgtgtttcaacaaggtagctagaaattatatttagatttggttgttttgaagctgtagtaactaaacaccaccctgccccatcttacctagcacttaatattcattat

SEQ ID NO: 387950 - DNA, 492 bp, Homo sapiens
aatgttatgaaagtggcttcagctcatatttccttaatcaaaccgaatcccatggtcatgtccaagttaaactgtaaggaagtgcaattytaccaagtggtcaggagaaagggaaccagatattcatgagcaaccaaacaactactgcatccacttcccaaccaaagtaggaatctcctcatctacgtctctgacaagggctgaaggggatctgattgggaatatggggggtttgtgttgtcattttaaaaccaaggtatataggggatgtcttctgaattcaaagagtaacatggaatagttgcagaattaattgtttcagtttcacttgtctgccttgctctgtagtgtgggcaccaaagttccccagtccacatcacaggtggctagtagtcaacccccaccctcaaaagaccattacagcctaagattataatggccatagctggaccaagagcttaaagggtaacctcagtctaacaatgacaacag

SEQ ID NO: 387951 - DNA, 596 bp, Homo sapiens
gacctacttctgggtgtctatagaagttttaagagcagcaattctcagccgggtgcagctcctcatgcctgcaatctcagcactttgggaggccaaggcaggcagatcacgaggtcaggagatcaagacyatcctggctaacacagtgaaaccccgtctctactaaaaacacaaaaaattagctgggtgtggtggtgggcaccaatagtcccagctactcgggaggctgaggcaggagaatggcgtgaacccgggaggcagagcttgcagtgagccgagattgagctgagatcacaccactgcactccagcctgggcaacagagcaagactccatctcaaaaaaaaaaaaaaaaaaaaaaaattttctctcaggagcatccccaaaagcaaagtatttaaattaaaaatgctgatgggaagactttaaacatgtatttcattcatcataagaagtatatttttccattagttttttaaaaagtattcaaccaacaacaaaatctctcaaaagattattcaaacagctctaacaaaagtcaaaagaggttggaactgaacctaccactggctgtcccagaaaagatttctgcaaaca

SEQ ID NO: 387952 - DNA, 560 bp, Homo sapiens
gagtcccaatggtgcctcccccaccccgtgttttctgctgaggtggcaggcaataattaaagccacctgcctaatcacaaagcataagctgcttcacagaatttcataggtttccttaggtgtttaggggcttaacccacaacgagggcactccctgaatgaaatctgagcaggatattctgggatgatcagtttgggttaagaaactaaagtcgtcctttctatattaagacaggtgagagatgacaaactctagtaaatgtgctactgctttcagcatgattccaaaggacaactttttggtgatttttatttcagaatttaccaaaacctctgagaatgggtaccagaagagagtytgaaaagcatactccattatcccaatcacatattaaagacaacccacaggtcttgacatcacaagctttgccacataagaactacaacatgagagcaggtaatcaattcatacagccactaacatgcaggcccaactggcctaagaaacctgcctaatgtactttattatgactttttttatattttgattttaaaaccca

SEQ ID NO: 387953 - DNA, 592 bp, Homo sapiens
ttctggttccaaagcattttctagttacagggtattattcttcaaaagttttttgttgttgttgttttcttttttttcttttctctttaacattcacttgaaaacaacttgaagtagacaatcacactttccctaatccatttaatagaagagcagaacgatgactcccataataggaatgccrctaccccatgagttgaaggagagtgatgggaccatgtgcatgggaaaaggtgtaccaactcccctttgggaatgattgtctattcaaccaaataagccacatgtcgaggaaaatgttttgcactgtgtattggaaaactctgaaagaatctcacagttttataacgaagtctataaagcttcgagaataaaatgttcagttaccagaacctctctgcactgtcaagacccaatttaagtgaggccatcttatcggaggatgtatctggtatttgcacataggttataaggacattgtgtgttaatcatagggtgtagtgtgactttgttgaatttttagatgagaatttaatcagatttactaagcgcaaaagcacaaataatgtgcccatggtggaaatggtcttat

SEQ ID NO: 387954 - DNA, 556 bp, Homo sapiens
ctagtggctctgacagttccacttcgtaggtgtgcttccttaggacatggcccgttgagacctcacatggggttctctgggtcccagcaacgcagaccaacactgccctgagaattgaggggtcaccctcctgctgcctgcatctccttccatgtttcacctttagtgagtcaggcaaggggttcagaagacagatgctagaaacctatggctctgggaagccaatctcgagcagacattgccttcagacctcacttgagtcttccacatttacactcggtgcttcctggaggagaagaacactgtgaaggttgtgaagctgaccaattatacttctggcccccaaaaggcattaaaattgaaagcactgctcgataagtctttgttccttctgtctatawcataaatgctgaagtggattgcttaaatacttaagttttgtaaatgcacacacaactttctgtggagaacacagtggtgtttctgtttaatgccttttttagtgccgtatgtgctagaagctagacctttttttaaatatgttcccagggagcac

SEQ ID NO: 387955 - DNA, 619 bp, Homo sapiens
ggagcagttaactttaattcagagcctcagagggtttcccctcatctgttcaaccattctgcaactacatgagctcagttacaaggtggatcaccaaggccacctacagctggagttgggaggaggtaaaacctctagtgggtgtcaccaacctgatacccaagataaccagggatctcaaactcattcacccccaggcatgccatcccagtccaccccaaggaaggtttgcagttaaatgcaaattacagaagattacatcatcattcacccaaactgccacagaagtttcatagtaagaccctagcgtcagaatggtactactgccacttaatagctatgtgactcaggcaagtcatatcatctccctgtgcctcagtttatcatggaacctcttctaaaaggtatatgagagaattccatggcgtaataacrttttcagaacaatatctggcacctagttgctaacatttagcagcacatgttgccaattagggtttcaattttccatctgcaaaatgaaaagaagactctgtgctcctttaaccctttattcaggatgaatcgagtattaattttgacccagaattcattcgtcctcccttagctttctctttct

SEQ ID NO: 387956 - DNA, 579 bp, Homo sapiens
gtgaatgagactgactcactttgacatcaccctgaaagtgtctggcactgactggtgctctttctccatccagaaaaacctcactacaaagaaaacaatttctcaaaggtgaggtgttgggtcttctgagaacaggagtgtctctgttcaaagagaagtgccctttggcccccgacctaccaaaaaaaatcacataacatataaactgccagttgaagggaacagatcaagaagagcaagaacacatttaattggatggagggaaaaagaaactattttcttagataactagaaatacactaatttcttactgaacagkatttaatacaagctaatatatatttaaatgtttcatattccaataataacatcttctaactatcacaaaagcaacaggtataatcaaagggctttaaattttccaatcccaaaaatgtataaatgctgttagcataatgggtaattatttccatcatacataatacattgatgtgtgtgtctggctccagtgttcatcacattaggaaagcccactagcaagttaaaaataaaagggaacattggctattttgataatac

SEQ ID NO: 387957 - DNA, 579 bp, Homo sapiens
gtgaatgagactgactcactttgacatcaccctgaaagtgtctggcactgactggtgctctttctccatccagaaaaacctcactacaaagaaaacaatttctcaaaggtgaggtgttgggtcttctgagaacaggagtgtctctgttcaaagagaagtgccctttggcccccgacctaccaaaaaaaatcacataacatataaactgccagttgaagggaacagatcaagaagagcaagaacacatttaattggatggagggaaaaagaaactattttcttagataactagaaatacactaatttcttactgaacagtatttaatacaagctaatatatatttaaatgtttcatattccaataataacatcttctaactatcacaaaagcaacaggtataatcaaagggctttaaattttccawtcccaaaaatgtataaatgctgttagcataatgggtaattatttccatcatacataatacattgatgtgtgtgtctggctccagtgttcatcacattaggaaagcccactagcaagttaaaaataaaagggaacattggctattttgataatac

SEQ ID NO: 387958 - DNA, 626 bp, Homo sapiens
tctgcacgccggctgcagggatagcatagagtgtcctctttggcaacagaggcagcagggctggtggcacattcagtgtccactggctgtagcatcagcatcttgcggtagccccagaaatgctctcactgaccacttacagcatstgctcctgccaaggttgcccctgagtctggctctccagccttccaggctgtctgccctgttctacctaaggtaaccacatttggatgctgttgcttacagccaaggaccctgatgtgggctttcaacctggaaaaatgcataaatgcagaagagtgcacagatcttgaggcaagtcacaggcacagcaggtctgttcctgccctgcctctagtaccgagacctacccgccctgctaggaccagctcaaccaggaaccctccagagatcactccgacaggagactctgccctttctggacttcactgctgctcatttgccatttacttccacgcagcagctctcccactcatgtgctcctctttgaactttcaggctcagcttcttagcgtctcccttctgaattcctgcagcagcttcctagtgagctccctacctccagactgagtggtccctccaaaggattcctcaaaccatctcaa

SEQ ID NO: 387959 - DNA, 565 bp, Homo sapiens
gtgtttatctgcaacaacctggctgaccagtcaggccacgcaggagctgagctcaagccagaagcaagaaaaacagagagaaaatgaaatcattaccacctggtagaaagcaaggacaagttggaaaaaaaagcctgtaaaggcaacttgggaatgtcccactatgctgaagtaataagcacagaattggtgctaagcatctgtgggcctctgaaactgctgctctttccctttgctggggacactgttcctgagtggcctcccacaagatgaccatttccagggaggtctctcctgaccaccaaactccctggcactctctctctcatatcgccttgttttattttcttcaccacatttatcagtgactaaatggctgtattcatttccttactttcggactgatcttgcagcagagggtgcatctgtcttgtctcctaatgtgtccctaaaacctgcccagagtctaacaygctaagaggaagtctgaataaacggtgacgaaacagcacaggccacagaggaagacggtctctggcattccgcaggtcaaagattcctgttt

SEQ ID NO: 387960 - DNA, 575 bp, Homo sapiens
gctttgtttttgtgggttttttttttgtatttttggtagaaasagggttttgccatgttgcccaggctggttctaaactcctggactcaagcagtccacctgcctcaatctcccaaagtgctgtgattacaggcacgagccaccacgcccagtcctgtctttatttcctcatctttaattttctagaatataaaagcctttttcccctccatcttctgtataatctgctgcgtacacctaacggaaacgggcacaatattccgccgtacaggagcccggaacggaccgacaagaagagccaccacagggatgtgaatgataaaaactgctgtcccaaagcactcagaatgcagcgtgcactgtttagaccagaaatgctcttttgccaaaaatgaccaatgtgtacgagattggaaagaaatcttgtcccagtaacctcagggcacacacattccaagttatgttagttccaaagacattgcacatatttataaatgttcttagaaaaggatttctaggggtagcaccttccgctgattctgcaaatcaaccattcttctttttttacagatgaa

SEQ ID NO: 387961 - DNA, 540 bp, Homo sapiens
gtgatttaggcataaaatacacactagactttgaaggttaagtgatctgggggtcccgagatttttcctttcacaaagacatagtaaaaaacatggaatcttccatgaataactttatatattggttacatgttgaaacaatagttttaatatattgttaaataaaatatattattaaaattaatttcaccggtttattttttaatgtggctaccggaacattttaagttacayatatagctcgcatcatattagtgctggacaatgctgacctgtactgaaggttctgtgaagaatctttgggtcatttaccactgtactccctttgccccctccccacccactagcacaacacctggctcatagtatgtacataatcaataagtgttgaagcagggaagtctctaaatctctctatacatgtatttcttcattgatacactgtgagtctctattcacaagataataaaagtcaagaaatttattacccattttgaaaggtaaaaagtatatgaatattactgcttttgttgaaaagca

SEQ ID NO: 387962 - DNA, 540 bp, Homo sapiens
gtgatttaggcataaaatacacactagactttgaaggttaagtgatctgggggtcccgagatttttcctttcacaaagacatagtaaaaaacatggaatcttccatgaataactttatatattggttacatgttgaaacaatagttttaatatattgttaaataaaatatattattaaaattaatttcaccggtttattttttaatgtggctaccggaacattttaagttacacatatagctcgcatcatattagtgctggacaatgctgacctgtactgaaggttctgtgaagaatctttgggtcatttaccactgtactccctttgccccctccccacccactagcacaacacctggctcatagtatgtacataatcaataagtgttgaagcagggaagtctctaaatctctctatacatrtatttcttcattgatacactgtgagtctctattcacaagataataaaagtcaagaaatttattacccattttgaaaggtaaaaagtatatgaatattactgcttttgttgaaaagca

SEQ ID NO: 387963 - DNA, 502 bp, Homo sapiens
ggcggctttctgcagtaatttatttgggacttttgctgtgatgcaaacaaaaaagagaggagaggtcttgtctgctggaccttgcctattttttgtgttgacttccagtacttagtccataggcatacgtaagtttttccaggtgtaatcttccttgggatgggatttcgaattctgctttttccctttaaccttacataatttctacaaatgttatgggctatgtgaaagtcatacctggaggagaaataatcaaaatgcatgtgccrcgcaccgagctgggctgccacacacgtaaatgagcattctcttatgctttctgtggaataaagacaccttgcaaagaggagacagctcatcaaacctgcagggtgcctcaaaaagcaatttcaggttcctgattgccattttttgggtctacgatcttcaagagtgtggccagacggttttcacagtttgcttgctgtcaggtttatatgaaagtgcagcagtcagattcata

SEQ ID NO: 387964 - DNA, 544 bp, Homo sapiens
aaacaaaacaaaaacaacattttatggttgatgactcsagcccaaaacagttaacaaaatctgaaccatgaatgcctttttaatctcaggagaataatcatcattttcatcagtgtttgacaggactcctgtaagacaagagttgggcattgcttcctcagcctaacttgcctgggcggaaggagacatggccagaaggtcttaccatttgccttgtatgtggtactctttctgaggtctccaactctcttaaaatcctgttcaaaatgatcatgtggactgcagtctcgtggacagcaggaaatggacccgaagtgtccctgcacagagggtcctaaccatctgtgcttgctgcacctgcaccgtcagctaccctctctgaggcacacttctccttcttcaaatgcctgcagggaccagggggcagcccagaagtgaagacagaagggaggacagcaagggaagccccagctcaaagaagtgactgggctagggcggccctccttaaagatgcttctgcctgcctgccgagtgtcactgttga

SEQ ID NO: 387965 - DNA, 544 bp, Homo sapiens
aaacaaaacaaaaacaacattttatggttgatgactccagcccaaaacagttaacaaaatctgaaccaygaatgcctttttaatctcaggagaataatcatcattttcatcagtgtttgacaggactcctgtaagacaagagttgggcattgcttcctcagcctaacttgcctgggcggaaggagacatggccagaaggtcttaccatttgccttgtatgtggtactctttctgaggtctccaactctcttaaaatcctgttcaaaatgatcatgtggactgcagtctcgtggacagcaggaaatggacccgaagtgtccctgcacagagggtcctaaccatctgtgcttgctgcacctgcaccgtcagctaccctctctgaggcacacttctccttcttcaaatgcctgcagggaccagggggcagcccagaagtgaagacagaagggaggacagcaagggaagccccagctcaaagaagtgactgggctagggcggccctccttaaagatgcttctgcctgcctgccgagtgtcactgttga

SEQ ID NO: 387966 - DNA, 544 bp, Homo sapiens
aaacaaaacaaaaacaacattttatggttgatgactccagcccaaaacagttaacaaaatctgaaccatgaatrcctttttaatctcaggagaataatcatcattttcatcagtgtttgacaggactcctgtaagacaagagttgggcattgcttcctcagcctaacttgcctgggcggaaggagacatggccagaaggtcttaccatttgccttgtatgtggtactctttctgaggtctccaactctcttaaaatcctgttcaaaatgatcatgtggactgcagtctcgtggacagcaggaaatggacccgaagtgtccctgcacagagggtcctaaccatctgtgcttgctgcacctgcaccgtcagctaccctctctgaggcacacttctccttcttcaaatgcctgcagggaccagggggcagcccagaagtgaagacagaagggaggacagcaagggaagccccagctcaaagaagtgactgggctagggcggccctccttaaagatgcttctgcctgcctgccgagtgtcactgttga

SEQ ID NO: 387967 - DNA, 489 bp, Homo sapiens
tgtggtatattttggtgaaatatactttagctttaatgagaaaaagacaattatcatttaaacaccatcctctttaggtacaaataattccctgtgtgagatgttgaaggagagcagctgcctcccattgctgggcagggccaggcacactcagctgcttggaacacatggcaggaacgaatttctgctcaaggcttggatcaggcaattgatgctttcyggaagggaaataatggctgaggaaacgtcgatgtcaatatttcttcatggagaaaaacacattttgatctttcttcatggagaaaaacacattttgatcttttcctcaaacaagtcaataaggtatcaggttctatttgaatcttttccctggaaaacatcttacaattatgagagtctaataactttttcttgtaacattaaattgaggcaattccaatgcttcaaacagtatttatttaaaaggagatggacaacctcctaaaagtt

SEQ ID NO: 387968 - DNA, 531 bp, Homo sapiens
ccacagaagagagggtctgggtgggactcacgagtgtcccgcagtgacagagctttcccagtctacgtctgcaccaccttgaggctccttctaatcctccaaccgcagccctgaaatctctctcataagaatctggtggaaggctgtgggsagagcctggaggtggctctcaagagaatttggtggaagtctgtggaggaagatcctggatgtggctctcgtaagaatttggtggaaggttgtggggagagcctggaagtggcctctcatgagaatctggtggaaggctgtggggagagcctggaagtggctttctctcatactagctcattgttgttctctagaaatctgtcttgaaggtttatcttcttatctacttgcacggtagctgggattctgtttctcccatttaccactggtggacaaatgctcaaatcctttctaccctcggaaagaattgtcttttttttggatttggaactatttggttaccctatgacctcaggtatttgatgcgctcaggaaaagtta

SEQ ID NO: 387969 - DNA, 531 bp, Homo sapiens
ccacagaagagagggtctgggtgggactcacgagtgtcccgcagtgacagagctttcccagtctacgtctgcaccaccttgaggctccttctaatcctccaaccgcagccctgaaatctctctcataagaatctggtggaaggctgtggggagagcctggaggtggctctcaagagaatttggtggaagtctgtggaggaagatcctggatgtggctctcgtaagaatttggtggaaggytgtggggagagcctggaagtggcctctcatgagaatctggtggaaggctgtggggagagcctggaagtggctttctctcatactagctcattgttgttctctagaaatctgtcttgaaggtttatcttcttatctacttgcacggtagctgggattctgtttctcccatttaccactggtggacaaatgctcaaatcctttctaccctcggaaagaattgtcttttttttggatttggaactatttggttaccctatgacctcaggtatttgatgcgctcaggaaaagtta

SEQ ID NO: 387970 - DNA, 319 bp, Homo sapiens
ctcctctggctgagggatttttcctcttgggatgcagcctggactggtggctctggagccaggcaggcctgagtgtggatcccggcttagccatttgctcagcctccctgagtctaacgttcctatctgtaaaaaggagaaaataataccaaccttccagtatttctaggaggaattagaaktagtaataaatatcaatatgtggtaaaaatgacacagatacctcttattgtaggacaagtaggattctaagtgctttactcatattaactcatttgttattccagactctattcacgattcacctcctccatgcagc

SEQ ID NO: 387971 - DNA, 549 bp, Homo sapiens
tgggacaaaatctagcacaaaatagtgatttttaaaatatttgtcaaataaattaataatttcttgtggccgagaaaacgggtgaggttctgaggaatgtgaacgtttggaaagagcttgtagaytccatctgtcgccatttctgtacttgtaccccatatcttctgggcaacaaatggtatcaaaaccccccgtgtagaaagccctcaatcaatatgcgcttgcatgttttctctaggtagaatgggacccagacccggagtgccctttctgcctcttgttttgggagagtgttccttcttcactgccttcacttcctcttctcccgcctgcttctcagtcacctggacagcctgccctttcccctctgccacacactgccattaagtaactgtttttaccaccttcctgcttagagacaacacagaatcgttagtggactgcctggggaatcccagtaatcagcctctatttctaattcttaaggaggtcttgagcaagatgatcaacttttctgagctagctttttttttctctttaaaacaagag

SEQ ID NO: 387972 - DNA, 382 bp, Homo sapiens
tgtggctcactatctatttctattggacagcgctgctttagacagaacccaacaaatccttcacggttttatttctagaggaaagatgagcatactaaaggtttaaggtatcctttgtaaacatcrgacccttcttgtggacagcccatgagtctctctgcataatggaaggaccagtcaaccacaaggagcctcctgccacagctcatcccagcctgcctagcgttggcctctgtaggctcacagcctcttccctggcagggtcagcaagggtcccgtgagctctgacaacttcacagtcttctacttctctgactttaccatcctctattcatttttttaaatgtctccaaataatacagaaaaaagaaacttacaggtt

SEQ ID NO: 387973 - DNA, 414 bp, Homo sapiens
gctttttttcagctcagttttatcataaagtgtagcatctttcccatccagtgcctgagccatccttttctcatcataccatcatccagtaagtttctagaacatcctaattcatctccctgctttatattgcatcctgcttcagtctccccaggactgcttgttctttcttaaaaccttaagctaactgtaggtcatcattcacatgccaaaaatccagccatggcttctctttcaaaattaacagtgaatatcttatccctaggcccattcctactctccagccttaaccttcttcccttctgccactgctatcaagaacccggccctccagctctactaacagtagacatctaaactgctcttactgtgcactctacaaaaagyatcattctcataatagtcgtttaaatt

SEQ ID NO: 387974 - DNA, 579 bp, Homo sapiens
ccggctttaaaattattgtatccctagaaatcctgtcatttgttacaacatgagtgaaactaactggaggacattatgttaagtgaaataagccaggcacagaaggacacattttgcatgttctcactygtgtgggagctaaactttttttttttaaaaattgaactcactgagatagagagtagactgatggttactataggctgggaagggtagctgggcatggagtggggaggggataaagtggggatgtttaatggatacaaaaataggtaaaatgaataagatctagaatttggtagtacatagggtgactacagttaacaagaatttatcatatatttgaaagtaattaaaagagtagaattggaatgttcctaatacaaagaaatgataaatgcttgaggtaggtatacctcaattaccctgattttgatcactgcacattgtatacctgtatcaaaacatcacatgtattccatattatatacaactattatgtacccataattaaaaatagaaattaaaaaatcttgtatccctgttttttctaataaagcataataaaagctcatgaat

SEQ ID NO: 387975 - DNA, 593 bp, Homo sapiens
aaataaacaaatgggatagggcgggagtgggagagttagtaggagccggagaaaaacagccccgctttaatctatttaatctgaggttctacagaagatttcatttataatttgctcctaacagtttttgaaactccctgttgtcattggtttcctgcctttattcttccttgtcagcaagtgtacccttaagcaattcactgttcattaacaccttcagagagaattaaaggaataaaactcaaaaggggtaggaggtaaaatgttatgaatcccaacctcacctgagccagagaaatggtttacttgatgtcttaggcatcatcttattctaattacagagtcctccttagaatcaaggtaaaaaatcatattctctattttttgcttttttcttttccttctctttttttctttaatgcttgtgtgattatatgacccttgatactcaaatcctgggatgctgtctatcctaatgacagctcattccctcccccatttatagaatgaaatatgaatatgtcrattctttttttttgagacactccatcaccccagttggagtgaagtggaacaatttcagctcactgcaa

SEQ ID NO: 387976 - DNA, 568 bp, Homo sapiens
ccagaatctcagttcattgactttcacaggaatttcctgtcccatttttaactgcaccaatgggcccgcattggagtgtgasccctggccacagtccacaataggggttgtggtacagactagctttgtgtcatcaaaaatgaattaaaataaatggttgatctatggttgaaatgaggagagtaatgtgctatggaagacaggaggaagaaaatgctttcaaacatatgaagtgttttgtttaaaaacttggagaagagtagaagttgagtgtgcagaggggaggaatccacaaaagcaagccgggctccaaaggaagctgtgggcgtgggtttacactgagagactggagccatctggtggagaatgctgaaagcaacaaagaataatgagaatcagtgcagtctgctagagaaatgagatcccagaagtggggactggaagatactctttacttttacatatgatgaagttgagattcaacaaatttaagtgacttgccgaagctgaaagggtgaaataatgtcattattaaatgggttaccctcagatatggtttcaatctagt

SEQ ID NO: 387977 - DNA, 443 bp, Homo sapiens
accaaaacaaaaacagacaaaaataaataaaatgaccccggatttcttagctgcagcccatgaaagccacacagacttaacagartaggaacttggtcaaggatattagacaattcacataattgctgagagagttagaaagccagttgctggaaccatatgggtagaaacaacacccagctatgttgtgggggcttgtaaggaactatcttagcccccactgctcactctctatgcccctagagattgaacattaaagagcttttagctgggcagaatggcacacacttgtagtcccagcactttgggaggctaaggcaggaaaatcacttgaggctgggagttcaagaccagcctgggtaacacagtgagacaccctctctccaaaaaaataaaaagttttcccaaggaccagccatctgtccccatgttagctagaagat

SEQ ID NO: 387978 - DNA, 582 bp, Homo sapiens
cttccttactgttaaatgtggtgactgtctgagttccagccaatagaatgtaggtagaggaaaagtgcatcacttccrggaagagccagtaaaagcctcctgcaagtcatcttttcttgcttcctcccctgcctgaatggagaggactctgtggacctagagaagggcagaaccacaagatgaaaaaagccttgagcccctgagtgaccacatggagggctgcattacaaggaactctcacatcagactctggaaagtgacaagtaaatgtacattgtgcttcaggccagagaaggtaaaattgatctgcagcagcaactgctgtgactcaccctaaggacaaccactcacaagtctttcatgggctcatgtgagtgaaaggatctagattagatgctgcaccctagctgcaagggagccgggggatgcaagtttgctgccatcattcttgtgaaagtgggattcagaatgtggacagttaccaagatgtagagaaaatacttggagcagcaataaatgaagcatgatccctacagaaagaaacaaacagttcacagaaaatgtagcccaaatagccagtaa

SEQ ID NO: 387979 - DNA, 582 bp, Homo sapiens
cttccttactgttaaatgtggtgactgtctgagttccagccaatagaatgtaggtagaggaaaagtgcatcacttccgggaagagccagtaaaagcctcctgcaagtcatcttttcttgcttcctcccctgcctgaatggagaggactctgtggacctagagaagggcagaaccacaagatgaaaaaagccttgagcccctgagtgaccacatggagggctgcattacaaggaactctcacatcagactctggaaagtgacaagtaaatgtacattgtgcttcaggccagagaaggtaaaattgatctgcagcagcaactgctgtgactcaccctaaggacaaccactcacaagtctttcatgggctcatgtgagtgaaaggatctagattakatgctgcaccctagctgcaagggagccgggggatgcaagtttgctgccatcattcttgtgaaagtgggattcagaatgtggacagttaccaagatgtagagaaaatacttggagcagcaataaatgaagcatgatccctacagaaagaaacaaacagttcacagaaaatgtagcccaaatagccagtaa

SEQ ID NO: 387980 - DNA, 582 bp, Homo sapiens
cttccttactgttaaatgtggtgactgtctgagttccagccaatagaatgtaggtagaggaaaagtgcatcacttccgggaagagccagtaaaagcctcctgcaagtcatcttttcttgcttcctcccctgcctgaatggagaggactctgtggacctagagaagggcagaaccacaagatgaaaaaagccttgagcccctgagtgaccacatggagggctgcattacaaggaactctcacatcagactctggaaagtgacaagtaaatgtacattgtgcttcaggccagagaaggtaaaattgatctgcagcagcaactgctgtgactcaccctaaggacaaccactcacaagtctttcatgggctcatgtgagtgaaaggatctagattagatgctgcaccctagctgcaagggagccgggggatgcaagtttgctgccatcattcttgtgaaagtgggattcagaatgtggacagttaccaagatgtagagaaaatacttggagcagcaataaatgaagcatgatccctacagaaaraaacaaacagttcacagaaaatgtagcccaaatagccagtaa

SEQ ID NO: 387981 - DNA, 593 bp, Homo sapiens
cacaaatctgtaatttggtcctgtcttaacagtaygtgtttgtctgctccacatggtgtcagctgggggttggtggatcatctcccaagatggttcacttacatagctggcaattggtgctggatgtctaaatgggagctcagctagtatgaaggccaggggtctctgctcctctccatataaaactctgcctctccatggcaatgtggctttcttacatccattccaagagtgtgaatcatcccaagaaaaccagtcagaagtgtatggatattttatgacctaccttagaagtcacgaagcatcacttctgccatactctagtggtcaacccagttgtgtaaatgtccccccaggttcaaggggaatgaccgtagaccattcaatgggaagagtgttaatgttacattgtaagaaaagcatatgggagggaatatattatggtgtccatctttggaaaatgcaatctgccacaacaatattgagtatttcaatcaatgaacatgatatatctctcaatttattgaggtttgcaacatctctcagcagtgtttcatagttttccaagtacaagtcttgcagtcattttacta

SEQ ID NO: 387982 - DNA, 593 bp, Homo sapiens
cacaaatctgtaatttggtcctgtcttaacagtacgtgtttgtctgctccacatggtgtcagctgggggttggtggatcatctcccaagatggttcacttacatagctggcaattggtgctggatgtctaaatgggagctcagctagtatgaaggccaggggtctctgctcctctccatataaaactctgcctctccatggcaatgtggctttcttacatccattccaagagtgtgaatcatcccaagaaaaccartcagaagtgtatggatattttatgacctaccttagaagtcacgaagcatcacttctgccatactctagtggtcaacccagttgtgtaaatgtccccccaggttcaaggggaatgaccgtagaccattcaatgggaagagtgttaatgttacattgtaagaaaagcatatgggagggaatatattatggtgtccatctttggaaaatgcaatctgccacaacaatattgagtatttcaatcaatgaacatgatatatctctcaatttattgaggtttgcaacatctctcagcagtgtttcatagttttccaagtacaagtcttgcagtcattttacta

SEQ ID NO: 387983 - DNA, 554 bp, Homo sapiens
ataaagaagttgagtaaggccgggcacagtggctcatgcctgtaatcccagaggccaaggtgagaggatcgcttgaggccaggagttcaagaccagcctgggcaacatagtgagatgtttctataaaaacttttttttattatttgtttttactttttaaaaattagtgcacacatgtagtaccatctgcttgggagactgaataggagatcacttgagcctgggagattgaggctgcaatgagccaagaatgcactactgcactccagcctcagtgacagagcaagaccctgtctccaaaaaaaaaaaaggttgagtactcttctcaaggtcacagactggcaaaggctagattcaacacaggcttgtctgatacacagccattaaccactgtgctgtattttccgaaaagtttttgttgataatgaagggactccctctgaccccatatacttttctaggcattgaaacktttacttcttccactgagatcccataagggataaagttgcacatgggcactaagggtgagtctactgtaggcaaaacaggta

SEQ ID NO: 387984 - DNA, 534 bp, Homo sapiens
cccatgctaatgacctcgtttaaccttaattacatctttaaagccctttctccaaatatagtcacattctgaggtactgggggttaggatatgaattttaggggaatactactcagcccataacatctatatacgaaaatattaactaggtatttttaaaatatggagagttttttcgtgatttttttataaaaatgcttttaagttgggcctggcggctcatgtctataatcccagcactttgggaggccgaggtaggtggatcacttcaggacaggagttcaggaccagcctggccaacatgrcaaaatgccgtctctgctaaaaatacaaaaactagcagagcgtggtggcgtatgcttgtaatcccagctactagggaggctgaggcaggagaatcacttgaacctgggaggcagaggttgcagtgagccgagatgccactgcactccagactgggcaacagagtgagactccatcaataaataaataaataaataaataaataaataaataaataaatgtatgttttta

SEQ ID NO: 387985 - DNA, 569 bp, Homo sapiens
tattaagtagataaaataaacttcaaaaggcaagtgttttgggggagaaataaacagtggaatggtgatctgaaagtaacagggtaaagcaggggtcagcaaactttttctataaagggtaagacagcaaatattttgggcttgcagggcgtatatggtttctgtcacagctcctccattctgctgcagtagaacaaaagcagccacagacaatatgttactaacaaatgggagtggcagtatgccaataaaacttttacaaaaatagaatgtgggccaatggtcctcaaactgtagtataatgacccctggtgtagaacaagtatacagaatcctctttctggtggtgtacatgaggaaaagtagagaaagtaatgacctctgttagaaagggtttgaggaacatattcttgtcaatggctctttakctaccataaaaagggtgtgtagatgaggggtgctcttggattcacaaaacaacacaaggattccagaggtttctaaagatcaattaattcagacatttaaaaaatatctgctgtttcaaaggaaaaagattcaggttaacc

SEQ ID NO: 387986 - DNA, 596 bp, Homo sapiens
tggcattttcttataaggaaaacgtagtatgtaatttggccctgagtgccttctctgtgcaacagatctctacagaggaaagaaggatagactgcaagaatttatctaaattactaaactgtaatgatctagttctccaaaatgagacaagcagcagcattgcttaagtgttttaacttggcctgcaatttgctaatcagaggctagaggtgacatgccataaaactgcacaggcttttaactgataggtttacagaaggttcacagcaaatctgtgccctgtaattgaaatttaaaggcacaaatctcaggtcattygaataaaacagctcaatactcctatcttttctatcttctaaaaatggaaggaaaacatatgtcagaaataatctgatataggtccataactgccagtgaagaaaaaattgagagctagtggcaaccaagtccttactttaggtagccacagcacttttaacatgtaggtgtggataggaaaaattctttcttaaacacataataaacatattttggagatactgttctacattgtctacatgatacaaacggaaacaaacttaattagcctagaccaa

SEQ ID NO: 387987 - DNA, 561 bp, Homo sapiens
gcatgtttagatttaagggactctatttccagttcctcaactttcatatgtacttcttctaaactaagtagtggtgacctgaaaacaagactgtttctctcttccatattccctttaatagtctcccttctacttcactagagaaaagcaagtgtctctcacctatttcaaaacataccacagtgcattgcccaggatgtcaaaaactctgtgactccaaacaaagggacaagtagaaatacactactttttttgtactaccttttgtttgtttgcttgttttttgwttggttggttttttttttttttttttttgacaggtggtgcaatctcagctcactgcagcctcaatctcccaggcttaagcaattctctcacctcagcctcctgagtagctgggattacaggtatgcaccaccatgcctggctaatttttgtattttttgtagagatggggtttctccatgttacccagactggtctctaactccagggctcaagtgatctgcccacctcagccgggcctctactttttttttttttaacttttatcttaagttc

SEQ ID NO: 387988 - DNA, 568 bp, Homo sapiens
ataagagaaacaaggctgaggactcagtaaaagtgagtcccactccaaatgatcagtctaaaacttttaggtgcatattaagttaaaaagtacccctgactgttccttatcaaaaggcaaagtgtcaggagacctcctgacttacatttgggtaccagtgaggaagcacaatagttttggtattttgtggagttccttttccttctttccttcctyatttttttctttatttccattcatcaaaaaatgctgtgcaccgtggtctaaatattaggaagcaaatgttgtctgaggccatttcaaactagcacgcccgtgcacccccagcttctgtgcatctcctcagccttgatacctgtttgctgatctcttgcttctaactaatgaagaacaagcagttttctcttccagatctctgttgaactgtccttgtcaaacagattggatcacactcaatacaagagggtctttgtgatcagagccaccaggaattaaggaccctattttttttgaaaggatcaaatctacaattaacataaataaaaataaaaatactttttttactgat

SEQ ID NO: 387989 - DNA, 581 bp, Homo sapiens
cacttcaggaaaagtttcctgtattatgtttctcaatatttttcctgttttatttgttgggttcttatcatgaatatcaaatatccttatattgaattatctttgagcttcttaattagtagctaattctttttcctctgtatttgctgtgatcccaagtgctataattaatatgatttttagttatatctactatctctttctatttctaagttactcagaattttattttgttcctttagttctttggtatcctgttccatcttattttgttgttttatcatctttattttgatattttgttttatttaacttgtgttcttattaagttctatatagcccaatgcacttacaaggaatcttcttgctgttttggttttgggttcctcccagacaggatttttcatatgtttttaacatacattattttcttagaatattttattgagattgtgtgatttattttcatcytacttatgcctaatatggacaattctgagtgattgtgtatcgcttcagtggaatacagtgtgggtgaatttcccttgtcatccccctgccttatatagactctttatctt

SEQ ID NO: 387990 - DNA, 576 bp, Homo sapiens
aattttcccagaattgtttactcactccttcaatctgtttctcttgaagctggagagcattggtgagagtcatccggtttccattaattggccatccttcctgtaaagggcttggctttggggagagggagggaaaggggctgtgaggtcaggagccctgttcagctccaacagcatcttctgtttctttttgtagctgctacttcttgacacttatggcataaagttgttcctccttccttgtttatttggtgctgggaaatcgatcaattaatctctcactcactcatgctactttctgagcattttattagatggtagggaaaagagattctatgattactactacattttttcatccttgtttggatttttgaaacagagaaattttctgcccagcttactgtatttcttaaaagtaaggtaaaattcacatagtagtcatcatgttaaccattttcaagcgtccatctggcaacatttagtacattcacattgttgtgtgaccatcacctctatctagttccaaagcrtttccatcaactgagagaaagccctgtaccccactgagcagtc

SEQ ID NO: 387991 - DNA, 399 bp, Homo sapiens
tgcaataaaccaagaaaaaaatgcatctagaccttaaaagaataagtaaaactcattttacttgaagacaacatgattttccatgcaaaaaatctgatggaatctaccaaaaaactcaaagaatgagtaagtgttttcagcaaggttgcataatgcatttcaacataaaaaatcaaccatatttctatgaactcataacaaacaattagaaattgaaaatttaaagcaatgccatttataatggcacaaaaatcatataattagagacaaatatracaaaattgtgtaagacaaatacactcaaaactacaaaatattgctgagagaaattagagaactaaatgaaaagaactcaataaattaaacacgactcaaattgttaaaatatcagttctcccc

SEQ ID NO: 387992 - DNA, 515 bp, Homo sapiens
gggaaactattttaaaataagtacaggaaacacagaaagtctggaagaagcttacttaaagttgcaaatgggttagatctaaaaacattcagaatgtaatcattgatttttagagctacaagaaacagtaagttatctaagaaggctaattctccagccccaaaatactctgttataaatgaggaaaaggagagcaaataatatgacatagaacatttgttgtaggccttgaagtaacttttttgggaagaaggacattatagctatgcattatgcttggattttaaactaatcrtataattgcagaaatattatatcatatctgttcttcttccataagtggcatagtttagttattctatatatgttcatttatttaaattccatcacccacagttttattcttttatttggaaataattccaaatttacagaaaagttgcaagaataaaaataataccaaaaacacctataacacctgttacccagattcacttcttgttagcatcttatcc

SEQ ID NO: 387993 - DNA, 451 bp, Homo sapiens
acgaccttgaccctcgggctatgtggagaacttggggattgtagccccaaggtgagtgcgagccctcttgggctcctttctacgcgtgtggatcagtggtggcatagaggccgtgatggcagcggaggagctgtcacggaaacggcgaccattctcaaagtccttaatggccaggtcccaacctgggcagcgaggagatccttgtggaggtgtaaggcaggttggaatgggccaggctggagctacgttgmgtttgttgagttttttgcttattgctgttaattccctgcaataacaaagcctgttgctttagctaattcatgaccttctcccttgcttgtctctgcttgtgaactttgaagaaagaaatgctggcctgtccagcctcccctgcacacagaggtagccatgggacagggcccagctagtgagatagaaagccaaggctgtg

SEQ ID NO: 387994 - DNA, 451 bp, Homo sapiens
acgaccttgaccctcgggctatgtggagaacttggggattgtagccccaaggtgagtgcgagccctcttgggctcctttctacgcgtgtggatcagtggtggcatagaggccgtgatggcagcggaggagctgtcacggaaacggcgaccattctcaaagtccttaatggccaggtcccaacctgggcagcgaggagatccttgtggaggtgtaaggcaggttggaatgggccaggctggagctacgttgcgtttgttgagttttttgcttattgctgttaattccctgcaataacaaagyctgttgctttagctaattcatgaccttctcccttgcttgtctctgcttgtgaactttgaagaaagaaatgctggcctgtccagcctcccctgcacacagaggtagccatgggacagggcccagctagtgagatagaaagccaaggctgtg

SEQ ID NO: 387995 - DNA, 451 bp, Homo sapiens
acgaccttgaccctcgggctatgtggagaacttggggattgtagccccaaggtgagtgcgagccctcttgggctcctttctacgcgtgtggatcagtggtggcatagaggccgtgatggcagcggaggagctgtcacggaaacggcgaccattctcaaagtccttaatggccaggtcccaacctgggcagcgaggagatccttgtggaggtgtaaggcaggttggaatgggccaggctggagctacgttgcgtttgttgagttttttgcttattgctgttaattccctgcaataacaaagcctrttgctttagctaattcatgaccttctcccttgcttgtctctgcttgtgaactttgaagaaagaaatgctggcctgtccagcctcccctgcacacagaggtagccatgggacagggcccagctagtgagatagaaagccaaggctgtg

SEQ ID NO: 387996 - DNA, 533 bp, Homo sapiens
atcaacctgaattgaagttctacaagactcaaaaatgaacaaaaggatgcacaggtaatactcaagaagaagacgtaaarcaatgttggagatgatgtttaatatactgacctgtgagtgtgtctgttgactgtgatctaatgtgttactttacagaactggcaaatctagcgtgactttgtatcagttcggaggtagtttttcagatccctccccagctgacatccctaaacagtgtggcttatttcaaccttgagaaagaccttcatggcctttgccaatcccacaaactgacttctagagcttaaagttggcataaaatgatacaatatgtaagaaccaagataacccacatttttatcattccaaacaatgtaggaaagaataatgtccaaagaaatcaggatcttttcaaagaggacacatgttctttattaaatcaggatgagagatcagatctcccaacgtgtaccccagttttacattactttattaatttttcacgtgacttttgttgtgtgtagccctggttc

SEQ ID NO: 387997 - DNA, 469 bp, Homo sapiens
tttggatgcgcgggtcccgggtggggtcggggccagagggggtcgctaggcgggtgttccacggctgatcacgcttcgttggccccaggcggtgggcgccggcagggcagggcgctgtagttgacgggagcygcggggaccccggagacccggacgcccgtcaccgcccccctcccccagtccagcagcgctccgcggggatgccctggtctcgacccggtccgtcagcccccggcggcgcagggatccgcgcccggcgcctaaactgccctggtgtcctcttcgttctggcccggggctggcgcggggaggtgcagcattaggggcgctgaggtgacacccgagaacttcccagggagagggtgcgcgggggggtggatttccacagtccttcccgcggcccccgcgggggggcggtgttgggagggcacttggggttatcccaggctcgccggtgggggtgggggga

SEQ ID NO: 387998 - DNA, 469 bp, Homo sapiens
tttggatgcgcgggtcccgggtggggtcggggccagagggggtcgctaggcgggtgttccacggctgatcacgcttcgttggccccaggcggtgggcgccggcagggcagggcgctgtagttgacgggagccgcggggaccccggagacccggacgcccgtcaccgcccccctcccccagtccagcagcgctccgcggggatgccctggtctcgacccggtccgtcagcccccggcggcgcagggatccgcgcccggcgcctaaactgccctggtgtcctcttcgttctggcccggggctggcgsggggaggtgcagcattaggggcgctgaggtgacacccgagaacttcccagggagagggtgcgcgggggggtggatttccacagtccttcccgcggcccccgcgggggggcggtgttgggagggcacttggggttatcccaggctcgccggtgggggtgggggga

SEQ ID NO: 387999 - DNA, 292 bp, Homo sapiens
atatttaaccacaggacaaacataaagaataacctgaagaaggtatttctcaaagtgaggtygaaggccccaaaagaagtctaaggtgggctcactagtgtgcattttaaaccaacttcctaggtgattatttcacattccaaaatctgagaactaatgccctatgggaaacagcaccacttaaaagcaaggccataaacatatttctgacatgagatacagaattctaagtttatgatttgaagtgaatactgctttttgttttaaaacaagtttcaggtgttaagagaaa

SEQ ID NO: 388000 - DNA, 292 bp, Homo sapiens
atatttaaccacaggacaaacataaagaataacctgaagaaggtatttctcaaagtgaggtcgaaggcyccaaaagaagtctaaggtgggctcactagtgtgcattttaaaccaacttcctaggtgattatttcacattccaaaatctgagaactaatgccctatgggaaacagcaccacttaaaagcaaggccataaacatatttctgacatgagatacagaattctaagtttatgatttgaagtgaatactgctttttgttttaaaacaagtttcaggtgttaagagaaa

SEQ ID NO: 388001 - DNA, 292 bp, Homo sapiens
atatttaaccacaggacaaacataaagaataacctgaagaaggtatttctcaaagtgaggtcgaaggccccaaaagaagtctaaggtgggcycactagtgtgcattttaaaccaacttcctaggtgattatttcacattccaaaatctgagaactaatgccctatgggaaacagcaccacttaaaagcaaggccataaacatatttctgacatgagatacagaattctaagtttatgatttgaagtgaatactgctttttgttttaaaacaagtttcaggtgttaagagaaa

SEQ ID NO: 388002 - DNA, 292 bp, Homo sapiens
atatttaaccacaggacaaacataaagaataacctgaagaaggtatttctcaaagtgaggtcgaaggccccaaaagaagtctaaggtgggctcactagtgtgcattttaaacmaacttcctaggtgattatttcacattccaaaatctgagaactaatgccctatgggaaacagcaccacttaaaagcaaggccataaacatatttctgacatgagatacagaattctaagtttatgatttgaagtgaatactgctttttgttttaaaacaagtttcaggtgttaagagaaa

SEQ ID NO: 388003 - DNA, 509 bp, Homo sapiens
cactgtctgataagatgctaatatccagactatataaagaactcctataacttaacaacagcaacaaaaccaaacaacttgattcagaaatgggcaaaagactggaaatatttctccgaaaaaaatagtcaaatgcctaggaagcatataaaaagttcttcgacataagtaatcattaggaaaatataaatcaaatctacaatgagatatcacctcacamcaattatgatgatacaattcacaaaataaaacaagtgttggtgaggatttggagaaactggaaccgctgtgcaccattagtaggagtgcactactatggaaatggtgcagccactatggaaaacagcatgcaggctctgaaaaattaaaaatataattatcatatgatccagtaataccacctctgagtctatatccaaaagaactgaaagcagggcattaaagagatatctttacctctatgttcatagcagcattattcccaggagccaaaaagtggaagcaaccca

SEQ ID NO: 388004 - DNA, 648 bp, Homo sapiens
tttcctgtggggaaaaaaagcaaagtgtgttaacatgggtgagatcagcagaggtgctatttcatacaggatggtcatgggaggcctcgctggtaagaaaaaactacagcagagatcagaaggaccgagggagaaaatcctaaatgcatttagggacagagttaagttagggtcacaagacagcagaaatgtcccgaggatgaaagayggttggcatcaatgaactctgtggtcaatgtggctggagcccagaaagaagggatgtgagtaaggggaagtaaatccagagaactaagcacagtacaacagaacaggtggggcctgtaaggcctttggcttccaccttgcaaaagatggagagccattggcaacttctgaacagaagtggcacaaacccagttacatattagaagatcactctggctacacactgaggagagcatggtggcagaaagagaagcaaataggaggccatccccaggatccggttaagagatggcgttgtttggatcagagaggtagaaagacatgtccatattattttaacataggtatcatatacaaaaaagtacacatatcatcaatatatagcttaattttgaccaagtaaacatctggaagctcccatacaatgcctcccagtcacta

SEQ ID NO: 388005 - DNA, 551 bp, Homo sapiens
taggaatagtataaatggcatttattaaaacaygagtattagactaaagtctatacatgcaggttggtggtttttgaaatgacttgattggttctttacaatttggtgattgtgttagtacttccttattttggtgggaaatctgtgttcctgaaactaagaaccctctgtgggagttagactttcagagtctacctctctgcctgcttaatactgggcccatcccctacccctacatgccaggtaactggtacaagaggttaatgggccctgctttgagaaacagcttcagagattagatccactcatctccttagggcctttctagaatgctccatggttttccatctcctagaatgtgtttattttcattacagttttaggacttaaacatacagaaataataacaatacacagtactttttttctgcctcaatttccctgaagaagtccgtctttggaagtcaaagataaaataatttgagataccagcttgatgtaagcaccaaaacacctactggcctcttttgtttagaagtgttgtttctgtt

SEQ ID NO: 388006 - DNA, 553 bp, Homo sapiens
tcaagctttatgggaagccaaatcatagtcagacatcacttcatcaatttcctgggagaaatcactgtaattcagactagaaataattgtgacagcatgatggacacattctgtgctcatagacaggcttatgtgggaatggggaggttgcttggtgagcagggaatcaagagtgttggttgaataaaatgtaaagaccccttggtgagagaatatggtgaccctggctcactttarattttggtggcagttttctttattaaattttagcttaattctgaaaaagtgatactcaaaatagtattgtcttttccaagttctaaggagcacagtagcctccaatgcttataaatatacaaaagaaaatttgagttaagaacaaaaatattttagatactattatagtactgaggagcagcaaaaatccataaaaggtcatttggatctgcttttttttttttgtaccttcagataattttgattagctttcatttttatttgcattacccagagggcacacactggaatccaccagaactgaatacacattgtt

SEQ ID NO: 388007 - DNA, 593 bp, Homo sapiens
caaattatcccaaatgtagtgttctgaaactattttctatggtttataaatttaaggaagtcacagcacatagcatggtggcttgtctctgtgccgtggtgtttgaggcctcaactagaaagattcaatggctgggggtaagaagactggaatcatctggaggggtattcattcaaatgtgtgagacttgatgctggctgtcagctgggatccgtcttcccaaacacaactgaagacatcatcccaaatacaagatatggcctgttcatctagtatctccaaattgtcttatttgggattcctcacagcatgggctttaaggctgagaatatcactttaaaaaagcagaagtacaaggcatttttgtgatctaacctcaaaaatcacatgtctggatttctgtcattctccatcgacagagttgtcacagatcctgagcatacactcaggatcaagggaaatagacatggttaaaggcagattatckttggaaaatagaatctgtcacaagactctgggcttttattttggattctgaaatggctgaaacatggaaatcagacatcacaaggactgaagcccagtttcaaatc

SEQ ID NO: 388008 - DNA, 564 bp, Homo sapiens
acctaaaatacccatagaagaaaagagaaataaagggacaaagtcaatagataactggtaaggattttctaaatctgatgaaarccattaagccacagatttaagaaattctaggcactgcaagaaaactgcatgtattagtacttatttcatattaaaatatctaaaaccacaggtaaagagacaaagttaagtgcaattagagatttaaaaaaagatgttagcattctgggattaaagtgatagagatgtctgacttttcattagaaacatgaaaaccaaattcagtggaagaattattggaacactgaaaataactgatattctattatttttatactagcaaaatgttactcaaaaataaagttgaaataaagacactttcatataaagaaaaccttagaatgtgtcaccagtatttccatacgaaaggaaatacttccagcttcatccatgtccctgcaaaggacatgaactcattcttttttatggccacatagtattccgtagtatatatgtgccacattttctttatccagtctatcgttgatgggcttttgggtt

SEQ ID NO: 388009 - DNA, 543 bp, Homo sapiens
ttgtggcaataataggaaactagaaatggatggtgttagaagtggatgaggcattcttttaagttggcaaaaatttcattaagattttttataacattttattatgaaaatttttcaaaactatggaaaacttgaaagcatttgagaattgatgtttatgtccctaatacctagagtctacacattttgctgcatttgcttsatgacatacctattcatttttctgttcattctttcatctattttttcaaatttcaaagtgagttacaagcatcagtgaatacagtatgtttttgtactaatgggaataattcagaagagagaaaatcttttgatgattctaagaaagagtgggaaaatcactggaacaatgtccttgaaaacttagggtgggtaggaatcgtgtgagaaggtaaaagctgtcaggaggacctcaggcacttgatcaagatggaagttccatgggggaaagtcagagtataaaggtcaggggcaagtggtgggcagaggtgataatagggtatgtggatgttctcacccatt

SEQ ID NO: 388010 - DNA, 621 bp, Homo sapiens
atgaaaaacaaaatataggttcccacttttagtttttagaatccatgagaatagagtcctttttggctgacatcagtactaataatagctatgatttgttgatagcttattgtgtgtcaaccactatgttccactagtatgaacacatttagttcttatgaaacagtgccacttgtatcccacagatgtggaaattggggtatagaacacttatactacctgcccagaatcacataactagtgagtagtgggtccagggatcagacaatttgatgtcagggtcttatgccatactgctgcatctgaacagctgtgatcatgcagctaaacgggaccttgcagaaagcaccccagcaccccaaaggctagtctaactttcttaccaatgtacctgggtccccttgtcactgtaatgttcttcagatcccacctttagtcatgcattcaacaatatttacygagcaccaacttactgtctagacacaggagatctactggacagcaattctgattcaacccatactgggtctaggactagacacaatctcactggtcctatgatactaaaaacctagttatctggcatattgaaggggcctcaagcccagtcatgagggagac

SEQ ID NO: 388011 - DNA, 534 bp, Homo sapiens
ggccttctttccaaatatctttgccatgtgattatccagccactgaaaggaaatgttaaagaataaagtaagaagaggagttaagaataacaataatttgtaaaaaataaatttaaaaggtgtgttggatggaaaagaattcaggagacactgtgtggacatgtgtaacatgggcatcctgtcctccggaaagacatttaagatgttttgcaactcactgaggaatagatgaaattaaacaaaacaaagcaaaaatttgacctagtacttggttcatagtaagttcacagtaaataacaatttgtttttatttgttgctatggtcatgacggtggtggtgattctttaaggtctggaaaggacactgtctacagaaagcaaattatatacagaaggcagatagttacttccagattcgactacttcgtgctttcccgtaaattgcytgattatgaggcaacagttcccagctgatcgactcctaattttaatgctccagtttcaagtatcatcacattttaaggtaaaaggtct

SEQ ID NO: 388012 - DNA, 534 bp, Homo sapiens
ggccttctttccaaatatctttgccatgtgattatccagccactgaaaggaaatgttaaagaataaagtaagaagaggagttaagaataacaataatttgtaaaaaataaatttaaaaggtgtgttggatggaaaagaattcaggagacactgtgtggacatgtgtaacatgggcatcctgtcctccggaaagacatttaagatgttttgcaactcactgaggaatagatgaaattaaacaaaacaaagcaaaaatttgacctagtacttggttcatagtaagttcacagtaaataacaatttgtttttatttgttgctatggtcatgacggtggtggtgattctttaaggtctggaaaggacactgtctacagaaagcaaattatatacagaaggcagatagttacttccagattcgactacttcgtgctttcccgtaaattgcckgattatgaggcaacagttcccagctgatcgactcctaattttaatgctccagtttcaagtatcatcacattttaaggtaaaaggtct

SEQ ID NO: 388013 - DNA, 580 bp, Homo sapiens
aaacacttctattcacaatccctctgtcatgactaacaaatataacatttcttcctacaaacagaaagatctgtccttcatgcatattcctagacagttcaaaataggtgtaagcactttctyataaaggtttgagccactaattcagtgtaagcatattagaaatatagtatttttaaatatgaaatatgtgagattgaatcattagttgtaacgtggataaaagcaatagcaacattacggaaggatgtacttttcatcttcatatgataaggcaactgtgaagtctcatccatttttttttttaataatggtttagaagaaatgtaactactcagaattaatcaggcagaagctgacaggctcaaagatacagtgcctaacgtcttcccaccaattctgcaggatgattcagaaaacatcatttcgggtttcagaattcaagagggacaagtatcgggatttttcctcaccaagctctactctggggaaaaatgaccagtccagtgttagcagccaatcagtgccattcttgaccttactatgtccaaatcagagctcattccactttctcctctcc

SEQ ID NO: 388014 - DNA, 580 bp, Homo sapiens
aaacacttctattcacaatccctctgtcatgactaacaaatataacatttcttcctacaaacagaaagatctgtccttcatgcatattcctagacagttcaaaataggtgtaagcactttcttataaaggtttgagccastaattcagtgtaagcatattagaaatatagtatttttaaatatgaaatatgtgagattgaatcattagttgtaacgtggataaaagcaatagcaacattacggaaggatgtacttttcatcttcatatgataaggcaactgtgaagtctcatccatttttttttttaataatggtttagaagaaatgtaactactcagaattaatcaggcagaagctgacaggctcaaagatacagtgcctaacgtcttcccaccaattctgcaggatgattcagaaaacatcatttcgggtttcagaattcaagagggacaagtatcgggatttttcctcaccaagctctactctggggaaaaatgaccagtccagtgttagcagccaatcagtgccattcttgaccttactatgtccaaatcagagctcattccactttctcctctcc

SEQ ID NO: 388015 - DNA, 580 bp, Homo sapiens
aaacacttctattcacaatccctctgtcatgactaacaaatataacatttcttcctacaaacagaaagatctgtccttcatgcatattcctagacagttcaaaataggtgtaagcactttcttataaaggtttgagccactaattcagtgtaagcatattagaaatatagtatttttaaatatgaaatatgtgagattgaatcattagttgtaacgtggataaaagcaatagcaacattacggaaggatgtacttttcatcttcatatgataaggcaactgtgaagtctcatccatttttttttttaataatggtttagaagaaatgtaactactcagaattaatcaggcagaagctgacaggctcaaagatacagtgcctaacgtcttcccaccaattctgcaggatgattcagaaaacatcatttcgggtttcagaattcaagagggacaartatcgggatttttcctcaccaagctctactctggggaaaaatgaccagtccagtgttagcagccaatcagtgccattcttgaccttactatgtccaaatcagagctcattccactttctcctctcc

SEQ ID NO: 388016 - DNA, 645 bp, Homo sapiens
tttagtaggagggggtaccagtgggtctgaaatcctaccatcttcttttcaccaagccagtaactggagccagcacatgtgtcctcgcacagatgttgctgagccaggtgaaagcagtgcctttctcaatggtcatccagaggggtcctttccatgattcataaaaatgccccaaatgtgcaaatggcagttctgatcctgtgttttataacatacaaagtaggaattccttcatggtcatatgttaaatatatatttgcaccaaatttcctttgactgacaagctctgtgtagtcaggattctgtggcagagggaccagatcaggtaagcagcataccttaccatattggataaagatgcttattcctctctgggcaatgaacttcaaagaaataaagtaagaaagaaagtacacagctccaaaaatataaaatatcacaagaatgcccactcaatgtctgtaaaagtaggaattaggcatctatgacctgggtgcctgcccaccacccmagattttcttatactttcaagtccctgcttgtactcatttttacctcctcagccatctgggactcttactaccatgtgagtcactttcattttcataaatatattttgttccctgaaggtctttcagagacata

SEQ ID NO: 388017 - DNA, 622 bp, Homo sapiens
tattttctttcacccacagaagggaatcctctgctatagtaacaataaaggaagaaaagaagtcacatgtctctgkcatttaaaaaatgttattaatttatacacaagattcactaggcaataaacctcttaaaaggctgacctaagtgaaggtttcacatccccaaatttattttgcaaaatttatgtttatgaaattatatgtcagttgtttgaggctaaaaatacaatgatgaatatatatttatatgtgtgaatgtatatatctccatgtatgtacctgtatgtgcataaacatgtcatatatttaatgtaatttattttactactaaatatatatgccaactttctagtaataataactttaatttagataaaagagatataaacttatcacataaatttaaagtgatttatatttgcagtttattcaaatataaatttatatgaaaatataaaaggaaattattactaggcaaacatatatattctttcattcactatgatacaaaatactgtaatatttctggactgcatgttaaaagttttaatcattgacttctgttaccagaataagagattttaatgtagaagtccttaaaattttttgctaatatttaaa

SEQ ID NO: 388018 - DNA, 622 bp, Homo sapiens
tattttctttcacccacagaagggaatcctctgctatagtaacaataaaggaagaaaagaagtcacatgtctctggcatttaaaaaatgttattaatttatacacaagattcactaggcaataaacctcttaaaaggctgacctaagtgaaggtttcacatccccaaatttattttgcaaaatttatgtttatgaaattatatgtcagttgtttgaggctaaaaatacaatgatgaatatatatttatatgtgtgaatgtatatatctccatgtatgtayctgtatgtgcataaacatgtcatatatttaatgtaatttattttactactaaatatatatgccaactttctagtaataataactttaatttagataaaagagatataaacttatcacataaatttaaagtgatttatatttgcagtttattcaaatataaatttatatgaaaatataaaaggaaattattactaggcaaacatatatattctttcattcactatgatacaaaatactgtaatatttctggactgcatgttaaaagttttaatcattgacttctgttaccagaataagagattttaatgtagaagtccttaaaattttttgctaatatttaaa

SEQ ID NO: 388019 - DNA, 655 bp, Homo sapiens
attctacttcaaggattttgttaaccattgctatacttttcttaagttttatgtttataaactatgtacaagagtgaaatagagctctaggcttcagtcgatcaaacatcaattcaagctactctctaatgtagtgtagtaggtacagaataaacaccagttaagaaacattccaaccaggttcttgttccatatgttctatatgggatgtacaccttgattttctacctgccaatcatatctgttatttcaaaaactaaatttataattcattttttcaaggaaagttacatgtattsctctcttgccaaatatttgacatgcagtaaaaattgcatcttatacttgtttttattctttaatttttatatatctagcgtccaactaattttatgcattcaaaataactttcattttcttctcagtttttggtagtgcgtttagcatctaaaaacaattaggccgatgctgtagctcatgcctgtaatcctaaagctttgaaaggccaaggcaataggactgcttgaggccagaagttcaagaccaatctgggcaacatagctagaccatgtctctacatgaaattaaaaaactagccagaaatggtgatgcacagctgtagtcccagctacttgggaggctgagacaagaggat

SEQ ID NO: 388020 - DNA, 745 bp, Homo sapiens
tactacacagccatgaaaaggaatgaattaatggcatttgcagtgagctggaagaaattggagactattattctaaatgaagtaactcaggaatggaaaaccaaatattgtatgttctcattgatgtgtgggagctaagctatgaggatgcaaaggcatacaatggactttggggatttggagggaaaggtgagaggtggcgagggataaaagactacaaatacggtgcagtgtatattgcttgggtgataggtgcagggtgcaccaaaatctcacaaatcaccactaaagaatttagtcatgtaaccaaataccacctgtaccccaataacctacaaaaaagtaaaaaatatttttgaaaaattcttatgggttcagttgtgtctccaaagttttgtcrgacctcacgatgaaatcatatatataaaagttgggggagcactcatgtattagttaagatgaagtcttagtaggttagggtggtcccctagtcttaagtgactgctgtccttttaagaagagggcagacacaaaaagagaagactgccatgtgacaacaaaggcagagattggagcgatgcagctgcaagccaaggtataggattgacagccaccacaaggagccaagaaaagtcaagaaagaatcctcccctgcaggtttcagagggagcatgcccctgcaaacaccttgacttcaaacttctagcctccagaagcacaaaacaatatatttctgttgttttaa

SEQ ID NO: 388021 - DNA, 409 bp, Homo sapiens
agtcttctgagtccggacgggagctccccctgccgctgcagccacccaaatcgcaactgcagacccaggtcttttgttccacggagcagtcaggagccctacccaggagggcggggctacagctccctaaactgtagctatggatcgagcctccctgtgctcttgtagggagtgaggaatgggcaggatctgcccttccatgtgcagccgcagctgctggacacccggctgcagacctgggcttcccactccaggaagcaactaggagccgggacaagygtgggccctgcctcttccaagttggcagggcgtgagctcccgggtgcagctgtggctgccctcccaggcacaggactggggcatctctgcagcctgcaccctcgggggccccaggaagtatcccccaacc

SEQ ID NO: 388022 - DNA, 584 bp, Homo sapiens
aaacaacaaatatgctaattataatatttatgcactatctttggtaatattaaattatgaaaaatgaataatatgaaagtgaacaaagagcaaacttccytcttccaaaaaaagtgaacttcttaatgtaatctgctgtagtttgctttaattatataatcacagccattacttaaaagctaaaaaagactcagaaaaagaaacacccagtaggagttaaacactgtataaataaccttggaagtaatgaggcttattaaaacgagtaaattaaaaattgaagcccaatatgcgaaatggtaaatgtgattttagcagaacagcataaaattcttcatcacatgtcatcataaagctctccttttgggagagggggttatttacatcgatggtgcaatataattggaaggagtagacttccagccaatggtttgtctcccttctttaaagctcaacaacaatttgttgtcagcaccagcctgtcattaatattctgtcctttagtcaagttacctgtttatttgtctcctgccttttttacatcctctgacttggacaaaatcaaatgcacattgaaggcacaa

SEQ ID NO: 388023 - DNA, 584 bp, Homo sapiens
aaacaacaaatatgctaattataatatttatgcactatctttggtaatattaaattatgaaaaatgaataatatgaaagtgaacaaagagcaaacttccttcttccaaaaaaartgaacttcttaatgtaatctgctgtagtttgctttaattatataatcacagccattacttaaaagctaaaaaagactcagaaaaagaaacacccagtaggagttaaacactgtataaataaccttggaagtaatgaggcttattaaaacgagtaaattaaaaattgaagcccaatatgcgaaatggtaaatgtgattttagcagaacagcataaaattcttcatcacatgtcatcataaagctctccttttgggagagggggttatttacatcgatggtgcaatataattggaaggagtagacttccagccaatggtttgtctcccttctttaaagctcaacaacaatttgttgtcagcaccagcctgtcattaatattctgtcctttagtcaagttacctgtttatttgtctcctgccttttttacatcctctgacttggacaaaatcaaatgcacattgaaggcacaa

SEQ ID NO: 388024 - DNA, 584 bp, Homo sapiens
aaacaacaaatatgctaattataatatttatgcactatctttggtaatattaaattatgaaaaatgaataatatgaaagtgaacaaagagcaaacttccttcttccaaaaaaagtgaacttcttaatgtaatctgctgtagtttgctttaattatataatcacagccattacttaaaagctaaaaaagactcagaaaaagaaacacccagtaggagttaaacactgtataaataaccttggaagtaatgaggcttattaaaacgagtaaattaraaattgaagcccaatatgcgaaatggtaaatgtgattttagcagaacagcataaaattcttcatcacatgtcatcataaagctctccttttgggagagggggttatttacatcgatggtgcaatataattggaaggagtagacttccagccaatggtttgtctcccttctttaaagctcaacaacaatttgttgtcagcaccagcctgtcattaatattctgtcctttagtcaagttacctgtttatttgtctcctgccttttttacatcctctgacttggacaaaatcaaatgcacattgaaggcacaa

SEQ ID NO: 388025 - DNA, 615 bp, Homo sapiens
tgtgtgcatgtcagcaaacagcagatttggacaaagattaggcgatacaaacaagaaaaggtactaaatccttactctaaacatctgttccatcttctgcttgtttcctttcctttgtctgtttaatgttggtagctcttcccttctcacctatttatttccttactctcttcccttttacccttcacattctccatggttaatgtactcccaacttaccatttcagtattttcagtccacattttccttaggagcttcagatctactcagtctaactcaccttagacctttaattatgtgatctatcttttytttaatctgtaagaaaataaaactatactgaccttaccaagttgacacaagaagtaatggaaatgcctaggtcagcaccaggcatttagtacctactcaagaaacattagcacctttcccctttttctcttcaaggattatctgtggtcagttgcatactcattgagaggagctcctcctaagaccacagcagtaatgagtgtgcaaagcaaagattctaatcaaagtagttttgaaaatctagtccagcatcttagatcacccctatgggtgagccccaacctataacttgtaagaggaat

SEQ ID NO: 388026 - DNA, 621 bp, Homo sapiens
atatactgctgggtgctatttactaatagcttaggtaggtttcttttttgcatttaaattttcaaatgacatagaatcatcactgtctttttctttaaaaagttttagaatgtgacttaaacttttaatgttaaaattatgattctctaaaaaatgattaatgttctctatatttttctatggttggaatcatttaaagaacactggaatatcagcgctacaagcgtctggtaatattcaactaaacatccatctgttctggtgcttttttgataactgatctttaaacagctctagtatttaaatggaatactacagttttctactttctcttgaaaatattttagtaatttatttttttctaggaactgattcccttcctttagatgttcatgcttcatcastgcagagccacacctaatattctactatacttcttttaacctttcttgtttcgggatttacttctgctttctcatttacaattttatatattctttctttatatattttccataatttgtgcctcaaggggtttatgttggccatttcaaagaatcaccaaattttgagtttatttagccatttttacatttgcattctattctagtgattccagtt

SEQ ID NO: 388027 - DNA, 622 bp, Homo sapiens
tgagccctaaacaggtgatagagatattctgcaaattgctactgtcagccctgtcttgtactaaatattattgtctaataggacagatctcatatttttaaaaaaagtttcgttacttaggaactttttatcctccatatttctgaataattttattggccctcaaaattgtatctgamaattttatttaggttgcattaaatttataaattagttggcagataattgacatttgtgccattccagagctgaaaatatgtctccattttttcagattatcttttcatcctttattaggattttaaagtttttcccacagaaatcttgtgtaatgttatctcggtgaagctacttatgcctaacagatgctttacagatttctcttcataatgtgaacatctttttaatcacatattttgttattgtttatagctatcataaagaaatgttactaatttttgtaagttgatactgtatgtaaaaattttcttgaacttttaaattagttgtattactttatttgttgattctctgaaattatcagatttttttcatttcctttccaaatcttacacttcgatttacttcccttttcccgtaagaccattgacctaaaactcta

SEQ ID NO: 388028 - DNA, 571 bp, Homo sapiens
tgcttgtgacagttttgtggtcatattggtcacttcatgtactgacatagatacagaaaggtgaggatggtagtgcttactactgactattgagtagaatgaatatattattctggaaaatggcagaataactggaaggaacttgagaggttagaattttcacagagaagatggagagcagaaccagataaatacgttatattgctgtttctttattgtaactttatcagttagcttgtgccatataattggtatctcctattaaagatttgtatgaaaatgtaaaaatatttgtcagaattctctgctcaaagtaagatacaaaactgtcttcaagtaatttaacacattttcaatatttcttctttttatagaacagttgttctgttgatcatttctttttcaaatattttatagttggatagaagaaacatatgtagaaacttctgaaaaaatcatcattaaggaataatatagagaaatcattaaaatattataatattcaacacttagacataaaattattaacatttaagaatgataggctggcrggggcggttccaagatggcc

SEQ ID NO: 388029 - DNA, 616 bp, Homo sapiens
caccgtgctaaagaccacaaagaaaaaaggctctgtgtccatgctcaaatgagaactgaggggaaaaaagttagtggagagtaggtgaaggtagaaaaatcacaaatcaagagtaaatgargtggagtaactcagcccaactgcttctctctatgtagtgattttcctactaggggtaaaacagtgaagcctttacatgtttattttaatgaagaaggcaattccttataagaagatgcttttcatcaaggatattatatgggtcatttcatttaataaaattataaactgcaaatcctctgctataggtataaatgtgggagaatttacatcttacttgctggagattatcagatgtgtaggccattcttgtcaatggccacaacatcctcctggctaaaaacatgaaatagtggtgtattctcatctctgaatatgcatagtttacctaatattaagaaacccaactaaataaaaagatttgcaatatgagcctagtatatgaaagaaatgtattagaataagaaggtatatttgaagtaaaaacaaactccaaaaaagtagttaattgatgataaaaatatagcttaatctcagactaaactgtgttcatctt

SEQ ID NO: 388030 - DNA, 607 bp, Homo sapiens
aaactagttgtggtagaatccgaaacctatttaagcctcagatagtttgtatgctcatgtctctttttatcgtaccttagtattttgtaaaacctttgaaaactcctttctcttcaccgtgctaaagaccacaaagaaaaaaggctctgtgtccatgctcaaatgagaactgaggggaaaaaagttagtggagagtaggtgaaggtagaaaaatcacaaatcaagagtaaatgagrtggagtaactcagcccaactgcttctctctatgtagtgattttcctactaggggtaaaacagtgaagcctttacatgtttattttaatgaagaaggcaattccttataagaagatgcttttcatcaaggatattatatgggtcatttcatttaataaaattataaactgcaaatcctctgctataggtataaatgtgggagaatttacatcttacttgctggagattatcagatgtgtaggccattcttgtcaatggccacaacatcctcctggctaaaaacatgaaatagtggtgtattctcatctctgaatatgcatagtttacctaatattaagaaacccaactaaataaaaagatttgcaatatgag

SEQ ID NO: 388031 - DNA, 607 bp, Homo sapiens
aaactagttgtggtagaatccgaaacctatttaagcctcagatagtttgtatgctcatgtctctttttatcgtaccttagtattttgtaaaacctttgaaaactcctttctcttcaccgtgctaaagaccacaaagaaaaaaggctctgtgtccatgctcaaatgagaactgaggggaaaaaagttagtggagagtaggtgaaggtagaaaaatcacaaatcaagagtaaatgaggtggagtaactcagcccaactgcttctctctatgtagtgattttcctactaggggtaaaacagtgaagcctttacatgtttattttaatgaagaaggcaattccttataagaagatgcttttcatcaaggatattatrtgggtcatttcatttaataaaattataaactgcaaatcctctgctataggtataaatgtgggagaatttacatcttacttgctggagattatcagatgtgtaggccattcttgtcaatggccacaacatcctcctggctaaaaacatgaaatagtggtgtattctcatctctgaatatgcatagtttacctaatattaagaaacccaactaaataaaaagatttgcaatatgag

SEQ ID NO: 388032 - DNA, 545 bp, Homo sapiens
tagtaacagtaaattcatcacaaaaaagaaaataattgtgatttttaaagttggtaagcattggctagaggatttaactttttttactctttttttttttatttttttttttgagacagagtcctgctctgtcacccaagctggagtgcagtggtgtgatctyggctcactgcaacctccgactaccttcaagccattctcctgcctcagtctcccgagtagctgggattataggtttctaccaccatgcgtggctatttttttatttttttattttttatttttagtagagatggggtttcgccatgttgggcaggctggtctcgaactcctgacctcgggtgatccgcccatctcgctgaagtgctgggattacggggtgaaccaccacgcctggctggatttaactttaaatagggttagattaacatgtggaaaaaaataaaataaaataaaataaaataaaataaaataaaataaaacctgttcttaaaagaggcttggaagatatctctgcaaaagagcaatcattccataagaactag

SEQ ID NO: 388033 - DNA, 545 bp, Homo sapiens
tagtaacagtaaattcatcacaaaaaagaaaataattgtgatttttaaagttggtaagcattggctagaggatttaactttttttactctttttttttttatttttttttttgagacagagtcctgctctgtcacccaagctggagtgcagtggtgtgatcttggctcactgcaacctccgactaccttcaagccattctcctgcctcagtctcccgagtagctgggattataggtttctaccaccatgcgtggctatttttttatttttttattttttatttttagtagagatggggtttcgccatgttgggcaggctggtctcgaactcctgacctcgggtgatccgcccatctcgctgaagtgctgggattacggggtgaaccaccacgcctggctggatttaactttaaatagggttagattaacatgtggaaaaaaataaaataaaataaaataaaataaaataaaataaaataaaacctgttcttaaaagaggcttggaagatatctctgcaaaagarcaatcattccataagaactag

SEQ ID NO: 388034 - DNA, 498 bp, Homo sapiens
ccggctcactgcaacttccacctcccaggctcaagtgatcgtcccacttcagcctcccaagtagctgggactacaggcaccagccaccacactcaggcaatagagacagggttttgccatgttgcccaagctggtctcaaactcctgagctcagatcatccacctaccmtggcctctcaaagtgctgagattacaggtgtgagccaccatgcctggccagaagtcctagtttccagtaccacattttcaccatttaattcaataagtgatcttggacatttaaagaggctcaaaatcatcagctgtaatatggaaattcaatgagaattatcttcaagcttgttctgagctttagcatctatagtttatttggatgtgtatgtatggatttactcaacataaatctcattaatcatttttgtatccctagcacctagaacactgcctggtctctagtggtattacatttttggttttttgttttgttttgttttgttt

SEQ ID NO: 388035 - DNA, 619 bp, Homo sapiens
gagtgattcaaatgcctgaaaatttacaaatcattcttcaaaattatttttaaaataaaagcaattaggctgcatcacaaaacagttcatgtggttctaagagcagcacaaaaatgtaaggactatgagcttcgataagacaagaattacaaattgtttatagaatactataaaacagaggttagcttgaatttgtgagaggcaattcagtgacatagcaaggctggaattcaagttatggaagggtaaagagaaaatgcaagcaaataattatggacaatcagctacattgctctttcaataagcttatcttttttttaagagaatgagacataaaaagagggaagatcattwgtaaaataagatgtcactctattttagatatgcctaagatgccaagaacaccctccttggttgcaacttggggagggagtttttttgctcttcatatacaactttcatttttttcttgaggcctgtatttacacatatgccaactgtgttaggtgcaataattgtgagttttggtaactatcttctgtatcacttctgaatgtagccacagtattttatagaatttataaaatttacattggaactatatgttaatgcacttatt

SEQ ID NO: 388036 - DNA, 379 bp, Homo sapiens
tcccagtctctatgggaaggtaagagcccaacttcagtaagtgtcaattagtaaacacagatggcctagtcacactgaccacctccccactaatgtcctccagtacttttccaccagttcaccccactataaaactctaccaacttttgtttcagcagagatgctttcaatctctcttccctaaagtgatgtcttaaataaatcctttcttgcctgttcaacttgtcgagtgcaatttttctctgatagaaccccctacatcttcaaactcttgagctttttttttttttttttttttttttacagagtctcattctgtcactcaggctaragtgcaggggcgtgacctcagctcactaaaacctttgccttccaggtt

SEQ ID NO: 388037 - DNA, 570 bp, Homo sapiens
gattacttattgtagatctataataaaaatagacagtggtagtgacatgaatattaaaaaatagattagtgaaacagaatagagtgcaaataaacaaatacacactttcaggtcacttaatttaatttcaacaaaagcgccaatgcaacatgatgagacgaagaatatttttgaacaataatattggaaaaacagaaaatctgtatagaaagaaatgaattttgactactttcatgaacacataaacacaatcacacacatgcaaacatacacacattaattagacttgaattataaatttaaatggaaaatttatacttgtaaatttgtattaaaaagaggaaatatctttatgacttagacatagagaaagctttcttatacagaatatgtaagtttaaagctagtaatagtttgaggctaattttgccccattcttgaggcaatgcatttctgagtatattacttgataccctatgaattatgaaaattgctatcttctgtaccaggtcctggtaattttctgcaggcagtaagctggaaaaacmgcaaggtttacttcacttattc

SEQ ID NO: 388038 - DNA, 609 bp, Homo sapiens
gtaagttacagagaaaggaacaatcatatctgtctagaggaagtcattcttgtagctaagtggttgaagcagaagatagagccgtatgaatgagtacacacacacaaacacatacacaatctcacacacacacacaatgtggtatggagagaatgtgggaaataggagttgaagtggtgaaagtcaaggctgatagacaagagtagactttggcaggtcttatacaatgtcacactatttgtgcccttttcctctgttggtaaaaaaggaaaaatatttataatatattggaatttataagtttgcacatatgctgattttaaactgtaacaaacatattgaaaggcagtttggtaacgtattcaaattgagaagatttataacttttaaccaaataatttcacaataattttacatataggtaaatatgaattasaaactaatgagccaaaaaatcaatatacatacatgctaactgcagcactttttgtaatagtcatgtcagaaacaattatctatcagtaagtgaatgaaaaatacaaaatacggtttgttctataatatggattgctatgtattgcaacaaaataaactgaaaggagattatca

SEQ ID NO: 388039 - DNA, 647 bp, Homo sapiens
ttattttttcccatatgttatcttttctttagttggcccatagcgttcatctagctggaggggaaattagaaatgttaaagaatgttaaagaaaggctaaacaatatccagcttctaacattcaaaaatggaactgttgaaaatatgtaaattttttttctctctgccttcagtagatcaatgtccaaggctagaagaaccagctcaaagagttccstcattttacagagaagataatccttttgcctatggcagaaaagccctgaggtttgttgctgtagggcagattatgtaaaatgagcgtagttaaagataagttggctattcctaaaaccaaggtgaggttgggaagaagagagaagacagaatgcaaaaccgtggagagaaggtggcataaaactgacagatgggtttatggggagccatagtcatgtgttataagccagtgagcaccactgagctctgaaaaagcttagagagggccaagaatttgggttataccacataaggaggtcccactattaggctgttaacacttagtataaaaggcttataaagttttcattgaaccatttaattcagcttccaagtttgcattaactttttcactttacaaattcttcaagcctccttaaattactgatgac

SEQ ID NO: 388040 - DNA, 647 bp, Homo sapiens
ttattttttcccatatgttatcttttctttagttggcccatagcgttcatctagctggaggggaaattagaaatgttaaagaatgttaaagaaaggctaaacaatatccagcttctaacattcaaaaatggaactgttgaaaatatgtaaattttttttctctctgccttcagtagatcaatgtccaaggctagaagaaccagctcaaagagttccgtcattttacagagaagataatccttttgcctatggcagaaaagccctgaggtttgttgctgtagggcagattatgtaaaatgagcgtagttaaagataagttggctattcctaaaaccaaggtgaggttgggaagaagagagaagacagaatgcaaaaccgtggagagaaggtggcataaaactgacagatgggtttatggggagccatagtcatgtgttataagccagtgagcaccactgagctctgaaaaagcttagagagggccaagaatttgggttataccacataaggaggtcccamtattaggctgttaacacttagtataaaaggcttataaagttttcattgaaccatttaattcagcttccaagtttgcattaactttttcactttacaaattcttcaagcctccttaaattactgatgac

SEQ ID NO: 388041 - DNA, 559 bp, Homo sapiens
gagtaatttataaacaatatagctccaaaatagcagtggatacatatatgactatttatatatttayttagcagtccttttattcatcctctcatttattcattcattcattcgttcattcattcattcattctagctgttggagattcagagatgacaagtcgaccattctcagagttacacgttcagagaaaggtggactaaaacaagtaaataactagggtaatttcagatagcaacaagtgttaatgaaggcaataaatgaaagtgtaaatgaagaataaaatgtggaggaggagagactctttcgtaaggaatggtcagtcatgttatatctaagaaaagatatttgagcagaggttgcaatgtcaccaatgtacagattttaggtaagagaaatccacatacagggattagagggataagttatggcaaagacacaaaggcagatgtgagatggattcaggaacctctcagaaagaagaccagcatagctgaagcagagcaaagaaaagcactcatagcatgggaatgaagtcagagaggtaagcaggagtga

SEQ ID NO: 388042 - DNA, 506 bp, Homo sapiens
gtgtcttttagcatgctaatacattataattagcatataatgagcagcgaggatgaccagaggtcaccttcctcaccgtcttggttttgatgggttttggccagcttctttactgcagcttgttttattagcaagctttcttgatgagactttctgtctcatcctgtaacttagaatgcctgacctcctggaaatgcagctcagtaggtctcagccttattttacccagctcctaaacaagatggagttgctgttgttcaaaggcctctgacacaggtgtctctatcggycatcttgctgccatccctcctctccttacttctttgtaccttcactagctcatccggaaaatgaaatactgaggttcatttgatcctagatctaaatctagatcatagattagacccttctcaactctgaagatctagaattccatgatatatgtcattttgtatatttctgtttttcccatttttaaagtaatcatattaatggcaatttacata

SEQ ID NO: 388043 - DNA, 538 bp, Homo sapiens
caaacattcaaaccatagcagggaagggaaaatgtttaaacagacattttataccaagacttaaacagatttcatcatgcaaagaaataaagaagaaatcacatgtgaagtggtatattttagtaataactccagggtgttayctcctttgcaaataataggatcccataagtaatttacatttatctcttacagaaaatgcatcagaaacatggattggtttgagcagcaataaaattccagtttcctttgaatggtctaatgactcttcagtcatctttactaattggcacacacttgagccccacatttttccaaatagaagccagctgtgtgtctcagcagagcagtctgtaagttgattcatttgttcagtgctcactttgctggtcttgtactgaaggccacctgtgttggagctttgggctgtggcagagaccaagacaggtgcagtccctgttcctcatgggccttccatgttagagagcaaacaagtacacacagaaaaaacatggtaattatagttgtaatgattgct

SEQ ID NO: 388044 - DNA, 588 bp, Homo sapiens
actcatgggtcacatcatagacaattccaccagggctgagggagctggggtatttatacttctatacttgtcaatcattggctaatgctgaacctggggggacatgcattcccaggcatggtctgctgtctctgcatgcagaaaaagctgcctcacgcagtctgagggcagccctctgacaaacagttgcaggtgctgactgttgggagtaaaaacacaccggaagggaagtacacaaagagcacagccatcagagggaatctgcatggagccttgtcattgggttctataggcccagtatgagaggttgctcagcagggactaccgtgattattggaactaaccaaatcctctctcttagggattctgggtatgagatacacagttagcaaaaattaataaagcagcagcatctaggagcacgaagaagctgaaggagttaaaaagaatagaagcaraagtgtactgttgtgtgtgtgtgggtgtgccctggtttcacttagctgcactctttcattccccttgggcaatggtctttcattactctatcactgccttttgtaatgacagaatgccttaaatataaag

SEQ ID NO: 388045 - DNA, 606 bp, Homo sapiens
tctttgggtaggcaaggcaagtttcctgcaatgctgtgtatctgccaggcactgtgctaggcaatttatatggtcttttccctatttaactccagaaactcttcgagacaggcattagtgcctgattatgcagttggaaaaattagggcasagaggcttagtaacttgccaaaggccacaaacgtagtgggcttgctccaggatttgaaaccagatttatttgggtctactgtgagacaggcactgtgctaggcaatttatatggtcttttccctatttaacttcagaaactctttgagacaggcattagtgcctgattgtgcagatggaaaaattagggcacagaggcttagtaacttgccaaaggccacaaacgtagtaggcttgctccaggatttgaaaccagatgtatttgggtctgtgagacagtatcaaggtacagagtgagtgggtgggcattcaataagcagttgaataactgaatgaatgagttcccctaaaattatgctcctgtcccatggagctctcttgcatccctctgatcctgtttctctcctgtgtgtggccacagcatttccttgaagatctactgtcacattttcactt

SEQ ID NO: 388046 - DNA, 606 bp, Homo sapiens
tctttgggtaggcaaggcaagtttcctgcaatgctgtgtatctgccaggcactgtgctaggcaatttatatggtcttttccctatttaactccagaaactcttcgagacaggcattagtgcctgattatgcagttggaaaaattagggcacagaggcttagtaacttgccaaaggccacaaacgtagtgggcttgctccaggatttgaaaccagatttatttgggtctactgtgagacaggcactgtgctaggcaatttatatggtcttttccctattyaacttcagaaactctttgagacaggcattagtgcctgattgtgcagatggaaaaattagggcacagaggcttagtaacttgccaaaggccacaaacgtagtaggcttgctccaggatttgaaaccagatgtatttgggtctgtgagacagtatcaaggtacagagtgagtgggtgggcattcaataagcagttgaataactgaatgaatgagttcccctaaaattatgctcctgtcccatggagctctcttgcatccctctgatcctgtttctctcctgtgtgtggccacagcatttccttgaagatctactgtcacattttcactt

SEQ ID NO: 388047 - DNA, 591 bp, Homo sapiens
aaataatcattttgaaagctagtaaagggaaagaactaagcatttgttctgtgtttcctataaaaattgtaccacggggtaacaaaaattgattaaaaggaattagctttttataggactatcccagmtataagtgaagaaacccctaatgagtcaatggatctaagaattgaccatcaaaggctgctaatgtcacaaaaagagaaaaaaaaatgggacattatgtgcctctagacagagcacacaactacctatgaagtgatctttcaaaaaaaaaaataaaatctgaatttgatcaatcctttcattctttttaaaaataaaaatgcgtattttatgaaaaagaaaatagagtaacacattaaacaatgtgatgtgaatacaatcaacaaagcccagactgtaggaaaatttataagacaaaacacatttgcattaacaaataaaggcaggggtggaaattggggaggggcaggaaacacagagatgaaaacagactttaggagatctatcaaccaattacaatgtgtgaaccttctttggatcttgattcaaactaactgtaaaatacattatgtaatatttatgagc

SEQ ID NO: 388048 - DNA, 425 bp, Homo sapiens
ctagtaaagggaaagaactaagcatttgttctgtgtttcctataaaaattgtaccacggggtaacaaaaattgattaaaaggaattagctttttataggactatcccagatataagtgaagaaacccctaatgagtcaatggatctaagaattgaccatcaaaggctgctaatgtcacaaaaagagaaaaaaaaatgggacattatgtgcctctagacagagcacacaactacctatgaagtgatctttcaaaaaaaaaaataaaatctgaatttgatcaatcctttcattctttttaaaaataaaaatgygtattttatgaaaaagaaaatagagtaacacattaaacaatgtgatgtgaatacaatcaacaaagcccagactgtaggaaaatttataagacaaaacacatttgcattaacaaa

SEQ ID NO: 388049 - DNA, 641 bp, Homo sapiens
aattttgttagatgaacttgtaaactgataatgcctcagtaagatgtacacttttaggccaacatgctcatagttatgcacagcgacatcaacatagagatatttgttgtaacacttttgtagcagaaatgaaaatgaatttcacccaatgtccttcaacagggtcatggcaaagcaaattatgagtcctacatactatgaaattctatgtagctgtttcaaatgtcgactaataaatattgatgtggaaagttctctaagacagattgctaagtgaaaaaaatcaaataacagaaacatgcaatccttatatccatttaaaaagtacatatgcataaatgtatttaaatgcaatgcatagacaaacaccagcaggatcataccaaacagttaacagtggttgtttctgaaaagggaaatgtattgatgttgggaaggtgaagagaaagatgtaacggagtacttccacattttacttagcacacttctctataattagagcatctacataatttaccatccaagccagaaaaatttggagtaaaaatacctgctgttaattgctctgggacaccagacataaattagaacygttctgggcaaatgaggtatatggtcacattatctatagtaagaatata

SEQ ID NO: 388050 - DNA, 481 bp, Homo sapiens
ggagtacttccacattttacttagcacacttctctataattagagcatctacataatttaccatccaagccagaaaaatttggagtaaaaatacctgctgttaattgctctgggacaccagacataaattagaaccrttctgggcaaatgaggtatatggtcacattatctatagtaagaatatattcatgatttcatcgttgaattttaaaaatcggtggagctttgccaaccactgtctagagttgggattagcaaaccaccttggactggacttttgtaattatgagaaacaaggcttgtgtggccacttttatattttagtgtgaggccacactaaaggggagatatacctccccctgtggcttagcaaacactttccttaccttggtatatagagctctgaggatggaatagaccaatttgtataaagagctccgggccttcagggagggaagagcctggggcccctaagccattt

SEQ ID NO: 388051 - DNA, 647 bp, Homo sapiens
tctaggttagcgtggaaacctacacttgaaaaagcatcctttcctaccttattttgaaatgatatctgatatagtttggatgtctgttccctccaactctcatgttgaaatgtaattcccagtgttgaaggtgaggcctggtgggaggtgattggatcatggggcagatccctcttgaaggcttaggaccatcccctaggtgatcaatgagttctcagttcatgcgagatctgattgtttaaaagtctggaacctcctctcacctcaccctcttgtgcttgctcttgccatgtgacatgctggttccctgttatcttctgccatgattgtaagctccctgaggccctcaccagtagcaggtgccggcaccatgcttcttgtacagcctgcagaactgtaagtcaaaataaacctattttcttcatcagttacccagtctcaggtattcctttatagaaatgcaagactggtctaatacaatatctttccccatcattctttaatttccaaatttttcagttctccaccccttccccaccatcatacaccccttaaaagcagagagactaagtcttactcctctttgaacaycacaccagagaaggcccctagtaaacatttattaagcaaaataaaagacaacagac

SEQ ID NO: 388052 - DNA, 568 bp, Homo sapiens
gcctcagtgtgtgttgtttccctccctgtgtccatgtgctctcattgttcatctcccacttgtaagtgttatcrcttgtttttaagaacttattttatttatttgttgttttttgtttgtttgttttgagacacaatctcgctctgtcccccaggctggagtgcagtggcatgatcttggctcactgcagcctccacctcctgggttcaagtgattcttgtgcctcagcttcccgagtagctgggaatacaggcacgcaccaccacgcccagctaatttttgtatccttagtagagacctcaagtgattcgcctgccttagcctcccaaagtgctgggattacaggtgtgagccaccacgccccaccattaagggcttattttaaatgcaattataatgttttctttggaactgatggaactcccttcttttcattagctaggcaaattcccatgattccagaacaaatatatacagtttcaaagaacagatatttaggcaaataatttctctctatctctagcatcttacccagtgtctatgaagtagctggcatccaatgaaagct

SEQ ID NO: 388053 - DNA, 576 bp, Homo sapiens
acatgcaagatcctaattgattgtttgtttgtttttttttataactgacgtggaaaataagagttagcaccattgtttttaacaggtatacaggtgagaggagctggaaaattcattgctgacatggagaaatacatgtgtatcggggaaagggggcagatataagaaggatcattttggtttgtttgaaaatcacatatcaaagtgttgaggaaacagaagttatccacatcgtattgcccaagtccttattgccataaatgtattggacaacatggggcaccacaggagtaatatgcctcagaccagatwggaaatggaacgtaccgtgacatacaaccaactgttattcttaacaaaatataggatctaaccaaattgtccatactggggtctggaacagatttttcctgggagcgaaaaaagaacacgaccccaaatccacttctcgtgtttttattttttatttttttatttttgttcgcaccgccccccccccagcccccagagtaaaagaaaactgttttctaggtaaatggtctttccttagcagtacttgcatggcttggcatttgg

SEQ ID NO: 388054 - DNA, 419 bp, Homo sapiens
tcactgtattcaacaaaaataatgatgaatgaagcccaatccctgtgtttgaggaggctaaatgggtactgtaaacattgtagaatattgtaagtgaataccacattgttactgccctgctatcttgccctgtggtttaataatagagcatgcctcaccttagggcctcacgaccccaagtatgtccagggacctgtggcatcactcaggaacttgttagaaatgtattagtagactctcagaccttaaccgagacttataaatcagaatctgcattttaacagatgctcaagtgattcatatgcattktaaaggttagaagctctttacaaggtgacaaggaagaggacgttttggaggagatggcacctgagttgggatttgggttgaactgagagaaagacaccccaggtaaagaa

SEQ ID NO: 388055 - DNA, 419 bp, Homo sapiens
tcactgtattcaacaaaaataatgatgaatgaagcccaatccctgtgtttgaggaggctaaatgggtactgtaaacattgtagaatattgtaagtgaataccacattgttactgccctgctatcttgccctgtggtttaataatagagcatgcctcaccttagggcctcacgaccccaagtatgtccagggacctgtggcatcactcaggaacttgttagaaatgtattagtagactctcagaccttaaccgagacttataaatcagaatctgcattttaacagatgctcaagtgattcatatgcattttaaaggttagaagctctttacaaggtgacaaggaagaggacgttttggaggagatggcacctgakttgggatttgggttgaactgagagaaagacaccccaggtaaagaa

SEQ ID NO: 388056 - DNA, 412 bp, Homo sapiens
ctaatggctgatgtatttggcgactggaaggtattatgaagttaaatctccattaaagtttctttctcatccatccacaaatatgaatgttactgtgacagctcaccatagtaagtaaacaagtagataaatgcataagcaaaccatgtatcagcacttcctctgagcccagcactcrgtctcacacctctactgacaggagacagtgaggacctgagggctcactctgctgtagtgagtatctgccccaagagggtttcagtccataaaaaatgctttcgatatatagcagtttccaaagataaagctgacatcatacttatctgactttgtacatttctttctcctagatttgcatacaatcaaagggaacacccacgggatgccgtgtatgtttcccttccagtataac

SEQ ID NO: 388057 - DNA, 592 bp, Homo sapiens
cttcatcattacaaaatggctcactttctaaaaagattttacagtgaatttctttaataccaagccagccatgtaccaagggggtaggggcggtaggagagtccatcccatgtgtgggcaatagtgtattgtctgaaaatmatttaaaactaacaatacagctaactaaaagttggtctgctttttattatcaccatctgcttgaaattctaaacaatgttggtgattaaaatactcctcctcgaaagggtaggctcacccccaaccttggtacaccactgtaacaagctctccataccaattaaaataattttcttcacaagtacctttcaataaccatcaattacataaagaaaagaataccatgcttccattttattacaaactctggtttttatgagtagcaaataagaatcctaacagcacagttcatcatggaaacatttccataactctattgtgcttttataacatttagaaacctgggatattttccagtaaatatggttttggtatgcaatgactaagtctgtgaacacaaagttccagccaagcatcttcctgctaagggtaaagataaacatgttattgt

SEQ ID NO: 388058 - DNA, 583 bp, Homo sapiens
tccaacactttctaaagaaaagaaaatagaggtaaatgtaacctcagccagggcaccctttctggtgaagtgctctgcggcccacagcagagttagtagaccctcacctgatcaagccaggctctttcagcgcctcatcacaccacagtaagtgaagcttcacrtggttgatcactgaacgctatccccagtttgcaaaagcagaaacagaggctactagaggttggatagctagcccacaggcaaacagtgggttagcagggagccagcattcatatccagacctgacagcacccatgctctgaattcctacactcggatattgtattctaaacaacgtttcttttaaaaacagttttagaaattagccacctgacgctgactacccagtttttaactctcttttccccaacttcctctccaacccagagatctataccagagatgggaactcttatgggagaccttgtgaatttccattcttaattgatgggacctggcatcatgattgcattcttgatgaaaatcatagggggccatggggtgccaccaccttaaattatgaatatgaccgaaagtgggg

SEQ ID NO: 388059 - DNA, 497 bp, Homo sapiens
gtgttaatgcatgcatatgcttcctagagttactttttatggaagaagcaagagaaagtttctcaaacctgagggctgctaaatcatggaggtcatgttgtatagcaaacacactgccatcccactcctggaagcttctggatttacaagtgtagggcctcagtggtaataatgaacctttagacaatgtgctttcaaatccaccctattttgtttttatcaaatgtcagaatctctgttgctatttatgctatagaaaaatggctgaagcagcaggatgtgccatcagaggatcaacaagaccagtgccctcattatagctctgtcacagtcacctctaggtctttgttcctgtctgtkaaataaggacattagacaagatgatctctaaaggcccttccagcttataggatcatgagtataacatctgatatgtaactggctataggaggccttttggaaagtcccccagttggagcctgggatgcacttgacac

SEQ ID NO: 388060 - DNA, 594 bp, Homo sapiens
cagcctgggcaaagtgagaccacgtctctacaaaaaaaaaaatttttttttaattggctgttggcatgtgcctgtagtcccagctgctctggagactgaggtagaaggattgcttgagcctgggagattgaagctgcagagagctatgatggcatcactgcactccagcytgagtgatagaggaagaccttgtcttaaaaaataaataaataaaaggtattgcagtttcaatattgtcttctcaaccatgaaaatgatatgcttttctatttatttaggacttcttttatgtactcagtaaaattctataactctttccatagtcttgtatatctttcaaaagaaactatataaacaaattttaatattatatttaaaaatcaaggaacctaagttactgagtccctgatgagttattctttgaatgaaagacaaataattgtaatatatgataatgatgatgtgccagacagactactaaatgctttttatacattatctcctttcatcccatctaactaccttatgaggtggacgttattgttatcctcattttgcagatgaggaatgcgaggctcagagaggaaacataac

SEQ ID NO: 388061 - DNA, 594 bp, Homo sapiens
cagcctgggcaaagtgagaccacgtctctacaaaaaaaaaaatttttttttaattggctgttggcatgtgcctgtagtcccagctgctctggagactgaggtagaaggattgcttgagcctgggagattgaagctgcagagagctatgatggcatcactgcactccagcctgagtgatagaggaagaccttgtcttaaaaaataaataaataaaaggtattgcagtttcaatattgtcttctcaaccatgaaaatgatatgcttttctatttatttaggacttcttttatgtactcagtaaaattctataactctttccatagtcttgtatatctttcaaaagaaactatataaacaaattttaatattatatttaaaaatcaaggaacytaagttactgagtccctgatgagttattctttgaatgaaagacaaataattgtaatatatgataatgatgatgtgccagacagactactaaatgctttttatacattatctcctttcatcccatctaactaccttatgaggtggacgttattgttatcctcattttgcagatgaggaatgcgaggctcagagaggaaacataac

SEQ ID NO: 388062 - DNA, 624 bp, Homo sapiens
ctcctgccatatatgaaacaaagagcattgtgtggcattgtcttccggaacatttttactcctagagaatggcaagctaagtaattataaaggcttattgtcatagacacaaaaagaggctgtttgacttgggcttgctagattgtttcctctgttttctctctggcctgtgacatcagaagttcagtccatgggggcatatgtgcattctagtgcctagaactgaaggaaacagaattggttatgccagaaccccaggcttgttaggatgggaaggaagctcagcaaactcagttctatcctgccccttcatcatgcagccgagcacactgagccctctgctgtcaagacaggtgcccagrgttgtgcatgccctgatttgtgcatccctttctccacagtttccagccagagacgacactcttccatggcccggatacattccatgacaattgaggcgcccatcaccaaggtgaagcagtttgtggtctgtctccattgagcacacatactccttgttctccccaaggatcatttccaatgagaagaaacagggacccgcagtaatgagcatgctgtcatagttgtgtggtgctagtagcctcctctgaagagagaggatgt

SEQ ID NO: 388063 - DNA, 536 bp, Homo sapiens
tactttgggagaccaaggtgagtggatcacctgaggtcaggagttcgagacaagcctggccaacatgatgaaaccccatctctagtaaaaacacaaacattagccgggcatggtggcaggcccctgtaatcccaactactcgggaggctgaggcaagagratcacttgaacctgggaggtggaggttttagtgagccaagatcatgccattgccctccagcctgggtgacaaggtgagactttgtctcaaaaaaaaaaaaaaagtttccatacaatataatttgttccatctctaaaaaccaattcagcaataactgaaagccaccacttggaaggtttcaaggatttagctctacctgttgatgatgtccaaagcattagttaaggtagaaaaaaaatatacacacacacacacacacacacacacacacacacacacacacacacactcacccctatgtagtcagtaccaggaaacacgaaagactagatggtacagtcatccaacacaaagcacacaataactgaaggcactg

SEQ ID NO: 388064 - DNA, 536 bp, Homo sapiens
tactttgggagaccaaggtgagtggatcacctgaggtcaggagttcgagacaagcctggccaacatgatgaaaccccatctctagtaaaaacacaaacattagccgggcatggtggcaggcccctgtaatcccaactactcgggaggctgaggcaagagaatcacttgaacctgggaggtggaggttttagtgagccaagatcatgccattgccctccagcctgggtgacaagstgagactttgtctcaaaaaaaaaaaaaaagtttccatacaatataatttgttccatctctaaaaaccaattcagcaataactgaaagccaccacttggaaggtttcaaggatttagctctacctgttgatgatgtccaaagcattagttaaggtagaaaaaaaatatacacacacacacacacacacacacacacacacacacacacacacacactcacccctatgtagtcagtaccaggaaacacgaaagactagatggtacagtcatccaacacaaagcacacaataactgaaggcactg

SEQ ID NO: 388065 - DNA, 536 bp, Homo sapiens
tactttgggagaccaaggtgagtggatcacctgaggtcaggagttcgagacaagcctggccaacatgatgaaaccccatctctagtaaaaacacaaacattagccgggcatggtggcaggcccctgtaatcccaactactcgggaggctgaggcaagagaatcacttgaacctgggaggtggaggttttagtgagccaagatcatgccattgccctccagcctgggtgacaaggtgagactttgtctcaaaaaaaaaaaaaaagtttccatacaatataatttgttccatctctaaaaaccaattcagcaataactgaaagccaccacttggaaggtttcaaggatttagctctacctgttgatgatgtccaaagcattagttaaggtagaaaaaaaatayacacacacacacacacacacacacacacacacacacacacacacacactcacccctatgtagtcagtaccaggaaacacgaaagactagatggtacagtcatccaacacaaagcacacaataactgaaggcactg

SEQ ID NO: 388066 - DNA, 472 bp, Homo sapiens
ggggagtttatgaagtattaacttacayaatcacaaggtcccacaataggctgtctgcaagtttgaggagcaaggagagccaatccgagtctcaaaactgaagaacctggagtccgatgttagagggcaggaagtgtccagcatgggagaaagatgtaggctgggaagctaggccaatcttaccttttcatgtttttctgcctgctttatattcgctagcagctgattagaaagatggtacccaccagtattaaaggtgggtctgccttccccagcccactgactcaaatgtttatctccttttacaatgccctcacagacacttccagtaggtcaatactttgcagccttcaccccaatcaagttgacactcagtattaactgtcacaccacccttgcactaaaggtatacatacacccactagggcatggtcaacgtcagagatctgggccagacaggaactgaagtaga

SEQ ID NO: 388067 - DNA, 409 bp, Homo sapiens
cctctccaggaacccaccctcccagtaccttgatgtgtttatcagtccagaagctcttccaaccctgttttttaagagttttatggaggactccttacctaggcgtgattgattaaataattggccactggtaattaactcaaactccagctcttctcccagtcctggasgtcaggggtagggctgaaagttctacccctctaatcatggcttgatatttctggcaagcagcctcatcctgaaactatctaaggctctctcctcatgaggggctgactcattagaacaaaagatgctcctatcacccaggaaattgcaagtatttaggagctctgtgttagcaactggggacaaagaccaaatatacatttcttactgcatcacaccatcacgtagtatatgaacttta

SEQ ID NO: 388068 - DNA, 607 bp, Homo sapiens
aagtcattgaggatattctggtatgtttctctckaaaagctttatggttttagctgttgtatgtaggtctatgaatttctctatggtatgagataggagttgtggttctttttttttttttttttttttgcataggaatatccaattatcctaacaccacttactgcaaaaatttcacattagccactgatcatataaatgtgatctgtttcttggatttctattctgtcccatggttgtacttgttatctttatgccagcaccacactttcttgattattttaagttttgaagccaaacagggcatatcttccaactttttaaagtttgctttgcttattcaagggccttctcattttcatatataatttaaaaacagtctgtagacttccacagaaaaaaaacctgctgaaatttttgaattgaaacaccaatttgggtagaagtgaatgttaacactgagccttccagtatgtgaacatgatatgcctcaccatttattcaagtgttcattaaaattttcagcaatgttttatggttttcactgtaaagttctggtcatctcttattaaattttttcctaattttaatttttaaattttatttc

SEQ ID NO: 388069 - DNA, 621 bp, Homo sapiens
attgaggacattgagcctttccattttccagaccatttctccattaaacttgtaaagggatcatttattccagaattgcttgctaactcattggataaggaggttaggtcctgcaaagcttttgttactgttccgtcaggggctgtgttattaggaataaaagtacatcattggactccaatcatgacacagacaccacctttttctgctagcatcgtatctagggctatcctgttttcccagactatttagttaatgggacctaattgggaggctgtycccttaatggcatgtcttgtgtagttaacaaacctttgttggttgtaataaatgtagtttatccaatctacatttttatttacagttgaccaccaaaacagcacagattcaaatcctgaagctgtttgatttcgggccttaaatttatctggtacccctcgtggaactccagtagcatctttataaacgtgggagtcaaaggacccatgaaggtcacttcttctcttctgattttctcttctattatgttaatggaatgctagggtgaaagggatggccagttggactagagcacaagtaccactccagttacttggcagagtgtccagtaagggtccacca

SEQ ID NO: 388070 - DNA, 473 bp, Homo sapiens
tcagaatgcttaagtcatgtaaaaacgtatcaaaattattatcattacagctaccaggaaatagctacctactccatgttagatactgcagttaagtatctcacacagtttcactgattcctaacaacactgcaaagcatgttactaacccttaaggagtaggaagctgaagctctgagaggctatgcaactactcaatggaaatgtggggatctgaactctacctagctccaaagggcgtacttttttctaaaatttctaatttttttccaatttcacaatggaggcagagttttcactacaattttaataatttcaccagctgggtggggtggctcacgcctgtaattccagtactgtgggaggctgaggtgggaggacggcttgggtcccaggragacaactgggcaacagtgaagattctgactctaaaaaaaataagaatttcaccaaaaggggggacagatttctaa

SEQ ID NO: 388071 - DNA, 518 bp, Homo sapiens
cggtatcactctgctataaaaactatttccaaaacaaaacaaacctatctaccccctttcttgatttaaaaaaaaaaaaaaagaagraaaatttgagggtttttgattttttcaacttcacataccggtttgcctttgcaaaaaaaaaaaaaattgtttagtctcaaagtatagctgcaaggtggaccggctgcacgggtcccagagggccgctcgcctccgacggtcgcagtttcagccgggccgcgcccgcgagaaacagcggagaggccccagcagacgggcgccgccggacaggtttaccgtccgcgtcggccccggggaaccgctccctcgcgcccgcagcacttgttcgcggcgcggactccacaccgcggccgcccgccccaggggaggagtgagtccgccccagcggcgccaacccggggacccggggcaagggttcggggccatccgcggccggggcgcgccccccatccggaaagcggcgacggcccccaagttgggctgcggagtgg

SEQ ID NO: 388072 - DNA, 577 bp, Homo sapiens
tcaaacaagtttatcaccactaccatccccaccataaaactgtctcaatcaagggcaacacaattcaatattagccaagacaacctctttacctgtcactgcttaaggaaaggatttttggtcttatttagaaataactttctgtacctatttttctccataaatccactgagaccaatgtgtggctctatctcaagcaccagcaagcaaaactgcctgctagaaggttcagtttttgtatctttccaaatgtagaacacagctatcttcaaggatttcataattttttgaaaattgatgcacaaacttcttgaaagttcagagacacagcagctgtaattcttctgaaggctggttatgggacrcattaccttcatactttgctgtttaagaaatgtggggtggagaatcaagtaaactgatagaatttccatataaaattctaagtgctctgagaacaaaagaaacttaaaatacacacacacacacacacacacacacacacacacacacggttttccctactaatcattttacaactaaacaaccaagttgctaaaccagagcccacaaaagc

SEQ ID NO: 388073 - DNA, 548 bp, Homo sapiens
agaaaaaaaaaaagaaagatcaaaaaaggcaatactggaacttaaactcagtcctctgactccamgctctggggttttgccatgaatcagcagcttccagggaccaaaaccaggggcagaggtagaaaagcacacattaagcaggcaggaactgtaggccgtgtggtttagagtcatacatcctcacaggtctgctagcgtgaagaagcgtaccagtacctctcacactttcatatcaatgtgtcctcatggcagaaggcagcttttctattaaatctgggaatttatcagaaagaggacaacccaagcctcatttcagagcgaagtctggtatacgcttggaaacctatgtgtctgtcatccctaagtacattaatgcattttctcaagagaatcaagggaaaatgatgcttcagaaagatgtcccacatttatcctgtggcactcaaagtaccccaggttgagacgatatgaggaagattcaagctgtcaagttcagtttcccaagatctattccacagaagatgagcaaatctcacttcagaggc

SEQ ID NO: 388074 - DNA, 548 bp, Homo sapiens
agaaaaaaaaaaagaaagatcaaaaaaggcaatactggaacttaaactcagtcctctgactccaagctctggggttttgccatgaatcagcagcttccagggaccaaaaccaggggcagaggtagaaaagcacacattaagcaggcaggaactgtaggccgtgtggtttagagtcatacatcctcacaggtctgctagcgtgaagaagcgtaccagtacctctcacactttcatatcaatgtgtcctcatggcagaaggcagcttttctattaaatctgggaatttatcagaaagaggacaacccaagcctcatttcagagcgaagtctggtatacgcttggaaacctatgtgtctgtcatcccyaagtacattaatgcattttctcaagagaatcaagggaaaatgatgcttcagaaagatgtcccacatttatcctgtggcactcaaagtaccccaggttgagacgatatgaggaagattcaagctgtcaagttcagtttcccaagatctattccacagaagatgagcaaatctcacttcagaggc

SEQ ID NO: 388075 - DNA, 548 bp, Homo sapiens
agaaaaaaaaaaagaaagatcaaaaaaggcaatactggaacttaaactcagtcctctgactccaagctctggggttttgccatgaatcagcagcttccagggaccaaaaccaggggcagaggtagaaaagcacacattaagcaggcaggaactgtaggccgtgtggtttagagtcatacatcctcacaggtctgctagcgtgaagaagcgtaccagtacctctcacactttcatatcaatgtgtcctcatggcagaaggcagcttttctattaaatctgggaatttatcagaaagaggacaacccaagcctcatttcagagcgaagtctggtatacgcttggaaacctatgtgtctgtcatccctaagtacattaatgcattttctcaagagaatcaagggaaaatgatgcttcagaaagatgtcccrcatttatcctgtggcactcaaagtaccccaggttgagacgatatgaggaagattcaagctgtcaagttcagtttcccaagatctattccacagaagatgagcaaatctcacttcagaggc

SEQ ID NO: 388076 - DNA, 543 bp, Homo sapiens
ctctagggctaccccccaaaatatcactcctttacaacactctcctcctaaaggcttctgggctctggtaaaatcagggctatcatcacagcagtcctgctagatgaggaatcctcccaggtgccttagaattattagctcttcatccacttagtaagctgcccccttccccaaacataggattgacaatttcaggaaattaaatgataaatattactaaaatgacctttagcacagtgccagctgagtaaatgccaatattacatcttgttgatcagaagcctggaaagccatgattatcaggcggcttatgaggtggtatccccagagagctctaggccagacagggacgctcaggacccaaagcagaggcaggaagctctgtcaatcattcawgggccggatgaaaaatgcttatgtcaccatgtggggaaagcaggacacaaactgtatgcatagcgtgatcacagagtaccaaattatgcctttgtaagaagctgcattcaaaaaactaatgtgggtagtgaggctaagcgttccttc

SEQ ID NO: 388077 - DNA, 543 bp, Homo sapiens
ctctagggctaccccccaaaatatcactcctttacaacactctcctcctaaaggcttctgggctctggtaaaatcagggctatcatcacagcagtcctgctagatgaggaatcctcccaggtgccttagaattattagctcttcatccacttagtaagctgcccccttccccaaacataggattgacaatttcaggaaattaaatgataaatattactaaaatgacctttagcacagtgccagctgagtaaatgccaatattacatcttgttgatcagaagcctggaaagccatgattatcaggcggcttatgaggtggtatccccagagagctctaggccagacagggacgctcaggacccaaagcagaggcaggaagctctgtcaatcattcatkggccggatgaaaaatgcttatgtcaccatgtggggaaagcaggacacaaactgtatgcatagcgtgatcacagagtaccaaattatgcctttgtaagaagctgcattcaaaaaactaatgtgggtagtgaggctaagcgttccttc

SEQ ID NO: 388078 - DNA, 547 bp, Homo sapiens
acagggatgctctgggccagacagggatgctcaggacccgaagcagaggcaggaagctctgtcaatcgttcatgggccggatgaaaaatgcttatgtcaccatgtggggaaagcaggacacaaactgtaygcatggcatgtacagttgataacctccaactgtatccttacttagataaaagttgtcatcagcatcaaagtctcttcagacacaaagaacatccctcctctattcattacagagccacagcctcttcctcagtgggtccctatggtactttgtgcagttggataatatttattctgctttattatagttcatttatgtgtctgacttctccattaattccatgagcaagagctacatattctcatttccaaatcccagtttctcatactgggctgggcatacaacaaatgcttgttaaactgatttcaaaaatttcttgtacaattcataagtttcagaatgttttccctaaaatcctaataatgtatgtgatcaggcagaaagaaagaatatatgaatgaaatagaaaggcacatg

SEQ ID NO: 388079 - DNA, 547 bp, Homo sapiens
acagggatgctctgggccagacagggatgctcaggacccgaagcagaggcaggaagctctgtcaatcgttcatgggccggatgaaaaatgcttatgtcaccatgtggggaaagcaggacacaaactgtacgcatggcatgtacagttgataacctccaactgtatccttacttagataaaagttrtcatcagcatcaaagtctcttcagacacaaagaacatccctcctctattcattacagagccacagcctcttcctcagtgggtccctatggtactttgtgcagttggataatatttattctgctttattatagttcatttatgtgtctgacttctccattaattccatgagcaagagctacatattctcatttccaaatcccagtttctcatactgggctgggcatacaacaaatgcttgttaaactgatttcaaaaatttcttgtacaattcataagtttcagaatgttttccctaaaatcctaataatgtatgtgatcaggcagaaagaaagaatatatgaatgaaatagaaaggcacatg

SEQ ID NO: 388080 - DNA, 591 bp, Homo sapiens
ataagtagcaaaagagatacaatcagtagaacctggtcttacacatctttaagcttgaaggtaagatgtgtaactgctgagttttgcaccatttcacctcacttcccaatttcaggtgcagaggcttgaacacaatgagcgcagacagctgctgcatgtcagcagagggggaaataatacctgttcatcagggagctaattctgcaaaatgcaccatctaataggtacygtatacacggaaataggatgctctaatcagtgggaaggcaggaactgcaatctatccctcatggacctaaaatataatggagctaaattgaaggttttatgatgcacagagcactttacttggaagactgatgcttttccaggcaaggtgttcatttccagaacaagttcccacactctctgacatccaatcctggggaacaacgggaactgaacaaagcaatgcctggggcagctcatcagtatttatagagcctgtgggagacagtacagcgcagaggctaagagcacagatttagaagccagccagacctaggttcaagtcctattctactatttttgtagctctgtgaccctgggtaa

SEQ ID NO: 388081 - DNA, 575 bp, Homo sapiens
gctgctgccatagcacacgtttgcttctagagtcacagcataaaaggcyttcccgcccatcattccttctctcatatccactttttcccattgccatgaactccttacctttctctatccatggcaggctttccttctatgccttggtgctcttgctttgtttgaaagacccattcctgcacatccatctggcaaactcctactcattcttcaagacccatctgaaatgtgcctccttaggaaatcgtccctgcactccctcccctggtgtggtaggctgaaaaatgagcctccccaccaacaaaaaaaaatacttatgtcctaatccccagagtctataagtatgttaccttacatggtaaaagggactgtgcagaggtgattgagtatcttgagatggggaggttatccaggtgggcccagtgtaattacaagggttcttataagaggacagtgagagactcggagttagtgtaggatctgtgaagcaggaggttggagtgaggctggggagagaccacacaccacagaacgcaggcacctctagaagttgacagaagtgagaaaatggattc

SEQ ID NO: 388082 - DNA, 575 bp, Homo sapiens
gctgctgccatagcacacgtttgcttctagagtcacagcataaaaggccttcccgcccatcattccttctctcatatccactttttcccattgccatgaactccttacctttctctatccatggcaggctttccttctatgccttggtgctcttgctttgtttgaaagacccattcctgcacawccatctggcaaactcctactcattcttcaagacccatctgaaatgtgcctccttaggaaatcgtccctgcactccctcccctggtgtggtaggctgaaaaatgagcctccccaccaacaaaaaaaaatacttatgtcctaatccccagagtctataagtatgttaccttacatggtaaaagggactgtgcagaggtgattgagtatcttgagatggggaggttatccaggtgggcccagtgtaattacaagggttcttataagaggacagtgagagactcggagttagtgtaggatctgtgaagcaggaggttggagtgaggctggggagagaccacacaccacagaacgcaggcacctctagaagttgacagaagtgagaaaatggattc

SEQ ID NO: 388083 - DNA, 568 bp, Homo sapiens
tcaagcctcagttccagtgtcccctcgagggcaggcagtgctttcccatctgccctaggtccactctaccagcctctacttgggcccccagcataccttatctgtcttccatctcctcagttctagaacctaacacactgtggcactcttttttttttttttttttttttaaagcatctgactatcttctatcacagggccaggtactcaaaatatatttattgaatacagttgaatatattctgtgatcatccctgatcatgttaagttctattgggtccatactatttagtagcctaacccaggtaggactaaaactaagccacttgtttgtgcagcagtttctgattacaagtggtttrtattcctgtccgcactcagtgaagaggagctaccactgttagtatttccataatgtgaatagatgagaaaaccaaagcatagagaggttagatggtctgcccagggtcatgcagtttgtaagttgcagtggcccacagcccagctctctctcaggaccctgagaggtaaggctggatgaacattgctgactgttaaaagcacctga

SEQ ID NO: 388084 - DNA, 591 bp, Homo sapiens
ccctggatcctcaatgcctggccctggaatatagtaggcactcaactatcacctgatgtgtcaattttagataacgatggttggtacctatacagatcatttccagaggcgtcttgctgacagcaagggactggaaggaaaatagctgatgtgaagagatggcaggagatgtaggaattcagggaggaattagttgtttttttctctgtgttgcaacacttggctcatctgtttgggcaccttctccctgtcttgattggcatattagcttcctacagctgccattgcaaagtaccacaaatggaatggtttaaaacaacagaaatttattttctcacagttctggaagctasaagtctgaaatccaggtgttggcaatgttggctccttcttgggggctccaggggtggaatctgttccatgcctctgtctggttcctggcttctggtgattgtgacactccttggtgctccttggcttgcagctgataagtccagtctctgcctccgccctcacatggctatcttctctctatatcttcatgtcttcacagggtggtttccccactctgtgtgcctgcttgtgtctcct

SEQ ID NO: 388085 - DNA, 591 bp, Homo sapiens
ccctggatcctcaatgcctggccctggaatatagtaggcactcaactatcacctgatgtgtcaattttagataacgatggttggtacctatacagatcatttccagaggcgtcttgctgacagcaagggactggaaggaaaatagctgatgtgaagagatggcaggagatgtaggaattcagggaggaattagttgtttttttctctgtgttgcaacacttggctcatctgtttgggcaccttctccctgtcttgattggcatattagcttcctacagctgccattgcaaagtaccacaaatggaatggtttaaaacaacagaaatttattttctcacagttctggaagctagaagtctgaaatccaggtgttggcaatgttggctccttcttgggggctccaggggtggaatctgttcyatgcctctgtctggttcctggcttctggtgattgtgacactccttggtgctccttggcttgcagctgataagtccagtctctgcctccgccctcacatggctatcttctctctatatcttcatgtcttcacagggtggtttccccactctgtgtgcctgcttgtgtctcct

SEQ ID NO: 388086 - DNA, 533 bp, Homo sapiens
atgttggctccttcttgggggctccaggggtggaatctgttccatgcctctgtctggttcctggcttctggtgattgtgacactccttggtgctccttggcttgcagctgataagtccagtctctgcctccgccctcacatggctatcttctctctatatcttcatgtcttcacagggtggtttccccactctgtgtgcctgcttgtgtctcctcctcttcctataaggacatcagtcatactggatgaagggcctrccctattccatcaggactacaccttaacttacatcttgattacattcacaaagaccttgtttctaaataaggttgtatccacaggtaccagaaattaggatttcaatatagcttttggaggaacatgattcaactctcagtagttcgttatcacatattagtgttaaacaaaataatacctctatatggtgttttatgggtcatgcgacagtgatgattgcattaaattctcacactaaccctaagggtagctggcataatcagccctattatata

SEQ ID NO: 388087 - DNA, 584 bp, Homo sapiens
tgaggagaaccaggtgctctgtaaatacttgttggcttgaattgcattcagaagctcacccttgctctggagagaaccttcaagggtagcaaacaatgacttttactgaacatgtcagagagtgtaagccaaattttgagagaactagggtttagtgagtctgtgggcatttccgcaggtgaggtgttgaattcactgtacctcattccaagctgcggggagccagggttcaattctcactttcttcctttcagagaacaagcctgaggcccctgccaaggcttcttctcccctctcrtctgctcccctccctccttcagtgtcaccctcttcctccaggcctgttcttactctgatgcatcctccaaccccccactgccagagccagacagccatctgctcctcactcccccgtgtctccgatggccccagggcaaagtccagactcctgctgactgtagcacgcactgcatcctctggcagcaccacctattggaacacaccctcacatttgtgtatgacacaaattgtgaaacacaccgagtcccttcagtaagacttggctcttcagtggtgcccatatg

SEQ ID NO: 388088 - DNA, 618 bp, Homo sapiens
accactctgcaggtgcgaactgttactctcccatcttatcagctagggaaaaaaaggccagagagagaagggacttgctcagggttagctgtgaatgagatgaagcctggatgagaattctagttctgagagagagagtttcagagctgggatgrcatgctgggtgtctggaccctcagaaccatccactagccagctgcattggtttcctgtggctgctataacaaattaccacaaacttggtgatgtagaacaatagaaatctcttctctcacagttctggaagccaggagttcaaaatcagtatcagtgggctaaaacaagctttcaacagggctgtgctggaggctccggggagaatctgtttctgcctcttccagtttctggtggctgacagcattccttggcttgtggccacagtactccaaactttgcatccatctccatgttatcgcctgtgtgtttgtgtcaaatctccctctgcctctttcatatagggacacttgtgatagcatttagtctccaaccagcgaatccaggataatctcttcattttaagattctcaactttatcatatcagcaaagatccttttaccaaataggataacatgtccctg

SEQ ID NO: 388089 - DNA, 559 bp, Homo sapiens
aagtggcttattctgtgttccctcatctgtgcaactggaatgacaccaaacagggaaagatgtgacatttaaatgggagaatgaatgcaaagtacatagtaggtactcataaggaatcctcccagaaaagctggcacatcctgctcatttagrgctgtttgtttgtaaaggcacagctgagtgaatctgggagccaggtccacaggcaggcaatgaagcatgctatctgcctcctgaagagacatgccaggggctgggatggaaaagacaaactccagctttcagatctgccactgcaagaaaaccagggtttttgctgtggtggctctgggtggagtggtgatggtggtgggggcagatgggcagtaaacaaatagccaaaccccacatagccatgtggattggtgacatccaggtgactctgtgaccctaggatgcacggggaagcacagaaaacccttctcaaagacaaaaaactgctttagttctgtgtagcagtggcttgaaggttgatcactggtatgatgtgcctaagttaggatgcagctggcatggaaca

SEQ ID NO: 388090 - DNA, 586 bp, Homo sapiens
tgcaattctgtgccatctggccaccaattaagttgttttcaaatccaggcagggtcatcctcttttgttacattgtcctcagcttttccgtaaagtgactagattatatcratacttatttacattcccaaaagagcgctttggtataaaactgcataatttctaaaaccacattttgaaaatatgaactgaacgtgattctttcttcaacgatccaaaatagtaaccgaggaaatagaaaaggctgataacctaatacccaggaatgccattgccaccgcaaatgagtataaaatcccaacccggtcaggggaagtggaagaaagtggcaaagtgactatactggacactaatcgaagctgttgtctagtgtctttctaaagctctaagcttccatttcctgtcatctggttttaaattaattggcatgaattttttatgaccagagagcaaacaggttgaatgtcccatagaactgggttgggcttgctttctgctgagctccccatttctgcactgaatatgagctacaaactacgcagaaacaggaacacaaatggacccctgactattcattctctgtcca

SEQ ID NO: 388091 - DNA, 631 bp, Homo sapiens
gttttaaattaattggcatgaattttttatgaccagagagcaaacaggttgaatgtcccatagaactgggttgggcttgctttctgctgagctccccatttctgcactgaatatgagctacaaactacgcagaaacaggaacacaaatggacccctgactattcattctctgtccaatgacacctcttccaggaaggcttctcccaccaacctgagtcagaattagtaccccctcctctggcttccctcagggcaacacttcttgsagactctgttacactgcagtcatgcagtttgttttctttttttaaaaaaagtattttctttctgactattcactaaatacaataaaaactcacctaacaccatcaatatgattttagatatacttccttttaagcttttttgtatgaatactcacacagacatccacacaatgtacattcagatgctttacaaggtgggatcataccatacaagctaattttaatctctctttaatttagtaaaatagcatgcttttaaatggttatgtagatttataattaatctcctactgatggacacagcattatttctaatttttcactagtgtaaatactctaatatctttgtacatatttcttgtagg

SEQ ID NO: 388092 - DNA, 603 bp, Homo sapiens
gaaaaacaaaaacaaggaagtcagctcttcttgaaagagaaacttctccactcagcaactttctactcaccctctttcatttaacaagcaatgttgattgcttactgtgaacgtcagactcagattacaattggtggctgggaagagtgaaaagagcatgggcctgatccatggtcaaatcccagctctggctyatgtaagttgtgtgacactgagaaagttacttaactcctctgagcatcagcttctttatctgcaaagtgaagatctttatgccagcctttcagagctgatgtgagaattagcatttctcaaacatctagctgaggccttcaagtcagtccttaagaatactcactgcttttaccatttctactactaatcatggttaataagacatgctcactgcactaaaaaggtccaaagtgttactggtggatgggaagcctgttatctatagtgggatccagtgaggaagaggtcaactctaccgggatggaatgggcaagacagacttcaagggagactcatgagcacaatcttttcaaaacaaaaggtctgtggcaagaggcttaaaacgtagatacatcctgagaagtacaa

SEQ ID NO: 388093 - DNA, 603 bp, Homo sapiens
gaaaaacaaaaacaaggaagtcagctcttcttgaaagagaaacttctccactcagcaactttctactcaccctctttcatttaacaagcaatgttgattgcttactgtgaacgtcagactcagattacaattggtggctgggaagagtgaaaagagcatgggcctgatccatggtcaaatcccagctctggcttatgtaagttgtgtgacactgagaaagttacttaactcctctgascatcagcttctttatctgcaaagtgaagatctttatgccagcctttcagagctgatgtgagaattagcatttctcaaacatctagctgaggccttcaagtcagtccttaagaatactcactgcttttaccatttctactactaatcatggttaataagacatgctcactgcactaaaaaggtccaaagtgttactggtggatgggaagcctgttatctatagtgggatccagtgaggaagaggtcaactctaccgggatggaatgggcaagacagacttcaagggagactcatgagcacaatcttttcaaaacaaaaggtctgtggcaagaggcttaaaacgtagatacatcctgagaagtacaa

SEQ ID NO: 388094 - DNA, 603 bp, Homo sapiens
gaaaaacaaaaacaaggaagtcagctcttcttgaaagagaaacttctccactcagcaactttctactcaccctctttcatttaacaagcaatgttgattgcttactgtgaacgtcagactcagattacaattggtggctgggaagagtgaaaagagcatgggcctgatccatggtcaaatcccagctctggcttatgtaagttgtgtgacactgagaaagttacttaactcctctgagcatcagcttctttatctgcraagtgaagatctttatgccagcctttcagagctgatgtgagaattagcatttctcaaacatctagctgaggccttcaagtcagtccttaagaatactcactgcttttaccatttctactactaatcatggttaataagacatgctcactgcactaaaaaggtccaaagtgttactggtggatgggaagcctgttatctatagtgggatccagtgaggaagaggtcaactctaccgggatggaatgggcaagacagacttcaagggagactcatgagcacaatcttttcaaaacaaaaggtctgtggcaagaggcttaaaacgtagatacatcctgagaagtacaa

SEQ ID NO: 388095 - DNA, 603 bp, Homo sapiens
gaaaaacaaaaacaaggaagtcagctcttcttgaaagagaaacttctccactcagcaactttctactcaccctctttcatttaacaagcaatgttgattgcttactgtgaacgtcagactcagattacaattggtggctgggaagagtgaaaagagcatgggcctgatccatggtcaaatcccagctctggcttatgtaagttgtgtgacactgagaaagttacttaactcctctgagcatcagcttctttatctgcaaagtgaagatctttatgccagcctttcagagctgatgtgagaattagcatttctcaaacayctagctgaggccttcaagtcagtccttaagaatactcactgcttttaccatttctactactaatcatggttaataagacatgctcactgcactaaaaaggtccaaagtgttactggtggatgggaagcctgttatctatagtgggatccagtgaggaagaggtcaactctaccgggatggaatgggcaagacagacttcaagggagactcatgagcacaatcttttcaaaacaaaaggtctgtggcaagaggcttaaaacgtagatacatcctgagaagtacaa

SEQ ID NO: 388096 - DNA, 571 bp, Homo sapiens
atatgtttaagtaaaatcaaccactatcagaccacctgtgctcactgatgacttaccatgtgcaaggtgcttccactccatgttcataataaccatcacaacaaccctataaagtcggttttactcccccagttttatagttgaggacatggaggctcagagaggcaatgtgaattgccccagatgcagagtggcagcgggaactagaagcacgtgttgtggtgcttgggcccamctgttcacctcaaactcagagcgccaacaacccaatcctcaccgtttctctccaaagggtcctcttctgctgatccccatctcaataagtgatgccaccttccaccggccgcacaagctagaaacctaggtcactcctgacaccgctctctcctgcactgaaccccctagatctaagccatctttgagtcctgctggttctaactcctcaatctctcccaattctgtccacttctcaccatctctgtttctactaccctattcaagccatagtcatctctcaactgagcttccacaatggcctcccaaccagtctccctgcactcgtcctcataga

SEQ ID NO: 388097 - DNA, 437 bp, Homo sapiens
aatcaaatttatgtgcctctttctggtttacagactaaagcccagcccttgagcttaaccttcatgactctcccatgaacctccctcctagtgtgtacatggtggccaccacacacgtctgctcacccttctctagacaggttctgcccatccctgcctctacacctttgctcatgctcttcctcttttggagcaatccaaacccttccaggttctacccctgcccacctgtgtgaaacatkgccctgcaacttaagcccttgcagccttcttggaattccgtgatgttcagataaatggccataattttgattttctttttccctgggatggttttatttgcttcagggtcctgaatgagtctctgaactgttcaaggcctccacatactcacaaggaggagagcctccaaggcagggctggtgcggaccctcacc

SEQ ID NO: 388098 - DNA, 491 bp, Homo sapiens
aatgggcctgagtgggaattgctgtaggctgtgcacctgggacagaaagcacatgtgtacttaccttgactaggtagtgccacattgctttcytccagtgctaccccaatctgcactcacactgacatgaagccacctgtatcctctatccctgcatagcttctgacacttgagacagagctctctatttttgccaatctgctgggtgcacacatagcttattgtttaattgtttttgttttatcctttctttgacactacataagtttgagtatttacatacatttgttggctttttgggtttctcttcattgaattacttctccacatcctttgtccatttatcaattagagttcctgacattttcttgtcaattggaaggagttcctagtgtattataaataccaatcccttgtcacttttaggtaagtatcttttcccaaactatgtacatctattttaattttttaagcaaaaacgttaattctgg

SEQ ID NO: 388099 - DNA, 543 bp, Homo sapiens
ttttggcctcatagctttgcttctatgcatgaagtgctgaatgccatttctggtactgactcagattcttcatgtgccagtctgggtactgacttgtggagtggatagtggttgagggaagacaactgggggtgggaggaatgggagaatgtgagtgtcraggggtgggctacctcttgggcactggcaattacatgacagtggaacagcattgcaatttagttttgtgtttttcattgtaacccaactggcaacagaacagtgatgggagatggaaagggtatcaaatttgactagtgagttgccccttttggtcccttccttagagtaagcctcagtttcttcatctgcaaaatggaactatcagtgccttctctgactacctcgcagagttgctgtgaagaaaaagtgagataaaaatgtacctgaaagcatttgtaaaatgtaaagtgctgtataaatgtaactgattattgtttcatttaaaagacatggttttgttgatatctcatgaaaaacagtgctagtcctcccatttagtca

SEQ ID NO: 388100 - DNA, 491 bp, Homo sapiens
aatgggcctgagtgggaattgctgtaggctgtgcacctgggacagaaagcacatgtgtacttaccttgactaggtagtgccacattgctttcctccagtgctaccccaatctgcactcacactgacatgaagccacctgtatcctctatccctgcatagcttctgacacttgrgacagagctctctatttttgccaatctgctgggtgcacacatagcttattgtttaattgtttttgttttatcctttctttgacactacataagtttgagtatttacatacatttgttggctttttgggtttctcttcattgaattacttctccacatcctttgtccatttatcaattagagttcctgacattttcttgtcaattggaaggagttcctagtgtattataaataccaatcccttgtcacttttaggtaagtatcttttcccaaactatgtacatctattttaattttttaagcaaaaacgttaattctgg

SEQ ID NO: 388101 - DNA, 491 bp, Homo sapiens
aatgggcctgagtgggaattgctgtaggctgtgcacctgggacagaaagcacatgtgtacttaccttgactaggtagtgccacattgctttcctccagtgctaccccaatctgcactcacactgacatgaagccacctgtatcctctatccctgcatagcttctgacacttgagacagagctctctatttttgccaatctgctgggtgcacacatagcttattgtttaattgtttttgttttatcctttctttgacactacataagtttgagtatttacatacatttgttggctttttgggtttctcttcattgaattacttctccacatcctttgtccatttatcaattagagttcctgacattttcttgtcaattggaaggagttcctagygtattataaataccaatcccttgtcacttttaggtaagtatcttttcccaaactatgtacatctattttaattttttaagcaaaaacgttaattctgg

SEQ ID NO: 388102 - DNA, 521 bp, Homo sapiens
tatagcttcacaatccatagccaatattttgatagattttcaagtgaatatacatgaattttataaacttgaaattagactgtgcatagctctttatcctttttccattcartataataaacttttctaatttaaaaaatgcactgaaaacttatttaatggttaaagaatattacctagagtgaatgtatgattatcctcctgttaagtattttacttctgaaattttatttgattttgttattattatttctttcactcaacatatatctaacacatacctgccacgtaggatagaccgggtcaacaaaataatcatagacccctgcccttcggaagaaaaatgtgaagcaattaagacatacacatatttaatcaaagctgtataaatgcaataaaagaagtgacctttaagaggagacctgaaggccataggatttgatggggtcggaatgggagtaagagtgtcgcagatgaggggtatatgtatgcaaaaacccaaggcattctagaagggggcg

SEQ ID NO: 388103 - DNA, 592 bp, Homo sapiens
tgattcccccgctcctcagtttcctgagtagctgagactatcaccattgggagatagtctcaccatttctatacagatttcattyacttctcctgttcctttttttaagcacagtatatctacctttagctgagctgttttccagaagtccagactttctcaggctcacttactatagtcagtaaatctccagtcctctccttgggggttgacagtgcaggcactcaggaaaacaaaacggagaagggaaccttaagacaaacaaccaattttccttttttccaaccccacccaggcccctactttcagaaatgcctgaggcttcccatttctgaggtttcctagtgctctgcaatgaaaatcagatcccttctggatgttttccactgatagcttaggtttcactttctcaggtctgcctgtcaattatttcttgtccatctgctttatagttccaaaatgctattgtcttctcattggttcttttttcctttgtagttttctgctttcttatcatttctctgtcattttagtaggtgttagggaaagaacagaggtagaagtgtgtttcttcctctgtgtgtaactgaag

SEQ ID NO: 388104 - DNA, 599 bp, Homo sapiens
tgtaaccaataggtaattttctctttgggcactaacattaggtgttaattccctggtgctgctccactgtacrgtgcctggcagtcaacttccctgtctctgccatattcattgtaagctccttgaggcctgggaaggtactatattctttcttgtgtttctaggcccagtagggtagccagaagttaaaatagatctaaacacaggagaaatcacatcacaataaacagtggatggatcaatgaatgaatgagtgatacaagtcattatagaaaagttcctatcattcattttatagctctgccagaaggctatatatcagtgaaagcctagtcacccattcacagctcccatttgagacttatcaatattttcttcctccttggatcagaaaataataatacaataggtatcatttacatatcttgggcaaaaatgtgctacaaaagatgaacactaaactttggaattatttgaaccaggattcacatcctcattcttatacaaattggctggatcactttcaacaagacttttcttgggcctttggctccatttccttatctgtaaaattgggaaactaagggctaattcacatg

SEQ ID NO: 388105 - DNA, 599 bp, Homo sapiens
tgtaaccaataggtaattttctctttgggcactaacattaggtgttaattccctggtgctgctccactgtacagtgcctggcagtcaacttccctgtctctgccatattcattgtaagctccttgaggcctgggaaggtactatattctttcttgtgtttctaggcccagtagggtagccagaagttaaaatagatctaaacacaggagaaatcacatcacaataaacagtggatggatcaatgaatgaatgagtgatacaagtcattatagaaaagttcctatcattcattttatagctctgccagaaggctatatatcagtgaaagcctagtcacccattcacagctcccatttgagacttatcaatattttcttcctccttggatcagaaaataataatacaataggtatcatttacatatcttgggcaaaaatgtgctacaaaagatgaacactaaactttggaattatttgaaccaggattcacatcctcattcttatacaaattggctggatcactttcaacaagacttttcttgggcctttggctccatttccttatctgyaaaattgggaaactaagggctaattcacatg

SEQ ID NO: 388106 - DNA, 516 bp, Homo sapiens
agacaggcgggttgaagtttaggtgactttctaaagactagaacaatttaaaaatgattcacattgctctcataggagtgagatcccyggcaccagaggaggtgagcaagcagaagttgtgagctgcttagccaggacaacgtagaggtgcagactgtatattcaaggtccttaatattcagtaatttgtaatgatcattcatggaaagatatatagtctacttaagctcttagtctcagtttatttatctgagaagtgggggaacaacaacattggatatccaaacaaaatgaagcaatgggtgagatgggaagagtgcttataaactgtgaggttgcaaagagcagagcttgcaaactgctaccccatggccacaattagcccccagatggatttcggtgggccggcataaggttggccttattttttttttaaaagagatttcatgtgacagttcaagttgttcaacttaattacaaagaaggatgaaagatgtgatgactgggccctcattt

SEQ ID NO: 388107 - DNA, 540 bp, Homo sapiens
catgtcttttatgtttgctgcttaatttgccatctctccaccaaaacaaaagctctatattgccagtaactgaggttgggatgttggaggtgcctagcaaatatttgatgaatgaatgaaagtctgtctccaagagaagatgttcccagcaaaggcctctcccgtcactgctgagcctcagtctctttgaatccttaaagaacccagctctgctctgaagaacttcttctattcctacccttgtgccaactgtggaggtagcaccagatctggagacgayggaacagaaatctacatgccatgagggaaaaggaaaaatatattgaggagaaaacaaaaatgctcatctagtgaaggctgccacttgcccagaattctccatggcttttgaacagcttagctgcttctgaatggtgtctaagaggtcagtgcctagtcacatggttcactgggacaggtcagttgggatggttctctgccagctagaaggacagttttgtagagacggtagcttttcctatgggaaacttttatgttatt

SEQ ID NO: 388108 - DNA, 590 bp, Homo sapiens
attgaggagaaaacaaaaatgctcatctagtgaaggctgccacttgcccagaattctccatggcttttgaacagcttagctgcttctgaatggtgtctaagaggtcagtgcctagtcacatggttcactgggacaggtcagttgggatggttctctgccagctagaaggacagttttgtagagackgtagcttttcctatgggaaacttttatgttatttccaaagaatctctggagtcagcccagccttgggctacatcagctctggaatgctgggtaagtccctgagcccctaggaacctcagtttcttcttctgggaagaagaagaaactgtgaggtgctatgttacctacctgtgcttacatatatatatgcatgcttaacatcaggcatggtacatagtgggtgttcagtaaatgttatatttctccctcagttctccaactcagaacagaagcgggcacgttgtagaagatgatcccctcgtccaccacatcgttgcttacaggcttcttcccacactcttcctgtgtccccgcctccctcggtccccacaccgccaccaccaccgccaccgcctcttaccagg

SEQ ID NO: 388109 - DNA, 583 bp, Homo sapiens
cttcctcattgattcaaatttaaaattcactatcatctagtgatgaaacccggggccactgtctcaattatagtgttttatttttgtagaaatactgtatccattaaaattatctatttctatggcacttaaaattgtcaacacagtctttttgcttcaccttctggctgacttatataacctcactttactaaggctgggggaaaaatgtctgagcatttctggagattaatgttctgttttaagaatcaagtcctgagtatcactcagttcagggcaaaccatatatttaattgagctctttctgcagccagagcattaaagggagagagaaaaataagtgagatgaggctctgcccgtaaggagcttctgatcaagttttttctttcttttttactcatttgttagtctgtttcctaatttatataatggygaatagatatttaccaaaatgctccatatgcctggcactggagtgtggagacagagataaatagacctggttccttcccaaaagaaggtgtctgcctagcttaggagacagccatgaacatgaaaaagctctagggaacgggacaaaga

SEQ ID NO: 388110 - DNA, 583 bp, Homo sapiens
cttcctcattgattcaaatttaaaattcactatcatctagtgatgaaacccggggccactgtctcaattatagtgttttatttttgtagaaatactgtatccattaaaattatctatttctatggcacttaaaattgtcaacacagtctttttgcttcaccttctggctgacttatataacctcactttactaaggctgggggaaaaatgtctgagcatttctggagattaatgttctgttttaagaatcaagtcctgagtatcactcagttcagggcaaaccatatatttaattgagctctttctgcagccagagcattaaagggagagagaaaaataagtgagatgaggctctgcccgtaaggagcttctgatcaagttttttctttcttttttactcatttgttagtctgtttcctaatttatataatggtgaatagatrtttaccaaaatgctccatatgcctggcactggagtgtggagacagagataaatagacctggttccttcccaaaagaaggtgtctgcctagcttaggagacagccatgaacatgaaaaagctctagggaacgggacaaaga

SEQ ID NO: 388111 - DNA, 583 bp, Homo sapiens
cttcctcattgattcaaatttaaaattcactatcatctagtgatgaaacccggggccactgtctcaattatagtgttttatttttgtagaaatactgtatccattaaaattatctatttctatggcacttaaaattgtcaacacagtctttttgcttcaccttctggctgacttatataacctcactttactaaggctgggggaaaaatgtctgagcatttctggagattaatgttctgttttaagaatcaagtcctgagtatcactcagttcagggcaaaccatatatttaattgagctctttctgcagccagagcattaaagggagagagaaaaataagtgagatgaggctctgcccgtaaggagcttctgatcaagttttttctttcttttttactcatttgttagtctgtttcctaatttatataatggtgaatagatatttaccaaaatgcwccatatgcctggcactggagtgtggagacagagataaatagacctggttccttcccaaaagaaggtgtctgcctagcttaggagacagccatgaacatgaaaaagctctagggaacgggacaaaga

SEQ ID NO: 388112 - DNA, 438 bp, Homo sapiens
cagagaggcatttgacaggggaggatgcagctgtttggagacattgtgttacctgcccatgctcacatgctcacacagctagtaactggtgaagccaaggttataccagtggggcattcctttcagagcacaacacaaacagcagacaaggcagaggggaaattttggggtcttttcattcaaacagctgtgagttctaattccatattggccacttcacttctccaagttccctcaaaatggatgtggtcattcctcctttatagtgcacttgacaggatgaaggtagcctatgtatggcccgtgttgggcctctagatgtcagctgctcttgaagagtcattaaaagtgtggasgttggggaccccacacctccagcccaggttagaactcacttctcaggaatgggcagagccagctaaaagatgccattgccag

SEQ ID NO: 388113 - DNA, 514 bp, Homo sapiens
cttcctctccctttctgcctgcctctctccttaacaccatcttacctgttgctactctcagaagattgtaagctcccaaaggactgtgttactcatcttctgcctggagtactctctctaaggccttctgggaagaaggtgatgaagaaacagctgtgaaaatgaacatattgacactttagggagttctgagatcatcagattggaaatcctccacagctggtgctcagccaaggagtccctaatgtggtaaactttcagcttgtagagaccaccctccgtggccccagtgtgtgcctgtktgtctgggatgtgaggactctgcaggcatctaaaggtgtaaacacctgtgcacgtgcctgaaagcagacgtgtgtctgggctcagaggtgcatgttgggtgcttctgtgtcatgggccctgtgcgcttgtctgggtctggacacgtggccgtgcctgtgagatttccctttaggctctgttggtttctggaggatgaagagcccaggcctca

SEQ ID NO: 388114 - DNA, 542 bp, Homo sapiens
catttctttgattctcataaggacttggtgccatttaacaagggagaatggatgtcaaggctcaaagaggtcacacaaagatacaaaaagcctaggaatgcaagcacaggtctgtctgcttcaaagcttaaatttatatttttctctaccttaaaataagtaatgtggttgaaggagctggtgatttttacttagaaaagaaagactcagtggtgacccatcagcctgcctccaaatacttaagtgttcctgtgtaccaaagaggtctgaaatacagtagcttcagaggataaaacaaagaccctcaatccatcccttttctgattatgtgttgctgaaaaattaaagttgcacagatatgtgataattctccctacgtcatatgcaaagaagccccaaaacaataacaaacaaamaaaaaaagaatttgaagtctgaaaagtttaagtctatcctaaagataagctggcatgaataaaataatattctatgtgtgcagtgtgttggtaggttatgaagaatttccatatgtatgattttat

SEQ ID NO: 388115 - DNA, 586 bp, Homo sapiens
ctggtgatttttacttagaaaagaaagactcagtggtgacccatcagcctgcctccaaatacttaagtgttcctgtgtaccaaagaggtctgaaatacagtagcttcagaggataaaacaaagaccctcaatccatcccttttctgattatgtgttgctgaaaaattaaagttgcacagatatgtgataattctccctacgtcatatgcaaagaagccccaaaacaataacaaacaaacaaaaaaagaatttgaagtctgaaaagtttaagtctatcctaaagataagctggcatgaataaaataatatyctatgtgtgcagtgtgttggtaggttatgaagaatttccatatgtatgattttatttgatgttgtgaacaaatgtgaacctgaaagagctaatccttcaagatggatccctagcggctaactgggtctacatttaaaagagagccaagaagccatttgttgacaagagttccctaaaaaccaaagccaaacctttttaacttttagaatttcagagctcacttgaaccaactagagctcacctgcctttaccaatcagggctcagccatgttgacc

SEQ ID NO: 388116 - DNA, 530 bp, Homo sapiens
gcatgaacagacttgattgtgaacttaggtgagaacttttgctataaaacttgaaccctcagccagtcatggtgactcacacctgcaatcccagcactttgggaggccgaggcagacagatcacctgaggtcaggagttcaagaccagcctggccaacatggtaaaacctcgtctctactaaaaacacaaaaattagccagccgtggtggtgggcacctgtaatcccagctactcgggaggctgaggcaagagaattgcttgaacctgggaagcagaggttgcagtgaaccgagatcacgccactacactccagcctgggtgacagagcgagactccatctccaaacaaacaaacaaacaaaacamttgaaccctctctgttctctggaacacaccttcttctgtttacaccaaaggccatgtcttcccattatacaaactgttcactggaataaagtctctttccctcaaattccttttcagagaacctttgttcacagtctgcagcaaaatcatgtgagcatggtgag

SEQ ID NO: 388117 - DNA, 657 bp, Homo sapiens
aacaggcaagtcatattggaagacagtattgcccatagtacagcaggtactaaatcttttcaaaaacaaycaccattcaccaacttcttccaaccttccaaaataaagatgggggagacaaatataattgatgacaatttattttttggttaaatgtatgcctttggttgataacccctaaattatcttgcccacttgtagcaacaactatccaagtgtggcatatgtttataggtaaataaggactgtaaaacataccacaagaacactcaattcctggaacatcaaaacagctcaagtgtatcactatgcattaggctaactgagagatggaaatagattaaatggaatggaaatgtttccactttgaaatattaacgtcgtaattaccatgccctgagctttatttaccatgctctagggctaccccccaaaatatcactcctttacaacactctcctcctaaaggcttctgggctctggtaaaatcagggctatcatcacagcagtcctgctagatgaggaatcctcccaggtgccttagaattattagctcttcatccacttagtaagctgcccccttccccaaacataggattgacaatttcaggaaattaaatgataaatattactaaaatgacctttagcacagtgcca

SEQ ID NO: 388118 - DNA, 363 bp, Homo sapiens
tagctataaatgcctacatcaaaaatgagaaaaaacttcaaatgaacaaaaatgatgcacgttaaagaactagaaaagcaagagcaaaccaaacacaaaattagtagaaaagaaataataaagatcagagcaggggagtctagcaagatggccaaataggaacagctccgatctgcagctcccagtgagactaatgcagaaggtgggtaatttctgcatttccaaatgaggtacccagctcatctcattcagactkgttagacagtgggtgcagcccacggagggcaagcagaagcggggtggggcatcacctcaccctagaagtgcaaagggccagggaactccctcccctagccaagggga

SEQ ID NO: 388119 - DNA, 564 bp, Homo sapiens
cattcttttcaagtgcacgtgatatgttcatcaagatagactgttgctgggccacagaacaagtctaaacagatttttaaaagactgaaatcatgcagagtatgttctctgaccaaaagagaattagattagaaatcaaaagcaacaagatagctaggaaaaccaaaaatatttgtaaacttgatcacactcctaagtaataaatgggtgaaagagttaaatcataatggaaattagaacatacttttaaatgaataaaaataaaaacatcacatataaaaattagtaaaatgcaaataaagcagttcatactaataaattcgtggctttaatttttttatattagaagaaatgtcagttacctaatcagttacctaagaatccacttaaaatctaaaagagagcaaagtaaacccgaagtaatataagaaggcaaataatacagacaaaagcagaaattaatgaaatagaaaccaaacaatagaaaatatatcaacaaagccaaaagctggctattcgaaaaaaatcarcaaaattgataaattctcagctagacttattgat

SEQ ID NO: 388120 - DNA, 619 bp, Homo sapiens
gaatgcatgtgctctcttggctcaattagcaaacatttcataatagaccaggtttatgaattattttttcccaaaattrataataagagatatgaatcccttatcaaggtttagggaaagtaaagatactattgttttcaaaacaaaagtaattcaaatattttaagatatacataaaagcatttcaatgttacttagatgctagtcactggtgatagaactctatgatagggaatatcaggtaatggcagcctaaattatttacagcagtcatcctactgaaatcaactaaatattcttgggtaaaacattaaaacaattatcttaaaagcactgaaaatctgataagataatggggaactgctaggacaaattgtggaggaaagctaagcccaaagaggtaaacagaatattgaacttgacataaaattggacataagttgtaggaagacagaaattaagaagcaggatgggctgggcaccatggctcatggctgtaatcccagcactttgggaggctgaggcgaatggatcacgaggtcaggagttcaagaccagcctggtcaagatggtgaaacctcgtctctactaaaaatacaaaaaattagccaggcgtggt

SEQ ID NO: 388121 - DNA, 433 bp, Homo sapiens
atggccggtgcaggagcaagggagggggggaagtgctacgcacttttaaacaaccagatttcacgagatctctctcactgttatgagaatagcaccaagggggaaacctgccccatgatctaatcacctcccaccagggcctgcctacaaaattggggattacaatgtgacatgagctttgggcggggacacagatccaaaccatgtcattctgccactgccctcaccctccrcgaaatctcatgacgttcttacattgcaaaatacaattatcccttcccaatggtccctcaaagtctgaactcattccagcattaagccaaaagtccaaagtccaaagtctcatctgagacaaggcaactctcttctgcctatgagcctgtaaaataaaaaacaagttagttactcccaagatacagtgcgggtacaggca

SEQ ID NO: 388122 - DNA, 629 bp, Homo sapiens
gttttcctttttgttgcatctctgccaggttttggtatcaggatgatgctggccttaaaggagttagggaggagtacctccttttcyattgtttggaatagcttcagaagaattggtaccagctcctctttgtacctctgatagaattcagctgtaaatctgtctggtcctgggctttgtttgcttggtgggctatttattattgcttcaatttctaatttaatatttttaaatcttgggttaaatggttgaatgaatgtgtgaaaagttagatatcaatgaatgaatattcttaaatgtataaactttaatcttgctggatataggataaaatttacattaaaacactgtaattaatcagtcaatttaagtaaaataaattcaaggaagtggtctgaatttctcagtgagcatttagatatttatgggagtcatataaaataatttataaatgtgactgagggctttttattaaggaaaatgaaatattgctatggacatgattctgtgtgtttctttactacactatgaactaaaaattttggagacaaatctaagtatataaattggtttattgatgaccgattgggaatataaataggcacaaaaatttggcgaagcattttggc

SEQ ID NO: 388123 - DNA, 629 bp, Homo sapiens
gttttcctttttgttgcatctctgccaggttttggtatcaggatgatgctggccttaaaggagttagggaggagtacctccttttctattgtttggaatagcttcagaagaattggtaccagctcctctttgtacctctgatagaattcagctgtaaatctgtctggtcctgggctttgtttgcttggtgggctatttattattgcttcaatttstaatttaatatttttaaatcttgggttaaatggttgaatgaatgtgtgaaaagttagatatcaatgaatgaatattcttaaatgtataaactttaatcttgctggatataggataaaatttacattaaaacactgtaattaatcagtcaatttaagtaaaataaattcaaggaagtggtctgaatttctcagtgagcatttagatatttatgggagtcatataaaataatttataaatgtgactgagggctttttattaaggaaaatgaaatattgctatggacatgattctgtgtgtttctttactacactatgaactaaaaattttggagacaaatctaagtatataaattggtttattgatgaccgattgggaatataaataggcacaaaaatttggcgaagcattttggc

SEQ ID NO: 388124 - DNA, 629 bp, Homo sapiens
gttttcctttttgttgcatctctgccaggttttggtatcaggatgatgctggccttaaaggagttagggaggagtacctccttttctattgtttggaatagcttcagaagaattggtaccagctcctctttgtacctctgatagaattcagctgtaaatctgtctggtcctgggctttgtttgcttggtgggctatttattattgcttcaatttctaatttaatatttttaaatcttgggttaaatggttgaatgaatgtgtgaaaagttagatatcaatgaatgaatattcttaaatgtataaactttaatcttgctggatataggataaaatttacattaaaacactgtaattaatcagtcaatttaagtaaaataaattcaaggaagtggtctgaatttctcagtgagcatttagatatttatgggagtcatataaaataawttataaatgtgactgagggctttttattaaggaaaatgaaatattgctatggacatgattctgtgtgtttctttactacactatgaactaaaaattttggagacaaatctaagtatataaattggtttattgatgaccgattgggaatataaataggcacaaaaatttggcgaagcattttggc

SEQ ID NO: 388125 - DNA, 623 bp, Homo sapiens
agtatatgtagaattcagtattatccttggtttcagacattcagtggggatcttagaaagtattctctgtggaaaaggagggactactgtacttttaacaaagcacttcccagaataaacacacagacatatacatgcacacactttcagaaatgcacttaaatattcaatcatggagtaaaaattaattatgaaatatctagacaatgaayattatgtagtttttattaagaaagaagcagaattatatatactgacatgaaaggatgttcattatatatgttaagtaaaaactaagttcatcatatatgttaagtaaaaaaaagtcacaaattaagagaaagtgttaattgatttgagagtttgtgtattttttttcctattttgtgctgaaaagctgaagttggcatcaaccaaggcatattgttatctatgtatcaagctaaataatttaaagatctttaagactattaattcagagatgctgtataaatagaatcagtgccagattttttgtttcaattctatcagccaagtatactatgctttctttgcttgtgatagaaaaaagagagaaaaaacacagaagcaaaaagtaaagttgtacaatagtgtgtagagtg

SEQ ID NO: 388126 - DNA, 600 bp, Homo sapiens
gacgtgttgtagagtcttctcctgttctgtactacattaaaaagtgagagccttttkggttactcgataaatgggctggagtaacatacccaaatgaggaatgtgttgcctccaaaatccaatagtcccaaataagcctctttcgtggttgtaggaggggccaaatgcagcaacttatccttcaccttagaaggaatatcttgataggccccactccactggacccctagaaattttactgaggtagaaggttcctgaattttagtcatttattttccatactctggcatgcaaatgtctcaccaataagcccagtgtgtttgctacttctcactcactgggtccaatcagcaaaatgtcatcaaggtaatgaaccagtgtgatatcttatggaagggaaaatcaatcaagttctctccaaacaagattatgacacaaagccggagagttgatatacccctgaggtaggatggtaaagatatattgctggccttgctgactgaaggcaaattgcttctggtgggccttatggacaggaatggagaaaaaggcatttgccaaatcaatggttgcataccaggtaccaagagatgtgttaat

SEQ ID NO: 388127 - DNA, 600 bp, Homo sapiens
gacgtgttgtagagtcttctcctgttctgtactacattaaaaagtgagagccttttgggttactcgataaatgggctggagtaacatacccaaatgaggaatgtgttgcctccaaaatccaatagtcccaaataagcctctttcgtggttgtaggaggggccaaatgcagcaacttatccttcaccttagaaggaatatcttgataggccccactccactggacccctagaaattttactgaggtagaaggttcctgaattttagtcatttattttccatactctggcatgcaaatgtctcaccaataagcccagtgtgtttgctacttctcactcactgggtccaatcagcaaaatgtcatcaaggtaatgaaccagtgtgatatcttatggaagggaaaatcaatcaagttctctccaaacaagattatgacacaaagccrgagagttgatatacccctgaggtaggatggtaaagatatattgctggccttgctgactgaaggcaaattgcttctggtgggccttatggacaggaatggagaaaaaggcatttgccaaatcaatggttgcataccaggtaccaagagatgtgttaat

SEQ ID NO: 388128 - DNA, 596 bp, Homo sapiens
tggtactaatacaaaaacagacacatagaccaatgggacaggttagagaacccagaaataaagctgcacacctacaattatctgatcttcaacaaaaacaagcaatggagaaaggacttcctactcaatattgctgggataactagctaaccatatgcagaagactgaaaactggaccccttcctttcagcatgaacaaaaatcagcctgagatggattaaagagttaaatgtaaaacctaaaactatacaaaccgtagaataaaacctagaaaatatcattctgggcataggccctggcaaagatttcatgacaaagatgccaaacgcacttgcagcaaaaacaaaaattggcaaatggggcctaattaaactaaagarcttctgcacatcagactattgaggtggagcaagatagtggaacagaagcctacaccatcccccccctcccccgccacatgaacaccaaattgtaacaactatctgcacacggaaaagcgtcattacaaaaaccaaacatcaggtgagcaatcgtagtacctagatttaacaacgtatcactaaaagaggcattgaagagggttggagagacactct

SEQ ID NO: 388129 - DNA, 564 bp, Homo sapiens
gctttgacctacaaacaggaaatgcagcttttttatataggtgacaactaaactgtcacaagcaaaaattgactgcagacaaaaaaactcattaaaaagtatagctcagaatgcattctctgatcatgatgcaatgaagctacaaatggaccacagaatcataaaacagttattcatcacaaaatcataaaacaaacagaaccctcamtacctgataatgttaaaataaaaccacttgagtaaaaaagggaaaaaaaccgaaaatctcaaaatctctcagaaataaaataataatttaagaaattgtgtgttacaactaatgagatatagctgcaacagttctcagaggaaaattcataactttaaataattatactaataagaatgaacaaaatacactaaatagtcaacgaaaagagttaaaaaacttaacaaaaagtaaaaaaaaatcaccttaggaaagcaaaaggaaagaattaaagacaacaatagaaatcaaggaattttaacagaaaataagtaaaacaagtacattcaaaggtaactcttttgggggaaaattta

SEQ ID NO: 388130 - DNA, 420 bp, Homo sapiens
ggagagcagggtgaggagggaatgtgaccagtccagggtctcacctgctactgaaaacagaaaatgccagattataatcttccattcctgggcaatcaaaaaatggcacgaaggatcataggacacgagtacctcccctaaaaagaaacagaacaaactgaggagtcctaatttccccccatcttcccattcccaaagtaaaaggcaasagtcagcctagacaggatgccgtcggggtgcggggtttggagctgaagcagacattctttacagagaaaatacatggtgctaaaagccagcaaagttggtgttcttagaagtctgaaataaaatatcagtgacaccgaatcctagtggaaattatggagtcagtagcaggaagtcaggtaagagaaacaggcccaagaatgtggcaccaga

SEQ ID NO: 388131 - DNA, 595 bp, Homo sapiens
aaaatgattgaacataaacaatctaaagtcagaaaatatgccaggacaaccaatttcatctacttctgaagccattgggctttcttttaacctctagttgaagggtcttgaatctatttctaagtaccagcataacttctgttactctcagatttttggcaaatcatgtaaaattcataagtatcaaacatcatggtgtgaatactaaaactagaaatcagaaaagtctgaaatctgccttaccaaagttaatcatgactcatmtgtatgcctgaattaagctgtgaggaactagaagtaccagtcttgacacttgtgatgtattaaacagcccttagcaaaacagattgcccaaattgttcaattagttttttaacactgatccaattcacctgtggtcatgtagccagagcctaggaaaatatttccctggggatggatgtctagtgaaatagaacatttaaaaataaaaaaataagtaaatcttccacagacttttttttttcaaacttcttctgatattcaaccaattttgattccaaaagaatcttttggaatataacagaaaatatgctatctgggtattaaaatgttt

SEQ ID NO: 388132 - DNA, 595 bp, Homo sapiens
aaaatgattgaacataaacaatctaaagtcagaaaatatgccaggacaaccaatttcatctacttctgaagccattgggctttcttttaacctctagttgaagggtcttgaatctatttctaagtaccagcataacttctgttactctcagatttttggcaaatcatgtaaaattcataagtatcaaacatcatggtgtgaatactaaaactagaaatcagaaaagtctgaaatctgccttaccaaagttaatcatgactcatctgtatgcctgaattaagctgtgaggaactagaagtaccagtcttgacacttgtgatgtattaaacagcccttagcaaaacagattgcccaaattgttcaattagttttttaacactgatccaattcacctgtggtcatgtagccagagcctaggaaaatatttccctggggayggatgtctagtgaaatagaacatttaaaaataaaaaaataagtaaatcttccacagacttttttttttcaaacttcttctgatattcaaccaattttgattccaaaagaatcttttggaatataacagaaaatatgctatctgggtattaaaatgttt

SEQ ID NO: 388133 - DNA, 595 bp, Homo sapiens
aaaatgattgaacataaacaatctaaagtcagaaaatatgccaggacaaccaatttcatctacttctgaagccattgggctttcttttaacctctagttgaagggtcttgaatctatttctaagtaccagcataacttctgttactctcagatttttggcaaatcatgtaaaattcataagtatcaaacatcatggtgtgaatactaaaactagaaatcagaaaagtctgaaatctgccttaccaaagttaatcatgactcatctgtatgcctgaattaagctgtgaggaactagaagtaccagtcttgacacttgtgatgtattaaacagcccttagcaaaacagattgcccaaattgttcaattagttttttaacactgatccaattcacctgtggtcatgtagccagagcctaggaaaatatttccctggggatgratgtctagtgaaatagaacatttaaaaataaaaaaataagtaaatcttccacagacttttttttttcaaacttcttctgatattcaaccaattttgattccaaaagaatcttttggaatataacagaaaatatgctatctgggtattaaaatgttt

SEQ ID NO: 388134 - DNA, 623 bp, Homo sapiens
caaggatatcttctgtcttatttttttttttgtcaaataaaattgcacttcaaaaaaattaaacaagtatctaggagactgcaatgttcaagacattgcactagataccatagagggcatgtagtactagagaagtctctctctctctcctggcagagcaataaccagagacttctcatatagtgtaagcttttgtattctacgctgtcaactaaaacaatcacttatatmatttcaacaataggtaaattttattaaacaacattcttcttagtatgtttgtcttcatcataagctaaaataatataatcttttaacctattttatattagtattatttatttttacagggataggccaatcacctcatttatacactaacatagtaaaacctcaatattaaattggctcaaatagaaccattctctttatgcaaatgtgctttagaattcacagcattctctacctccttccttccattccttctctttctggctaggctattgagggaaagagcataggaggaaaggagaattggtaggagattgttaacttgtgtaaacaaagtaatagctgtttaaaaattggaaggcagaattttgcaggcccagaaggcaaaagag

SEQ ID NO: 388135 - DNA, 576 bp, Homo sapiens
tggaatagtatattgaagtcagacagactgcgtttgaatcctwcctccatgatttaatgtttggcatttaagcctaattttccacatctgtaaaatcaagatactataatgcctgtgtctaaagtttgttatggaggatttaatgatatatatataggatttaattatatattaaaataatttatatacatacaaaataaaatgctgtatacatcacatgggctccatatatgaaagttgttattaataaaaggaatttttgtttattcagtgttttttaaatattctatatgcatggtttgactttcccttgtgactctgaagtttgtattatttatttatattttacaagtgaggttactaatggtcacagacattgtatgatttaatcaaccttggggttttttttttttttttttttgacatggtcacttacgttaataacaatacatataccacgttatcaccatggaatgtaaattcaggttagacaagagaatttcacaagtgtaatagcattctgtagtatataaaagtttgtatacactgtctgaccaaaccagcattctcacaaat

SEQ ID NO: 388136 - DNA, 576 bp, Homo sapiens
tggaatagtatattgaagtcagacagactgcgtttgaatccttcctccatgatttaatgtttggcatttaagcctaattttccacatctgtaaaatcaagatactataatgcctgtgtctaaagtttgttatggaggatttaatgatatatatataggatttaattatatattaaaataatttatatacatacaaaataaaatgctgtatacatcacatgggctccatatatgaaagttgttattaataaaaggaatttttgtttattcagtgttttttaaatattctatatgcatggtttgactttcccttgtgactctgaagtttgtattatttatttatattttacaagtgaggttactaatggtcacagacattgtatgatttaatcaaccttggggttttttttttttttttttttgacatggtcacttacgttaataamaatacatataccacgttatcaccatggaatgtaaattcaggttagacaagagaatttcacaagtgtaatagcattctgtagtatataaaagtttgtatacactgtctgaccaaaccagcattctcacaaat

SEQ ID NO: 388137 - DNA, 576 bp, Homo sapiens
tggaatagtatattgaagtcagacagactgcgtttgaatccttcctccatgatttaatgtttggcatttaagcctaattttccacatctgtaaaatcaagatactataatgcctgtgtctaaagtttgttatggaggatttaatgatatatatataggatttaattatatattaaaataatttatatacatacaaaataaaatgctgtatacatcacatgggctccatatatgaaagttgttattaataaaaggaatttttgtttattcagtgttttttaaatattctatatgcatggtttgactttcccttgtgactctgaagtttgtattatttatttatattttacaagtgaggttactaatggtcacagacattgtatgatttaatcaaccttggggttttttttttttttttttttgacatggtcacttacgttaataacaatacatataccacgttatcaccatggaatgtaaattcaggttagacaagagaatttcacaagtgtaatagcattctgtagtatrtaaaagtttgtatacactgtctgaccaaaccagcattctcacaaat

SEQ ID NO: 388138 - DNA, 527 bp, Homo sapiens
actttaagtatgtaagaaacctgtaaggatgtttcttctgttactgctgaggttaatcattttggtttttttcttttgttgattggtctagctagaattttattgatcttttcaataaatcgattatacttatttcattgatttttctctattgtttatgttttagtccctctcacttattcatgttctcttaatcatttccttttttycccaatgctcaggatttaatttactcttattttctagctaatttctagcttcagaaactaatataattaatttcaatctttattctttactaatatgagctatgaatttccctctgacaactgcattagctgtataacacaatggtgatgggttgcattttaatcttcatttacttcaaaatgctttataatttcccttgtgatttattgttttatccatgagttatttggaatcaaaatttcaaaatagttttgtattttccacatttctttctgttattgatttctaagtataagtccgttgtagtcagaaaccat

SEQ ID NO: 388139 - DNA, 543 bp, Homo sapiens
aagcgttgagattacaggggtgagccaccacacccagcttataaattattgaaaaatgcaaaataatcctcagtttccatatgtaagtattgtgtataccatgttatttttgagtgcttccatatgttgaattgaaatacaaygagaagcaagaaatggatgcttggcactactggaaagcaataaaatggtttcaagtatctattatattttagatatctaaggggaaagatttgacaaggtgcaaaaattcatctttttctctcatttaagtatttctgcaggtcagattctgaacatactgcaaaatagtatatatagtctacaaatatatagtctacaatatatccagtggtacaaccttatgagcctctatggcttttggattcagccacattttgtttcaagaatgtatggaaaatatgtgcagaaacatttctctggagcctgaatgtgtttattcacaagagtatatgtttaggattatgggtcacactgtgccagcattgagagccagctagccagggacagaggttagggtga

SEQ ID NO: 388140 - DNA, 609 bp, Homo sapiens
agaaaaagtttttatcttcacttatgccttttctggtgctattcctttctttatgcaggtctgagtttctgactatacaattttccttctctctgaagaacttcttttgacatttcttacaaggcaagtctattggcaacaaatcctcaaaatttttgtttgtctcagaaactgtgttttttattcacttttcaaggataattttgcatgttacagatatctagattggtaaatttgtgtgtgtgtgtgtgtgtgtgtgtgtgtgtgtgtrtttttggtcaaaactttcactctattctcttcttagttgtgtggtttttgagaagttggatataattcttgtctttgctcctatataagtaaggtattttttttcctctggcttttatctgggttttctctttacattagcagtttgaatatgacatgcctaggtgtgatggttttgttttgtttttgtttctgtttttttttttagcatttatcctgcttggtgttctgtgagcttcctgaatctaaagtttcatgcctgacattaatttgggaaaattctcagtcattattccttcaaatatttcttctattcttttctcctttcctttgtctgtt

SEQ ID NO: 388141 - DNA, 622 bp, Homo sapiens
aattatataattgatgcctgttagaaatctagacatacaaatagcacaaatggtctcaattttgcatcctcatttgaagaacagctatttgaatcccaaatactacccaaaacttgacttacttawacttgtctatatctttaaaactttttatatttattgtaacttttctcattcaattaaaacttattgaatatttactatatgctaggcactatgctaggttctagtgattcggtgattaaaaaatgaattccttgccctcagtgagttatctttcttgcagaggaaaatggtgagtagtgtgtgagtagtactgggacaggaagatacaggcacaaaaggaagtcagctcaacccaatcttcatggaatagggaagtgtagtaagggggaaatgaaggaagacttcctggagaagagaaatcctgaattgagtttgcagaagagataaagcatttgtcaggaagataagtagaaaaagagtgttccaggagaggagataggattttcaaagacattgagatgagagaacaagataagtttaaggaaatacatgaggttcaattcacctgagactcaagacagcaaataaacttctgaaagatgagattagacaaata

SEQ ID NO: 388142 - DNA, 622 bp, Homo sapiens
aattatataattgatgcctgttagaaatctagacatacaaatagcacaaatggtctcaattttgcatcctcatttgaagaacagctatttgaatcccaaatactacccaaaacttgacttacttaaacttgtctatatctttaaaactttttatatttattgtaacttttctcattcaattaaaacttattgaatatttactatatgctaggcactatgctaggttctagtgattcggtgattaaaaaatgaattccttgccctcagtgagttatctttcttgcagaggaaaatggtgagtagtgtgtgagtagtactgggacaggaagatacaggcacaaaaggaagtcagctcaacccaatcttcatggaatagggaagtgtagtaagggggaaatgaaggaagacttcctggagaagagaaatcctgaattgagtttgcagaagagataaagcatttgtcaggaagataagtagaaaaagagtgttccaggagaggagataggattttcaaagacattgagatgagagaacaagrtaagtttaaggaaatacatgaggttcaattcacctgagactcaagacagcaaataaacttctgaaagatgagattagacaaata

SEQ ID NO: 388143 - DNA, 625 bp, Homo sapiens
cagggcatgaagtccgtgaaggaagtggtcatcatctttgtattatgctctgggatctacataagtgtaagggaagggactgttgacttgcactccaggtgacaagctaggacttggcaaaggggatctgtttgcagtcgcttatttgtacagctcccccatgaatcctgggacaggatttcacaattatctcttattttgtttttaaaataagttttcagggcagtaaggctcgaataggaggtttgacagggccaccttccttgcctacacccaacatgattcataatgccaaggcctgcctccatcacggtgggtgtgctggtgccttccttctccccacctgcctccatcctcatggctgagttttatagacaggacatatggagagaaagaaaaagaagacttctctttctaaacattctaggaaaagggaatrttttaaccaaactgtcgctttcccccactatttcatgaatggtccagtggcacatgaagctaaccaggtgtcggaaaatatgctctgccttatacatacatgtttcgtcattgtgttcttttaatgaccctgtgaaatgattattatcatctctattttacatgtacaaaaaatagtaagatttgg

SEQ ID NO: 388144 - DNA, 578 bp, Homo sapiens
gttcaaaatagtcatataaaatatatgcatgattccattgaatttgtttctaaaagagaaagttgtcaaaagtcatatctttactatataactacagatgattctcatacaaaagagaaagtttgactgaagacatcacattgtgaggtagaaggttctctgatatacaggaattttaacaggacacagcccaaagatagcctaaagataaagggaaggaggccraatatggaatgccttgaagggagttataaaatcagaccaggacttggtggctaatcaaagaaggtaaggacaataaggttgctttttaatttataatcatggcatgcaagaaataagaagtcaagtccaccatcactgcttttaatgttgataaatggcaaccaaaacaaacccaggggaagccataaattagaattataagcagccattaaaaattatgtacaggtatatcggtgacatagaaagtgtccttgacattgctgaaaagaagaattggccagattaatgaataaacttatttgtgtaacaatgtgtgcttgtgtgtgtgtgtgtgcacgtgcacatgcatgcct

SEQ ID NO: 388145 - DNA, 594 bp, Homo sapiens
atgtaccaactatatatcaatttatactctgtttctcagtgatattatccttttctagtacaaggtatctgttaacatgtgatactgattgcttttccagtctgtggctttggaacagtatggagagtccaacagtgcagtttgytaaagaagtctgccaaaacctagtgttgatttcttccagagcacaatctgtgttataaatgttgtagctagttttctgattctcagctttaccctcatgtgtatcaatttgtaagtttattatacatggaatatgattctgtatatcttagtagccttgttcttttctttcattttgaaaacaaaatctaataatctcattcagaaaagcattatcacatacttgttctggaaaaattatcttgatgtactagagagttctctcctgtgttggaaaaatttggtacatattcaatggctatttggacagagtattcaatattaggggtgagttgctccattatttgacctaataaaattcaattttagatattccacattgtacttagagtaaagctcctccttctcacctgcttctgtgaaatcctctcatgggaaggtttacttgtc

SEQ ID NO: 388146 - DNA, 560 bp, Homo sapiens
acataaaataatataaatcataatataaaatctgcaagtgacatttttaactatccacacatgggcacgcatatgccactgcaatatttggataccacattcattaggttatgaagacataaacactctgccacctgagctatttcacactaaataacagaatataaatcagtgagcaaattgttcatgattacagaacaaatagtaacgagtagactttgattacagtttttggttaaaatattataattttcctactttattaaaacttagcttcttatcattgtgaatatctcaacatatttatactatttatagatgaatwccaaatacattcccagctctctgattttggactgctcaaatgttatgtgcttaatacgatggggaaaagaaatgtagaattggacaatggccccctccaaaacaaattccaaatgtgtaaaacacatttttaaaggcttgggtgccttaactttttttgcataaaatattgcaatacatatatttaataagttagttccctcattcacattgacttaatattattttgttcaact

SEQ ID NO: 388147 - DNA, 574 bp, Homo sapiens
gattataaatttagcttaacatattggccacaatttatcaacataatagtagagaaatacactttctcagtggagccaccctacagatattcctcctggctgaggagtagagcattcaaaagtctgaaaagtaatttgaaaatatcttagaatggtccttattccaaatataggggaataatttatgccagatggctttattttctacaactgccaaggaatacttaaaattttccagtctgcatgttgtatatgtcctccaagtgaaaaatcactaaattaaaaggtttttgtttttgttgtagaggggcagttttacaacggaattaatttgttgttaacttccatctctggaaatcagaataacatattaaagatgtctcacatgtaatcatcttatattcagctggaatttaaagcaacatggcctaggaggctgcttcagawcctaaagcttgagccccatgactgtatcagagtagacacaggtgactttgggactgcttcctactaagaatagtacaaatggtcatttcttcatggccaccaatgaatctgtaagtgccctgcaagt

SEQ ID NO: 388148 - DNA, 488 bp, Homo sapiens
ctgatggatcaatattaatagagtaccacgtttcaggccctagactgttgaattgtatcagatttaaatcctgcagatctgtgtaaaaatggatataatgaatctggtatcaataagagctgtgagtgtggcacaagaaatcacaggatcatagattctcagatgtaaaaatggctttaaaaagtattcaagttgaacgtacaccttttctagatgaggaaataaatttaaaaatcttaagtttccatagtaacaaatagtaaagaatcttgagaacacagtttccctaattcacagtttgcttatatcatagtctgataggaaagggagaaggattttcattttcagtttacatcaatgtccaggaagttaaataactcgaaatactctagataatttgttattttacctaaactttccraagattacatttataattagaatattaaaagtcgagtttcaggacttttcaaaaactgcaactagtt

SEQ ID NO: 388149 - DNA, 488 bp, Homo sapiens
ctgatggatcaatattaatagagtaccacgtttcaggccctagactgttgaattgtatcagatttaaatcctgcagatctgtgtaaaaatggatataatgaatctggtatcaataagagctgtgagtgtggcacaagaaatcacaggatcatagattctcagatgtaaaaatggctttaaaaagtattcaagttgaacgtacaccttttctagatgaggaaataaatttaaaaatcttaagtttccatagtaacaaatagtaaagaatcttgagaacacagtttccctaattcacagtttgcttatatcatagtctgataggaaagggagaaggattttcattttcagtttacatcaatgtccaggaagttaaataactcgaaatactctagataatttgttattttacctaaactttccawagattacatttataattagaatattaaaagtcgagtttcaggacttttcaaaaactgcaactagtt

SEQ ID NO: 388150 - DNA, 633 bp, Homo sapiens
ataatatcccttttgtttctcttcctgtgccaaatctcagttcttacayagacagtgagtaccttgccattgctcagttctggctcttttttctctaatattgaaatgcctcaggattcagcacagcatcctttgttttacatatattttatttagttcaaacaaacagttccagactttaatgtcatttgatgctgcattacagacacatgtactgcatctccacttagctgtctaacagacatgttaggtaacaaggctaaaacataatttaagtcctgcttactctgctgccacctcagatcagctcttccctttctttctatcacaggaaatgacactcacccactttcagacatctgtattaaacacctcagtcctccttgatgcttttgtattctctatactccatagccatccatcagcaagtcagaccattcagcaagatctccactactgcctgtcatctaccgtcacttgttctcctactgtcagaagctgttttcctgtcttttaccatgcttgcccctctattaagtttcactaactcctaatatatccatttagacacatagcaaagcaaccaatgcacaatgctagtggcatagtaaaaatacttcccgaagagcttcc

SEQ ID NO: 388151 - DNA, 463 bp, Homo sapiens
ctattagggagagtacaaaatatcacttggagccaacagtggtaatttgctcagagttaacttttttgatagaaataaagagtgtttcagtagttttattctaggagagccaagagaattctaagggcaccagtttttttctatccatttggtttgtgctttgttgcacatcagtcagaaatgacattttatatcgactattctgttcaattgaataagacacgaagacacagagcttggaaaaagggtattttttccctgacttttttgtttaggcttctgctaaattgctcaaagcttttcttcaactcagactgttaaatttagaaggsacccttagagatcacctggtccaaccccttcatttttcagatgagaaagcagaggcctccagagaaggaccgagatctcattagtactccatggggtgtagagtagagattatgtgcagaacaattagatt

SEQ ID NO: 388152 - DNA, 571 bp, Homo sapiens
tcagatatgtattttgaaataygaatttggaaagctaacacaaaggcaaggcttccagaaggcaatgaggagagagaacctgaagagagatggtggtgaggctggatctaccaaaaacattaagtggatggtaacattgtatcattaacagaaaggaaacatgtattttataaacactggtgatattggtactagtatcattgttctgctgggaaaaattgtcatcctgacttagtcctaggtcccaagtatggctaccacatttccacacagataaaagttacaattgtacctgtagtcatggcccactttctcagaaaatactttactttagatatgccggagtgtttcactcaatattaacctgaatctcccaatttttctccaagaaaccatgaatgataacctagacctagaaaattgtgggagggtagtaaggtgctaattgctaacctctaccagaaagcaagaatgttacaataagaaccccgattcaggtattccttgatttcttgggctgatttttatcggtgacatagactccagtgaccattctctaatccacttcagg

SEQ ID NO: 388153 - DNA, 571 bp, Homo sapiens
tcagatatgtattttgaaatatgaatttggaaagctaacacaaaggcaaggcttccagaaggcaatgaggagagagaacctgaagagagatggtggtgaggctggatctaccaaaaacattaagtggatggtaacattgtatcattaacagaaaggaaacatgtattttataaacactggtgatattggtactagtatcattgttctgctgggaaaaattgtcatcctgacttagtcctaggtcccaagtatggctaccacatttccacacagataaaagttamaattgtacctgtagtcatggcccactttctcagaaaatactttactttagatatgccggagtgtttcactcaatattaacctgaatctcccaatttttctccaagaaaccatgaatgataacctagacctagaaaattgtgggagggtagtaaggtgctaattgctaacctctaccagaaagcaagaatgttacaataagaaccccgattcaggtattccttgatttcttgggctgatttttatcggtgacatagactccagtgaccattctctaatccacttcagg

SEQ ID NO: 388154 - DNA, 571 bp, Homo sapiens
tcagatatgtattttgaaatatgaatttggaaagctaacacaaaggcaaggcttccagaaggcaatgaggagagagaacctgaagagagatggtggtgaggctggatctaccaaaaacattaagtggatggtaacattgtatcattaacagaaaggaaacatgtattttataaacactggtgatattggtactagtatcattgttctgctgggaaaaattgtcatcctgacttagtcctaggtcccaagtatggctaccacatttccacacagataaaagttacaattgtacctgtagtcatggcccactttctcagaaaatactttactttagatatgccggagtgtttcactcaatattaacctgaatctcccaatttttctccaagaaaccatgaaygataacctagacctagaaaattgtgggagggtagtaaggtgctaattgctaacctctaccagaaagcaagaatgttacaataagaaccccgattcaggtattccttgatttcttgggctgatttttatcggtgacatagactccagtgaccattctctaatccacttcagg

SEQ ID NO: 388155 - DNA, 558 bp, Homo sapiens
taacataatttttgttattcttcctcctcagtattggttagtgatggaatgcgagaataaagctgaatttatctatkttcatttatgattaaaaaaagataaattctaagtaggtattttaaaagatagtttgacatatacactcccagtgttggacttgaaattaagaggtcagctggtattggtatgaacattaacaaagacctacaggctaaacaagaaatagtttagcctatttctcatttgcctgtgtataaagattatggatattctcacatattcacaggcaaacaatgaaggcacaaaatccagaactggtactattctattttcttgaactattcatgctaaaattatatcaaaatttgcttttttactccttaaaactttctgcatatccgttacctctttgtgtagtgcccattctgcttattaaacatttctagaatctacagtgcctacaatttagcaaaaattttatctatctatatagctatatctactattccttaagacccaactcaaatgcttcaggcaaagaaagcatcatagggtgtc

SEQ ID NO: 388156 - DNA, 558 bp, Homo sapiens
taacataatttttgttattcttcctcctcagtattggttagtgatggaatgcgagaataaagctgaatttatctatgttcayttatgattaaaaaaagataaattctaagtaggtattttaaaagatagtttgacatatacactcccagtgttggacttgaaattaagaggtcagctggtattggtatgaacattaacaaagacctacaggctaaacaagaaatagtttagcctatttctcatttgcctgtgtataaagattatggatattctcacatattcacaggcaaacaatgaaggcacaaaatccagaactggtactattctattttcttgaactattcatgctaaaattatatcaaaatttgcttttttactccttaaaactttctgcatatccgttacctctttgtgtagtgcccattctgcttattaaacatttctagaatctacagtgcctacaatttagcaaaaattttatctatctatatagctatatctactattccttaagacccaactcaaatgcttcaggcaaagaaagcatcatagggtgtc

SEQ ID NO: 388157 - DNA, 558 bp, Homo sapiens
taacataatttttgttattcttcctcctcagtattggttagtgatggaatgcgagaataaagctgaatttatctatgttcatttatgattaaaaaaagataaattctaagtaggtattttaaaagatagtttgacatatacactcccagtgttggacttgaaattaagaggtcagctggtattggtatgaacattaacaaagacctacaggctaaacaagaaatagtttagcctatttctmatttgcctgtgtataaagattatggatattctcacatattcacaggcaaacaatgaaggcacaaaatccagaactggtactattctattttcttgaactattcatgctaaaattatatcaaaatttgcttttttactccttaaaactttctgcatatccgttacctctttgtgtagtgcccattctgcttattaaacatttctagaatctacagtgcctacaatttagcaaaaattttatctatctatatagctatatctactattccttaagacccaactcaaatgcttcaggcaaagaaagcatcatagggtgtc

SEQ ID NO: 388158 - DNA, 558 bp, Homo sapiens
taacataatttttgttattcttcctcctcagtattggttagtgatggaatgcgagaataaagctgaatttatctatgttcatttatgattaaaaaaagataaattctaagtaggtattttaaaagatagtttgacatatacactcccagtgttggacttgaaattaagaggtcagctggtattggtatgaacattaacaaagacctacaggctaaacaagaaatagtttagcctatttctcatttgcctgtgtataaagattatggatattctcacatattcacaggcaaacaatgaaggcacaaaatccagaactggtactattctattttcttgaactattcatgstaaaattatatcaaaatttgcttttttactccttaaaactttctgcatatccgttacctctttgtgtagtgcccattctgcttattaaacatttctagaatctacagtgcctacaatttagcaaaaattttatctatctatatagctatatctactattccttaagacccaactcaaatgcttcaggcaaagaaagcatcatagggtgtc

SEQ ID NO: 388159 - DNA, 606 bp, Homo sapiens
aaattgtatcataattttaacattcttgttatgccttcttatggataattgggtttggttgttgcatattagttcatgaaaatattaaagaatagtataatcttatggtgtaagaatctaacaaaagccaagctgagtttttctgaataattccaacaaaaaaggcaaaagatagaccaaaattttaacatacagtatgaacagttaataatagagtgagataaaaatgcatttccttttttctcagactaaaagtatgcaattctatgaaggaaaaaaaacaaggaatagataaaataaattcaaactaaaataaataatgtttttaaaggcctgaatgtggacagtgttyacgtatctctcatagctcagaaatctattagcgttcaaacacccatcactttctccattccattgagattgatagaccttgtttaataagtcattattatcctgctcatcaaaaagcactattgagcacttaattatgtgtggtatcgtacttgatgctatatgacaaatactacatagatatggcccttaatttttacaacctaagaatttaaaagaatggggtgttttataatattgcatttgttaaatagt

SEQ ID NO: 388160 - DNA, 606 bp, Homo sapiens
aaattgtatcataattttaacattcttgttatgccttcttatggataattgggtttggttgttgcatattagttcatgaaaatattaaagaatagtataatcttatggtgtaagaatctaacaaaagccaagctgagtttttctgaataattccaacaaaaaaggcaaaagatagaccaaaattttaacatacagtatgaacagttaataatagagtgagataaaaatgcatttccttttttctcagactaaaagtatgcaattctatgaaggaaaaaaaacaaggaatagataaaataaattcaaactaaaataaataatgtttttaaaggcctgaatgtggacagtgttcacgtatctctcatagctcagaaatctattagcgttcaaacacccatcactttctccattccattgagattgatagacsttgtttaataagtcattattatcctgctcatcaaaaagcactattgagcacttaattatgtgtggtatcgtacttgatgctatatgacaaatactacatagatatggcccttaatttttacaacctaagaatttaaaagaatggggtgttttataatattgcatttgttaaatagt

SEQ ID NO: 388161 - DNA, 591 bp, Homo sapiens
tttgctgtagcgtggatggcaaggacagtccttctctgatgttctcagaaaatccaatctttgggttctagattgtgaaggaattgtcctcagtgaaccataaaaagtgttctttacctggtgaaaatatactatagcataataatctaccactttaacaaaagccctcttgcatgggaaagcttttatataaccagaaaacatgcattgaaaatgacaactgaatgaaatctctttataaatgtttaaatggcccatcaagtagccaaatayacctgaagctttgattgtcttcccaggaatatagaaccaaacatttgttttcaactatttccacaatttataagtcaccacatcaatatattcaatttgtattatttttttcttttttacgacaagtcatgaaatatagaacctttaataacaaaagctttaaggactcaggaaggacaaggtggctgtcctggttcttcatgagtccatgattaacattggacatttgtccttcttgaataccagttgtttctccaacttagatccatagcactgataactaatgggttatcatgggtaatttgacttagaccacgg

SEQ ID NO: 388162 - DNA, 493 bp, Homo sapiens
tctgtcacccaggctggagtgcagtggcccaatctctgctgactgcaacccccgccccccaggttcaagtgattctcctgcctcagcctcccaagtaggtaggattacaggcatgctgtaatttttgtactttttagtaragatggggtttcaccatcttggtcaggctggtcttgaactcctaacctcgttatccaccctccttggcctcccaaagtgttgggattacaggcgtgagccaccgtgcccagcctgtatggatgttttaataatattgattcttctaatccatgaacactgaatatcattctggtttttggtatcctactcaatttctttcattggtgttttatagttctcattttaaagatctcttacttcttttgttaattcctaggtatttaattttatttatggctgtagtaaatggggttacttttaaatttatttttcagatttgttcaatattgtcatatagaaatactactgattt

SEQ ID NO: 388163 - DNA, 615 bp, Homo sapiens
ataactcttaactgttcagcttacctgctttacatctaggtaaggcctggaacatgtgaagttagatgctgaaaagagtcagacctcgtctgcatttctctctgggtcctaggctccacacttagtacataattaaaatccttacttaccaacgttttcacccaaagtaaaagttgctaagaattaacattgtaatatgtaattgagactactggaaaagtaggtttacatgcaaggtgtgtaaggtgaatgaaatgtgttttttataagatattataagaatgtacaggaatgtacatttttgcctaggttatagggttaaaggattgtttaaaataaagctaaaggtttgaacaaggtgtgaaaggtttataaaaaattaagtgtaaaagagtctatgtttgaacatattggctaaagttaaaatggtattcagttttttccattaattggatcaaaggcaatggcaacaaaagccaaaattgaaaaatgggatataattaacctaaagagcttctgcacagcaaaagaaactatgattagagtgaacaggcaacctacagaatgggagaaaatttttgtaatctmtccatctgacagagggctaatatctag

SEQ ID NO: 388164 - DNA, 568 bp, Homo sapiens
catacaggagaactctggctggcatctggcgggtacccctctgggacgaaacttccagaggaaggaacaggcaacaatctttgctattctgcagcctctgctggtgatacccaggaaaacagggcctggagcgtaccttcagcaaactccagcagagctggagcagaggcctgactgtgagaaggaaaactaacaaacagaaaggaatagtatcaacatcaacaaaaaggatgtcaacaccaaaaccccatccgaaggtcaacaacatcaaagaccaaagctagataaatccacaaagatggggagaaaccagcacaaaaaggcttaaaattgcaaaaaccagaacgtctcttctccaaaggatcacaacttcttgccagcaagggaayaaaactggatggagattgagtttgatgaattgacagaagcaggcttcagaacttgggcaataacaaactcctctgagctaaaggagcatcttctaacccaatgaaaggaagctaagaaccttgaaaaaagttagaccaattgctaactagaataaccagtgtagagaagaacataaatg

SEQ ID NO: 388165 - DNA, 632 bp, Homo sapiens
aatggccaaatgaagacagaatatttattataaacaataattagattggtacaaaaatataaaggcaaatagttaattgattatataattgaatcattgcttctgtaggacatggatttctggaagtgtctcaaatccttgttttgttttaggagttaactgaaggtgggaytggggaggtgattcctagacttctcagatcaaaacacctaggccaacaaccagacactttaatccatctacatatgagatcaaataccatattacattccttagctgtttttatgcttgggaccacaaaaatcagtatttcctcttttaaatattacaaagcactttactcacattactttttttacttcatttcattctttattataacatgttatgaagaaaaagatttgtaaagcatcaaaatctttgtaatgagatggtcactgaatagtgatttgaccttggtaattttgtgttcctgagtttcattatttgtaaaatgagaccagactaggcatcagtgaaacttgcatggtgtgaagattctttgattatattaggatttccagtggggaataacacatttaaaaatctagtataaagtttatggaatagagacatgtaatgtggaacacctc

SEQ ID NO: 388166 - DNA, 547 bp, Homo sapiens
tttggagaaatacacatgaggaaggtaatattatttttgacattttgcacacttgagaagcataaagtaaacayagattgtagcataacacttccattgtcccattctctccctactcttttctatgtctttttttttttttggtactcatctcatttgccttttttttttcattttagactttttttcccagcgccctgcttcccctcatcttactcattaagtttctttttgttgatattttggggtaaggtgagaagaaagattcaagagaaaaggggatagatggaatgtcaacttcagaatgggagttgagaaagccattgactactgcctcctttaagacagagatagtacaaatgagacagcaaatgcttctcttaagtcaatgggctgtaacatgaagacttgcatcttcgagattgtgctgcaataatgctatgctagaaaaatcacctatgttggaaatgacagctgctaaattccaccagagtaaaacactaatgttgccttgcaaagatttccagattaccaagacttgatagtc

SEQ ID NO: 388167 - DNA, 550 bp, Homo sapiens
cccctttcttccagcagttaatttgtctagataaattgcagctttctatacctaggaatgttggattttccaaccacataagaaagtacctgacctagcgtgcttaccaaagggcagaaggagactcagaagagcaaaagagaggccacatgagccaacacaatttttatatggagtttctgtttctgggtaatttggtgtaatgggtgatgtttcttctcaactctttcaacagatcagtaacttctcccaaggagtaaagctratgagtggagtgcagagagaaggatgatgtgtttcttgaatactgtacgctcctggcatttcacatagaagtctttcatataataataagatgaaaaaaataaggggctgcaatttagttactggcgttggatccctactgcaaatgacaatgttatgtgtcaataaaattgaatcttaatgtcacattcaggatcataggttaaaccagtgattttaactagatgacaacatttttccgattttgtataagaaatctaaatttgtacacaatatttttttctaa

SEQ ID NO: 388168 - DNA, 550 bp, Homo sapiens
cccctttcttccagcagttaatttgtctagataaattgcagctttctatacctaggaatgttggattttccaaccacataagaaagtacctgacctagcgtgcttaccaaagggcagaaggagactcagaagagcaaaagagaggccacatgagccaacacaatttttatatggagtttctgtttctgggtaatttggtgtaatgggtgatgtttcttctcaactctttcaacagatcagtaacttctcccaaggagtaaagctgatgagtggagtgcagagagaaggatgatgtgtttcttgaatactgtacgctcctggcatttcacatagaagtctttcatataataataagatgaaaaaaataaggggctgcaatttagttactggcgttggatccckactgcaaatgacaatgttatgtgtcaataaaattgaatcttaatgtcacattcaggatcataggttaaaccagtgattttaactagatgacaacatttttccgattttgtataagaaatctaaatttgtacacaatatttttttctaa

SEQ ID NO: 388169 - DNA, 564 bp, Homo sapiens
tttatttctttctcttgccaaattcctctgtctaggactgctagtattgtgttgaataggagtggtgagagtgggtgtccttgttccagttgttagagggaatgctttaaagttttccctattcagtgtgatgttggctgtgggtttgttatatatgactagttatttttagctatgtttcttcaatgcatattttgttgagggtttttatcatgaaaggatgttgcattttatcaaatgcttcttctgcatctttgagataatcatatggttttgcttttaattctgtttatgtggtgaatcatatttattgatttggatgtgttccaccatccatgcatccctggaataaaccaataaaacccactcgatcataatgtatatyattattattttttttttaggggagtctcactctgttgcccaggctggagtgcagtggtgtgacctcgcctcactgcaacctctgcctcccaggttcaagtaattctcctgtctcagcctcctaagtacctggggttttaggtgcttgccatcatgcctgactaatttttgtatttttag

SEQ ID NO: 388170 - DNA, 417 bp, Homo sapiens
ttcctttggtatcaatttctaattttattcaactctggtctgagaagatacttgatatgactttgatttttwaaaaatttattgagacttgctttataaccaaggatatggtctattttggataatattacatgcacagataagaaaaatgtatattcttcagttgtttggtagtatgttctgtaatgtcttctaggtccatttggttgaggccagttgtagtcttttttcagcttagcaagtgtatctgcaatgcttggcttttggccccctttctctatttttaaagccatcaacagtgagttgagtcctccttacgttatatctgccttcatctttcacttttaagaattcttaccattatacagggcccacctagttaatccaggctgatctctctatgttaaggtcagctga

SEQ ID NO: 388171 - DNA, 588 bp, Homo sapiens
tcttttatttcgttgagcagtggtttgtagttctccttgaagaggtccttcaaatcccttgcaagttggattcctaggcattttattctctttgaagcaattgtgaatgggagttcactcatgattttattcatttcaaaaaacgttttgatttctaccttaatttcattgtttagccaaagatcattcagaaaacgttagttagtttccatgtctttgtgtagttttgagattttcctttggtatcaatttctaattttattcaactctggtctgagaagatacttgatatgactttgattttttaaaaatttattgagacttgctttataaccaaggatatggtctattttggakaatattacatgcacagataagaaaaatgtatattcttcagttgtttggtagtatgttctgtaatgtcttctaggtccatttggttgaggccagttgtagtcttttttcagcttagcaagtgtatctgcaatgcttggcttttggccccctttctctatttttaaagccatcaacagtgagttgagtcctccttacgttatatctgccttcatctttcacttttaagaattc

SEQ ID NO: 388172 - DNA, 588 bp, Homo sapiens
tcttttatttcgttgagcagtggtttgtagttctccttgaagaggtccttcaaatcccttgcaagttggattcctaggcattttattctctttgaagcaattgtgaatgggagttcactcatgattttattcatttcaaaaaacgttttgatttctaccttaatttcattgtttagccaaagatcattcagaaaacgttagttagtttccatgtctttgtgtagttttgagattttcctttggtatcaatttctaattttattcaactctggtctgagaagatacttgatatgactttgattttttaaaaatttattgagacttgctttataaccaaggatatggtctattttggataatattacatgcacagataagaaaaatgtatattcttcagttgtttggtagwatgttctgtaatgtcttctaggtccatttggttgaggccagttgtagtcttttttcagcttagcaagtgtatctgcaatgcttggcttttggccccctttctctatttttaaagccatcaacagtgagttgagtcctccttacgttatatctgccttcatctttcacttttaagaattc

SEQ ID NO: 388173 - DNA, 588 bp, Homo sapiens
tcttttatttcgttgagcagtggtttgtagttctccttgaagaggtccttcaaatcccttgcaagttggattcctaggcattttattctctttgaagcaattgtgaatgggagttcactcatgattttattcatttcaaaaaacgttttgatttctaccttaatttcattgtttagccaaagatcattcagaaaacgttagttagtttccatgtctttgtgtagttttgagattttcctttggtatcaatttctaattttattcaactctggtctgagaagatacttgatatgactttgattttttaaaaatttattgagacttgctttataaccaaggatatggtctattttggataatattacatgcacagataagaaaaatgtatattcttcagttgtttggtagtatgttctgtaatgtcttctaggtccatttggttgaggccagttgtagtcttttttcagcttagcaagtgtatctgcratgcttggcttttggccccctttctctatttttaaagccatcaacagtgagttgagtcctccttacgttatatctgccttcatctttcacttttaagaattc

SEQ ID NO: 388174 - DNA, 591 bp, Homo sapiens
gtaacctattttatttacaggttccaggcattaggatgtggaaatcttttgtggggtggcattattctatctaccatcacccccacaacagggacatacacacacacacacasacagacaaaacatacatatatacacacatatgtgaaaaaagattctaaagctgagtatcctaatattaatagtaggggactgaattatgctgattatattttcttcatatttctactatccagattttcctataataaatacaactagaaatatttaataaatgctatttttaatgtaagtttctaaattatatttgttactcatctactggatactactgagacaaatatcattcactgaggtttataacttgggcacttagaaagcaatttattttaaaagttgatggtgcgctgagtgaatatcccatgctcagaggcttaggaatgaggccaaccaggagagaagatctagccttctcagccattgatttctgcacaatcaattgactcagatcatgcagctaatccaattcagtagttaagaaaattgaaaagaccagctgtgtggtttctaggcccagtattttttttttaa

SEQ ID NO: 388175 - DNA, 591 bp, Homo sapiens
gtaacctattttatttacaggttccaggcattaggatgtggaaatcttttgtggggtggcattattctatctaccatcacccccacaacagggacatacacacacacacacacacagacaaaacatacatatatacacacatatgtgaaaaaagattctaaagctgagtatcctaatattaatagtaggggactgaattatgctgattatattttcttcatatttctactatccagattttcctataataaatacaactagaaatatttaataaatgctatttttaatgtaagtttctaaattatatttgttactcatctactggatactactgagacaaatatcattcactgaggtttataacttgggcacttagaaagcaatttattttaaaagttgatggtgcgctgagtgaatatcccatgctcagaggcttaggaatgaggccaaccaggagagaagatctmgccttctcagccattgatttctgcacaatcaattgactcagatcatgcagctaatccaattcagtagttaagaaaattgaaaagaccagctgtgtggtttctaggcccagtattttttttttaa

SEQ ID NO: 388176 - DNA, 591 bp, Homo sapiens
gtaacctattttatttacaggttccaggcattaggatgtggaaatcttttgtggggtggcattattctatctaccatcacccccacaacagggacatacacacacacacacacacagacaaaacatacatatatacacacatatgtgaaaaaagattctaaagctgagtatcctaatattaatagtaggggactgaattatgctgattatattttcttcatatttctactatccagattttcctataataaatacaactagaaatatttaataaatgctatttttaatgtaagtttctaaattatatttgttactcatctactggatactactgagacaaatatcattcactgaggtttataacttgggcacttagaaagcaatttattttaaaagttgatggtgcgctgagtgaatatcccatgctcagaggcttaggaatgaggccaaccaggagagaagatctagccttctcagccattgatttctgcacaatcaattgactcagatcatgcagctaatmcaattcagtagttaagaaaattgaaaagaccagctgtgtggtttctaggcccagtattttttttttaa

SEQ ID NO: 388177 - DNA, 445 bp, Homo sapiens
tgttctgttattcttgtaaaacatagaaaatggctcaattaggttctgtgctacagaatgcataccaaccactattagaattttaactagtttcctctttgtgaaattaatcctttttaaaccataaaatgagacctttacttctccctacattcttattaattgcacagtacttcacaggctcttgttgaattgaagaaaaaaaattagtcaagaaaaggtcacttctttttttgccggttgcatgttaatgagtcaggaacacaaggtgcagcttgtgaggtgaawtggactgtggtaggtaagaaatgataaaaacatatatggaatgaggaacatagcaagaacatgaggtcccattatcacagctaggaaggtttagctcccccttgaacttttgtctctctcctctgatgtgtggtaatttgtggttccgaaacacctg

SEQ ID NO: 388178 - DNA, 582 bp, Homo sapiens
gaagtgcaattaagtgaggtctgcctgtaatacacttatactgctggggtggatactgcgatgcactgtgcagactcccccttcgttattgtaggacttattacccacacgctgggtgtgtcactggcagacagccctcaggcaccactgttttccagaaattgcctcatttaaaagttatctccactaatatcagcagtggtgagaggtataaagcccttattctcttcctaatcttcaggactgttccaaagaacctgctactccaaactactctgaatgcacatctcatcttcagagcagaattaggtgaggcattagattgaaattgtgttgctgatcaatttttccttttgctcaaatgtgtttcctctccttcctgtccataaatttgagcccaaaaacattctttaataagctacaagttaatttctgtattacagttggcttkccagggaaccctacctgcaccattgctatttatttatttctatgtttcagacattattattgactggtggctatgattcaggaacatttaattctcacatcatagttcttgcctatcccatgtgcctaatt

SEQ ID NO: 388179 - DNA, 582 bp, Homo sapiens
gaagtgcaattaagtgaggtctgcctgtaatacacttatactgctggggtggatactgcgatgcactgtgcagactcccccttcgttattgtaggacttattacccacacgctgggtgtgtcactggcagacagccctcaggcaccactgttttccagaaattgcctcatttaaaagttatctccactaatatcagcagtggtgagaggtataaagcccttattctcttcctaatcttcaggactgttccaaagaacctgctactccaaactactctgaatgcacatctcatcttcagagcagaattaggtgaggcattagattgaaattgtgttgctgatcaatttttccttttgctcaaatgtgtttcctctccttcctgtccataaatttgagcccaaaaacattctttaataagctacaagttaatttctgtattacagttggctttccagggaaccctacctgcaccattgctatttatttatttctatgtttcagacattattatwgactggtggctatgattcaggaacatttaattctcacatcatagttcttgcctatcccatgtgcctaatt

SEQ ID NO: 388180 - DNA, 612 bp, Homo sapiens
tatattcaattgctatttttctttcagtcgtttaaaaaattctccactgaaatcattgggacttgaagtattttttttggaaggattaattaaggacttaattcccttaataaataaaagactactcaatttttaaattttttcttctgtcagttttggcaggttttgttattccaaaatttgtccaattcatctaggttttctattgtttggcacaagtccttcaaatgctttattaagatctctttgctggttttttttttggctcttaaataataccttcttgctcattsctgatattcctgctttttctctttttaaaattttactagatgttagtcctttcaaagaaccaacttttggcttatctttttcttgactgggttttttttctattttattaaattctgtttttatctttgtttctcttcaactcttgcagagttgaagttacttgcagagttaattctttagaacagttgagagggacagtggtaccagaatctgggtgctttggtggaatcttgaaagtagggaagcttgcctttccctcaggagtgctgctgagtatctagctctgattgctttctatgaattgtagacttatctttc

SEQ ID NO: 388181 - DNA, 617 bp, Homo sapiens
atgtttggtaaagattcttttgtaagcatcctctaataatttaaagatattaccttatatttctcttttgctgaggggttatattataattggatgttgatttttattaaatactttcactgcaactattgagatgattatatgattttctttttcattcagttaatggggtaaattatattgagtagttttttaataytaaatctgctttttattccaggaccaaatatgaactggttatagtatattaactttttctatatttttctaaattttgtttgttaatatttatttagaaatttttacatatatgtttattattgatattaacataatttggttttattgatttcctctattgtagatttgccttaaatttctttaatttctacattattcatattatttccttctgtctatgctgtttgtgtttataactctgttctatcattaactttttgatatttaggccatttgcttttagctcttcctgtttttaatatatgtggctattcattagtctcttggcacaatttctgttgcactccatgcaattatgctagaaaacaatagctattagaaaatcactattgttttctagtacaattgcgtattct

SEQ ID NO: 388182 - DNA, 589 bp, Homo sapiens
tttctttctaatttttgattagttataattttcaaacaatttttgatacattttcaaatttattgatatgtgaccagtaatgtccagtcattgcttagcttctccaatatccctaatattgtacttttctcacagcagatgttgacaatttgtgtcttttctttgctcattctcatgagaagtttgtcagtgttattagtctttttaaaaaacagactttggtgttactcattctctctataacttctgccttatatttaatatgttctcccttccactttaatgaacttaacttatcattctttttaawtttttttttttttttttgagatggagtttcgctcttgtcacccaggctggagtacaatggcacgatatcagttcactgcaacctccacctcccgggtccaagctattctcctgcctcagcctcccaagtagctgggattacagacatgtaccaccacacctggctaattttgtctttttgatagagactgagttttaccatgttgaccaggctggtctcaaactccagacctcaggtgatccgcctgccttggcatcccaaattgctgggattgtaggt

SEQ ID NO: 388183 - DNA, 604 bp, Homo sapiens
ctaacattaaaaatttccacttatccaagtcaccattaaggaaatggaaaggcaagccacactgggagaaaaatattcatatcttacaaagaacttcactccaaaatatttaagaggtattataaatcaataatcaaaagattaacacaacttaatataatgagcaaaagaagcagatacttcacaaaagaaaaggtatagtaatagccagagagaaaaatgaaaagrtgttcaacattatcaggaaaagacaaattaaaaccagataagactctacttaccacctaaggaaatagttaaaacttaaaaggactgacaattatcaatttttggcaagaaagtggaacaaatgaaccttctcacacacattgctgatagggctataaaattttgcaaccactttgaaagtctgtttggcaatatattttaaaataaagcacattactaccatacaactcagcaataccattcatagacatttacccagcagaaatgaaaatatatgtcaaagaaaagacttgagttgaataattgtaacagttttattcataatagcccaaaacaacacaacccaaatgttcacaggaaacagataaaatgtttt

SEQ ID NO: 388184 - DNA, 585 bp, Homo sapiens
gttgacagttttagagggttatttttttttttgtttacttaaaaaaaagtcaatgggccatgaatttatttccacatcttctgaaatgaacaaacaaacatttataaagactttaactaatttgatcaaaattaaaactatttaaattacgacattgctagagatcaagcatttccatggagttcatttgttgctgaaactttgagatttaatttcacttattatagtcaagtatctccatgttcctttttcttaaattttgtctactatgctacaatataagaatgttctttaattctatcattcacattaaaggtattctcaaatggggtgttgactggggagctaaaaaatataaaataggccaygggtggtggctctcacctgtaatcccagcactttgggaggccgaggtgggcgggtcattaggtcagtagttcgagaccagtctggccaacatagtgaaaccccgtctctactaaaaatacaaaaaattagccaggtgtggtggtgtgcgcctttaatcccagctactcaggaggctgaggcaggagaatcacctgaacccaggatgcggagaggttg

SEQ ID NO: 388185 - DNA, 388 bp, Homo sapiens
ttggattgaagagcaatgtgtgatccaggtattaaaactcttcagcaaatgagggggtatatgtcagtgaccagtctcctggtcaattgctaaagggagtgyaccatataatggcatgatttgtaatctggaaataatagtctctatatctgtgggcatgttctgatatccagtccttattggccttgtccttcagtgacatggtgtaatgtcagtcatcattccaatgggctataccatagatcttcatattggaaaactcttttattgcttaactgacaaattcagatattctcatttaattataatcagcaaaccttctagccttctctttacccatatatctctccctatcttccttgcaccctataccctcatcacagtcact

SEQ ID NO: 388186 - DNA, 598 bp, Homo sapiens
taacatatacttattattttatttatgtgaaattcaggaacaggctaaattaatcaatggtgataaaagttagaatgaccattatctcaggatgaagaaaacaggacttaaggtactttccagtaattatgatctctatggtcttccagaatcaggtataggctgtgggtgagtgatctggaaaatggtaaaaatttgggtaatggctcaatatacaactaaagatttgtgtacagggtagaaaggcagaatcctatgagtcgaaggaggtcattttggccactgactccagctaaattgtgaggcagatctgtttcttgctccccccgctccctgatttagcatgttaattcaccaaacrtttactgaaccgcttttgggtatcagttcttttctctttttcttcctcatcttctctttaatttttattcccattcgctttttttttattcttctgattttctaactgataattcagaaaaactttctctggctcagcttttgattccaactcctttcaaacattttatattgtcttatatgaaatattatcactttgagtaagtctcattggagccgcttcttataacaggaattt

SEQ ID NO: 388187 - DNA, 598 bp, Homo sapiens
taacatatacttattattttatttatgtgaaattcaggaacaggctaaattaatcaatggtgataaaagttagaatgaccattatctcaggatgaagaaaacaggacttaaggtactttccagtaattatgatctctatggtcttccagaatcaggtataggctgtgggtgagtgatctggaaaatggtaaaaatttgggtaatggctcaatatacaactaaagatttgtgtacagggtagaaaggcagaatcctatgagtcgaaggaggtcattttggccactgactccagctaaattgtgaggcagatctgtttcttgctccccccgctccctgatttagcatgttaattcaccaaacatttactgaaccgcttttgggtatcagttcttttctctttttcttcytcatcttctctttaatttttattcccattcgctttttttttattcttctgattttctaactgataattcagaaaaactttctctggctcagcttttgattccaactcctttcaaacattttatattgtcttatatgaaatattatcactttgagtaagtctcattggagccgcttcttataacaggaattt

SEQ ID NO: 388188 - DNA, 653 bp, Homo sapiens
aataggggccatgtttgacaaacacacagctaacatcatattgaacaggaaaagactgaaagtctttcctctaagatctggagcaagacaaagatgcccactttcaccgcttttattcaacataatactggaagtcctggccagaacagttaggcaaggaaaagaaataaagaccatttaaattgtaaagcaataagtaaaattaactttattagtacatgacatgatcgaatatttagaaaaacatagattctaygaaaaaaactgttagaactgataaataaacacagtaaaattccaaaatacaactcaacatacaaaaagtcagtaacatttatatatgcaaatagtgaacaatatgaaagacaaattaaaaaaccatttataatagctacaaagaatataaaatacctagaaattaatttaaccaaagaagtgaaagatcagtacaagaataactataaaacattgatgaaataaattgaagaggacacattgaaagatattccatgctcatggattgcaagaactaatattcttaaaacgccaacactacccaaaatacttcccaggaaaaaatggagtggggcaagtgttgaaaaactacctgttgggtgctacattcactatttgggtaacaggttcaatcgaag

SEQ ID NO: 388189 - DNA, 526 bp, Homo sapiens
ataatgtgcattcagaaactaaccatatattcaaacatattttaaagacagatgtagagaaaccaagtaaaaaactatgcgacattaaattctagtcatacttaaagtgcttcactgcttgaaaatgagacaggattctgaactaatattttggaggttccacttcttgaaaagctattaggattctgaactaatatttgggaggttccactgtttcaaaagatagtaggattctgaactaatatttaggagktttctaaaagaataatatagcaatttgatttctacagaataaatgtttacagatcatagaaggagactatgtgaacagtatttgtggaagcaatcactacagttggaaggtacgaggccttgcgttgctgaagaattcttgccaaaacaagctcacaatagttcatagaagacagttcataatattattatgagaaacaacagacaattcggtaaaacaggaagtgaaaatatgtttaataagtgtctatgttatttgggaaatggcgtgcct

SEQ ID NO: 388190 - DNA, 585 bp, Homo sapiens
aatactctgacactatcacttgatttttaatgtcttgataattcttgacccaactctgcctttgttggtgcaatgcttaatgcagtctcttgagaagagttgtttattcttcagtctcttagaactaaaaatttctgtttgctttggctgtttcttcagaagcgctttaaacactaatacattatttaaagtaaaaacacaagtatgaacctatttctattggatattttatgttcatttgtttgcagagacagaaatatgagaacacaatcattatctttgtatatgcaagtaattcgagttgccagaggccctttatgtttactaaaacagggatggcttccaataatctgtgagagattatattaaactatggrtctctagatacaatttccttcctccattctatcacttttttctttctgatggtagattttcaaagattatgtgacaataagccttcagtgttgcatcattttattgggaagtttttatttcccacggggtaatattctttctggaaccacatttagagatcatttctaagggttgccttctttaccttgggagatctcaactagaaag

SEQ ID NO: 388191 - DNA, 371 bp, Homo sapiens
gaactattacccccattttatatataagaatgctgaaaaacaaagaggtacaacatacttgccaaggacacacagcagctagatattagagccatgattgaaacccmggcattttggttctggagaccacatgcttaagcattatgctttatcactttaagaaatttttcatgagagtcagagctctcagtctaatgggaccacagttgtgaaagaattaacaataataacacacatgagctatatagtagatgctgtagcctgaaggatatatgcttcaaaatgctgggattcctcagctgtcaattcttttcaaaattgctccaaatgaaaagaatcaccttgcccaaagtcagacccctctttaaaat

SEQ ID NO: 388192 - DNA, 594 bp, Homo sapiens
atggggggtggggcagagccttttcatgggaaagtactaatattctgtacttctaaaggattaatatctttttcccccacaaaagaawtcatgcatctattttcaataataccaattcttatccgtgttatttggttattcctagtaataataataaattataattatttagaaacctgtagaaaaaaatgtattttccagacaccaaacttaaattatgaattttaggcttgatactgtaactgtccaacaagtttaccttacccactgcctagacagagccgatttatcaagacaggagaactgcaatagagaaagagtttaactcacacagagccagctgtacaggagaccagagttttattatcactcaaatcaatctcactgagaattcagggactgggatttttaaggataatttggtggatagggggccagtgagttgggagtgctgattggttgggtcagagataaaattatagggagttgaagctgtcctcttgcactgagtcagttcctgggtgggggtcacaagaccagatgagccagtttatcaatctaggtggtgccagctgagcaatcgagtgcagggtc

SEQ ID NO: 388193 - DNA, 594 bp, Homo sapiens
atggggggtggggcagagccttttcatgggaaagtactaatattctgtacttctaaaggattaatatctttttcccccacaaaagaaatcatgcatctattttcaataataccaattcttatcygtgttatttggttattcctagtaataataataaattataattatttagaaacctgtagaaaaaaatgtattttccagacaccaaacttaaattatgaattttaggcttgatactgtaactgtccaacaagtttaccttacccactgcctagacagagccgatttatcaagacaggagaactgcaatagagaaagagtttaactcacacagagccagctgtacaggagaccagagttttattatcactcaaatcaatctcactgagaattcagggactgggatttttaaggataatttggtggatagggggccagtgagttgggagtgctgattggttgggtcagagataaaattatagggagttgaagctgtcctcttgcactgagtcagttcctgggtgggggtcacaagaccagatgagccagtttatcaatctaggtggtgccagctgagcaatcgagtgcagggtc

SEQ ID NO: 388194 - DNA, 587 bp, Homo sapiens
ggaaagggtgtttatcgactttgtttcaaagttcaactataatcaaagttcctcccaaagttagtttggcccatgcccaggaatgaacaaggacacgttggaggttagaagcaagatggagttggttaggtcagatttccttcactgtaataattttctgttataatgttgcaatggcaatttcaatactcctaacattttccagagattttaacataatgtctaaagtctagtrtaatgacttccactatcaccgctacatagatagacacatgagcagtggtgtgtccagcctcatattcatgagctcctgttcttcattcccaacttcttaccaggcattttcacctcagtgtcgccaactgaaacctcaaagttatattcaagtctaacattaccttctccccaaaatctgttccttatactatgttccctattctagctaagttgaactatttacttgttctctttgttcaaaagatgtatttatttcacaaattcttctctatctatattaaatggatagtcaagttctatagatgatcatgttttatttctatttatactttctatggttctcattatta

SEQ ID NO: 388195 - DNA, 616 bp, Homo sapiens
acaataagacaaaggtaaataaagcaaaatgtaaatgccaccagctaagtcaaaagaatataattataattttggaaaggttatttgcacactataatatttaaggtgaggtaggattaataatacaaaagtctgtgaaaaattgagatgaaaatgacaaaaaatggtacgaatatggacaaaatatatgataaatcaagtaacagaaaaggaaatttggatgagcataaatatataattaggtgcttatactatatcataaaatgagaactaaaatttaaaacactgaactaacatcactcactcactgcatttgcaaacatctaacattttcataacacacttgttagtgaggtggtggaaatcgaaggktgttaacacattgcagtggaatgcaaaaattgcataattaatatggagaaaaaattggcaaaatttagcaaaattatatatttactattttatattataattcaatttttaggaatctatatcatacatacacttgaacaattacaagattatatatcagcaatattgttgtttttgatgatacttattataactaaagattaaaaaaacccatatttccaaccgagttcttcatgaataataa

SEQ ID NO: 388196 - DNA, 493 bp, Homo sapiens
ttatatgtgaggaaactgaaaggccagggaagagaagtgactgataaaagtctcatatagctagtttgtggcatagacatgattccctctcaggtatttagaattataaaaccagtcctctcatcactcttataccayattaatctaagaccatctctaaaactgaatagatgagaccaacaagcaagtcagatgccaaacatctgacttgaaggttctctgatacatagtatttggtctatgatttttgcatcatagagcagtcccagattagtagttcaatttgcacaatactggggagaagtctatgtgtaagtcaattaccagctactagtactcagagcatatatactgttagtagcaattaagagcctgggttttggtaataggagtccactctcttctgcctagttatctgattgtggataatttacttatgaagggcaatgaagctataaaatgaggacaacgctattatctacctcattataaa

SEQ ID NO: 388197 - DNA, 493 bp, Homo sapiens
ttatatgtgaggaaactgaaaggccagggaagagaagtgactgataaaagtctcatatagctagtttgtggcatagacatgattccctctcaggtatttagaattataaaaccagtcctctcatcactcttataccacattaatctaagaccatctctaaaactgaatagatgagaccaacaagcaagtcagatgccaaacatctgacttgaaggttctctgatacatagtatttggtctatgatttttgcatcatagagcagtcccagattagtagttcaatttgcacaatactggggagaagtctatgtgtaagtcaattaccagctactagtactcagagcatatatactgttagtagcaattaagagcctgggttttggtaataggagtccactctcttctgcctagttatctgattgtggataatttayttatgaagggcaatgaagctataaaatgaggacaacgctattatctacctcattataaa

SEQ ID NO: 388198 - DNA, 610 bp, Homo sapiens
acataatcaatccccatatgaccaatctttcagctaatctctgtactccttgttgcatgactataggactacaacttgtcattagcctcagtctctttataactcagtctctgtataactctctataacttgccatattagagccatggcaatttaatattttatgcaaggcttcccccagaagtaacctgagtccccagtcctcaggaatactatttccttctggtcttgaagttattcacatgattcctgttagtatcaaacaagagctttatccactcttctcattstaaaatgtactctcaaatatttaatgaaaatagaaatgtaagcataattactgcaactctgtattagaagcaagtatcagatttcagagcattacagtaaatatgttatatacaagtagtcgcctgatgcaaaccgcaattattgcaaaaatagaagtcagagctactttaggaagcctaattcaaaccaatccctcttctgggattagaagcatatatccagacacaaaaccaaacatttagaaaatcctaccatgttcacaagcttataaggcagttatcattatcacttactgctgtttgctctggggtaggttgca

SEQ ID NO: 388199 - DNA, 596 bp, Homo sapiens
tttgtgcagtctagagacttggtgccctgcttcccagctgctctagctatggctaaaaagggccacagtacagcgtgggctcttgcttcagagggtggaagccccaagccttggcagcttctatgtggctctgatcctgcagttgcacagaagtgaagaattgagttttgggaacctctgcctagatttcatagratgtatggaaatgcctagacgcctaggcagatgtttgctgcagaggtggggccctcatggagaacctctgctagggcattgtgggccggagaccccacacagagtccctactgggatactgccgagtggagcgttgagaagaggaccactctcctccagaccccagaatggtagatccacctacatcttgcatcatgcacctggaaaagccacagacactcaacaccagccagtgaaagcagccaggagggggactataacctgggaagccatgaaggcagagttgcccaaggccatgggaacccccctcttgtatcactgtgacctgaatgtgagaaatgaagtcaaaggagatcattttgcagcattaagatttgactgccctgctggatttcagactg

SEQ ID NO: 388200 - DNA, 596 bp, Homo sapiens
tttgtgcagtctagagacttggtgccctgcttcccagctgctctagctatggctaaaaagggccacagtacagcgtgggctcttgcttcagagggtggaagccccaagccttggcagcttctatgtggctctgatcctgcagttgcacagaagtgaagaattgagttttgggaacctctgcctagatttcataggatgtatggaaatgcctagacgcctaggcagakgtttgctgcagaggtggggccctcatggagaacctctgctagggcattgtgggccggagaccccacacagagtccctactgggatactgccgagtggagcgttgagaagaggaccactctcctccagaccccagaatggtagatccacctacatcttgcatcatgcacctggaaaagccacagacactcaacaccagccagtgaaagcagccaggagggggactataacctgggaagccatgaaggcagagttgcccaaggccatgggaacccccctcttgtatcactgtgacctgaatgtgagaaatgaagtcaaaggagatcattttgcagcattaagatttgactgccctgctggatttcagactg

SEQ ID NO: 388201 - DNA, 568 bp, Homo sapiens
gaaattcttctgccttgagatgctgttaatctgtaaccttacccccaaccctgtgctccctgaaacatgtgctgtgtcaactcagggttaaatggattaagggctatgcaagatgtgctttgttaaacagatgcttgaaggcagcattctagttaagtcatcaccactccctaatctcaagtacccagggacacaaacactgcagaaggcctcagggacctctgcctaggaaagccaggtattgtccaaggtttctccccatgtgatagtctgaaatatggcctcctgggaagggaaagacctgaccatcccccagcccaacayccgtaaagggtctgtgctgaggaggattagtaaaagaggaaggaacgcctctttgcagttgagacaagaggaaggcatctgtctcctgcccctccctgggcaatggaatgtctcggtataaaacccgattgtatgttccctctactgagataggggaaaaaccgccttagggctggaggtgggacaggcgggcagcaatactgctctttaaggcattgagatgtttatgtgtatgcatatctaa

SEQ ID NO: 388202 - DNA, 554 bp, Homo sapiens
accacatatactacattatacttttgtaaatctaaaattatttcagaataaaatgcttattgattagcttacaataaatgagaacaaataagaactatttatccaataacaatttttgttttatttttcataatttgaaatgttaacccgcatcttccaatataacgtaatttgaacatgaatgtgattttacaatgaactaacaccgttttttcactctaaaaagaagcattctgaagtaagaataaaaacatggaatctaaaaacggtctttttttaatgagttaaataattttgctttataattaaaaaatatgtatgtaygtatatatgtatgtgatactatatatatgtgatacaatgattcgtgcttgtaagtattctttattgacaaaatccattagcacactggaatataggtacagcccatcaactctcttaactttgatttctttgactgatggatttttagaaaaaataaaataaatgttttgctaatgccagactgactgtcacatttgacattggttcactgagagggtatttccacattc

SEQ ID NO: 388203 - DNA, 554 bp, Homo sapiens
accacatatactacattatacttttgtaaatctaaaattatttcagaataaaatgcttattgattagcttacaataaatgagaacaaataagaactatttatccaataacaatttttgttttatttttcataatttgaaatgttaacccgcatcttccaatataacgtaatttgaacatgaatgtgattttacaatgaactaacaccgttttttcactctaaaaagaagcattctgaagtaagaataaaaacatggaatctaaaaacggtctttttttaatgagttaaataattttgctttataattaaaaaatatgtatgtacgtatatatgtatgtgatactatatatatgtgatacaatgattcgtgcttgtaagtattctttattgacaaaatccattagcacactggaatataggtacagcccatcaactctcttaactttgatttctttgaytgatggatttttagaaaaaataaaataaatgttttgctaatgccagactgactgtcacatttgacattggttcactgagagggtatttccacattc

SEQ ID NO: 388204 - DNA, 582 bp, Homo sapiens
ttgggggttttagtgagatgattacatcatgagggcagagcccttatgaatgagattagtgcttttataaaggaaacccagagagctgccttgtcccttccaccytgtaagatgaggaagggggcccttgccagatactgtgcgtgccttgatcgtggacttcccagcctctgaactgcgtgaaatgcttgtctgttgttcataagctactcagcctctggtattttgttggcgcagccctaatggcctaaaagaaaatcttgcctaaagaaatgttcttagcttttccctagacatagaactcttctgtgccattgcatattggtttcttttttttacatctttttactgacatcattcaagctgcttctaggagacatttcttctataattaatgacacagcaatatttactttttatgattactacgacaccttctttatgtgctaccttaaggacattgactcatataggaaaccctccctagttgaagaaattctgtaggttactatcaacattttaaatatttgtagttcagtttgagaatatacaacagttctgaatgcacagggcagtgaggta

SEQ ID NO: 388205 - DNA, 582 bp, Homo sapiens
ttgggggttttagtgagatgattacatcatgagggcagagcccttatgaatgagattagtgcttttataaaggaaacccagagagctgccttgtcccttccaccctgtaagatgaggaagggggcccttgccagatactgtgcgtgccttgatcgtggacttcccagcctctgaactgcgtgaaatgcttgtctgttgttcataagctactcagcctctggtattttgttggcgcagccctaatggcctaaaagaaaatcttgcctaaagaaatgttcttagcttttccctagacatagaactcttctgtgccattgcatattggtttcttttttttacatckttttactgacatcattcaagctgcttctaggagacatttcttctataattaatgacacagcaatatttactttttatgattactacgacaccttctttatgtgctaccttaaggacattgactcatataggaaaccctccctagttgaagaaattctgtaggttactatcaacattttaaatatttgtagttcagtttgagaatatacaacagttctgaatgcacagggcagtgaggta

SEQ ID NO: 388206 - DNA, 632 bp, Homo sapiens
tcaagtgatcctcctgcctcagcctcctgagtagctgggactatggtccatcccactactaccagcaaattttttctttttttatggagatggtgtcttgctatgttgckcaggatagcctcaaacttctggccttaagtattcctccagcctcagcctcccaaagtaatgtgattacaggcatgtgccaccatgctggcccaaaagaaaaaaactttaaggtcatcaatttttacattatgtttatatctttctcaaagccactgtttaggcccctaactatcatcatggaagaacgaaagagaagttaagactacaattctgtctagaacttaagtattagaagtgatgtccttagcagcactttatttattatattctccttatcttcttgttagagatttttcagactatgtagtgatgtttttgatgattccatatttatcagacatgattttatcccttgtaatgtagttactgtcatgaacataggaggaaaagaagattatatgtttggcccaaaaatttagatgaaagttttaaaaataccacttgtctctctctgggattcaaatttttaaaaccatttaactttattcaattcaaatgagaaaaaaaattaagatttagga

SEQ ID NO: 388207 - DNA, 557 bp, Homo sapiens
atagggttctctagagggacaggactaataggattgatatatatgtaaaagggagtttattaaggaatagtgactcacacgatcacacagtgaagtcctacaataggctgtcggcaagctgaggaggaaggaagctagtctgagtcccaaaacctcaaaactagggaagccaacagtgcagccttcaatctatggttgaaggtccaagagcctcccacaaatcactgttgtaagtccaagagtccaaaagctgaaggatttagagtccaatgttcgaagacaggaaacatccagcatgggagaaaaatgaaagccagaagactcagcaactccttctaacttcttctgcctgctttattctagcttygatggcagctgattagatggtgcccacacagactgagggtgggcctgcctctcccagtccactgactcaaatgttaatctcctttggcaacaccatcacagacacacccaggtacaaaactttgcgtctttcaattcaatcaatttgacactcaatattaaccatcacagtatcacataaatcattatta

SEQ ID NO: 388208 - DNA, 607 bp, Homo sapiens
cagctttgttagcctctttgtgcatcagtcatgtcaataataaaatagacataatgttgtactttcctcattagattattgagaaatttygatgaattaatacatataagccactcagagtagttttgggtaccaagcatgcaagaacattaagctatcgttatcaatatttacctttcaaattagactttccttttttcttttaaatcataatttttgtaattacgaagtaatttttacctcatacatcttatttctcatgtaattctattaagcaacagaattctatttagccttggctagtagtgacatgaaaataactggaaaaccagattaaaaaatgaatggcagacagacttcaatataatttattttttgatatcttgccctctatatcttcatacaagtgaattttttagacttttaatttcaggggtatgggtgcatgtttgttatatagataaattttatgtcatgggagtttgatgtacagattatttcatcagtcaaataatacacatagtacctgacaggtagttttgcagaccctcctcccaccctccaccctcaagtaggccccagtgtctattgctccctttctttgtgt

SEQ ID NO: 388209 - DNA, 607 bp, Homo sapiens
cagctttgttagcctctttgtgcatcagtcatgtcaataataaaatagacataatgttgtactttcctcattagattattgagaaatttcgatgaattaatacatataagccactcagagtagttttgggtaccaagcatgcaagaacattaagctatcgttatcaatatttacctttcaaattagactttccttttttcttttaaatcataatttttgtaattacgaagtartttttacctcatacatcttatttctcatgtaattctattaagcaacagaattctatttagccttggctagtagtgacatgaaaataactggaaaaccagattaaaaaatgaatggcagacagacttcaatataatttattttttgatatcttgccctctatatcttcatacaagtgaattttttagacttttaatttcaggggtatgggtgcatgtttgttatatagataaattttatgtcatgggagtttgatgtacagattatttcatcagtcaaataatacacatagtacctgacaggtagttttgcagaccctcctcccaccctccaccctcaagtaggccccagtgtctattgctccctttctttgtgt

SEQ ID NO: 388210 - DNA, 607 bp, Homo sapiens
cagctttgttagcctctttgtgcatcagtcatgtcaataataaaatagacataatgttgtactttcctcattagattattgagaaatttcgatgaattaatacatataagccactcagagtagttttgggtaccaagcatgcaagaacattaagctatcgttatcaatatttacctttcaaattagactttccttttttcttttaaatcataatttttgtaattacgaagtaatttttacctcatacatcttatttctcatgtaattctattaagcaacagaattctatttagccttggctagtagtgacatgaaaataactggaaaaccagattaaaaaatgaatggcagacagacttcaatataatttattttttgatatcttgccctctatatcttcatacaagtgaattttttagacttttaatttcaggggtatgggtgcatgtttgttatatagataaattttatgtcatgggagtttgatgtacagattatttcatcagtcaaataatacacatagtacctgacaggtagttttgcagaccctcctcccaccctccaccctcaagtaggccccagtgtytattgctccctttctttgtgt

SEQ ID NO: 388211 - DNA, 612 bp, Homo sapiens
tattttatatagaataactaaatgatgttctttaataagtctagcaagttcccactcattccaaactcawtagagagagttatcatttcattttagaatagttcaaacatttttcaagaaagttgagaagtttctgtcaaatatttacaaagaactccttgcaattatataatacttatgagagagagaaaattctttcattaaaatgaatttttaatagaataatttgactgcagctcatatatgaataatgaaggacagtgaaatgaaaataatcactaatggtttacttggcatcaactttgattttgatttgacaaactttacttgagcttttgaaagaacaattaactgtgatacttttttttgagttttaggtaaaacaaagatatgtgtttaaaaacccattgacaggagcagcaggcagcctgcagccataatatagacattaatattgaccatgcaatttgggataatgtgcaatatttgagataatattatatgttattttcatatatatagagagagaaagtgagagaaggagaattttttttcagttatttaagacagtgaaaatgcttccaggagttaaattagaaaataagttttagc

SEQ ID NO: 388212 - DNA, 612 bp, Homo sapiens
tattttatatagaataactaaatgatgttctttaataagtctagcaagttcccactcattccaaactcaatagagagagttatcatttcattttagaatagttcaaacatttttcaagaaagttgagaagtttctgtcaaatatttacaaagaactccttgcaattatataatacttatgagagagagaaaattctttcattaaaatgaatttttaatagaataatttgactgcagctyatatatgaataatgaaggacagtgaaatgaaaataatcactaatggtttacttggcatcaactttgattttgatttgacaaactttacttgagcttttgaaagaacaattaactgtgatacttttttttgagttttaggtaaaacaaagatatgtgtttaaaaacccattgacaggagcagcaggcagcctgcagccataatatagacattaatattgaccatgcaatttgggataatgtgcaatatttgagataatattatatgttattttcatatatatagagagagaaagtgagagaaggagaattttttttcagttatttaagacagtgaaaatgcttccaggagttaaattagaaaataagttttagc

SEQ ID NO: 388213 - DNA, 454 bp, Homo sapiens
tgctgttatgcttccagtagactaaaggggacaatggtgaaagttgggaggccaactgggtgaacaatggtagtgtcttaaattaagaattctgcatrttggtagtggttgcaaatatattctgccggtacagtaacaaggtttgcaggtagatcggatattgggtatgagagaaagaaaggaacaaagaataattcgaagctttttgaattaagtagcaggaataatagagttgccatttgctgacatgaggaggacaggaggaagagcatagttgagacatatatgaggagctcaacatttagcataacgtgtctgagattgttaatggtcaggaggggccagtagacaagaagatataaggaaaccattagttatttacctctggaatccagtgtaacatcaaactgacaatatttggtagttgtcagtatatagatttattttaatcatg

SEQ ID NO: 388214 - DNA, 616 bp, Homo sapiens
catttttgtaatgtctaacacttctcacactttccacaartaatttcacaagaatttcaggcataaatatctctatctgcctatgtatttattcatctgtctatccatcatctgtctttctgaacataatttgtcatgaaattagcagagtaaaaattcacatgatttgcatttctatataattctcttattcttgaaacattaaaaaatataaagggcatgcacatattgaataagggactacagaatggaaaatacactgcatgtcatttgtccttaagatactgaaacaaagaaatagctattttttaagtgtttaagctcagaagtgagggttgatgtattgaagaggaattttttgattaaaagccaatgttagtcttgtgaaaaagtgtgatgtgtactgaaaaaaacacaagcctgtaacaccttctttattaagctgctttttttttctcctatatttgtatgaaatgtggttgtgagaaatatttgtatttttaccaacggatgctcaaaatttatttcatgaataaatgaagttaggtttgaaatttgtttcctaatcctgtggacaacatagtcatcaaccttaaattttacatcaggaaaatat

SEQ ID NO: 388215 - DNA, 616 bp, Homo sapiens
catttttgtaatgtctaacacttctcacactttccacaaataatttcacaagaatttcaggcataaatatctctatctgcctatgtatttattcatctgtctatccatcatctgtctttctgaacataatttgtcatgaaattagcagagtaaaaattcacatgatttgcatttctatataattctcttattcttgaaacattaaaaaatataaagggcatgcacatattgaataagggactacagaatggaaaatacactgcatgtcatttgtccttaagatactgaaacaaagaaatagctattttttaagtgtttaagctcagaagtgagggttgaygtattgaagaggaattttttgattaaaagccaatgttagtcttgtgaaaaagtgtgatgtgtactgaaaaaaacacaagcctgtaacaccttctttattaagctgctttttttttctcctatatttgtatgaaatgtggttgtgagaaatatttgtatttttaccaacggatgctcaaaatttatttcatgaataaatgaagttaggtttgaaatttgtttcctaatcctgtggacaacatagtcatcaaccttaaattttacatcaggaaaatat

SEQ ID NO: 388216 - DNA, 613 bp, Homo sapiens
cagctttgttactgtttgaaagctagatatttcccttctgtattgctatgtcagaattttatgtgtgcatatttagctacaatccagataagactactttgggaaaatcaatcaggtaatttccattcacttgattaacttttcttcatatttctataggtcacactctccaagaaaagtgttaaaaggcatactgaaatgtcataaagaaaaacagtatagtctgaatgaatcttttgaaacagttaagaagattaaaaaaaaaaaaaaaggtgtgatacgagtttttgtaataatgccccaaactctgcctttatcaaatcatacagggacatatgtacagatttctcattttaattcaatgccatcagacatagtatggcctgatagcacataatagaatgaagtttctcttaaatgcttgaaattcactccttgtcaattttctgcattctagctcatttttrtctcttcattgctccagtccaacacttttagtgatcataagcacgtctaagcctggaaaaagtatacatgaaccactgggcaggcagaatttgagaaaaagcattgatgatttagttgtatagtaactatccttccttcaattatg

SEQ ID NO: 388217 - DNA, 585 bp, Homo sapiens
ttcagccaaatcaaatactcaattagctcatcttttgtgaactctttgaattattttccatatgcttttctcttacatgtgcccttaatttctgaccttttcatggttagagttgaagtgagagagaagcaattatagacgtatcaatgttattttttgaattatgtttcagaagctggtsttgtgctttctggtcttggaagttgttgaaatctgactctttctcttgagggagagttttacaacttcttctgagaaaagtccctcatcgctgctacttgatataagtgatgtgctttccttcctgcatcataagacttttctcttggtcgtctctagttcttgaggtccaatttctaaatctctccttccttcatttttagggtcccgtcagtcagccatcctgtatataaggtccatattttgtctattgaacactctttctccattctttgcccttaaaaaccccgagtgttctgggtaatttggcacagtagtaaacagtccttcactttccttttcgagttaactttcctttagagttttcataaaggagtcacatgctagtccagtgagccctcataa

SEQ ID NO: 388218 - DNA, 628 bp, Homo sapiens
ccttcctgcatcataagacttttctcttggtcgtctctagttcttgaggtccaatttctaaatctctccttccttcatttttagggtcccgtcagtcagccatcctgtatataaggtccatattttgtctattgaacactctttctccattctttgcccttaaaaaccccgagtgttctgggtaatttggcacagtagtaaacagtccttcactttccttttcgagttaactttcctttagagttttcataaaggagtcacatgctagtccagtgagccctcataacttcaagaaatagtaattaatccttcttacctgtaatcttaaatttcttcttgttttrtttgagctgaaaaaaagaatacatacctacttctcctcctgatagtagccatcaatggaaaattctttaacttgtaactatgaatcacttctaggaactcaagtttcaaaaagttattataatatagaaattagaaatatttttttctcccaaatgaaagtgtgacagttgatattggtaggataataaaataatgacattttattgtcacccaaagatattatctcctagttcctatgaaaaagggtcttcgtagataggaccaagttgaaaattgagagatg

SEQ ID NO: 388219 - DNA, 628 bp, Homo sapiens
ccttcctgcatcataagacttttctcttggtcgtctctagttcttgaggtccaatttctaaatctctccttccttcatttttagggtcccgtcagtcagccatcctgtatataaggtccatattttgtctattgaacactctttctccattctttgcccttaaaaaccccgagtgttctgggtaatttggcacagtagtaaacagtccttcactttccttttcgagttaactttcctttagagttttcataaaggagtcacatgctagtccagtgagccctcataacttcaagaaatagtaattaatccttcttacctgtaatcttaaatttcttcttgttttgtttgagctgaaaaaaagaatacatacctacttctyctcctgatagtagccatcaatggaaaattctttaacttgtaactatgaatcacttctaggaactcaagtttcaaaaagttattataatatagaaattagaaatatttttttctcccaaatgaaagtgtgacagttgatattggtaggataataaaataatgacattttattgtcacccaaagatattatctcctagttcctatgaaaaagggtcttcgtagataggaccaagttgaaaattgagagatg

SEQ ID NO: 388220 - DNA, 599 bp, Homo sapiens
aacaggtcacatacactgtttattaaaaggggataagtgtttaagaagaaaaggaaacagacaaggggaataggaacacaggttgaagctaaggcatgtgtgggagagtgcaatgttgccgctgatatttgggaaagactttcaaaagatcttttaaaattctacaaaagtattctgacatgaatattcttgttacagccttccttaagcctgccttcttcatcaccttcagatattgccacaaagtcactttctttgtattcttttcagrtttcttccttccttttaatgtttgttcaaatttcaccttttcaatgactcctatacttaaaattttaattctgcactcctacatttaactccactgtctacatattttcccttgagtttattttgtgcagttatcaccatctcttgaactatatattttacttcctacttagtgtattctctatctttcccaaacagaatgtaaattccatgaaagtagaaatttctttttttccctgatgctatatttggaccccttaaatagcatttagaaggtgctgaaatatttattgaatatgcatttgaataatcaaactatcatctttggc

SEQ ID NO: 388221 - DNA, 577 bp, Homo sapiens
aacttgggcctaagggtgttgtcactgttactgcccctcatctttgaaacaccacctttcatttgtgattggtctctggagagtttcctgcctcccagaatktgccaaccttggcttatatctgtgaaagatcctggaaccaagacagtttcctgaccagctcccaggagtctttaccagtagcaataggtctttgcatgtaccccatagataagaggatttttcccccttccccaagatcttaaggcttttactttctagggataaagggtgaatagatgggaaaaacatagtcaacccttgaacaatgcagagtttagaagtgtcaacccccacagtaaaaaatccacctataatttttgactaccccaaaacttaacgatcaatagcctactgttgcctggaagtcctactaataatgtgaacagattattaacacatatttcatacactaatatatactgtatcttataatacagtaaactagagaaaagaaaatattattatgacaatcacaagggaacatgcatttacagtactgtactatatcttcaataccataagtttacattatctg

SEQ ID NO: 388222 - DNA, 577 bp, Homo sapiens
aacttgggcctaagggtgttgtcactgttactgcccctcatctttgaaacaccacctttcatttgtgattggtctctggagagtttcctgcctcccagaatgtgccaaccttggcttatatctgtgaaagatcctggaaccaagacagtttcctgaccagctcccaggagtctttaccagtagcaataggtctttgcatgtaccccatagataagaggatttttcccccttccccaagatcttaaggcttttactttctagggataaagggtgaatagatgggaaaaacatagtcaacccttgaacaatgcagagtttagaagtgtcaacccccacagtaaaaaatccacctataatttttgactaccccaaaacttaacgatcaatagcctactgttgcctggaagtcctactaataatgtgaacagattattaacacatakttcatacactaatatatactgtatcttataatacagtaaactagagaaaagaaaatattattatgacaatcacaagggaacatgcatttacagtactgtactatatcttcaataccataagtttacattatctg

SEQ ID NO: 388223 - DNA, 591 bp, Homo sapiens
ccaagcacaacactgattcacatctaaactggaactaaaaatcaagattcctcacttacacttaggcctctagattatagagcgagcacatttactcatgccttttctctgaaagcaacagattctaggcaatagtaggaaaaatgggggcttacktggttgttggttgtttcagtttttaattttttcatgctgatgtcaatggttagaaagatttttctgttagcctagtgttttgattttatgtcttcacttagaagaaacattacctttttatatttaagttgcacacaaaaagtattagtgtcaaatatttaaatacagtccttttaaacttgcacaatactacttataaaaacatatcagagaaaggagtccacatgactgagtgaaaagctgtcttttgccacaaattttatactatatttttcaggaattatctcctttcacttcataattgctgctagcaggggccaagctaaccattaaatagtgtttctgacctcatgcactgttccatagctttgtaaagtgcatagacagttttttttccccagaaatagaaatgcttctgctactaagttgaaaggc

SEQ ID NO: 388224 - DNA, 591 bp, Homo sapiens
ccaagcacaacactgattcacatctaaactggaactaaaaatcaagattcctcacttacacttaggcctctagattatagagcgagcacatttactcatgccttttctctgaaagcaacagattctaggcaatagtaggaaaaatgggggcttacttggttgttggttgtttcagtttttaattttttcatgctgatgtcaatggttagaaagatttttctgttagcctagtgttttgattttatgtcttcacttagaagaaacattacctttttatatttaagttgcacacaaaaagtattagtgtcaaatatttaaatacagtccttttaaacttgcacaatactacttataaaaacatatcagagaaaggagtccacatgactgagtgaaaagctgtcttttgccacaaattttatactatatttttcaggaattatctcctttcacttcataattgctgctagcaggggccaagctaaccattaaatagtgtttctgacctcrtgcactgttccatagctttgtaaagtgcatagacagttttttttccccagaaatagaaatgcttctgctactaagttgaaaggc

SEQ ID NO: 388225 - DNA, 511 bp, Homo sapiens
ctgtttcatttttaggataaaacaagctgagccttttcacacaggtgttgggaaagcaaccagtgatgaagaggagattgtagaatggaaaaagaatattgatgagctaagaccccagagtgttagaattcatgaagctctgccaggggactactactcattaccaataacctacaattgttgcttcaaaggtagacagaattagttcagacttcattaaaggaattttcattgataatccttgtctttctgataatcaatttcaactgatatgatcttaacttctcaccttgtcccccaaccttgaccctgaactttatacttataataatgtatcccttccatcttggtccccaaacacataaaatctattatctttccttaaagacttttctgtctttccccactcatccaccatttttttwagtaacttatcttttataatcactgattttatgtctccaaactgtggaccagttattccacaggcatcttaagcaatgatgtagga

SEQ ID NO: 388226 - DNA, 549 bp, Homo sapiens
atccttccacctcagtctcccagggtgctgggatcataggcatgagctactgtgcccagaccagctatctttcttatcagtgctgctggacaaaagtagtcgacctcctggatttaatatcttttttttttttgacggagtcttgctctgtcacccaggctggagtgcaatgacgtgatcttggctcactacaacctctgcctccctggttcaagcgattctcctgcctcagcctcccaagcagctgggattacaggtgcccgccaccatgcccagctaatttttgtattttttagtagagacagggtttcaccatgttggtaaggctggtctcaaactcctgacctcaggtgttccacccccctcagcctctcaaaatgctgggattacaggtgtgagtcactgcgtccagcagggtttaagatmtttaacctcaattgagttcagtgctgctctaacattctacaatttctttgtcaatgctcttgcatttgtgctttcaccctctctcctcagtagaaaaaaaaaaaacataaagaacccaatgga

SEQ ID NO: 388227 - DNA, 566 bp, Homo sapiens
ctgggaattggggacctctgctctagagtacgtctcccaccttagacataaaccctttaaggaagctgatgtttctctcatagctatttgtattgtaatagatctttttcctacagtttataatgaaaaatttcaaatayacacaaaagagaaaggaaaggaataatgaaaccccacagaaatattacctaacttaaacaaataatcaacttaagacaatattgttttatctataataccacccactttaccctccttctcctagtggattattttgaagccaattccagacatcatataatttcatccgtagacatttcagcatgtatctctatataccacaagatattgttcaaagagacatattgaaagatactgctggttcctgtgtaagttcttgtactggtgggtcagaatacttttttttcttttgagacaaggtctcattctgtcacccaggctggagtacagtggcatgattatggctcactgcagcctcaaccttccaggctcaagcaatcctcctacactggcctcctgaatagctgggactacaggtacacatc

SEQ ID NO: 388228 - DNA, 453 bp, Homo sapiens
ctgcctttgcctctcaaagtgctaggattacaggcatgagccaccatgcccagctccttttttttttctacaaagtcctgtaaatcagcaaaaccaagcatgtaggctgctaataccatatagaaatactgcagtagtaatacaatctgtttcaagggtaaattggaatgcttagaatagctttgtagacactgctgttcaaggaatagggttgaccagaggctaatcaaataactcacatttttctttataagttgtccatccaaggtcagcatgatagagaatgtgatgtagtgattggtggaaactatgctgtatttttttagtggattttatataaaccttttagcatatcaataaatgaagttactttttcccctattattttaaaarttgagtattttatcccagttagtaaatatttattgtacctttcctatgagcatcccctac

SEQ ID NO: 388229 - DNA, 534 bp, Homo sapiens
attcagaattctatcagataaatttaacagaaagattgaaataactaaaaaggatcaaacagaaattctagagttgaaaaatgcaactgacaygatgaaaaatgtatgagtcttctaacggcagaattgatcaagcagaagaaagaatcagtgagcttgaagacaggctatttgaaaatacacagtcccagcctggccaacctggtgaagccccatctctactaaaaatacaaaaattagctgggtgtgctggcgggcacctgtaatcccagctactcagaaggctgaggcagtagaatggcttgaacccgggaggcagaggtttcagtgagctgagattgcgccattgcactccagcctaggtgacagggcgagactccatctcaaaaacaaaaaacaaaaaacacacaatcagaggagacaaaagaaaaaagaataaaaaagaatgaagcacacctacaagatctagaaaatagcctccaaaaaagcaaatctaaaagttgttggccttaataacttaaggtggaggcagag

SEQ ID NO: 388230 - DNA, 534 bp, Homo sapiens
attcagaattctatcagataaatttaacagaaagattgaaataactaaaaaggatcaaacagaaattctagagttgaaaaatgcaactgacacgmtgaaaaatgtatgagtcttctaacggcagaattgatcaagcagaagaaagaatcagtgagcttgaagacaggctatttgaaaatacacagtcccagcctggccaacctggtgaagccccatctctactaaaaatacaaaaattagctgggtgtgctggcgggcacctgtaatcccagctactcagaaggctgaggcagtagaatggcttgaacccgggaggcagaggtttcagtgagctgagattgcgccattgcactccagcctaggtgacagggcgagactccatctcaaaaacaaaaaacaaaaaacacacaatcagaggagacaaaagaaaaaagaataaaaaagaatgaagcacacctacaagatctagaaaatagcctccaaaaaagcaaatctaaaagttgttggccttaataacttaaggtggaggcagag

SEQ ID NO: 388231 - DNA, 534 bp, Homo sapiens
attcagaattctatcagataaatttaacagaaagattgaaataactaaaaaggatcaaacagaaattctagagttgaaaaatgcaactgacacgatgaaaaatgtatgagtcttctaacggcagaattgatcaagcagaagaaagaatcagtgagcttgaagacaggctatttgaaaatacacagtcccagcctggccaacctggtgaagccccatctctactaaaaatacaaaaattagctgggtgtgctggcgggcacctgtaatcccagctactcagaaggctgaggcagtagaatggcttgaacccrggaggcagaggtttcagtgagctgagattgcgccattgcactccagcctaggtgacagggcgagactccatctcaaaaacaaaaaacaaaaaacacacaatcagaggagacaaaagaaaaaagaataaaaaagaatgaagcacacctacaagatctagaaaatagcctccaaaaaagcaaatctaaaagttgttggccttaataacttaaggtggaggcagag

SEQ ID NO: 388232 - DNA, 517 bp, Homo sapiens
agcagtgcacactagttgggttgcacctggtgagagattaggggtggtttccccaccaaggtctctgagccagagctttcagctgcatgagcacagcctgctccccctgtggaggggattctggggtgggtgtggttgtatactgggggaagtgagaatgtggcctctctgtgggtgagtgcagcacygtgaattgtgtttgtaacacttgagttgtgtttcccaggtgtatgtgatggcagaactagttttgctgctggggtgaatcaggttcctggaagggactggactaacatggagagaatgatgctaagtagttacagtcattattatatacacatgacttagtagtatagaaccattagcaatgaccaagaccacctgtgtgtcgagtgcttaccatgtgcctggtgctgtgctaagcacctcacctgcagtggctcatttagtcctgtcagaaccctgcaagttcatgctggtttgcctggtgtttgtttattgtgccatgttgggtggg

SEQ ID NO: 388233 - DNA, 543 bp, Homo sapiens
cagccagtcacacataaatatacacgattgtacattcagtcataaatacacacagcggcacaaatagacccagccgcagaggcacacgtgtgtacacacacacacacacacacacacacacacacacacacacaaactgcctgccctgccataaggacttcagactgaggtccttgtgccggctgaaggtcagagagtgggactttggggagtgggggaacaggcaccctgtgtggtcagagcctsgtggcctgagcaaagccaggcaggcagaagggtggggaaatcttcagggtggcctgggccctttgcccacccccatcccaagacccatgaccacaccccagggctcacggccactagagaccccaggtgttggtccatcccctaagtcctcagggtccactgggcctatcccgggatttagagtctcctgtggtcccacagcacccgctcctgaggcagccagccatttaagtgaggctggtccagggtgacagagcctggtcagcaaggtcagaactcatgccccaccctgccaag

SEQ ID NO: 388234 - DNA, 543 bp, Homo sapiens
tggggaataatttatatgtaatttgtgatatagtttggctgtgttcccacccaactctcatcttgaattgtagttcccataatcctcatgtgctgtgggaggaatcaggtagagataattgaatcatggggacagtttcccctactctgttctcatgacagtgatttagttctcacgtgatttgatggttttataaggggcttcctcatttgctgggcactagttatctcccctgcccccagaagagatgccttctgccatgattgtaagtttcctgaggcctccccagccatgcagaactgtgagttaattaaacctctttcctttataaatatcctagtctcaggtatttcttcatagcagcgtgagaatggactaatagaatttgggtgtatgatcccttccccayggagcttccaacccagttggggattcagctaaataaatacagatgaacatggaaaagactctgataggaccagcacagatggttaggaagtatgtatggggggcctgttcctcacacttgcttatataataatt

SEQ ID NO: 388235 - DNA, 464 bp, Homo sapiens
taatgagctggatgtcttatattttggctgagagcattttgaccaaacgaattgtaatcaaagcagcacggtaaaagcaactttgtgtgatagtttggttgaaacagactttggacacaaaatgaatatgttaaccactggcattcaagtttttrttaaatagtaatgatagtaactaccactcatgaatgctttccacatgtagggcatctggctagactttgcaaatattaccatctttaatcttcacagccatcctatgagataggcactactattttctccattttacagatgaggaaattggtggtttgggagattaggctgtttgctcagtcacatagctagtcaatctagagtgagactttgaaccctgagcatcccaaagtcctgctctctttggttgccatatagtactgcttcctggtatcaaggaacagggttcattaattatccattgttat

SEQ ID NO: 388236 - DNA, 557 bp, Homo sapiens
attatgtatcaagcttactggtttaatctgaaattcagatatgcctactttagttactcctttgaggtaacagacttttagttgtctacgttttatattccttctggaatctgtttaaaaaaaagtttaagaaatggggagttcaaagtataaagaattcctggacattttgggaagcactgtttatttgagagcaactttggaggaataatttaaagatgcataggtcccagwtataacaatatgattaattagatgatcccacacatagctctgtacccttttttattttaacaatttatattaacaacataaaattatctttatttaaatattttacaggatcagaaattgttaaaagtgagaaagtaggtatatgcatttgtaaagttttatttttttactcattaaagtttgtaattttaatcagataattgaatttaagtaatttaaaagcatatttacatattggatgcaactgtagactctcattgtgttgaagccaattacttccaatatgaaagtaatgtaaattgtcccatctcatcaacatatct

SEQ ID NO: 388237 - DNA, 549 bp, Homo sapiens
gtaccactgctggcaaatttctggccacaatatggacagattttctccttttctcctgtatgtgtctaaaaggaaagggataaaaaggctaaggataaatacaaagaattaggtaaagatgattaaatgcctctgacaatagtaaatccttattttgtaggattacatttcattaaaatgatttaatttcacaatgagattttaaacaatttatgatggatattcccactggctcaaaaaaatgtgccttrgaatcatgcattagtgttaatttcaaaatcattctgcagtttacttttttaagccctcatggagccccaactaaaaatgattaaattatacaaaccagtatattctagcaaaagcacataatcaaaatagggctatagctacccttcccagctgccaagaaacacttcatttgaagcatttttcacattctttgtgtatatttaactcttgaggacagaattaatcttaataaagtcatctattacttgtgttatgatgtttgactagactggttttactgcaaagcaaaaaggaata

SEQ ID NO: 388238 - DNA, 468 bp, Homo sapiens
cactgttaagagaaagtagagcttttcagaaggcagtgggtaggaggatctaaacataaagtagacttcytatttgacccagaaattccacacctgagatctatgcacaaaaatactcttagcatagttttaaagttttatataaaaggatgttcactgcattattgttcaaaatagcagtggttacaaaaaaaatgagtagatttatatgaactaacataaacatccctgcaaatcatatgttaaggcaaagaagtaggttcctgaatgatacatatgtgtcatagtactagttacttttaaatatacttatctcccagatgggcagctggaactctgttcttctccaaactcacctaaaagaacttcctcttacacaaaaacattagtgtgaaatgcaaatgttactaaagattttacaagagatatgaaagaggtgccttctatggtagaatacttcgcttgaaa

SEQ ID NO: 388239 - DNA, 468 bp, Homo sapiens
cactgttaagagaaagtagagcttttcagaaggcagtgggtaggaggatctaaacataaagtagacttcctatttgacccagaaattccacacctgagatctatgcacaaaaatactcttagcatagttwtaaagttttatataaaaggatgttcactgcattattgttcaaaatagcagtggttacaaaaaaaatgagtagatttatatgaactaacataaacatccctgcaaatcatatgttaaggcaaagaagtaggttcctgaatgatacatatgtgtcatagtactagttacttttaaatatacttatctcccagatgggcagctggaactctgttcttctccaaactcacctaaaagaacttcctcttacacaaaaacattagtgtgaaatgcaaatgttactaaagattttacaagagatatgaaagaggtgccttctatggtagaatacttcgcttgaaa

SEQ ID NO: 388240 - DNA, 571 bp, Homo sapiens
tcaaactcagttacagtggacaggccacccttactgtatctgtaggtgtgcactttgcttatgcagtcacatttttttctggcctgccctctaccatactccttcaaacacaactcaaatatcatcctctatctctagtcctggaatccaccagccctcccaatccgattcaaccaacttgcttttgcatctgtttcctaagctttttatgcatgcctcctaatgtgtccatgaggatttcaagatgattctcacccttaaaagactcctttctgttctcaaccaaygctgcatatcctctatacgatgcttctggagctaggaaaattattcttgccttttgctccctttagcatacagcagccctcactcctcctgccttaacatcttaattcaaatagaatgaacctttttctttttccttcaacatcatgcttacactcactcacatggttcatcagcttgatgtattggtcaaaatttttggttatcaggggggaggagccaagatggccgaataggaacagctctggtctacagctcccagcctgaaccacgcagaagacgggtg

SEQ ID NO: 388241 - DNA, 537 bp, Homo sapiens
acaggcgtgagctactgcacttggccagagcatactctttgcccgcaaataaaaatgcagccatacatgtgtgacgtttctgtacaaggaarcccattaaacattcaatgcccaagatttttattagaaactcatagatgccttctccctaggatataccaaaattccagacttctggaaggaagacaggtgttcaacataacccatattgtttacacaagtagtctaggcacagtaaaacaccttgatatgttaactattgacagggaacactctgagagccaagttctcccatgcccaccaaaggccaaacttacaggcaggactttttggcagtctcaggcctgctaggtttattctagagacgtacctctctactggaagcttttcataatgcactcttctctgctctcttacttttcatcttggtccatcctcaggacttggcattgtatgttactttacacccttctgtaccaattcattttggaaatgaatgcagttcatttgtatgtcctttatagtgatcagtacatt

SEQ ID NO: 388242 - DNA, 537 bp, Homo sapiens
acaggcgtgagctactgcacttggccagagcatactctttgcccgcaaataaaaatgcagccatacatgtgtgacgtttctgtacaaggaagcccattaaacattcaatgcccaagatttttattagaaactcatagatgccttctccctaggatataccaaaattccagacttctggaaggaagacaggtgttcaacataacccatattgtttacacaagtagtctaggcacagtaaaacaccttgatatgttaactattgacagggaacactctgagagccaagttctcccatgcccaccaaaggccaaacttacaggcaggactttttggcagtctcaggcctgctaggtttattctagagacgtacctctctaytggaagcttttcataatgcactcttctctgctctcttacttttcatcttggtccatcctcaggacttggcattgtatgttactttacacccttctgtaccaattcattttggaaatgaatgcagttcatttgtatgtcctttatagtgatcagtacatt

SEQ ID NO: 388243 - DNA, 604 bp, Homo sapiens
tgaacttttaggctgaaaaaaggtacagatacayggtagcaatgaccagcacattatttctctcagatacttgaaaagtgacgtcagtagcattcaacagaggctagaccctgccaagttcccataagggaataatttcattaaatgtgaagcagcaaagtcatacagacatgaacaattatattgaagcataaaagttttcattttcacaagaaggtatctttccctttcctactttattttattttactttgagagatagagtcttgctctgtttcccaggctggagtgcagtggcgtgatctcggttcacagcaacttctgcctcccgggttcaagtgattctcctgcctcagcttcccaaatagctgggactataggcatgtgccaccacaccagctaattttcgtattttttaatagagatggggttttactatatattggccaggctggtctcaaactcctaccctcaggtgatctgcccaccttgtcctcctgaagtgctgggattacaggtgtgagccaccttcctggcatgtttcctactttagctaacctttttgtgtaactactgtaggaagcctgtgcaaatcaaacaggtt

SEQ ID NO: 388244 - DNA, 481 bp, Homo sapiens
aatctgcctttttctttctctttttggactaaagttgaaattggtatcataatttttaaatgatttcaaaagagataaaatraagtctttggaagtatcccataaatattataataattataatccccatggagtataataactgaaaaattatttttaaaagatcatatacatgttatttaacagcatgctataatacatcaactaaaatcaataagcaagtattttgtatctcatgaaaatgtttttacatgcatttctaagatgttgaatatctttggaccaatttcctgaattcaattcaagcatgatgtattatctacatgatacattctgaaacaagaacttgagcaaaggtaaagtataagaaatgcaaaccaaaatcaacagaagaaactaggacactatattaataacttgaagagaaagaagaaggtagagaggtcacacagaaggcaggcaaatatttagttgttttagg

SEQ ID NO: 388245 - DNA, 481 bp, Homo sapiens
aatctgcctttttctttctctttttggactaaagttgaaattggtatcataatttttaaatgatttcaaaagagataaaatgaagtctttggaagtatcccataaatattataataattataatccccatggagtataataactgaaaaattatttttaaaagatcatatacatgttatttaacagcatgctataatacatcaactaaaatcaataagcaagtattttgtatctcatgaaaatgtttttrcatgcatttctaagatgttgaatatctttggaccaatttcctgaattcaattcaagcatgatgtattatctacatgatacattctgaaacaagaacttgagcaaaggtaaagtataagaaatgcaaaccaaaatcaacagaagaaactaggacactatattaataacttgaagagaaagaagaaggtagagaggtcacacagaaggcaggcaaatatttagttgttttagg

SEQ ID NO: 388246 - DNA, 571 bp, Homo sapiens
taaatgaaactaccgctttaaaaacttacatactcaaaatgtatttatagatttcttactaacatgtattagtaacttagctagaatataaaagtatctaaaaatgcaagaattataatttttgaatatctactaaatgtcagacactatgctagcacagtacctaaatgatctcatttaatctttgcagctaatttgaaaggtaggcaccagtatcccatttcacaaatgaagaataaagaaactgaggctcaaggaggagtaagtgacaaattacatggtgattctgaagatcttcaatatcatttactctaagcacctttgctctgtaaataaactgaggactaaagaattaaataacttgttcagaatcacatgactactaaaggtccaaagcagaattcatagctaaggcccctgattaccactcttagagtttataaaaagtgacaatgtaattyttttgtaatgatatcactataaacaaaaaaagtatatagtttacctgagtgggtgatcatatgacgttttagctgattagctgaaataaatttcttcatacattcttgac

SEQ ID NO: 388247 - DNA, 571 bp, Homo sapiens
taaatgaaactaccgctttaaaaacttacatactcaaaatgtatttatagatttcttactaacatgtattagtaacttagctagaatataaaagtatctaaaaatgcaagaattataatttttgaatatctactaaatgtcagacactatgctagcacagtacctaaatgatctcatttaatctttgcagctaatttgaaaggtaggcaccagtatcccatttcacaaatgaagaataaagaaactgaggctcaaggaggagtaagtgacaaattacatggtgattctgaagatcttcaatatcatttactctaagcacctttgctctgtaaataaactgaggactaaagaattaaataacttgttcagaatcacatgactactaaaggtccaaagcagaattcatagctaaggcccctgattaccactcttagagtttataaaaagtgacaatgtaatttttttgtaatkatatcactataaacaaaaaaagtatatagtttacctgagtgggtgatcatatgacgttttagctgattagctgaaataaatttcttcatacattcttgac

SEQ ID NO: 388248 - DNA, 502 bp, Homo sapiens
gtggctcacatttgtaatcccagcactttgggaggccaaggcaagaggattgcttgagcccaggagttcgagatcagcctggacaacaaagtgagacctcgtccctacaaaaaattttaaaaattagccaggtgtgatgacatacgtctgtggtcccagctacamaggaggctgaagcaggatgattgtttgaacctgggaagtcgaggcttcagtgagctgtgttcatactattgcatttcagcatgggtgacagagtgagactcggtctcaaaaaaaaaaaaaaaagtctcacatgacaggaggatcacaacttttaaaatgaggaaatctagtcaaaggatccaaagtagcaggtatgcaggatgaataactctaaagatctaatgtataacacgaagattacaattgataatagcgtattatattctggatttttgctaagtgagtagattatagttgctcttgccacaggaggaaaaatgggtaactatgtgagata

SEQ ID NO: 388249 - DNA, 603 bp, Homo sapiens
aattttaattaaagacgtcagaagaattctagccctcaccaaagggattaacatactggtattaaaagagcatcttaagaaaatttgtgaaggcagtttaggataacatgaatcttactgataaaacgatcataaagccacatcactgaatatccatctactactatgtaaccacctcaatattcaacatcttgacacaaatcctttcgaaaaaatctatgtttacaatacatgaaattaataaagaaaaaccttgcaaatcactttaatcttgataatcttaaattagaacatggatctaatttaagaagtgaacctgaccactctagcagaggcacagaaatcaaatttttgttcatgctagtaaatacactgaattaatatgttaataatgaccatgatcaaacttgaagattaaaaaatgcaaaattktgaagatgataaattatgtgtcatgtatatattaccacaattttttaaaaaagtgtacagccaatgtgccctatgctttgaacattttataaacaagcagcaaagcttaatatgtaatatacatatatttaattatctggattaatataaaaagaccattttcaataagca

SEQ ID NO: 388250 - DNA, 604 bp, Homo sapiens
tggttgaactttaaaatatatgtattatatgggaattctttagaagaactttacatttttttccatgaatatcaggggactggcttattttgcttttgtagactargaaatggttacaaaacagcaaactgaatcattctaggtgaaaattaaaccaaaaatgtaattgtgaaagcaccacccaattacttttccaatctcacccttccaatcccttcaatttatggagtttctaataaattagaagtacaccatagagagaagtgaaatgctacactgacaaataggagtagctcaagttcattcttggcatctttctgtaattgaaatactttttttccccgcagcaaaaagagccatgaaaccccaccgacctcacggaaccccaccttgttactcttggaatgttcccattaatcaaattctgaggaatctcacttaacctaaacaagttaaacccaaggacaccatctttgaaagaaggacaacaaaaacctgaacttgacattactccttgaatattttagagatcctctacttttaaaagcttaacagagtttacagttgtaagaaagtgggcaataaaatgtaaaaatcaaataag

SEQ ID NO: 388251 - DNA, 604 bp, Homo sapiens
tggttgaactttaaaatatatgtattatatgggaattctttagaagaactttacatttttttccatgaatatcaggggactggcttattttgcttttgtagactaggaaatggttacaaaacagcaaactgaatcattctaggtgaaaattaaaccaaaaatgtaattgtgaaagcaccacccaattacttttccaatctcacccttccaatcccttcaatttatggagtttctaataaattagaagtacaccatagagagaagtgaaatgctacactgacaaataggagtagctcaagttcattcttggcatctttctgtaattgaaatactttttttccccgcagcaaaaagagccatgaaaccccaccgacctcacggaaccccaccttgttactcttggaatgttcccattaatcaaattctgaggaatctcacttaacctaaacaagttaaacccaargacaccatctttgaaagaaggacaacaaaaacctgaacttgacattactccttgaatattttagagatcctctacttttaaaagcttaacagagtttacagttgtaagaaagtgggcaataaaatgtaaaaatcaaataag

SEQ ID NO: 388252 - DNA, 584 bp, Homo sapiens
tgaaaagataagcataatgacactgggaatagagggtcaaacagtgtatcaagggagtatgaatacctgtgactaaatacagaaacaaacacatcagcaatgttagcagcaatagctcacagtatcacatgcttacattgtgcaggcactgtgcaaagttatttatatcttcatttgttcctcaaaacaacactatgcagttgggacttttttttttctttctttttttttttttttagacagagtttcactctatcgcccaggctggagtgcaatggcacgatctcagctcactgcaacctccaccacctgggttcaagcgattctcctgcctcagcctcatgagtagctgggattgcaggtgtgcaccaccacgcccagctaatttttgtatttttagtagagatagggtttcaccacgttggccagactggtttcgaacacctgacctcaggtgatcccctgcctcggcctcccaaartgctgggattacaggcatgagccaccacacccagctgggactattattattccatttatcagagatgaggaaaccaagcttcaaggaaattagccaactcatt

SEQ ID NO: 388253 - DNA, 584 bp, Homo sapiens
tgaaaagataagcataatgacactgggaatagagggtcaaacagtgtatcaagggagtatgaatacctgtgactaaatacagaaacaaacacatcagcaatgttagcagcaatagctcacagtatcacatgcttacattgtgcaggcactgtgcaaagttatttatatcttcatttgttcctcaaaacaacactatgcagttgggacttttttttttctttctttttttttttttttagacagagtttcactctatcgcccaggctggagtgcaatggcacgatctcagctcactgcaacctccaccacctgggttcaagcgattctcctgcctcagcctcatgagtagctgggattgcaggtgtgcaccaccacgcccagctaatttttgtatttttagtagagatagggtttcaccacgttggccagactggtttcgaacacctgacctcaggtgatcccctgcctcggcctcccaaagtgctgggattacaggcatgagccaccrcacccagctgggactattattattccatttatcagagatgaggaaaccaagcttcaaggaaattagccaactcatt

SEQ ID NO: 388254 - DNA, 566 bp, Homo sapiens
ggcaaaaagggatggttcatcactctttccatggtttttgaaataagttaatgggtgttctttctcaaggaacacactgaactgaaaacagccaaaagctagtrggtaaaaagtcaccaaggcctattaggaaaaaaagtgaaatgtgatctgtttctggttactactgatgacagtagggtcattttattttggaggtaggagtggtgttttgcagaggtgtgaagtatatatctgcctgatgaagtctgtgtagcatcatcagatattacaaaagttttcacaaacacccatttgtgaaagaagattgaactcaaatttgcttacagaaaaaaaaaaacaactgtatatcagatgaaaagtgtaaatagtaaagatgctaattttctaagtaaaaaaaaaaaacttctgcagttacctttggaattttaaaatgttaatggtgttcaagtttagaataaacatttctcgtttattacagtaacactgttgtcatctttttctttgttttaatcttttaggctgaatgactttttgtcagaatattttatgacttttgagcaaac

SEQ ID NO: 388255 - DNA, 566 bp, Homo sapiens
ggcaaaaagggatggttcatcactctttccatggtttttgaaataagttaatgggtgttctttctcaaggaacacactgaactgaaaacagccaaaagctagtgggtaaaaagtcaccaaggcctattaggaaaaaaagtgaaatgtgatctgtttctggttactactgatgacagtagggtcattttattttggaggtaggagtggtgttttgcagaggtgtgaagtatatatctgcctgatgaagtctgtgtagcatcatcagatattacaaaagttttcacaaacacccatttgtgaaagaagattgaactcaaatttgcttacagaaaaaaaaaaacaactgtatatcagatgaaaagtgtaaatagtaaagatgctaattttctaagtaaaaaaaaaaaacttctgcagttacctttggaattttaaaatgttaatggtgttcaagtttagaataaacatttctcgtttattacagtaayactgttgtcatctttttctttgttttaatcttttaggctgaatgactttttgtcagaatattttatgacttttgagcaaac

SEQ ID NO: 388256 - DNA, 362 bp, Homo sapiens
taaacatatttttttacatctttaaaattacacacatagttactttcatttctggcaacatggtagatactccatatcccggaaaaaaggccctataaggagcacttattaatgctggataaaacaaagcaaacagaaaacatctgaacttgtaaaaaaagtaatgatagccctcaggattcaatgaacaaaaatggagctgaaagtgagtgataagttcaagttgaggatgcagcacctgtagggtaatctcaagacttgatttttcatggtgtcagggaaaatgagacaaactgtatgttcagattatagggcaagatggaatcccataccactwttattcttggactctagaaatgcta

SEQ ID NO: 388257 - DNA, 575 bp, Homo sapiens
ccagcattacccaatctgcaaaaacatctgagagcaggcaaaattcagaggatttctgtaagaaacaatcagtcagctgggcatggtggctcacacctataatcccagcactttaggatgccgaggcaggtggatcacttgagatcaggagtttgagaccagcctggccaacgtagctggtgaaatcctgtctactaaaaatacaaaaatcagccaggcgtgatgrtgtgcacctgtaatcccagctactcgggaggctgaggcaggagaatagcttgaacccaggaggcagaggtcgcagtgagccgagattgtgccactgcatcactccagcctgggcaacagagagagaccctgtctcaagattaattaattaattaatttaatttaatgccaatgtcctgcacaagactaccataaatgagcacataaaaggtgctctataggccaggcatggtggctaatgcctgtaatcccagcactttgtgaggccaaggcaggaggatcacttaagtacaagagttcaaggccagcctgggcaacaatgcaagaccccatctctacaataaatttaa

SEQ ID NO: 388258 - DNA, 595 bp, Homo sapiens
ccttactggaagataacctattaaaagatagatctgtaagttatttaactgttatttttatgttattattgaagaaaatcactagacagctgtactttatcattttgtgacagattcttaaaaaaattctaaaaatgccacttgtataaatctggtaagaaaaaacagaaataggaaagatagagaactggaaaagccatcattttgcacataagtaataaatccttttggtatttatttttgttggttgcttagttggtactgctgctatttgaattctgtatcaacattatttgttactcctatggatcttggtagcttagtgacaatggaraatgtcttatctgtgcttggaaaacaaagttgcttctctctttagagatccacatgtgattttccagctctgtcatatttaaatttcacgtgtcgccagagaagaccccaggataaattgtttatgactatccatcctcaggcaaggcagagaaaggaggttcaataatctgtgacaaaataactgctggtaatgagcattctaaactgacagcagaattggggcagagctgtgagaatatcttggctcaatacccagtgc

SEQ ID NO: 388259 - DNA, 586 bp, Homo sapiens
ttgcttgtacaatccacactgctactattgcccagaacctgcttgctctggtcattcccatctaaatcctcttcatttcctttgccttattcgacatttttattgaagtccatgttgtcgtttatctaagattcatggcttttatgttatgttatttaagttatttggataatgtgaatcatgtttgactagaggaaaggaagaaaagagctaaacatactagacaatcctttaatgtaagccgccctkgttcagcggacagtttggggtggagcaaaacctccttctgtcagctctgaaaattcagatgtgtcagttctttctccctctagctcaactgaaagttctattgagaacccttcataccctcccccatacatttctagtcccactgtatacccatcgctccctgaggaacttagcccaatgaatactactcgtagtggagcctcctatccacctccaaaggaaaatctttgtccccttagaaaggtggcaaacagagaagaaggcactgtgagaatacatgttcccttttcttggcctgatttggctctatgtaatttctctgaagatacaggaagat

SEQ ID NO: 388260 - DNA, 485 bp, Homo sapiens
aaataactgcccaagagtgggcaatttatagagaaaggagggtttaattgactcagttccacatggctggtgaggcctcaggaaacttacaatcattgcagaagcagaagcaggcatgtcttacatggcagcaggtgagagaaaatgtgtgaaggagaaactgtcaaacagttataaaactatcaggtctcatgagaactcactcactatcatgagaacagaatggggaaactgcccccatgatccaatcgcctcacacatggtccctcctccaacaagtggggattacggggattactatttgagatgggatttgggtgaagacccagagccataccatataattccaccccagcctctcccagatctcatrcccttttcacgtttcaaaaccaatcatgccttcccaacagtcacccaaagtcttaactcattccagtattaacccaaaagtccaagtctcaagtttcatctgagataaggca

SEQ ID NO: 388261 - DNA, 558 bp, Homo sapiens
caggtaaatgtccagagattttttttaaaaaatggaaaaagaatgctcagccaaatttgtacacaacttttgattacttagatattagaatttttaaaccaggatacctttcttggtaagcaagattgagtttttattgaaagtgttggtgttatgagctaataactagtagcgctaaggataagtagaacaaggaggaatgaagcttttctataatctcatctcagagaaattcagtttaactctctacttgatagtgggagcactcttcaagtaggggaaaatatatagatcagttaattaactatgaactctcctttccttaaatgcctakgttactttatttgccaaacagttccatttcatgcagttgaactccatcttatctccaaggtaggtaaggccaagcagagtgcaagacaagattgttgttccccttcactcaactggtgtgttgccgaacacttacaaagcagtgaggagcaaaactaagagagcttacatgtaaatgagaatctgcaacacaatgcagtatcatgagagattataaacattttt

SEQ ID NO: 388262 - DNA, 572 bp, Homo sapiens
actatatcatacccttagttcttaaattcggaaaatttcttcaaaatcattttataccataggttttgaccacacagggcagggctatccagaattgagtaaagttaaaacattcaaagaacaaggamgactttgagacaggttctcggcctgtcacccaggctggagtgcagttgcacaattatgcctcacttcagcctcaacatcctgggctcaagagatcctcccaactcagcttcccaagtagctgggactaaaggcatttgccaccaaagctggctatttaaaaaaatttttgtagagacaggatctcactacattgcccaggttaatctcaaactcctgggctcaagaggtcctcctgcctgggtctcctaatgtgctgggagcgtgagccatggctcccagccctgagaacaagttttaactaccatacctgaagatggagatcttctcaggaagtcagctttcctacgcagaaaatagaaggagaaaatggtcactagatctgaaaattctctggtagcaacatatcttcataaattcctttctcagtggaaatggaaggatta

SEQ ID NO: 388263 - DNA, 572 bp, Homo sapiens
actatatcatacccttagttcttaaattcggaaaatttcttcaaaatcattttataccataggttttgaccacacagggcagggctatccagaattgagtaaagttaaaacattcaaagaacaaggacgactttgagacaggttctcggcctgtcacccaggctggagtgcagttgcacaattatgcctcrcttcagcctcaacatcctgggctcaagagatcctcccaactcagcttcccaagtagctgggactaaaggcatttgccaccaaagctggctatttaaaaaaatttttgtagagacaggatctcactacattgcccaggttaatctcaaactcctgggctcaagaggtcctcctgcctgggtctcctaatgtgctgggagcgtgagccatggctcccagccctgagaacaagttttaactaccatacctgaagatggagatcttctcaggaagtcagctttcctacgcagaaaatagaaggagaaaatggtcactagatctgaaaattctctggtagcaacatatcttcataaattcctttctcagtggaaatggaaggatta

SEQ ID NO: 388264 - DNA, 599 bp, Homo sapiens
aaagccttttatatctggtcttatgtgcacttgagaaatgacaccagttgcttttgcagtaaagtcctttttaaataaatcaactctgaagaaaattgagagtcctcagtgctatagagagaatctgtaaaaaatcttgaagctcaggggcactggaatkcttaagtgtgaaatccattattctaccatgattaaagcagttcgtcaccaattagaggagcgtgttcttagttaatcaatggaggttaaagagttttccctttctttctagaattagtttcctaattaataaaagtgaattttaaaatggccttctgaggaacagctgcgttatctattgtttatggaacagcctcacagtcatgcttgtttttcggcatggagagagaaatgagagtaatttgcataagtggaatattatttgctctgttgattatttttctctctttttccttttctgggtactgttcatttctattattttaatgataagtgactttcaggcagaaaacaactgtctgttattttttgacctcacaaaacaggctaaaaatatgttcatataaaattagtattatattagactgcattacatgaac

SEQ ID NO: 388265 - DNA, 645 bp, Homo sapiens
tttcactgcaattatgaagaaaagtggggaaaaaaatcaatgatgcagttaagagtgttacwatagattaaacataggaggatgtaaacacgcttagaattgagtcttcatctcccgctgggtttgagatagagaaaagacattttatcaaagaaatcatggctaagcccattcaaaaataaaattaatactaagcagttaagccaggcacagtggcttgcacctgtaatcccagcactttgggaggccaaggcaggtggattacctgaggtcaggagttcaagaccagcctgaccaacatggagaaactccatttctactaaaaatacaagattagccgggtgtggtggcacatgcctgtaattccagctactcatgaggctgaggcaggagaatcgcttgaacccaggaggtggaggttgcggtgagccaagattgtgccattgcactccagcctgggcaacaagagcaaaatttcatctcaaaaaaaaaaaaaaaaaaatactaagcagttaaataaaggtagggaagtattccaggtggcgtagtttgcatcatttattcccagttatttcccagcttgttataggagtaacagtcataacttcaccatgtaacttcgtagtattccctagtagtgtagac

SEQ ID NO: 388266 - DNA, 645 bp, Homo sapiens
tttcactgcaattatgaagaaaagtggggaaaaaaatcaatgatgcagttaagagtgttacartagattaaacataggaggatgtaaacacgcttagaattgagtcttcatctcccgctgggtttgagatagagaaaagacattttatcaaagaaatcatggctaagcccattcaaaaataaaattaatactaagcagttaagccaggcacagtggcttgcacctgtaatcccagcactttgggaggccaaggcaggtggattacctgaggtcaggagttcaagaccagcctgaccaacatggagaaactccatttctactaaaaatacaagattagccgggtgtggtggcacatgcctgtaattccagctactcatgaggctgaggcaggagaatcgcttgaacccaggaggtggaggttgcggtgagccaagattgtgccattgcactccagcctgggcaacaagagcaaaatttcatctcaaaaaaaaaaaaaaaaaaatactaagcagttaaataaaggtagggaagtattccaggtggcgtagtttgcatcatttattcccagttatttcccagcttgttataggagtaacagtcataacttcaccatgtaacttcgtagtattccctagtagtgtagac

SEQ ID NO: 388267 - DNA, 606 bp, Homo sapiens
aaaatcaatacaaagatatcagaaaacaattcatgatataaattttaaaattaccaaaaagatagatattttttaaaagaacaaaataaaaatttggggactacagaatttgcttgaagaaatacaaaatatatttggaggcttcaacaatagtctaatccaggcagaagaaataatctcagaacttgaagaagatgtcttttgaaataatataatcagacaaaaagttttaaaaaagaatttttttaaaaaatgagcaagggcttcctgacatttgggacagtgtaaagyaattggacattcaaattatcagtatccccaagggcaatgagacaaaaaaaaaaaaaaaaagaattagaaagcctatttaattaagtaataggtgaaaaagctcttaagtctagcaaaagattcagacattcagatacaggaagctcagtgattctcaggtggatacaatgcagaaagggcttctccatggcacactatagtcaaactgtctacaactaaagaaaaagagcaactcctttttaatgaattaaaaagagtctgactagtatgagatggtatctcattgtggttttgttgcatttctctaataattag

SEQ ID NO: 388268 - DNA, 610 bp, Homo sapiens
cactacctaggatatgcatatacaaaatttcttatgtattcccataaatttgtataaattaagaaaacaaagatatctaaacactgactgtcaacaggcttatgaaaaattttgaggaaatagtttttgagtcctttgtccttgctgaattcactcacccttccatatcctcataatataccagtcccataacttcccttgactccttattttactgttacttttataattttaactattaactcacctttaataaatgatgatgttgtgcagtttatataactggtattatttgtatagtagttctcttcattcacaaagtacattaccattaccaaagatatttctaaatatatgagattattytactcctcagtacaatttctatttctgcccagattaccagattaccaatcatttctcagtttctcaatgaaaacttgtaattgacttttagtatttaccagtttcaattttaaaacaagcttgctacttttcacttcaagatatgttttgtattttgccttttgcttccagtttatctgttgttactataaactccatcattactgtcattatcccaatagcaattatgaattattacagacat

SEQ ID NO: 388269 - DNA, 652 bp, Homo sapiens
acaggaatccttacaataatgagctgtgttacaaatcctactgcatcctgacataaaattctattttctcaacaaccacatttttgatgtgtgtttttcagatacaataaatatattttaggatcaagtaatgtcaattagttttgaaaacacacacaggagtgagtctgcttcctaaaactcttttttcacgacggaacagaggaagcagctcagtggggatggagatgacctgcaggctctggggccctggctgcaccctgggtactgctgggactgaccttaggacttgctgttaggacttaccctcttggacccagatactggacctaagatactgggacagtctgcctgagcatcttgaattttgtatgatccctaaacctttttgcagctcaaaattttcatgattctaattacaycaccctctgaaattcctggtaatattgtcatttgtaatatgatattggcaaagtctcaagctaaaaaatattcatgaaagagccttttccccctttccatgtggaccatatggatttagagtcactttcaagtacaatattagggtttgggaacaaactgcattattttttggaacaactacagcatttttttatgtgtactttgagcatttgtggaaaaaatatacata

SEQ ID NO: 388270 - DNA, 518 bp, Homo sapiens
cctttgcaagtcaaagaaagcgttcagtcctgaataagattttggttttgatggcacttattgatcatgttgtactttttgccatttgggacttggtatctctggggatctccgtcataytttaatccaatgctagacaaagctttatgcagaatcttttcattacaaatacagttctgccggactagaaagctgcactgttctgggtacctgccacctgttcagcattgctctgggcgttgaggacacagcgtgaccacaccagcccttgcctggcctcccgcaggcctgacaacacagacatgggtttggttagggggaaatcagggtcttctatcggttacatttctgtgcagaaaaaaactatttttagctaaacatctactctactacaataatttaaaaataattatcgacttaaatcgttattgagtgtgatattgtttctaaatttatttggtcatattatactgattaaacaagatttttcacatttgtgtgtgcagttatggctcgtt

SEQ ID NO: 388271 - DNA, 427 bp, Homo sapiens
aaattgaaactttttctctacaaaagcccttgttaggaggatgaaaaataagctgcagactgaatgtttgcaaaccacatacccaacaaaggtctcaaatctgcaatagaaaagggctgtcaaaacccaacagaaaggtaacacatgatctaattagagaatgggccaaaaacatgaacagatatttcatggagcaggacagrcagatggcaaataaacacgtgcggtgatgttcaagtccatcagccaccagagaaacacaaagagaaagaaccataatgaatcagatgctactgtccacccatctgaaagcccaaaagaagagagtgccaacagtcaatctgcagagggtgtggtgaaccgatggcttacccacggcgggtacgagtctcagtgttgcagccaccatggaagtagattggcagtt

SEQ ID NO: 388272 - DNA, 427 bp, Homo sapiens
aaattgaaactttttctctacaaaagcccttgttaggaggatgaaaaataagctgcagactgaatgtttgcaaaccacatacccaacaaaggtctcaaatctgcaatagaaaagggctgtcaaaacccaacagaaaggtaacacatgatctaattagagaatgggccaaaaacatgaacagatatttcatggagcaggacagacagatggcaaataaacacgtgcggtgatgttcaagtccatcagccaccagagaaacacaaagagaaagaaccataatgaatcagatgctactgtccacccatctgaaagcccaaaagaagagagtgccaacagtcaatctgcagagggtgtggtgaaccgatggcttacccacggcgggtacgagtctcagtgktgcagccaccatggaagtagattggcagtt

SEQ ID NO: 388273 - DNA, 623 bp, Homo sapiens
ggggataaatctcctgttatctaatccctttatggtatacaatccttttgatgtgttgatggattcagtgtgctaagtgatggtgctaatctttaaaaatgttaacatctttgtcatgtcacctagactgaattgtatttaaakaattcaggtgaagacccaaagctagttacttgtgtagccattggtcacacatttgctagttgggcatttcacagaaatggatattaatcaaattaaggaaaacaggcattcataaatggatttctgtttctaggcattttcaattccataatagattatttactatacgtggtcagcaactctgtaatgctgcaatgaatacatactagatttataggttttaaaatatgagaatagtgaaacatttgtcttttttatctaacttcttttacagaccgtatagacatatgaaatgtgacttaatatgaacggttactttttcttttttctaatagtaatttcgaatcacatttagcttttttctcgttaaatatttcctaagtattattttattatgcttttgttttgtatgtatcaagagcataacattcgttgacttttgatttttctctgtaacattatcttcagctattgaatta

SEQ ID NO: 388274 - DNA, 646 bp, Homo sapiens
aataagggtcactccttatactcatcatttttgagttagagatattgacaagtgtaycaaactatatattttctcccacaagacattgaggggcacacttcttttattctccaaaagtaacaaaaaatgctttggtgtctaatttttagcctgcaagggctctcatagtgttgttttcaaagacttacatgttttatttccttacctcactgcaacattataaatttatcttctgtgctaacatcatgatagcatctaaaggttccaagagtgaagattatcactagtttatgaacctttgtattccccaaaagggaaagagatattacataaccaaattccaagtatgattaaccaagatttttctaaaattttccacctctcaattctgtctactaatttgaaataaatgagcaaaatacatttgcaacatgataattcttcaaacttggctcttatgccaagcagtattgatgattggggcattaacaaaagcaataaaattgttttgcaaaacaaaaacgaagtgaaaaatatgctcagcttatcttacacaatattgttttccacatcaaaaatggctagataaccttagaaaaaatggcatatacattatttacctaaaagttatactaatctgggtaga

SEQ ID NO: 388275 - DNA, 430 bp, Homo sapiens
tctgcctttcttaaagtgattggttaaaaygttttagcacttagcagtttcttcctagttttgcagatatggccctgaactggcttatgagtaaggcaaatagaggatgttcttactgggctagtgcttttatttctctctttcgcttgttctattttttaagtgaaaatggcattagcatcttatttgtcaggctttcattttcgtgtttgagaattccacttgtagataaccaatagctataacctgttcaggtctttaaaaaatatagcttattgaatgagcagtcacacacaagaaattccgttcttcccatagtccatcatgctttacccgtattcaacttctcacttctgtatctaaaaacactagattttatcattctactttaaagtttctttcttttttttttttttttacttttcctaaa

SEQ ID NO: 388276 - DNA, 430 bp, Homo sapiens
tctgcctttcttaaagtgattggttaaaacgttttagcacttagcagtttcttcctagttttgcagatatggccctgaamtggcttatgagtaaggcaaatagaggatgttcttactgggctagtgcttttatttctctctttcgcttgttctattttttaagtgaaaatggcattagcatcttatttgtcaggctttcattttcgtgtttgagaattccacttgtagataaccaatagctataacctgttcaggtctttaaaaaatatagcttattgaatgagcagtcacacacaagaaattccgttcttcccatagtccatcatgctttacccgtattcaacttctcacttctgtatctaaaaacactagattttatcattctactttaaagtttctttcttttttttttttttttacttttcctaaa

SEQ ID NO: 388277 - DNA, 501 bp, Homo sapiens
aaactattacataattcatgtagttttcactgggcaacagtatctatcctctgaatggtgaaatggctacttttcatttatttatttttttctttcctgcggtaaaacgcttgaaaactgcaccactgggaaattgcagctatagtccatgtttcaacatagtccatgcttccttgagttggccacttactgtttactctcatctccttaggtttagcagtaaagacctgtaagatttcttctgttaggatcatctagccattccaaacatttctcttagatttgattctttcaagrcaaatcaacccaataaaaatttcataaataacggtgatctagctgccacatttggtgttctcatgtgatcaaaccaaattttatgtatacattcaattctcaatccaacccagtctgtttgcctaagccattccagacaaacttccacttcgaaggttttaaatgcataagtcagatagcaatccttcagttgccccagaggca

SEQ ID NO: 388278 - DNA, 501 bp, Homo sapiens
aaactattacataattcatgtagttttcactgggcaacagtatctatcctctgaatggtgaaatggctacttttcatttatttatttttttctttcctgcggtaaaacgcttgaaaactgcaccactgggaaattgcagctatagtccatgtttcaacatagtccatgcttccttgagttggccacttactgtttactctcatctccttaggtttagcagtaaagacctgtaagatttcttctgttaggatcatctagccattccaaacatttctcttagatttgattctttcaaggcaaatcaacccaataaaaatttcataaataamggtgatctagctgccacatttggtgttctcatgtgatcaaaccaaattttatgtatacattcaattctcaatccaacccagtctgtttgcctaagccattccagacaaacttccacttcgaaggttttaaatgcataagtcagatagcaatccttcagttgccccagaggca

SEQ ID NO: 388279 - DNA, 323 bp, Homo sapiens
ctgtgaattcaaggttagaaaaggagaaatttttatcttagcattcccaggaccaatcacaatatctaatacttacagcatgcaataaatgttggttgaactraaataaatctgatataaaaacaaataatgctttagggaagtgatttttcatttgagattattttctcagaaaaattaatatgaccaggttgtcatcctatgcaaacattagtatgccttattgatttttcactaagttatatatcttatattataagacttttttatgggtgtctctacctatagattccaggcactaacaaacctgtagaaattcataa

SEQ ID NO: 388280 - DNA, 323 bp, Homo sapiens
ctgtgaattcaaggttagaaaaggagaaatttttatcttagcattcccaggaccaatcacaatatctaatacttacagcatgcaataaatgttggttgaactgaaataaatctgatataaaaacaaataatgctttagggaagtgatttttcatttgagattattttctcagaaaaattaayatgaccaggttgtcatcctatgcaaacattagtatgccttattgatttttcactaagttatatatcttatattataagacttttttatgggtgtctctacctatagattccaggcactaacaaacctgtagaaattcataa

SEQ ID NO: 388281 - DNA, 323 bp, Homo sapiens
ctgtgaattcaaggttagaaaaggagaaatttttatcttagcattcccaggaccaatcacaatatctaatacttacagcatgcaataaatgttggttgaactgaaataaatctgatataaaaacaaataatgctttagggaagtgatttttcatttgagattattttctcagaaaaattaatatgaccaggttgtcatcctatgcaaacattagtatgccttattgatttttcactaagttatatakcttatattataagacttttttatgggtgtctctacctatagattccaggcactaacaaacctgtagaaattcataa

SEQ ID NO: 388282 - DNA, 530 bp, Homo sapiens
atctaaaattcaggaaagtaaccctatccttacctctgaggataaagcttgttaagtataggtaaaccatgayaatttaaattcacctgtttgtgattgactttttttaatgactgtttttagtcaagaaaatgtgagggtaggtctgccaagagttactgaaaagagttacattttctaaaaaaaaaaaatcctcttcttttctctttgagaataatgtgtggtatttctgaaatcattgtctgcccataaagagagattacttacacaaaaagtctgtataaaatatgactacaaagaaagatgaggaaaaaattatattcttgattaatttattgatctattaaattaatagtcttggaagtagatccctctttggacttccacttagagacagggccttactctatggcccaggctggagtgtagtagtagtgccaccatagctcattgtgtagctcaccgcaacctcaaactcctggactcaagcaaacctcctgcctcagcctcccaagtggctggaatacaga

SEQ ID NO: 388283 - DNA, 530 bp, Homo sapiens
atctaaaattcaggaaagtaaccctatccttacctctgaggataaagcttgttaagtataggtaaaccatgacaatttaaattcacctgtttgtgaytgactttttttaatgactgtttttagtcaagaaaatgtgagggtaggtctgccaagagttactgaaaagagttacattttctaaaaaaaaaaaatcctcttcttttctctttgagaataatgtgtggtatttctgaaatcattgtctgcccataaagagagattacttacacaaaaagtctgtataaaatatgactacaaagaaagatgaggaaaaaattatattcttgattaatttattgatctattaaattaatagtcttggaagtagatccctctttggacttccacttagagacagggccttactctatggcccaggctggagtgtagtagtagtgccaccatagctcattgtgtagctcaccgcaacctcaaactcctggactcaagcaaacctcctgcctcagcctcccaagtggctggaatacaga

SEQ ID NO: 388284 - DNA, 530 bp, Homo sapiens
atctaaaattcaggaaagtaaccctatccttacctctgaggataaagcttgttaagtataggtaaaccatgacaatttaaattcacctgtttgtgattgactttttttaatgactgtttttagtcaagaaaatgtgagggtaggtctgccaagagttactgaaaagagttacattttctaaaaaaaaaaaatcctcttcttttctctttgagaataatgtgtggtatttctgaaatcattgtctgcccataaagagagattacttamacaaaaagtctgtataaaatatgactacaaagaaagatgaggaaaaaattatattcttgattaatttattgatctattaaattaatagtcttggaagtagatccctctttggacttccacttagagacagggccttactctatggcccaggctggagtgtagtagtagtgccaccatagctcattgtgtagctcaccgcaacctcaaactcctggactcaagcaaacctcctgcctcagcctcccaagtggctggaatacaga

SEQ ID NO: 388285 - DNA, 421 bp, Homo sapiens
aatagtcttggaagtagatccctctttggacttccacttagagacagggccttactctatggcccaggctggagtgtagtagtagtgccaccatagctcattgtgtagctcaccgcaacctcaaactcctggactcaagcaaacctcctgcctcagcctcccaagtggctggaatacagacaggtgccaccatgaccacacctggctatttttttttcagttgtagagctaaggtctccctatgttgcccaggctggttttgaactcctggcctccagtgagcctcccacctcagcctcccaaagtgctgggattccrggcataagccaccagacctggcctatttatagtttaaattttctcatcgtctaaaataaaagatctaaaactaattgtctaagttggcagagcagtcagaaca

SEQ ID NO: 388286 - DNA, 489 bp, Homo sapiens
taaaatagtatagctgttatgaaaagcagtatggaggttccacaaaaaataaaaaagagaactattgtattacccagcaatcccactactgggtacgtaatcaaaaaaaatgaaattagtatgtcaaagagacatctgcacccagggatattgaagcatcattcaatatggaatctgcctaaatgctcatctaacaataaatggataaagaaaatgtggtgtataaatatctatctatctatctatttgtctatctatctatctgtcatctatcatctatctatttatcatctatctatccacccccccacacaccagaacaatattcagccataaaatgctgttatttttagcaatgtggatgaagttggaggacattttgttaagtgaaataagccaggcacagaaagacaarcactgcatgatcaaattcatatctggagttttaaggatatggagaaagatgttaggttttttccttgtgtggac

SEQ ID NO: 388287 - DNA, 583 bp, Homo sapiens
cagagacttagaaaaaatatggaaaattagtgaaaatgtaagagaatgagccttgaaatatcaagataattaaactgcaaactttaagaaggcaagaaagatatcctttacttagtttgtcttgtccaactaatggttagttgaatgccatgcacataacrcatccctttgagtacttattgaataaatgtagaatgtcattctggaataaattgaggcaagaaactagagggatagcagtgtgaaaaatgagattaatttatttggtatagagtcagtaaatttaagtgggccatttgaaacaacaagcttaaaagaaaaccaaataagcattttcaatgcatagaaatgcaaccatttttctccttctgtactttatccattcaaacattgcttgaaaaaaatataactttcagtcttgcttttttatctccaccaaactcagataattttggtcgttgatgacctttctaagctaattcctattttagaatgctatggatgaatgaatctcaaaacttcattaacaaatttattttattccatttcctaaggaatagaaactttttacctccaacccagg

SEQ ID NO: 388288 - DNA, 583 bp, Homo sapiens
cagagacttagaaaaaatatggaaaattagtgaaaatgtaagagaatgagccttgaaatatcaagataattaaactgcaaactttaagaaggcaagaaagatatcctttacttagtttgtcttgtccaactaatggttagttgaatgccatgcacataacacatccctytgagtacttattgaataaatgtagaatgtcattctggaataaattgaggcaagaaactagagggatagcagtgtgaaaaatgagattaatttatttggtatagagtcagtaaatttaagtgggccatttgaaacaacaagcttaaaagaaaaccaaataagcattttcaatgcatagaaatgcaaccatttttctccttctgtactttatccattcaaacattgcttgaaaaaaatataactttcagtcttgcttttttatctccaccaaactcagataattttggtcgttgatgacctttctaagctaattcctattttagaatgctatggatgaatgaatctcaaaacttcattaacaaatttattttattccatttcctaaggaatagaaactttttacctccaacccagg

SEQ ID NO: 388289 - DNA, 583 bp, Homo sapiens
cagagacttagaaaaaatatggaaaattagtgaaaatgtaagagaatgagccttgaaatatcaagataattaaactgcaaactttaagaaggcaagaaagatatcctttacttagtttgtcttgtccaactaatggttagttgaatgccatgcacataacacatccctttgagtacttattgaataaatgtagaatgtcattctggaataaattgaggcaagaaactagagggatagcagtgtgaaaaatgagattaatttatttggtatagagtcagtaaatttaagtgggccatttgaaacaacaagcttaaaagaaaaccaaataagcattttcaatgcatagaaatgcaaccatttttctccttctgtactttatccattcaaacattgcttgaaaaaaatataactttcagtcttgcttttttatctccaccaaactcagataattttggtcgttgatgacctttctaagctaattcctattttagaatgctatggatgaatgaatctcaaaacttcattaacmaatttattttattccatttcctaaggaatagaaactttttacctccaacccagg

SEQ ID NO: 388290 - DNA, 591 bp, Homo sapiens
aaaggttcacaaaatgagtccttcacctatacagcacctcttctaaataacagagagattacaaatccaatgtattcaaactctgagttgtctatatgtgtagtgttaaaaaatgtagctgtcagttttaacagcttttctcctgagatttcagtggctagctaatgatctcttttaaggattaggacaatttctagatagtgaaatggcaggaaaacatatcaaatacatatttttccattattagtattctgaggactgtaaagtcttactcaatgtatatcacttttaatttttaggatacatagaaatatttgctagtagaaataaatggcaagtgtttacttgaagatggtttaraaagacacttttctcttttaatttgaattgctactgtaaatgtcatcacatgtatttcagtattgtctatgccaaatttgtacctgaaaaacagtattatgaattgggcattatattccatcttcataaattaaaaaagaaacataataactagcgaagtggaatgaggaaggtgtggggagacacagaatttttcaaaagtagtaactaattcaagcatgtattagtcag

SEQ ID NO: 388291 - DNA, 657 bp, Homo sapiens
tttccattattagtattctgaggactgtaaagtcttactcaatgtatatcacttttaatttttaggatacatagaaatatttgctagtagaaataaatggcaagtgtttacttgaagatggtttaaaaagacacttttctcttttaatttgaattgctactgtaaatgtcatcacatgtatttcagtattgtctatgccaaatttgtacctgaaaaacagtattatgaattgggcattatattccatcttcataaattaaaaaagaaacataataactagcgaagtggaatgaggaaggtgtggggagacacagaatttttcaaaagtagtaacwaattcaagcatgtattagtcagcttaacatatcataacttaaatgatttaaattaggtatacgtttataccaataagttttaaattcttaattctaacctcatcaaataccaacaaagaatgcccttccatattaatacactttgggaattaagataaagtatatgtaattaaatcatcaaactccttttgttgtttagcaggtagtttgatataataagagaaattgtgttctcattatatatctgtcacttaatgaatgaatgtaaaaccttaatcaggctatctgacttcttttagtgacattaccctttttgcaacca

SEQ ID NO: 388292 - DNA, 479 bp, Homo sapiens
aattcttaattctaacctcatcaartaccaacaaagaatgcccttccatattaatacactttgggaattaagataaagtatatgtaattaaatcatcaaactccttttgttgtttagcaggtagtttgatataataagagaaattgtgttctcattatatatctgtcacttaatgaatgaatgtaaaaccttaatcaggctatctgacttcttttagtgacattaccctttttgcaaccaacacatcaaattagtaatatttatcctacaaaaataatgtgaagataaatgagataagatatataatagtcacaaatacttattgaataaagctgtttttatttatatatttctatgtacttactagatatgttcttattaaatattttattatggtatatgtcaagtcttttacttatttttttatacttagtatattatagaactcaccatccaataaaattgtaatacaattttct

SEQ ID NO: 388293 - DNA, 479 bp, Homo sapiens
aattcttaattctaacctcatcaaataccaacaaagaatgcccttccatattaatacactttgggaattaagataaagtatatgtaattaaatcatcaaactccttttgttgtttagcaggtagtttgatataataagagaaattgtgttctcattatatatytgtcacttaatgaatgaatgtaaaaccttaatcaggctatctgacttcttttagtgacattaccctttttgcaaccaacacatcaaattagtaatatttatcctacaaaaataatgtgaagataaatgagataagatatataatagtcacaaatacttattgaataaagctgtttttatttatatatttctatgtacttactagatatgttcttattaaatattttattatggtatatgtcaagtcttttacttatttttttatacttagtatattatagaactcaccatccaataaaattgtaatacaattttct

SEQ ID NO: 388294 - DNA, 405 bp, Homo sapiens
acttcttttagtgacattaccctttttgcaaccaacacatcaaattagtaatatttatcctacaaaaataatgtgaagataaatgagataagatatataatagtcacaaatacttattgaataaagctgtttttatttatatatttctatgtacttactagatatgttcttattaaatattttattatggtatatgtcaagtcttttacttmtttttttatacttagtatattatagaactcaccatccaataaaattgtaatacaattttcttgatttactaatcctaggtgaaaaatatatatatatatatatatatgttgtcttctgtttgaattatgcttagttgatggcattttcaataatctctctgattcttccttttcctgtgtaaactactctcat

SEQ ID NO: 388295 - DNA, 405 bp, Homo sapiens
acttcttttagtgacattaccctttttgcaaccaacacatcaaattagtaatatttatcctacaaaaataatgtgaagataaatgagataagatatataatagtcacaaatacttattgaataaagctgtttttatttatatatttctatgtacttactagatatgttcttattaaatattttattatggtatatgtcaagtcttttacttatttttttatacttaktatattatagaactcaccatccaataaaattgtaatacaattttcttgatttactaatcctaggtgaaaaatatatatatatatatatatatgttgtcttctgtttgaattatgcttagttgatggcattttcaataatctctctgattcttccttttcctgtgtaaactactctcat

SEQ ID NO: 388296 - DNA, 405 bp, Homo sapiens
acttcttttagtgacattaccctttttgcaaccaacacatcaaattagtaatatttatcctacaaaaataatgtgaagataaatgagataagatatataatagtcacaaatacttattgaataaagctgtttttatttatatatttctatgtacttactagatatgttcttattaaatattttattatggtatatgtcaagtcttttacttatttttttatacttagtatattatagaactcacyatccaataaaattgtaatacaattttcttgatttactaatcctaggtgaaaaatatatatatatatatatatatgttgtcttctgtttgaattatgcttagttgatggcattttcaataatctctctgattcttccttttcctgtgtaaactactctcat

SEQ ID NO: 388297 - DNA, 405 bp, Homo sapiens
acttcttttagtgacattaccctttttgcaaccaacacatcaaattagtaatatttatcctacaaaaataatgtgaagataaatgagataagatatataatagtcacaaatacttattgaataaagctgtttttatttatatatttctatgtacttactagatatgttcttattaaatattttattatggtatatgtcaagtcttttacttatttttttatacttagtatattatagaactcaccatccaataaaattgtaatacaattttcttgatttactaatcctaggtgaaaaatatatatatatatatatatatgttgtcttctgtttgaattatgcttagttgatggcattttcaataatctctmtgattcttccttttcctgtgtaaactactctcat

SEQ ID NO: 388298 - DNA, 429 bp, Homo sapiens
tctctaatgtgataaccactcaaaaacttccttcttcatcaaaacacagtattttttaaaaaatagagtgcttcatttttatttcacagaaaataatcaaatgatagccagaatattatgaactagagtcacataggmtattctaataatactacttgtgaaagaagtattgaggaggtcttaggacaaaagaatatttgtttaatagtgtcagaattcattttaacaccataaaaaggatatgtatttgttcaattttcactcactgcacaaagaattaaagaagattttcagtaatagcattcattttgagtcttaccaatcctttcagttttggtataacaaaaaggctattagcttttactctgttgtgttgaattttgatgatttctgacagtcttcactgaaatgctcagagatgagacttgc

SEQ ID NO: 388299 - DNA, 429 bp, Homo sapiens
tctctaatgtgataaccactcaaaaacttccttcttcatcaaaacacagtattttttaaaaaatagagtgcttcatttttatttcacagaaaataatcaaatgatagccagaatattatgaactagagtcacataggatattctaataatactwcttgtgaaagaagtattgaggaggtcttaggacaaaagaatatttgtttaatagtgtcagaattcattttaacaccataaaaaggatatgtatttgttcaattttcactcactgcacaaagaattaaagaagattttcagtaatagcattcattttgagtcttaccaatcctttcagttttggtataacaaaaaggctattagcttttactctgttgtgttgaattttgatgatttctgacagtcttcactgaaatgctcagagatgagacttgc

SEQ ID NO: 388300 - DNA, 429 bp, Homo sapiens
tctctaatgtgataaccactcaaaaacttccttcttcatcaaaacacagtattttttaaaaaatagagtgcttcatttttatttcacagaaaataatcaaatgatagccagaatattatgaactagagtcacataggatattctaataatactayttgtgaaagaagtattgaggaggtcttaggacaaaagaatatttgtttaatagtgtcagaattcattttaacaccataaaaaggatatgtatttgttcaattttcactcactgcacaaagaattaaagaagattttcagtaatagcattcattttgagtcttaccaatcctttcagttttggtataacaaaaaggctattagcttttactctgttgtgttgaattttgatgatttctgacagtcttcactgaaatgctcagagatgagacttgc

SEQ ID NO: 388301 - DNA, 429 bp, Homo sapiens
tctctaatgtgataaccactcaaaaacttccttcttcatcaaaacacagtattttttaaaaaatagagtgcttcatttttatttcacagaaaataatcaaatgatagccagaatattatgaactagagtcacataggatattctaataatactacttgtgaaagaagtattgaggaggtcttaggacmaaagaatatttgtttaatagtgtcagaattcattttaacaccataaaaaggatatgtatttgttcaattttcactcactgcacaaagaattaaagaagattttcagtaatagcattcattttgagtcttaccaatcctttcagttttggtataacaaaaaggctattagcttttactctgttgtgttgaattttgatgatttctgacagtcttcactgaaatgctcagagatgagacttgc

SEQ ID NO: 388302 - DNA, 551 bp, Homo sapiens
tggaagacactgaagaagaatcaatgtatacagagcttgagtgggattattattaaaaagaaataattatagactacaaattacattcactcagatgtttttcctctaataacatttcccaaatactgatgtgaagaaagaaagcatacacagaaagtgaaattttactgtgttgaggggacagagattagagttaagggtatccagtgtgtatggggctcacaagaccaatttccaagaaggaggtaaccacagagagagagcctgaatatctgcatacaaatgccccttaagtgtggccagtatcaaagatatgtatgcacaaggtgagacgtcaagaagcctagcagaaatcaataartgggaggttggagtgctgagtttagatttcagctagtggtttagagaagaaagaggttgtgtttcaaacactggtaattatagaggatgagatgggagtgagaaactgtatggctaaatgtggtcattcttcaggttttagcttttatgcagggtgctatatgctggttgcttccaacactgtaaaagtt

SEQ ID NO: 388303 - DNA, 551 bp, Homo sapiens
tggaagacactgaagaagaatcaatgtatacagagcttgagtgggattattattaaaaagaaataattatagactacaaattacattcactcagatgtttttcctctaataacatttcccaaatactgatgtgaagaaagaaagcatacacagaaagtgaaattttactgtgttgaggggacagagattagagttaagggtatccagtgtgtatggggctcacaagaccaatttccaagaaggaggtaaccacagagagagagcctgaatatctgcatacaaatgccccttaagtgtggccagtatcaaagatatgtatgcacaaggtgagacgtcaagaagcctagcagaaatcaataagtgggaggttggagtgctgagtttagatttcagctagtggtttagagaagaaagrggttgtgtttcaaacactggtaattatagaggatgagatgggagtgagaaactgtatggctaaatgtggtcattcttcaggttttagcttttatgcagggtgctatatgctggttgcttccaacactgtaaaagtt

SEQ ID NO: 388304 - DNA, 576 bp, Homo sapiens
gaattctgaagtaacctgacracttagtgaataacaatgtgttattcactggattcttcaattgtaaaaaatgtaccacattcatgcaagatgttcaaactagaagaaattgtgtgtgagacataggcaagaggtatatgggaataagggtaactctgcactttgttcagtatttccataagcctaaattgctgtaacaatctattaaatttttaaaatcacaaacataaaatatattctaaagggtagagaaatggactgtttttatggaaaaccatttaatgggaattggcattaaagagatggacatgtactaaaatattaatacttatttttataattttattagcagatatcagtaaatactatttaccttcatgaatattttgggtagtctttaaataatatccagatggaatgtatctgaagatgctttggaataaaatatacaatttcaacattgaaaaaaatataataaaatatctgaaaaggatatgcctgagctgtagatgaagaataaacccacgcttattatttatgcacacctaaaactctatcacatcaactaaaaaatga

SEQ ID NO: 388305 - DNA, 576 bp, Homo sapiens
gaattctgaagtaacctgacaacttagtgaataacaatgtgttattcactggattcttcaattgtaaaaaatgtaccacattcatgcaagatgttcaaactagaagaaattgtgtgtgagacataggcaagaggtatatgggaataagggtaactctgcactttgttcagtatttccataagccwaaattgctgtaacaatctattaaatttttaaaatcacaaacataaaatatattctaaagggtagagaaatggactgtttttatggaaaaccatttaatgggaattggcattaaagagatggacatgtactaaaatattaatacttatttttataattttattagcagatatcagtaaatactatttaccttcatgaatattttgggtagtctttaaataatatccagatggaatgtatctgaagatgctttggaataaaatatacaatttcaacattgaaaaaaatataataaaatatctgaaaaggatatgcctgagctgtagatgaagaataaacccacgcttattatttatgcacacctaaaactctatcacatcaactaaaaaatga

SEQ ID NO: 388306 - DNA, 576 bp, Homo sapiens
gaattctgaagtaacctgacaacttagtgaataacaatgtgttattcactggattcttcaattgtaaaaaatgtaccacattcatgcaagatgttcaaactagaagaaattgtgtgtgagacataggcaagaggtatatgggaataagggtaactctgcactttgttcagtatttccataagcctaaattgctgtaacaatctattaaatttttaaaatcacaaacataaaatatattctaaagggtagagaaatggactgtttttatggaaaaccatttaatgggaattggcattaaagagatggacatgtactaaaatattaatacttatttttataattttattagcagatatcagtaaatactatttaccttcatgaatattttgggtagtctttaaataatatccagatggaatgtatctgaagatgctttggaataaaatatacaatttcaayattgaaaaaaatataataaaatatctgaaaaggatatgcctgagctgtagatgaagaataaacccacgcttattatttatgcacacctaaaactctatcacatcaactaaaaaatga

SEQ ID NO: 388307 - DNA, 576 bp, Homo sapiens
gaattctgaagtaacctgacaacttagtgaataacaatgtgttattcactggattcttcaattgtaaaaaatgtaccacattcatgcaagatgttcaaactagaagaaattgtgtgtgagacataggcaagaggtatatgggaataagggtaactctgcactttgttcagtatttccataagcctaaattgctgtaacaatctattaaatttttaaaatcacaaacataaaatatattctaaagggtagagaaatggactgtttttatggaaaaccatttaatgggaattggcattaaagagatggacatgtactaaaatattaatacttatttttataattttattagcagatatcagtaaatactatttaccttcatgaatattttgggtagtctttaaataatatccagatggaatgtatctgaagatgctttggaataaaatatacaatttcaacattgaaaaaaatataataaaatatctgaaaaggatatgcctgagctgtagatgaagaataaacccackcttattatttatgcacacctaaaactctatcacatcaactaaaaaatga

SEQ ID NO: 388308 - DNA, 409 bp, Homo sapiens
atgcaaaggatccacaaggtatctaataatttttatttttaccaagctcatgagtaagttagttagccctgaaacggttttggagaaaaaaaaagtgttttagtttcttcatctgtaaaatatttatgtggcaaatgattgagcaaatatataaatttaagcagtttgatcctagaacttgttrtgtttaagaatatggattattgagaagtacttcaccatagtatttatcacatagtatgtcctaatttaagattaactatggttgtaatcataataaagtattttgaaaattcttttgaaaactctgttttaataaattatagattgaacattgagataagatggagttatccatgatctttaagacagcaaaattaggtcttgaaattaaaattgaaatgaatat

SEQ ID NO: 388309 - DNA, 409 bp, Homo sapiens
atgcaaaggatccacaaggtatctaataatttttatttttaccaagctcatgagtaagttagttagccctgaaacggttttggagaaaaaaaaagtgttttagtttcttcatctgtaaaatatttatgtggcaaatgattgagcaaatatataaatttaagcagtttgatcctagaacttgttatgtttaagaatatggattattgagaagtacttcaccatagtatttatcacatagtatgtcctaatttaagattaactatggttgtaatcataataaagtattttgaaaattcttttgaaaactctgttttaatraattatagattgaacattgagataagatggagttatccatgatctttaagacagcaaaattaggtcttgaaattaaaattgaaatgaatat

SEQ ID NO: 388310 - DNA, 471 bp, Homo sapiens
agaagtgtatttgtattgttcatttgacctcatttattttactatgcaagagtatgcttaaaaatatttcagccttctttttactatatatgcaattagtcatyatttattgagatattatatatccatcattacttcaatgatctcatttttagctttcctctttattaatggatgcagtaacttctggcattcccctgagaatattaattctacttatttggaagtactctttttattgctctctgctgtctttcttttgtattttatgcatctttcatttgctttatgttattttaaatcttaccctatgcacttacaatgatggcacttctctgaatgactgttgattttcttcctttctttctttttttcatgttgtctacattttttttttcaaggtgagtttctgctagactgttattactgagcaatcctttggtggagaaggaggttcatgctgctaccggc

SEQ ID NO: 388311 - DNA, 471 bp, Homo sapiens
agaagtgtatttgtattgttcatttgacctcatttattttactatgcaagagtatgcttaaaaatatttcagccttctttttactatatatgcaattagtcattatttattgagakattatatatccatcattacttcaatgatctcatttttagctttcctctttattaatggatgcagtaacttctggcattcccctgagaatattaattctacttatttggaagtactctttttattgctctctgctgtctttcttttgtattttatgcatctttcatttgctttatgttattttaaatcttaccctatgcacttacaatgatggcacttctctgaatgactgttgattttcttcctttctttctttttttcatgttgtctacattttttttttcaaggtgagtttctgctagactgttattactgagcaatcctttggtggagaaggaggttcatgctgctaccggc

SEQ ID NO: 388312 - DNA, 467 bp, Homo sapiens
tgatgattctgagtaagatgtgcggtcatctcacttacacagaggagatatttagatcacaaaatatctcattttgtctttagatggtccaggaaactatgccccatgagtcaaagagatttaggttatcataaacaaccctagaaaggaaatcacagcacatacattcttctaaaagcattctgtaggtaagatattccttcctggaaacttcttagttygtttgccaagaggttagctggttgtatggttaccaaaaaacctgccttctttgtctccagcatgtttcttattaaagagaatgaatgaattgcagaactattgtttgcacatttacttttaaatggtttatcagtaaaatatgtgagaatacatttttaaaataaacttatgtgattgctttggaaaatgtctggaaatacgcaaaccacactgataataatggccttctggggatgaaccaacac

SEQ ID NO: 388313 - DNA, 467 bp, Homo sapiens
tgatgattctgagtaagatgtgcggtcatctcacttacacagaggagatatttagatcacaaaatatctcattttgtctttagatggtccaggaaactatgccccatgagtcaaagagatttaggttatcataaacaaccctagaaaggaaatcacagcacatacattcttctaaaagcattctgtaggtaagatattccttcctggaaacttcttagttcgtttgccaagaggttagctggttgtatggttaccaaaaaacctgccttctttgtctccagcatgtttcttattaaagagaatgaatgaattgcagaactattgtttgcacatttacttttaaatggtttatcagtaaaatatgtgagaatacatttttaaaataaacttatgtgattgctttggaaaatgtctggaaatacrcaaaccacactgataataatggccttctggggatgaaccaacac

SEQ ID NO: 388314 - DNA, 411 bp, Homo sapiens
cttttgtcttgggagatgtattattatacaaaagatctatttggcaatttatagtttgctttttatctattcaattgttccctggtattcttagaacagaaaagcgaaccttttaagaataataacatgccaattacctttaattactctctagctctttcagttaaacaaaaaaaayctctcattttaggtttagtttgtgactgaatagaacattttatatctaaacccttaatggaaaggctttcctatttcccacaattttcttttccatttaatgtattctctaaatttaacacattatttaaaatgccatccatatacctgatcaacttgaaaagatggagaaacacaaaagtaaagcttattatctgttcacattttattctatgtttccattttcataatcaa

SEQ ID NO: 388315 - DNA, 411 bp, Homo sapiens
cttttgtcttgggagatgtattattatacaaaagatctatttggcaatttatagtttgctttttatctattcaattgttccctggtattcttagaacagaaaagcgaaccttttaagaataataacatgccaattacctttaattactctctagctctttcagttaaacaaaaaaaatctctcattttaggtttagtttgtractgaatagaacattttatatctaaacccttaatggaaaggctttcctatttcccacaattttcttttccatttaatgtattctctaaatttaacacattatttaaaatgccatccatatacctgatcaacttgaaaagatggagaaacacaaaagtaaagcttattatctgttcacattttattctatgtttccattttcataatcaa

SEQ ID NO: 388316 - DNA, 411 bp, Homo sapiens
cttttgtcttgggagatgtattattatacaaaagatctatttggcaatttatagtttgctttttatctattcaattgttccctggtattcttagaacagaaaagcgaaccttttaagaataataacatgccaattacctttaattactctctagctctttcagttaaacaaaaaaaatctctcattttaggtttagtttgtgactgaatagaacattttatatctaaacccttaatggaaaggctttcctatttcccacaattttcttttcyatttaatgtattctctaaatttaacacattatttaaaatgccatccatatacctgatcaacttgaaaagatggagaaacacaaaagtaaagcttattatctgttcacattttattctatgtttccattttcataatcaa

SEQ ID NO: 388317 - DNA, 529 bp, Homo sapiens
gtagtcctttaaggcattagaacgatttgtgaaatcactaaaaatactaggggaaatattcaaaaaatgacaatagtgccattattcctcctcytcaaagagactatcagaactaaaactctttgcttcatgttcctgtttacttctgtcactttcaagtcacagaggtattatcagactttcatcattatatgactctgcttttccaacagaatcaattacctatcccttatctcacatcttgatagtgatagatattgaatgcttatgttctgattagcaaactgtttttgcatttttaataaaaatttgaactcctgatatgtctggaaaatataaccccttcaacagccctttcaatgggttgctactattttgctcaccccatcttcacctgcctaatgatgaggatgcggggtatatacaatttcagttaatttgtagttatcagtctattatagttctttccttctgaaaaccaacaagtaaataaaccaacaagcatcaccaataaactttgacagtttat

SEQ ID NO: 388318 - DNA, 544 bp, Homo sapiens
ataaactctgtcgttattctctattgtgcttacctcaaactggtaacactttcaaatcttacctgtcagtttcttgaccaccatgcatgttaataacatttcttctctattttagacagcaaatgtttctcaatattttaaaaaaattaaaatatcctactctttggtcctctctacctcccatttcatccaatatcacttgttcaagacctgaactcgtacaggttttaacctcttgaagactgtcactctatggactctactctcttctctctcctccatagccttctcattgcttatcttccctacttgtccaggaaatgatgacatgtttcrtcactataattaatccctttcaaatggcctttatgccaaattattttattatatgctctttctgtgccatgccttgttttccaaatttaccacagtacaaattttacaattagttttccattactgaattagtaccaatctctgtcttaaaaaataaatacagtaaaaaatgataatgaatttattttttcttataatactatcactg

SEQ ID NO: 388319 - DNA, 562 bp, Homo sapiens
agtgtttctggagtttttggtactatacctttttcaagataaagtaaaaaaatttatggataatttagttgttccctgtgtagattccagtgccaaattcctttcttagacactgtttctagtacaacatgttaatatgtgacccctgcttcacttacggatttttagagatctatcccaggttacttaattcaactccaatacatacttttcttttaaatgcagtgaataaagggtgagttacttagtcactccggttttatttaatcctactgtcatctgacaatatggtactgatackatttcctatttctagatggttgctagaaatatactgtaatatttattcttgatatatgtttgttactttaacgggaatacataggctataaatagtccccttggctctcacaagttagacagtcctacccagaatgccctgctgaagagttgtagcagatcaccctgttcctccttaacctctctgtgtctcatatgctcacctgtaaaatagtaatcatagtaacacctaacttgtgatgatgtagagaggattaaagaa

SEQ ID NO: 388320 - DNA, 552 bp, Homo sapiens
tgactatggtccttaactcctctcctaatttttgctctgagaagaaaattatcatcataccatgaaagtagtatatgaactctatcttttaggttattctttaccagattatggaaatgtgataatgaatttttttaaaaatccatgataagacagtaaacatatacttgtttctattctgcaaagcttaaaatattcctacttgaaattaaaaaaaaaaaaaaatcttaggaggcccctgagattggtttaatgctctgttgtagctatcttgaaattcttcataatttttgagtaagtatccatgcattttcattttatactcagctctacgaattatgtagttaatcttgataacatatcagagcctcttgtctactttattttctgtacattcttmatcatatcaggtacagatgaagcatgcaaatgaaccaccttgatactctactgtaactgtccaggggctacctacttattgaccagttagaactacaaaaaggaagttaatgtggggaggggaacttccttctgaaccattttcttaattac

SEQ ID NO: 388321 - DNA, 619 bp, Homo sapiens
tgctgtgattctacacatagaaaatcctaaagtctccatcagaaggccctttgaactgataagtgaattcagtaaagtttcaagaaataaaaacattgtaggaaaataagtagcatttttatgaaccraaatcattgcagctaataaccaaaccaagaacacaatccaatttacagtacccacaaagaaaatgaaatacctaggaattcatccaaccaaggaggtcaaagaccactgcaaggagaagtacaagacactgttgaaagaaatcagagatgacacataaatggaaaaatatccatgctcatggattggaagaatcaatattgttaaaaatggatatactgcctaaagcaatttacagattcaatgctattcctatcaaaataccaatgccattttttaaataattagaatgaaacctattataaaattcatctggaaccacaaaagagattgaatagccaaagcaatcctaagcaaaaagaaaagccagaggtatcacattgccagacttcaaactgtactataaggctacagtgatcaaaacagcgtggtactgatacaaaaacagacacacagaccagtcagtggaatagaatagaagacccagaactaa

SEQ ID NO: 388322 - DNA, 619 bp, Homo sapiens
tgctgtgattctacacatagaaaatcctaaagtctccatcagaaggccctttgaactgataagtgaattcagtaaagtttcaagaaataaaaacattgtaggaaaataagtagcatttttatgaaccgaaatcattgcagctaataaccaaaccaagaacacaatccaatttacagtacccacaaagaaaatgaaatacctaggaattcatccaaccaaggaggtcaaagaccactgcaaggagaagtacaagacactgttgaaagaaatcagagatgacacataaatggaaaaatatccatgctcatggattggaagaatcaatattgttaaaaatggatatactgcctaaagcaatttacagattcaatgctattcctatcaaaataccaatgccattttttaaataattagaatkaaacctattataaaattcatctggaaccacaaaagagattgaatagccaaagcaatcctaagcaaaaagaaaagccagaggtatcacattgccagacttcaaactgtactataaggctacagtgatcaaaacagcgtggtactgatacaaaaacagacacacagaccagtcagtggaatagaatagaagacccagaactaa

SEQ ID NO: 388323 - DNA, 602 bp, Homo sapiens
ataaaacgtctgaataaatatagattctctctgttattattaggtgttatttatttccacaacctacaaaaaatcttcaggcagggtactatttaaaggtgcaatattgaaaaattccacataaaatcaggaaaaaagaaagaatgttcatctcactactattcttctacacattactgtaagcactaaccattataaaagraaaataaagggcataatgattgaataggaaaaacaaaattgtctttacttgaaaatgagatgattatggaaaaaaactaaggaatacatttcaaaagctactagaactaaataatatatatatatatgaaatttatagcaaataaggttaatatagaaaagtgcatgttgagtgttccttatccagatatctgaaatctgaaatgctctaaaagctgaaactttttgagagctgacgtgatgctcaaggaaatgttcacttaagcattacagattttggatttctggattagcactactgaatttgtaagtataatgtaaatattctgaaatctgaaaataatttgaaatctgaaatacctctggtcccaagcattttttaactcattatatgtgctcat

SEQ ID NO: 388324 - DNA, 599 bp, Homo sapiens
tgtctaattacaacaactattgcggtyttgatgtattttcttatcattttatttatttatcattgatatcttaggtgagtattaaaatatagcctgacattattttatgattaatagtttatttaaaatatattatatgattaagtgtctatttaaaattaagcctgttaaaaataaaactattgatctttcctatcctctaatcccaaatttgctcctcccaaatttaaacctaggtgagtaattccaactctgttcttcccatagttcaggccaaaacattgccaatatcatggacttttgcctctaatatacagggttcaaatatatcttgtttgcatagaacaatttcaatttataatttacatagtttatagtttagaacagctttccgaatagtttacacaatagtttcctcactaatttccctgttttctcttttgctatgctatggtctattttcacaaatcagtcaaactgttactgctaattctttaaagaggcgattgcttttccatttaaaacccttcattttctgccaattaaataaacaaaagttcttaccattttctaagaagctttatgtgaccatctcccca

SEQ ID NO: 388325 - DNA, 599 bp, Homo sapiens
tgtctaattacaacaactattgcggtcttgatgtattttcttatcattttatttatttatmattgatatcttaggtgagtattaaaatatagcctgacattattttatgattaatagtttatttaaaatatattatatgattaagtgtctatttaaaattaagcctgttaaaaataaaactattgatctttcctatcctctaatcccaaatttgctcctcccaaatttaaacctaggtgagtaattccaactctgttcttcccatagttcaggccaaaacattgccaatatcatggacttttgcctctaatatacagggttcaaatatatcttgtttgcatagaacaatttcaatttataatttacatagtttatagtttagaacagctttccgaatagtttacacaatagtttcctcactaatttccctgttttctcttttgctatgctatggtctattttcacaaatcagtcaaactgttactgctaattctttaaagaggcgattgcttttccatttaaaacccttcattttctgccaattaaataaacaaaagttcttaccattttctaagaagctttatgtgaccatctcccca

SEQ ID NO: 388326 - DNA, 599 bp, Homo sapiens
tgtctaattacaacaactattgcggtcttgatgtattttcttatcattttatttatttatcattgatatcttaggtgagtattaaaatatagcctgacattattttatgattaatartttatttaaaatatattatatgattaagtgtctatttaaaattaagcctgttaaaaataaaactattgatctttcctatcctctaatcccaaatttgctcctcccaaatttaaacctaggtgagtaattccaactctgttcttcccatagttcaggccaaaacattgccaatatcatggacttttgcctctaatatacagggttcaaatatatcttgtttgcatagaacaatttcaatttataatttacatagtttatagtttagaacagctttccgaatagtttacacaatagtttcctcactaatttccctgttttctcttttgctatgctatggtctattttcacaaatcagtcaaactgttactgctaattctttaaagaggcgattgcttttccatttaaaacccttcattttctgccaattaaataaacaaaagttcttaccattttctaagaagctttatgtgaccatctcccca

SEQ ID NO: 388327 - DNA, 578 bp, Homo sapiens
ataattatattcaagaatttgttaaccttttatctcactaaataaatttcaatattcattataaataacaaattcaagcatttaaaatattatttatatattcttaatttttgttgtttgttttaattacacatgtcaatcctgttatggaatgacatcaacatccccttggcaagaggatatttttaaatttccacatgtacattttaagagtttgatacaaccctatttatctatgattttctctttcctatamttagtaattttcactgtagaagactcacttataaaagtgtatattattattatatttggatgataaactaaaattttgaaatatttagaagcattgttatgaactcattaaaattatcagaatcacttcatataaaatgatatttaatattttcttatacataaataaattagtgacattaattgttttatacttttaatttaatttgattatgaaaactttctatgtgtttttgaatttgtgtaaccttagacagattgctaagcccatttcatcatgcattaatagaataggattagataatctctaagggtccttttgg

SEQ ID NO: 388328 - DNA, 578 bp, Homo sapiens
ataattatattcaagaatttgttaaccttttatctcactaaataaatttcaatattcattataaataacaaattcaagcatttaaaatattatttatatattcttaatttttgttgtttgttttaattacacatgtcaatcctgttatggaatgacatcaacatccccttggcaagaggatatttttaaatttccacatgtacattttaagagtttgatacaaccctatttatctatgattttctctttcctatacttagtaattttcactgtagaagactcacttataaaagtgtatattattatyatatttggatgataaactaaaattttgaaatatttagaagcattgttatgaactcattaaaattatcagaatcacttcatataaaatgatatttaatattttcttatacataaataaattagtgacattaattgttttatacttttaatttaatttgattatgaaaactttctatgtgtttttgaatttgtgtaaccttagacagattgctaagcccatttcatcatgcattaatagaataggattagataatctctaagggtccttttgg

SEQ ID NO: 388329 - DNA, 423 bp, Homo sapiens
ttgttttttctttctctatatattcctaatagctagaacagtgcctgatacatagtaggtactgaattagcaytctttacaaaaaataaagaaaatactatatacagcccagcgactccggcatttgtacttctatcctagtcctctctctgatttccaggtctgtatattccactgactacttggttgtccccaactgattacttcataaacatctcaaatgcaaagttttcaaaactggttaatccatctcatgaaacctgagtcttttttcatgtttctcttcacacagtctgggaatgacttttaatttcccccttcctcatctccctataataacaaaatgctaattctatctctaaaatacatcatgactctcttctttgccccatctctaccaatggcactcttgtccaaaatacc

SEQ ID NO: 388330 - DNA, 580 bp, Homo sapiens
ttcacatctaggaattggtagaggtaggactggattccaagactasctctctttcccttatcatatgcttcaggtatctattttatcaacaaaaattcagaaggggattgttttagttgatttcagtgagttaattcgtattgagtataattcaacagtgaatgtagttgattgtgtttgttgaataaataaatgagtttattttctagtttagaaaacttttctgtctgggcacagtggctcatgcctgcaataccagcactatgggaggctgacgtggaagaattgcttaagaccaggagttggaggccagcctgggcaatatggcaaaaccccatctctacaaaaaatacaaaaattagccaggtatggtggtgcatgcctacagtagttccagctactcaggaagctgaggagcaaggatggcttgagctcagtagggaggctacagtgagccataaatgtacctgggcaacagagcactccagcctgggcaacagagtgagaccctgtatttaaaaaaagaagaagaaagaaaaagaaaaaaaagaaaaattttctgacgtacctctgtgcttca

SEQ ID NO: 388331 - DNA, 592 bp, Homo sapiens
tgctatccagactttacattgatatagggaatggctgtagtaaacaacacacaaagcagttaatggttttattcatatgatgaatcatttacattcagttaaccattatctgaataatgataatcatagcattgcatagtttgcccttcaacctgtattgtttttgtttttgtttgtttgttttgtgtgaagtcaaggtctttctatgttgcccaggctggccttcaactcctggcctcaaaccatcctcccatcttggcctcccaagcgctgggattacaggtgtgagcaactatgtctggcctcagcctataatctttagctttatataatacctcttgaggcgaactatcacagaatgattatctcccttatacagatagatgcttttttttctggatgcttttttgaggccactcagaaatcaggaaaagactttatgcccttcttccaaatacagcatagaccactggagactatgactgagytttttattacctggggatggggactactgcaggctttgcaccttgttagcatagagggtggaaccaggattgccaaaccaccattaagatgcttaggccagaag

SEQ ID NO: 388332 - DNA, 525 bp, Homo sapiens
ggtgatgttactctttccttttctaatagcaattacttgttttctttagaactctctcacctagcatgaacttccaagatattgttaagtaactgcagtgaaaattaatttaccttaaagttttgctgtagtttaagactttttatcatgttaaagaaaaataatcttctttaacagttaggaatgggagttcattcttatcaaattttaattaaaaatgattattcagtccaggcacagtgtctcacacctgtaatcccagccctttaagaggctgatgtgggcggattgcttgagcccagaaattctagaccagcctgggcaacatagcgagatcytgtcactacaaaaagtattaaaattagccaggcatggtggtgcacatagtcccagctacttgggagactgaggcaagagaatcacctgagtccagaagttgaggctgcagtgagccatgatcacagcactgcactccagactgggtgacagagtgaaaccctgcctcaaaaaaaaaaaaaaaattca

SEQ ID NO: 388333 - DNA, 634 bp, Homo sapiens
gccattacagtaagtaattaaatgcttaacactttcatactggacttgctgctttgactggctactctcatgcatggcagctcagcctatctcccagctcagctgagctcctgacatctaaaatagatttttttttttttttttgtaatttacaactcaataataaaaagatgaataatccaattaaaagatgagcaaaggaactgaaatgacatttctctcatggagacatacaaatggccaaaaagctgatgaaaaaatgcttaacatccttaaacatgagggaaatgcagaaaaccacaatgagataccacttcatatccactragggggctataatccaaaaggtgaataacaagttttggaaagatgtggagaaactgcaatcacatattgctggtgtgaacgtaacgtggtgcagctgtcttggaaaacaatatggcaactcctcatatcatctgatccagcagtttcactcctagctatatatgtgagagacggattaaatgagatgaaatgaagtgaaagggaaatgaaaatgtgctcatataaaaacttgtacacaaatgtttgcagcagcataattcataataactgaaaggtagaaacaacacaaatgtttatcagctgataa

SEQ ID NO: 388334 - DNA, 397 bp, Homo sapiens
tttcaaaagaaatatcaccactcaatatgtactcacttgaggcttttaaaggatacatgagaaagagaatgyaagcaggtattggaagtctccagagatatcccatagcttgaactccccagggctccatctgcatattaggactgggcagtgtcctagtgtgtccatgatttgaactgtcatctgtgtaaaaaaccttggctccaggggagcactccaaaaaaatctcagtagctcttttagtcaaaccaggcttatcagaccagttagtcctgttgcctaaccataagttaagaaggtaaacttggaatatggcaaggatgtttcggtccctaaacagtacatcataaatgccactgaccttaagagtaaaaaacttccaatgtctaaatatccc

SEQ ID NO: 388335 - DNA, 579 bp, Homo sapiens
tacatacaagttgagtacatatttaggacacaaaaatgctgaattccttaggatgtcatatagttagtagtcatcccccaaaacactttagtctgagtatgccggaatttgctatatactcccttggcagacattggggctatcagtaggaggtatgggcccaccaagtcacccctaaacagacattgaaatctgtttgaaaagtattctttacattgatgatttccctccatccacataaacatgggttatatgcattaggccacgtaatactatgacaaattgaacctgcaacaaatttgttcatcatgtttaggcatcttcctcaacaggccatcatttagtttaacagttacacagtgatctatggctctttcctgcatggtacttcccaaaagctgtctttcgcagggtgttgaaaatgtcattgggatgcttcgtatacatgaacatatgttaatgcttcttgaattccctgaagctcatcctggaccttcagattcaagcaaaggaggagttttctgcagrcttacacattcactctcatgggcatttgtaactatatctgagagtaaatat

SEQ ID NO: 388336 - DNA, 575 bp, Homo sapiens
ggcatactgtagatgcttggaagccaccaagaacaaaagaaacctagatgatttgctgttccagaggatgtgtagtacaacagacagaagttaaagcaacttaatggccctttccattggacaggggagtggagtacagatccaacattccagcttttaggataactacccaagaaactgttttctgtctcacccaatgtgtatcactgatgagatctagtatattttagaagcctgggggacactgaaagcaaacaaaagaatttgcaacagctccacataaccgcggtaccatagacagacaccagagggaataagattttagaaattccattaaggggcaccagcagatccctgaaatcaggaatttacttgcacaatccagggaagacgcatccmcaggaaaaaaaaaaaaaaaaaaagaaaaagaaaaaaattgagaagttgtcataatctccagccagggtgattagtaaacgtcttttcctgtatgaagccactccataaagactgggagaggaggctgttttttaaagtgtgtggattgcaacacaaagtcatgaggcacaggaaga

SEQ ID NO: 388337 - DNA, 575 bp, Homo sapiens
ggcatactgtagatgcttggaagccaccaagaacaaaagaaacctagatgatttgctgttccagaggatgtgtagtacaacagacagaagttaaagcaacttaatggccctttccattggacaggggagtggagtacagatccaacattccagcttttaggataactacccaagaaactgttttctgtctcacccaatgtgtatcactgatgagatctagtatattttagaagcctgggggacactgaaagcaaacaaaagaatttgcaacagctccacataaccgcggtaccatagacagacaccagagggaataagattttagaaattccattaaggggcaccagcagatccctgaaatcaggaatttacttgcacaatccagggaagacgcatccccaggaaaaaaaaaaaaaaaaaaagaaaaagaaaaaaattgagaagttgtcataatctccagccagggtgattagtaaasgtcttttcctgtatgaagccactccataaagactgggagaggaggctgttttttaaagtgtgtggattgcaacacaaagtcatgaggcacaggaaga

SEQ ID NO: 388338 - DNA, 557 bp, Homo sapiens
atgtaagtagtcgaaagacatcttctattggctgtagattgtttatttcctcaaggctcatgataatggtatcattagcccagaggaaaactcaaatttttacacattcaattgcttaaaaatgtagtccaaataagcatatttttagtgagttagagtctgcctgctttgcatatcccagaacatttcactcaacatctactagccttagttagataagacaaattctggagttataaaagactctaagccactgctgtcctttgaaaatcttggtcctagagacttctcatgttgctgctttgtgacatcatgtagatacacaagcccctcaccaattaccctctcttgcccttgccctagtttccttctggatggtagtcctgtgccattgtcactggaaggtctcatgctgtaatatgcgcccctcatgccccaccacacatacacatgaaaacctgtcaaggtaccaccctaataaaactcattgtttgttaatgcccccttgctatcatatatatwttttttttatcagccctgaaatcctgaactcgctt

SEQ ID NO: 388339 - DNA, 492 bp, Homo sapiens
agaggagaaggacaacaaaactaagagacagacataaaacaattaacaaaatctaataataatccactccatcagtaattactttaaatgtaaatggataaaattgtccaattaaaagacatataaaggctgaatggattttaaatatgattcaaccatatgctgtctgcaagaaacttgctttagatttatagacatatatatgctgaagtaaagagatggaaaaaatattccatgaaaattgtaaccaaaaaaggttaaaaaggccatacttatagcagaaaaaaatagactgtaaatcaaaaactgtcacaacagacatatcracattatattatagtaagtggttcaattcacaaggaagatataaaaattctaagtacacatgcagccaacatcagaccactcaaatatatgaagcaaacattaatagaactgaagggagaaataaattacaattaataataggagattttaacttcagcttcaata

SEQ ID NO: 388340 - DNA, 581 bp, Homo sapiens
tacgtcctatgcagttcaacaaagcaagaaagaatgataaaatgattgaaaaggaagaaatacattttyttctatgaatagacaattttctatatagaaaattcaagagtattatatatgaagagctgagatagtgacaatattttttttctatttttttccacttgcatggtgatgatgatacaggtatttatttttgttacttgttatatgggacatttatgctttcttcactttttgaatatatgccatatttcacaaacttgaaaaaattttttaaattcatgagaattgacaaaccatgggaaataaaatatttcaaaaaactaagaaattaaaatcagtaatgcccctatgtagcagcaataacaaatcagaagttttgattaaaagagataaagtgaatcttagtttatgtgaaagtattttagggtttgtgagggggttgttggagagatccgggatggatgactccgtgtcaagacagtaaattggagacccatatgccctctgggttgagtagaggcagaccagctatgcctctaatagctggaagtcatatctactatgttggaactatc

SEQ ID NO: 388341 - DNA, 539 bp, Homo sapiens
tgggggtcctgtatattcaggttttgcccaagggttagtttatctgcttcttgtgctaacaaggctattgctgccagggcccttagacatgggggctagcctttggaaaccatgtctagttgttttgagagataggccactggccttggccagagccccacagtctaggttaaaactccgactgccattttttctctttctgacacatagagtgtaaaggattttgtcaggtcaggtagccccagggmtgaggccaacatgagtttttcttttaactcatgaaaagcttgttgctgttggttgtaatagatggagtttatccaatctacatttttattaactgtcacccaccaaaatattgactcatatcctgcagctatttgatttcaagctttaaatttatctggtattccctgtgggactccaattgcatctagatagatgtgagagtcaaaagacccataagaggctactctcgctttatgatgtcttattttttctccctctagttgatgaaatgccagggtgaaagggatagc

SEQ ID NO: 388342 - DNA, 617 bp, Homo sapiens
tgtggataaagaacagctttggctctgtaatatttaacatcacctggtgttaagccattttgtttgagatcacttacaaactggaaacaagacagactagatgaaagagactgttcaggggtttatctgtgaacgtactgtctacagccattttaatacactcattatgttttgctagtataaattttttaaaaaaattgttgatattccttctcatcctcatactgctttgctgcccacctggaaggttatggtgtttatacaaaaagggcttgcgtcatgctcagcatctcaagagccaaagwtggatcttacattaaatctgagtttggcttgcatggagagatgaagagatgttctcgtccaagtttggcagctgcttagatgttgaggtcccaatgtttcaaacgcagctcaaaaccctttagtgttttgagtttggctcttggcaaggcatgatttcctgtttctaagaaaaaagacacatgagagagccttaataaagcttcttggacatcaaaacaacattttgatgaattaattgtaaatgaatcagaaacatatggatgcattctcttgagacacacacatgtttaaaaagagggggaagggttgtt

SEQ ID NO: 388343 - DNA, 590 bp, Homo sapiens
atagaagttaaaaaagttttatatttaccatcacttcattgcatttccagcactctttacttctctataaaaatcctaatttctatctagtatatattttttcctttcaagggaattttttaaaacattccttataatacagtaaattctttcagttttgtttgtctaagaaaggcgatcttactttcattttgaatatattttcacagactttttggatgtcctgtaaccccaacttattggtggattcaagggaagttatagttgtctacctgccttgtccttgttagtgtaagaataatgttctttccagctttctacatcctagatagaaatggaattaacatattttttagttactatcttttgagtctgggtttgtgataggcttcatggatgtacagaagaagtaaaatacatattttcawacttgaaatagcttgccataaaattggaagagaaactggcctacctaaagcaatagttctaacatatagtaggtagcttaatgctactttacggaagtaaaaaccattctaggaattcataacagatgatcgttgatgaatattaacatagtcaggaaaagt

SEQ ID NO: 388344 - DNA, 609 bp, Homo sapiens
tgtcttcctggcttggagacagctgccttctcactgtgcctttatatggtagaaagaacaaagcaattctctggggatctctttaagggcactaatctcattcatgagggctccactctcgtgacctaatcacctcccaaaggccccacctcctaacaccaccaccttgggagttaggatttcaacacatgaatttgggggacacaaacattcaaactatagcgactacttagcttattgtaaatgcatcaatgtacaacatttcatcatatcaagttacttctttcatgcstaaaccagcaccaagccaactttgttaattctgaaatattctcactatgagagcactgaaaaacatataagcaattgaagccatagtaatgggccactgacacaaaattatagtatttcttaagagcataaacaggaatatgttgtcttaacagggccttttctcctccctaccaccccccacccaaaaaagaagtttacggacctaaactatcttagtgtatttatcttttgttttgaatgggagttttagtgtctacaaaatagtcaatacattctgtttcacaaatatgcttggaaataaggtttttatactgc

SEQ ID NO: 388345 - DNA, 550 bp, Homo sapiens
caagtattttttttaaaaaaagagagggtcaataatttggcaataatttataaaatgtttgtttttattgggtatacaagaagaaaagacaagtttatataatggaaagagagtttttgattcagtgtttaaaaaaacaactgattggctttaggctcaagttagaagaaacatctaagayattattagaaaaattaagtattatattctaactccacatcttcactaatttatttcccactgaaatgacctgttaagaacaacaggggaaataaatctgatggctgtaaattatatgagactggagcatgtgcctcaaaacattcaagaaaatgctgctgggtagatggataatatttagttgaaatcagatagaaggaagcagtaaggattgacttgaagttactggagaggctattacctaagaaaaccatgaatttcatggaaatcagtgaactatgtcctgccagaattagttaatgtttctgtgctggtcatctgttaactgcataacaaatgagcttgaatttctgggcttgaaataaggctt

SEQ ID NO: 388346 - DNA, 486 bp, Homo sapiens
  misc_feature (1)...(486): n = A,T,C or G
tgagggttactttttgccaccaaacctactaggcgttttattagaattatgtcatttaatcttcaccacagctatatgggtgaaataattattctttcaattttacaggtaagaaagctaagccttagagagtccaaaatcatattagttaacagagctgggatttgatttacctaaagcaggtgtaagagtctgtactctycactgtttccatataacataggtactctattcatttaacagagtagatgagatatctgtatctatatccataatcatacctgtatctatacagatatatattcatacatacacaagttttatctgtgattgtacagtatgaccatgggataccttagctatttgtctactattataagccaggatttatactgggcaaaccaggaagaatgctagttttgatctcaacagctaaccatattctctactccagnnnnnnnnnnnnnnnnnnnnnnnnnnnnnnnn

SEQ ID NO: 388347 - DNA, 558 bp, Homo sapiens
atgattgttagtcaattaaaaataaaataaaacttaaaaartaacagtacattaaaaagtttcaaacattaaaaaaatccacatgcacgtactcttttttttttttttttggcaataggtgtgggggtgcattttaaacatttatttaaatgctgaccctcaaagaatattctgatggccttaacagctgaccgtaaccgctctcaactgatgtgggtattcactaaatagaccgcaggctatttaatgacttgatgactcagtttctctgtcaataaaattatgtcagtaattttacctaccccatagggctatttgcaatttgccacaaattttagggatgaaaggctgtaaatcactactggtgttattatttacttaacagctagagttcaattctcatcaacatgaacctcattaaccctggacttggatggttttgccagataaaatccttccaaatcatggggtctaaaaagaacctgtgcttctttttacgatgaagattgaaaaaatatctactagtgttaaggtaaaatctgaattgtatttatttat

SEQ ID NO: 388348 - DNA, 558 bp, Homo sapiens
atgattgttagtcaattaaaaataaaataaaacttaaaaagtaacagtacattaaaaagtttcaaacattaaaaaaatccacatgcacgtactcttttttttttttttttggcaataggtgtgggggtgcattttaaacatttatttaaatgctgaccctcaaagaatattctgatggccttaacagctgaccgtaaycgctctcaactgatgtgggtattcactaaatagaccgcaggctatttaatgacttgatgactcagtttctctgtcaataaaattatgtcagtaattttacctaccccatagggctatttgcaatttgccacaaattttagggatgaaaggctgtaaatcactactggtgttattatttacttaacagctagagttcaattctcatcaacatgaacctcattaaccctggacttggatggttttgccagataaaatccttccaaatcatggggtctaaaaagaacctgtgcttctttttacgatgaagattgaaaaaatatctactagtgttaaggtaaaatctgaattgtatttatttat

SEQ ID NO: 388349 - DNA, 558 bp, Homo sapiens
atgattgttagtcaattaaaaataaaataaaacttaaaaagtaacagtacattaaaaagtttcaaacattaaaaaaatccacatgcacgtactcttttttttttttttttggcaataggtgtgggggtgcattttaaacatttatttaaatgctgaccctcaaagaatattctgatggccttaacagctgaccgtaaccgctctcaactgatgtgggtattcactaaatagaccgcaggctatttaatgacttgatgactcagtttctctgtcaataaaattatktcagtaattttacctaccccatagggctatttgcaatttgccacaaattttagggatgaaaggctgtaaatcactactggtgttattatttacttaacagctagagttcaattctcatcaacatgaacctcattaaccctggacttggatggttttgccagataaaatccttccaaatcatggggtctaaaaagaacctgtgcttctttttacgatgaagattgaaaaaatatctactagtgttaaggtaaaatctgaattgtatttatttat

SEQ ID NO: 388350 - DNA, 595 bp, Homo sapiens
ggatggttttgccagataaaatccttccaaatcatggggtctaaaaagaacctgtgcttctttttacgatgaagattgaaaaaatatctactagtgttaaggtaaaatctgaattgtatttatttattmactattaatgggctcatacatgattattttgacttttaatatggtatcctttatacatgctgaatttggtagcaaatacattttggcttaaacaaattagggattttttttttccttctctttatgaataaagaccagaaatactagtgtggtagctccaaaagtttattaaagacttaggccttttccatccttctgctctctcatctgtagtatctgagcttttatcttcaagataaaagatatttgcagaatctccagccactgttcctatgtttcagacaggaagaggaagagcaaggggcagaaaggggtgagttctagtcttcgtcatcttttaaggagtttcttggacatgttagtcaatgacctctgcttgcatttcattggccagaagttgactctgcatacctagctgcaagggaagctacaaaatgtcaaatcaactgggtacgttggtgatcca

SEQ ID NO: 388351 - DNA, 595 bp, Homo sapiens
ggatggttttgccagataaaatccttccaaatcatggggtctaaaaagaacctgtgcttctttttacgatgaagattgaaaaaatatctactagtgttaaggtaaaatctgaattgtatttatttattcactattaatgggctcatacatgattattttgacttttaatatggtatcctttatacatgctgaatttggtagcaaatacattttggcttaaacaaattagggattttttttttccttctctttatgaataaaraccagaaatactagtgtggtagctccaaaagtttattaaagacttaggccttttccatccttctgctctctcatctgtagtatctgagcttttatcttcaagataaaagatatttgcagaatctccagccactgttcctatgtttcagacaggaagaggaagagcaaggggcagaaaggggtgagttctagtcttcgtcatcttttaaggagtttcttggacatgttagtcaatgacctctgcttgcatttcattggccagaagttgactctgcatacctagctgcaagggaagctacaaaatgtcaaatcaactgggtacgttggtgatcca

SEQ ID NO: 388352 - DNA, 595 bp, Homo sapiens
ggatggttttgccagataaaatccttccaaatcatggggtctaaaaagaacctgtgcttctttttacgatgaagattgaaaaaatatctactagtgttaaggtaaaatctgaattgtatttatttattcactattaatgggctcatacatgattattttgacttttaatatggtatcctttatacatgctgaatttggtagcaaatacattttggcttaaacaaattagggattttttttttccttctctttatgaataaagaccagaaatactagtgtggtagctccaaaagtttattaaagacttaggccttttccatccttctgctctctcatctgtagtatctgagcttttatcttcaagatawaagatatttgcagaatctccagccactgttcctatgtttcagacaggaagaggaagagcaaggggcagaaaggggtgagttctagtcttcgtcatcttttaaggagtttcttggacatgttagtcaatgacctctgcttgcatttcattggccagaagttgactctgcatacctagctgcaagggaagctacaaaatgtcaaatcaactgggtacgttggtgatcca

SEQ ID NO: 388353 - DNA, 595 bp, Homo sapiens
ggatggttttgccagataaaatccttccaaatcatggggtctaaaaagaacctgtgcttctttttacgatgaagattgaaaaaatatctactagtgttaaggtaaaatctgaattgtatttatttattcactattaatgggctcatacatgattattttgacttttaatatggtatcctttatacatgctgaatttggtagcaaatacattttggcttaaacaaattagggattttttttttccttctctttatgaataaagaccagaaatactagtgtggtagctccaaaagtttattaaagacttaggccttttccatccttctgctctctcatctgtagtatctgagcttttatcttcaagataaaagatatttgcagaatctccagccaytgttcctatgtttcagacaggaagaggaagagcaaggggcagaaaggggtgagttctagtcttcgtcatcttttaaggagtttcttggacatgttagtcaatgacctctgcttgcatttcattggccagaagttgactctgcatacctagctgcaagggaagctacaaaatgtcaaatcaactgggtacgttggtgatcca

SEQ ID NO: 388354 - DNA, 622 bp, Homo sapiens
atatccactgattggtagctcctattccttttggtcaaacgatggtttagtaaattcaatttttggtatgtctaaactcttaaaatgaagagttttacagtttaaaagtttacagttwaaaactcttaaaatgaaaaccattacaaataacctttggattatctttaaataattctttctggtttggaggaaaaaaatccataaaaacataaaatacccagggtgtcaaatacacagtataatcattttgtatgatcatggctaatacggttcaatctaaattgcagtctcatatttgacataattatacataaccaaaaactaataaaaatcgctgccttatatttcaaattggtaattatggtagtaaacattaacaacatgtcagatataagatggtgatttgttctgaaatgtattagaaatcattatactgtatgataattttaattacagtttggtagcaagagagcatgcaggggtctactgctctagtgcatcatgggaactggcagcccttccatgcagccctcactctgactcctgttgttcaagttcaagaaatgcacaattcctcctccacctttaaatagcggactgagttccctctgcagaatcagca

SEQ ID NO: 388355 - DNA, 622 bp, Homo sapiens
atatccactgattggtagctcctattccttttggtcaaacgatggtttagtaaattcaatttttggtatgtctaaactcttaaaatgaagagttttacagtttaaaagtttacagtttaaaactcttaaaatgaaaaccattacaaataacctttggattatctttaaataattctttctggtttggaggaaaaaaatcyataaaaacataaaatacccagggtgtcaaatacacagtataatcattttgtatgatcatggctaatacggttcaatctaaattgcagtctcatatttgacataattatacataaccaaaaactaataaaaatcgctgccttatatttcaaattggtaattatggtagtaaacattaacaacatgtcagatataagatggtgatttgttctgaaatgtattagaaatcattatactgtatgataattttaattacagtttggtagcaagagagcatgcaggggtctactgctctagtgcatcatgggaactggcagcccttccatgcagccctcactctgactcctgttgttcaagttcaagaaatgcacaattcctcctccacctttaaatagcggactgagttccctctgcagaatcagca

SEQ ID NO: 388356 - DNA, 622 bp, Homo sapiens
atatccactgattggtagctcctattccttttggtcaaacgatggtttagtaaattcaatttttggtatgtctaaactcttaaaatgaagagttttacagtttaaaagtttacagtttaaaactcttaaaatgaaaaccattacaaataacctttggattatctttaaataattctttctggtttggaggaaaaaaatccataaaaacataaaatacccagggtgtcaaatacacagtrtaatcattttgtatgatcatggctaatacggttcaatctaaattgcagtctcatatttgacataattatacataaccaaaaactaataaaaatcgctgccttatatttcaaattggtaattatggtagtaaacattaacaacatgtcagatataagatggtgatttgttctgaaatgtattagaaatcattatactgtatgataattttaattacagtttggtagcaagagagcatgcaggggtctactgctctagtgcatcatgggaactggcagcccttccatgcagccctcactctgactcctgttgttcaagttcaagaaatgcacaattcctcctccacctttaaatagcggactgagttccctctgcagaatcagca

SEQ ID NO: 388357 - DNA, 632 bp, Homo sapiens
aggattaaatccttgtccttttacttttttttttgagatggagtctcgctctgtggccctggctggagtrcagtggcacaatctcagctcactgtaagctccaccacccaggttcacgccattctcctgcctcagcttcccaagtagctgggactacaggcgccggccaccaccccagctaattttgttgtatttttagtagaaatggggtttcaccatgttagccaggatggtctcaatctcctgacctcgtgatccacccacctcagcctcccaaagtgctgggattacaggcgtgagccgagttcaaatctcagtgggtccttttactttctagtcatatgaactgggctaaaggtaagttctctgtgccttagattcctgttctttaaaatggaaaacatagtagtacctaccttggaggggtattgtaacaacaaaagcagattattctgtgtgtagtacttagcctagcacctggaacatggtaagtcctcaatacatctatgtattgagatagacatgtatgtatatacatgtatggtatacatacttgttattatattatactaacactcagatcattcattttcctaagcttttaagatcctggtcttcataaaagtgaccaa

SEQ ID NO: 388358 - DNA, 598 bp, Homo sapiens
  misc_feature (1)...(598): n = A,T,C or G
tcaggaaggtggagtgcccccaayttttaggacaaaagagtttttacagatcatagtaaatcaataactcgtagacagtatgacagatacagaatatccttacttaagatgaaaaacaaattgtgcattgagatctttaatcaataaaaagctaacaaatcagtagtgcaaacaaggtgagagaatcttatttcatcctcagtcacgaactgaagagacacaccgggcagtgttttgtggttaaaaattgctcctaggctggtgtactagcgaactattgagtaagaaggtcagtagagaccaactcactgtgggatttgcaatgcagaaaggacaagtaggtgtaacataaaagggcactctatgtaaatgtcaattaatgtattattcttcaacaaacttctttaacaagtattttggtggctttgaagcctctgttcttcttgtgggagcaagaatgagacctcttgctttagcttttgattaaacaacgttcagaaaaaaactcatcaacatagattaaaccttcacattaaaactagagggcttgacccatcccaattagcccaactcctttgaaatattacaaccaannnnn

SEQ ID NO: 388359 - DNA, 512 bp, Homo sapiens
gatcttacttcaaagctgaatgacttgatgactcccataacagaatacattacactgattatgggattattcacatgccatttgcaagaggttgggcaacatttctcaacattccacccaccaacaaacagagtagcgacagtggaatgctaatatgcaaatgccctccatgtcctgataccatgataaaattcctcttcactctttttaactgatgttaaaaaagagagagggatggttatttcggtacaaygtagcccacagagaataaaaggcgtaagccccagcagggaaccaaagcagagattgtttccatgacctggcactcactaagcactcagtaaatgtaggttccttccccttccctttccccttcacccttaaatgccaaaaggctaagggttcatttttatatcaacaagctttgaataacatattcattggctcctccttttgtgactatcaatccggtgttgtgttctcatcttctggcaattgtttcagcctcaatt

SEQ ID NO: 388360 - DNA, 627 bp, Homo sapiens
gccatattctatgtgttaaagctttatggacatactctattacatcattgaaataaacccaaagcatactttttttaaaaaaactattcttatcttaaagattagaaaagtgatatttaaagtttagtaaattgctaaaagtcactgaaatagtgttaaaggtaagatttcaatccatgcaatctaactttatagctccaaagccaaactgcagcctaagcttacatgtatgtttcatcttcatgtaagcgatctgatgttcagttacaggcttwagctctagcccagaaaagatgatatttaaataattattattggtccccagggacctagaaatatattttaagcaaataatttaaattaatcctgtgatgaataaaataaaagcacgcattctagtatgataatattgtgtatgtttattgcaaaaactgaaattaattattccttctttagttgcatatgaagttaatacatgcaaaaactcaatgcaccagtttttatatagcaatataaagtcacaacttaacattacttttcctagaattcatctaagataactcatagaataaaaaacagaactgaataatcaatctccattgaaattaaaataatttttaaaacaag

SEQ ID NO: 388361 - DNA, 549 bp, Homo sapiens
gtcagctattagttttattgagaatctcttgtctgatgagtcacttttctcttgatgcyttcatgattctgtccgtgtgtttggctttctaaaagtttgggccgagtgcagtggcacatgcctgtaatcccagcactttgggaggctgaggtcagaggattgcttgagtccaagggctcaagatcagcctggacaagataatgagacccctatctctacaaaaaaatgaaaaaattagccgtgtgtggtggtgcacacctgtgctagctacttgggaggctgaggcaggaggatcccttgatcccaggaatttgaggcagcagtgagctatgatcacactactgtactccagcctgggtgacaaaatgcaaccccatctcaaaaaaaaaaaaagtgattctaaagggtttatgctaaatttggggagattattacagttggaattcattgtgtcttggaggtgcaatgttttggccaaatatggctatcacttcttgaaatattctttcttcccctctttgtcacttttctccttttgatacccacatt

SEQ ID NO: 388362 - DNA, 542 bp, Homo sapiens
tagtgacggtcttggaaccaagcttgctttcaaattctaacataaaatgagggtttcttatagggcaatgtagactccatttgcacaattttctacattgtataaggcattgatatgaaattattcactgaaacctgagtgatggaagaaagtacacattatatagttaatgattacttagcgactgcacaggagaaaagtaaatttgaaatagttaaccaaaagagtatgtggcacatctgaaaaattcaaataggaaaayaacagaaaaggtgccaatcgttttaatcatacagcataacaaggaatcaaatattttattttcctcagctattattaataaatgataaataaactaaagtgtttcagtttagtttagggtggtttctctacgtgagtgtggcaccagaaataataatgatttttaaagaaggacatagttgcctagtagtcagctagacacagaattctaacacatgttcttattactctaaatgaaattgaatgtattgcttagtttagaagactttttgaaaacatcg

SEQ ID NO: 388363 - DNA, 542 bp, Homo sapiens
tagtgacggtcttggaaccaagcttgctttcaaattctaacataaaatgagggtttcttatagggcaatgtagactccatttgcacaattttctacattgtataaggcattgatatgaaattattcactgaaacctgagtgatggaagaaagtacacattatatagttaatgattacttagcgactgcacaggagaaaagtaaatttgaaatagttaaccaaaagagtatgtggcacatctgaaaaattcaaataggaaaacaacagaaaaggtgccaatcgttttaatcatacagcataacaaggaatcaaatattttattttcctcagctattattaataaatgataaataaactaaagtgtttcagtttagtttagggtggtttctctacgtgagtgtggcaccagaaataataatgatttttaaagaaggacakagttgcctagtagtcagctagacacagaattctaacacatgttcttattactctaaatgaaattgaatgtattgcttagtttagaagactttttgaaaacatcg

SEQ ID NO: 388364 - DNA, 572 bp, Homo sapiens
aaatcttctaacctaacacatcaaagccaagttcatgatctctataccccaccatatctccttgtagtatctttgcttcagataatgatggcagcattaatcaactcaartaagtagcaagttgtcctgttttctttcctatgcaatctaacatcaagtcctttcaattgtatatctttaatgtttctggggtctacttacttactttctttcccaagtgcactacctgaattcaaatgtccatcatttgtccctggggtactgccatgacctcctaagtggtccacttacactatttttatctctctccagtcaactgtcctctacagaataaccataaccatctttagaatttacaacctgattatactcccctgtgaacattcacacacacacacaccctcccacatttgcacacacagaagactcaatcgctcctaataaattaggggtaaagtcacagctcaccagtcccagctctggtccagcccctggtgacccctatgatccatccctgcagcctgctccccacagcttcctgtgtttcagctgcatctgccttcccgcagtcc

SEQ ID NO: 388365 - DNA, 547 bp, Homo sapiens
tttacaaattttacataaggccgtgtatgctgtcacttgcaaatcagcccacattaaatggagcctcctctaacaaaagattctagaatctgtccaaattggaatccaacaggcccttccattcatgccccttacctctggaactccttcacagtaggggacttagcaacctcctcccatgcctgtctgctttcctattgcagaggcagacagagagaggcctctctctgatttctgccttctctgtcctatagacatggttttaatgagttatcctaattaggtcaggcccacctgagataatctctcctgattaacttgaagtcaactgattagggacctttattacattgacagaatacctccacttttgccatataaggtaagataaccacaggagtgataacccataacgtttgtcttattttattgtttagaagcaaattacatatgtcttccatgctttagggggtggtattatacagtggtgtgggtcattggrgtcttctttatattttactttctatacatctatgaattggattta

SEQ ID NO: 388366 - DNA, 529 bp, Homo sapiens
gctggttctataatttaaaattaatcaatgtaatccaagataccaacractaagaagaaacatcataatcaaattaattgatgatgagaaaatattttatcaaatttaacaccattcatgtttaaaaaaactcccataaaataggaatacaggtgatcatcctaactttataagaggaatcttaaaaaaaagaaaaccaaaaaccctacagctaatgttatatttaatggcagaatactagataaatgtataaaaatcaagtgtatatctatattttagcaatgagcacatgaactgcagagttaaaaatgcagacaggcaaaaatgcagatctctgggaggaaggagctccaggctacttcatcccagcagcgttcctggctccattctaaaatggtgacctgtagtgtcctttcattactctttctttccaatccttcctgggacctcttgggcctcacacctttatttcatggagccataaaaagtgtgtaccctgtagtcacttccctggctatgaaaaataata

SEQ ID NO: 388367 - DNA, 529 bp, Homo sapiens
gctggttctataatttaaaattaatcaatgtaatccaagataccaacgactaagaagaaacatcataatcaaattaattgatgatgagaaaatattttatcaaatttaacaccattcatgtttaaaaaaactcccataaaataggaatacaggtgatcatcctaactttataagaggaatcttaaaaaaaagaaaaccaaaaaccctacagctaatgttatatttaatggcagaatactagataaatgtataaaaatcaagtgtatatctatattttagcaatgagcacatgaactgcagagttaaaaatgcagacaggcaaaaatgcagatctctgggaggaaggagctccaggctacttcatcccagcagcgttcctggctccattctaaaatggtgacctgtagtgtcctttcattactctttctttccaatccttcctgggaccycttgggcctcacacctttatttcatggagccataaaaagtgtgtaccctgtagtcacttccctggctatgaaaaataata

SEQ ID NO: 388368 - DNA, 581 bp, Homo sapiens
atctttcagtctccttatatggaatgttccctaatcaaaaacttcagtgttgctaaaagtattctaactgcttctcttattaaaaagcttgtagagcccttttaattatttcttgattagaagactattaaaatcrattctactcaataaatattatgagctgaaactacgtcagatgttctgtgggtgttagactagtggactgccctagggcagcaacagcccattaataatcacatggttttatagacatacattatatggaatttaatacaatgtttgagctagttactgctctcttttatacacatgaatatactgaggtttagtgcaattactagaaagtattactagttgaagcaagtgtatgaacattgtacaaaatacagtatgatcatgactgtaacataaacacagagaaggaaaagaagttggaagggctcaaatgagagctggatccctcgtgtttagggaaagcagatgagagccactttagatgggccatgaaacatgttagtagaataataactaacatttatagtgaatgtatttcacactaggcactgactgttgtttaatat

SEQ ID NO: 388369 - DNA, 581 bp, Homo sapiens
atctttcagtctccttatatggaatgttccctaatcaaaaacttcagtgttgctaaaagtattctaactgcttctcttattaaaaagcttgtagagcccttttaattatttcttgattagaagactattaaaatcgattctactcaataaatattatgagctgaaactacgtcagatgttctgtgggtgttagactagtggactgccctagggcagcaacagcccattaataatcacatggttttatagacatacattatatggaatttaatacaatgtttgagctagttactgctctcttttatacacatgaatatactgaggtttagtgcaattactagaaagtattactagttgaagcaagtgtatgaacattgtacaaaatacagtatgatcatgactgtaacataaacacagagaaggaaaagaagttggaagggctcaaatgagagctggatccctcgtgtttagggaaagcagatgasagccactttagatgggccatgaaacatgttagtagaataataactaacatttatagtgaatgtatttcacactaggcactgactgttgtttaatat

SEQ ID NO: 388370 - DNA, 554 bp, Homo sapiens
acttggggctagccaattatcccagaaacatttgttgattagggcattctttccccactttgtgtttttgtttgcttgttgaagatcagttggctgtaagtatttggctttatttctgggttctctattctgttccactggtcaacatgacatttttataccagtatcatgctgttttggtaactataaccttgtagtatagtttgaagtaaggtaatgtgatgccttcagttttgttctttttactttgtcttgctttgactatgcaggctcttctttggttccctgtgaattttaggattgttttttctagttctgtgaagaatgatgatggcatttttatgggaattgcatttaatgtrtagcttgattttagcagtatggtcattttcacaatattgattctaccaatttagaagcatgggatgcgtttccatttgtttgtgtcatcccctgagttctttcagcagtgttttgtagttttccttgtagaaatctttcacctccttggttaggtatatttctaagtattttatttttttgcaacagttgta

SEQ ID NO: 388371 - DNA, 554 bp, Homo sapiens
acttggggctagccaattatcccagaaacatttgttgattagggcattctttccccactttgtgtttttgtttgcttgttgaagatcagttggctgtaagtatttggctttatttctgggttctctattctgttccactggtcaacatgacatttttataccagtatcatgctgttttggtaactataaccttgtagtatagtttgaagtaaggtaatgtgatgccttcagttttgttctttttactttgtcttgctttgactatgcaggctcttctttggttccctgtgaattttaggattgttttttctagttctgtgaagaatgatgatggcatttttatgggaattgcatttaatgtatagcttgattttagcagtatggtcattttcacaatattgattctaccaatttagaagcatgggatgcgtttcmatttgtttgtgtcatcccctgagttctttcagcagtgttttgtagttttccttgtagaaatctttcacctccttggttaggtatatttctaagtattttatttttttgcaacagttgta

SEQ ID NO: 388372 - DNA, 610 bp, Homo sapiens
tagaaaataaactccccagttttgttgctggacttgaaatcacttggtgattattattgcaaacttggtattcaaactttgtgttcttyccttaattttttgaaagcttgtgacatatgtgcaagttatgaagcccttagtactgtaccctaaaatgacaggctaaaaaagccttgccaatatatgcattgttttagcgaatgcacattactgtggctcttgaaacagttacaaagtgtttcactttatgatttcagtttttgatgaaatatttatcaacatttttattagtctgaatgaagggtcgtgaattttggacaatgagctaaccctttcttttcctcctaataagccataagcactttatctcttgtatgaaaaattcaattaattaaaagttaaaacaaactatttcagtatattcccattagatatgaaggagcaaaattttttatatttactttttaaatgaattaaagattatattttacaaaataatatgagtgagtttgcagcctctgtatgcattgatagcataaagcactgcaaaaagggtgtgctatttccatgagcaattctacataaaatctcagatcaaagatattttagt

SEQ ID NO: 388373 - DNA, 435 bp, Homo sapiens
gtgggtgtcctacttaagctggttgtgtttcacagggaacactgttttcctaaaatgaaaaagagcacattggagacaagagcaccagtttcactgagaaaatcagtgaggcttattttctgtttttcaggactgaggtgctgttatagagtaggaaaccctacttacaatgggaatgacaagatcccccaagaagggtcaggcagtggcacttaatcatcagaagctggtgagtgcaattgtcatgagtggtaaggtcagaatagcagcacaggatgccctgcacacagggagatggcttagagacatggtgttcccagggccwagacggaccagtggtctcaagagcattgcttcatttgtacaataaaaatacagccaaggattttgagggaagctagatcaaaaaatattcatgatctctggcctggtttc

SEQ ID NO: 388374 - DNA, 599 bp, Homo sapiens
ataaatttgtattcccaactaacgtatttgyctaaactttctataattaaagcatacaatattatttccaatatagccaattatatggttaattaactaattacccataatttcttcaattccaccccagtgacaatggtaaaataaattaacattccttctaaaaatcagcagtaattagggtatttttgttgcaccagcatctatagtcacaataagactaacacacacaccccagtaaagaaggaataggaagaaaatttcatatcataaatccagatgcaaatgaaaagttttcttcttcataatttccaaacactgttatccatctctacagatttatggaatccttgaagggatattaacaatgatctactggcatgttttaaaatccccctttattagtgtttatcgaaatgaagccctaagtactgctccaatttaactgaaatcctattcatcaaaatatttcccttttctcttccttccgtccctcctctgccaacccagtgatcctgaagcccctaggttcaggaaacacggtcttaattaaacccactaggctcaggagcttacttttcactgttacatttctctga

SEQ ID NO: 388375 - DNA, 599 bp, Homo sapiens
ataaatttgtattcccaactaacgtatttgcctaaactttctataattaaagcatacaatattatttccaatatagccaattatatggttaattarctaattacccataatttcttcaattccaccccagtgacaatggtaaaataaattaacattccttctaaaaatcagcagtaattagggtatttttgttgcaccagcatctatagtcacaataagactaacacacacaccccagtaaagaaggaataggaagaaaatttcatatcataaatccagatgcaaatgaaaagttttcttcttcataatttccaaacactgttatccatctctacagatttatggaatccttgaagggatattaacaatgatctactggcatgttttaaaatccccctttattagtgtttatcgaaatgaagccctaagtactgctccaatttaactgaaatcctattcatcaaaatatttcccttttctcttccttccgtccctcctctgccaacccagtgatcctgaagcccctaggttcaggaaacacggtcttaattaaacccactaggctcaggagcttacttttcactgttacatttctctga

SEQ ID NO: 388376 - DNA, 616 bp, Homo sapiens
tgtttttaatctgtgagacagaagtcagctatcatatgtagaatgcctcagctggggtttcttacctctggatgacaaagttgttcactgtccaacagagttgycaaggtgcattcatattgtggctgaaaagatttccgagatacttaatggagagcttgtaagtcttcttgtgactctgtcttcggagtagaaattactaaattcctgacacattcttttggtctaagcaaatcagaaggataagatttaagggatagggaaatagattccacttcatgctgggaaaagctacatattcacatagcaaggacatagatacactgagttgaataattgatcacatgggctaagcaaaagaaaggtaggtcacaacatgactcagtagtttagagaatgaattagagatttgccaggatataaggtgagttgagtagccaaaattacaactaaaagcacaccacagaattagtccaatgccatcatcactgctgctgacccctggatgctgcagccacctacctctactgatgctgtgggtcaatgtcaagttccacccatgaaacagggtattactgccaccctgatgccacaaccccttggaatggatgcttca

SEQ ID NO: 388377 - DNA, 616 bp, Homo sapiens
tgtttttaatctgtgagacagaagtcagctatcatatgtagaatgcctcagctggggtttcttacctctggatgacaaagttgttcactgtccaacagagttgtcaaggtgcattcatattgtggctgaaaagatttccgagatacttaatggagagcttgtaagtcttcttgtgactctgtcttcggagtagaaattactaaattcctgacacwttcttttggtctaagcaaatcagaaggataagatttaagggatagggaaatagattccacttcatgctgggaaaagctacatattcacatagcaaggacatagatacactgagttgaataattgatcacatgggctaagcaaaagaaaggtaggtcacaacatgactcagtagtttagagaatgaattagagatttgccaggatataaggtgagttgagtagccaaaattacaactaaaagcacaccacagaattagtccaatgccatcatcactgctgctgacccctggatgctgcagccacctacctctactgatgctgtgggtcaatgtcaagttccacccatgaaacagggtattactgccaccctgatgccacaaccccttggaatggatgcttca

SEQ ID NO: 388378 - DNA, 583 bp, Homo sapiens
gggtatgaagagatataagggagtcaaaggagagtcctggtttctggtctaaacaagaggtgaaccaaaaatgggcaaagaaggagaaacggttcgtttcactgggataggacatgcaggaggaggaaggtttgtggcagggagagagcatgcatttatttgggcaggtggaagagagttacatcgggattaatttcagctcctggtaacagacccaacacacaggggtattccgttttgtttgtttgtttttcttctctcataaaagaagtccagataagcatccatggcagatcttgaggctctactaagttatcgaggatccagactgctcccgtctttttgctcctctacatgtgactgtcatccttaaaaatcttcttgtgatccaagatggcagtgaagtcaggcattacacctcattccagacggtgaaaaggagaaagggggagagggacaaggatgtgactccaagttaactgagcttctttgaaggagcctagaagtccygcatgacactttcacttctcaatggctagaactaggtcacatgaccacaaccacttgcaaggaaggctaggaa

SEQ ID NO: 388379 - DNA, 574 bp, Homo sapiens
agggataatgtttacaactgctgctagactagttggaatcatatgtaaaaacttgacccttacctcataccctatataaaaattaacttgaaatagaacatagacttaaatatcagagccaaaactgtaaaacttcttgaggaagttagaagaaaatcatagttgtattgggtttggcaaagatttytgaaagagaacacaaaaatcaagaactgtaaaaaaaaaaaaaaatcaataagtggcactttatcgacatttaaaactttgttcttcaaaacacattgtaatgaaaatgaaaaaggcaaacccataggctggaagaaaatatttgcaaatgtaaatctgacagatttgtgtctagaatatatacagaacactcacaactcaataatatggcaaacaacccaattaaatagtcaaaagatttgaacagatgcttcaccaaggaagatacacagatggcaaataagcacatgaaaagatactcagcatcatgaaacaatggtgaattacaaattaaagcaaaaacaatattgctacccacccaccagaatggctaaaattaaaaatattg

SEQ ID NO: 388380 - DNA, 571 bp, Homo sapiens
tctggtgcacaggaggtgctcaataaagggcagttgtttttatgggtcatttagaattcttgaggaagcccttctcctgagagagaagcacatacagacgtgctttgcttttgagcttcagttgagagtcatggccttcagaatatggaaagagagtcccatctgcaaactgtcttctgcctgagaggccaggctgtgcaaaaaccctgaagcgcccaggacatggctctgccacatctgcccctgccagaaccatggagggaagaaaggctaggctgacttctgctcacccaacggaccttcacctctgggaaaccttccctcttctccaggccaggttaggcccycctgctcaacccctatcactgactcaatattgtagtctgttgctcgtttgatcatatgtgttcttaaacaggctttgggggctgtcaggcagatacccgtcaagatactcagcacagtgctgagaatgccttaaacactcaataaatgaatgaatggagattggagacctcttgaaaacacacttcattctttgtccatcctgccacactaccattatgctggc

SEQ ID NO: 388381 - DNA, 571 bp, Homo sapiens
tctggtgcacaggaggtgctcaataaagggcagttgtttttatgggtcatttagaattcttgaggaagcccttctcctgagagagaagcacatacagacgtgctttgcttttgagcttcagttgagagtcatggccttcagaatatggaaagagagtcccatctgcaaactgtcttctgcctgagaggccaggctgtgcaaaaaccctgaagcgcccaggacatggctctgccacatctgcccctgccagaaccatggagggaagaaaggctaggctgacttctgctcacccaacggaccttcacctctgggaaaccttccctcttctccaggccaggttaggccctcctgctcaacccctatcactgactcaatattgtagtctgttgctcgtttgatcatatgtgttcttaaacaggctttgggggctgtcaggcagatacccgtcaagatactcagcacagtgytgagaatgccttaaacactcaataaatgaatgaatggagattggagacctcttgaaaacacacttcattctttgtccatcctgccacactaccattatgctggc

SEQ ID NO: 388382 - DNA, 501 bp, Homo sapiens
caagcctacctcctaccctgccccagcctgtggctcaattcaacctctctgttttaggctattttgaaacccacgtaggatccaaggtagtggggatggggtgttggagccaggtatgatgggagggaggaagggtcagaggacgagggagttaggactccttagctctttgctccctgtgaggkgtgtgaaaattgttggtactctgggaattgaaggagcagctagctctagtattagccagctagacctaacattgctttagttacttgggtggaagggatcttttaggcccccattaaaggcagatgaacaggtctctgacatccaggattacgtagagctgggaattgttggtgctcccaccagccatagtggggaaaccttgtaatgcgtgggaacttaaataaagtactcaaaagggtattatcctagtaatggggaaaaaccatgtatagactaaaggctggtctgatcccacataacaaagcataaacataa

SEQ ID NO: 388383 - DNA, 501 bp, Homo sapiens
caagcctacctcctaccctgccccagcctgtggctcaattcaacctctctgttttaggctattttgaaacccacgtaggatccaaggtagtggggatggggtgttggagccaggtatgatgggagggaggaagggtcagaggacgagggagttaggactccttagctctttgctccctgtgaggtgtgtgaaaattgttggtactctgggaattgaaggagcagctagctctagtattagccagctagacctaacattgctttagttacttgggtggaagggatcttttaggcccccattaaaggcagatgaacaggtctctgacatccaggattacgtagagctgggaattgttggtgctcccaccagccatagtggggaaaccttgtaatgcgtgggaacttaaataaagtactcaaaagggtattatcctagtaatggggaaaaaccatgtrtagactaaaggctggtctgatcccacataacaaagcataaacataa

SEQ ID NO: 388384 - DNA, 469 bp, Homo sapiens
ccattgccagccagacaaaagctgcctgaggccagaacytaggtagtagctgtgaggatgaaggagaaggggatggagaagcaccaggagaaagaatctgcaagacatggggagcagacagcatgtgcaggggcagggaatggagagagtgggacgatgcccagcctaggcgtgactgctgggtgggtgttggcggcctcccggagagcgagcccggaaggcagcacaggttggggagccggaagatagacggcgaagctgaatcccacagtactgagttcagcagaggttaggaactctggccaacctcacagaggggatttcatgtgtcagtgtcagtggtcgagaaataatgaaattggaactgaaaagtgattgagccggtacctgttactgtgggtgcaaaaggctgcgatacacgtgggatttggctcgctgaagctggaaactgtttggattcttgtggagc

SEQ ID NO: 388385 - DNA, 577 bp, Homo sapiens
cctggtttctgatgatggtgcactatgacggaactctgcgctggtttgcttaaaaggtttatgttggctatgcttccatgagccaagggttttcccgtatctccgttctcacagcaaccttgcaaaacagcaataattaactctattttacagaagaaggaataggacacacagccacttagcagggaagctgacattcaaattatgattctagagcctgygtgctcctgtcacaacaccattttgggaatggtggtcagaacatggagaaatgagcataaaatcagcattaagaaaatgcaagggccaaggagggaagtgaatgattacaaatgagcacaaaaagtggaaacataactcatgattcctaagtcttcacatcctgacagtctttccttgctgcactaaaggagtcctttaatttgaagttatttttccacttgtatgtattttaactacaataaccaaaaatatctatgccttgcctgttcccttctacaattcaaacatcaggaatttcagaatgtttcaccttccaaacacaaaacattaaagacttgaaaacatagacttattt

SEQ ID NO: 388386 - DNA, 544 bp, Homo sapiens
tttacaaaatattactacgtgctaggcagtgctggytcctgggatacagagagaaacaggatgtggtcctgctctcaacgagcagacaatctggtagaaggaaaagacacaagaactgaaaattatactagtgcatggttagtgaaaggagggggccgggcgtggtggctcacgcctgtaataccagaacttagggaggctgatgttcttactgctcttcttcttctaggtaaactgtgactttggaatttccccatttctgtagaaatggagtttaattgctccatttatttaattgctttattggttgcttattattgtgctgaaaaaaatggcactaatccataatgcacaggtttatgcttatgtaacacctatgttctcacttgaggtcaggagtttgagaccagtctgggcaacatggtgaaaccctgccctgtcgctataaaaatacaaaaaattagctaggtgtggtggtgcacgcctccagtcctagctatccaggaagctgaggtgggaagattacctaaactcctaaactcgg

SEQ ID NO: 388387 - DNA, 544 bp, Homo sapiens
tttacaaaatattactacgtgctaggcagtgctggttcctgggatacagagagaaacaggatgtggtcctgctctcaacgagcagacaatctggtagaaggaaaagacacaagaactgaaaattatactagtgcatggttagtgaaaggagggggccgggcgtggtggytcacgcctgtaataccagaacttagggaggctgatgttcttactgctcttcttcttctaggtaaactgtgactttggaatttccccatttctgtagaaatggagtttaattgctccatttatttaattgctttattggttgcttattattgtgctgaaaaaaatggcactaatccataatgcacaggtttatgcttatgtaacacctatgttctcacttgaggtcaggagtttgagaccagtctgggcaacatggtgaaaccctgccctgtcgctataaaaatacaaaaaattagctaggtgtggtggtgcacgcctccagtcctagctatccaggaagctgaggtgggaagattacctaaactcctaaactcgg

SEQ ID NO: 388388 - DNA, 571 bp, Homo sapiens
ggctaaacacctctgctctgtgtggttcagcataagaagtcaagcagggccactcagtgtctccatctggtgaatctgaacaaaaaatctgggaataaccaggcagttcaggaattcatgcaaaagtcaaaagagcacacagaacactgctcggtggtttaggatccctccttgcaaccggccactgtgagtgccaacaataaaaagacttcgttgtcttcagcctcatcrttcatttataaaacaagcctttggggcctccttgtttcctatgaagcccctaccctcccacgacctgcggggcccggctctactcacagaactgcaggctgaggctcacaaaggccagcagcgcagccagggccagcagcagcaagaagcggttgcggaaaagcattattaagtattctattttctcttcatggtttcacctcaaatcgggaacatgtcctgtgaataaagcagaggtgataaatgagtgtttagaggtggagaactaaatttgtcaactgaaaataaccaaacttgtcaactgataataatctgattagcccagtcccccggcagggaa

SEQ ID NO: 388389 - DNA, 628 bp, Homo sapiens
aggccagactgctggtgcatgagagaccacatggagccaaggtaagcagtccctgctgaggctcccttgaaacaaactgtggtgacagtttgcttgatacaaagcaaaagctaactgatacaataaatgggaaatgccttgaatcttcaccaggaaattctaagccaggatctagatctcaatatcctcatctgtaggcacgacatgaaaatctccatcttgtctacgttctttaatatgcggagtgctttttgggaaaacagctatatttagttttagatttaaatacgttaggttaaccagatggctgggatcgtgtaactgcctgactgcttctagtctrcactgctgacatctctaccaatctgtgacttttcatttgctgaacagtgggaacatccaccgtttccccttgatactctctggggtctgcaccctcccacttctggctctcctctgatagcctctagcatggtcagcatttccattatttctacttgtgctagggagtagtctggtgtgatcacagccctaggggtgtatgtacacagcctggccagaggaacaccgaatcccaggatgccttcttttggagcccatttcactagaaaacttgaagataatgatc

SEQ ID NO: 388390 - DNA, 572 bp, Homo sapiens
gccttttatctcctctccccctcctccaatcaatcctggttcttccaaatccctcctggccccacacatccccccctttacattccagtcctttagtacctcccattgtgtccactcccctagcccctcccactcttccccagctccctactacctcaaagtgatcacaagcattttaatgttgataagggrgccaaattgcctaccacaaatgctgtaccaatttacatgcacatcaacattaaactcaacaaaaagacttgatctcagaaataccttcaataaccctattactctttaactatctgataatatgctttgtgaaaataaacatcttactgctactttatttagtatttttttgaatactagtaatgttgaaaatgctgtcatatgttggttgtccaattgtgtttctgactatgtaattacctgtgatatggtttggctgtgtccttacccaaatctcatcttgaattcccatgtgctgtggaaaagacctggtgggaggtaatagaattatgggggcaggtctttccatgctgttctcatgatagtgaaaaaagtctcat

SEQ ID NO: 388391 - DNA, 484 bp, Homo sapiens
acagacaaccttaggctaacggtctccttcttatttgctttaattatagtaagcagtcaattatgactggatattattttcagttattattattattgaaatatttcttgcactattcctctgctcttctcttcctcacccctactcttaccagtccctctgtgaccctgttcaacactgtgtttgctggtggaggtgagcctggtgtggtcttgggtgtcaccaagctgggggcarccatgccttcctgggtgctgtgtatatacagagaaaacatagacattttctcatcagaaagacctgggcctagctcagctccaccatttgctgactctgaaccttgaccaaatttctaagcctccattttgttacacggacagactcaaagccctcatgtagaaatattgtaactgtgtataaagcgtctgattcttgctgagctcaacaaatagaagccccttatcactggaacatgtgaggaaat

SEQ ID NO: 388392 - DNA, 543 bp, Homo sapiens
atgttgaagaagtccaagaaagtaagagccagaatgacaattcagtcagttatctgttacagatgttgatgatawtttacctccttggatgatggagggagctgggcctctcctcacaagagaagggtcttcctcaatgtgcgagcttgagaagcaccaatacctcctgcagaggcactaacagctggagcctgggtgctgtagtccctgcctcacaggcagctgctctcaaaaggcagggtggcatgggggttagaactagacctttgcttcaccacttactagctgtgtgaccttgggcattttcagtagaaaatctctcaggatttctatttcctcatctttaaaatgagcataaaatagtattgctttcatggggatattgtgagaattaaataaaataatgtgaagcatttagagtcatgtttggagtaaaagtgctcatcaaatattattaatagatattagtattgctgttatcatcatcatcattgtcgtcatcatctccccctggatttcttggtctgacacatagttgacttg

SEQ ID NO: 388393 - DNA, 575 bp, Homo sapiens
ttatatgcaccaaattattaaactccgtttattcagatcgccagtggactcctggcacattctctttcatacagaggggagaatgggctttctttctgtgaacattctagcatggaaatctcacaacaatcagaggaggacatagacacaccacagatgtgtgcaagttgtcagaatcaaaatggagtcacttctgttaaaacaaaacaaaacagcaacaacaataacaacaacaaactctgacaagtagagctaaaaaagctataaagagagggttttcatgcacaaatgcctgataataaaaactatcacaaaaggttctacaaaaaccaaaacattgcacrgaggttatcacaaccttacacaaaagataattctgcagggacacctgcccatcaactgcctgtccaaactcagagtggtgtcaccattgttattgatccttgtagcaaagggtgatcatctcaaaacaattatgtaatcctcctcattttttctttaaaaccatttgtcttcccttactttcctgaatacacacatagtttacgatggtatgtgtattcccattgcaatac

SEQ ID NO: 388394 - DNA, 575 bp, Homo sapiens
ttatatgcaccaaattattaaactccgtttattcagatcgccagtggactcctggcacattctctttcatacagaggggagaatgggctttctttctgtgaacattctagcatggaaatctcacaacaatcagaggaggacatagacacaccacagatgtgtgcaagttgtcagaatcaaaatggagtcacttctgttaaaacaaaacaaaacagcaacaacaataacaacaacaaactctgacaagtagagctaaaaaagctataaagagagggttttcatgcacaaatgcctgataataaaaactatcacaaaaggttctacaaaaaccaaaacattgcacagaggttatcacaaccttacacaaaagataattctgcagggacacctgcccatcaactgcctgtccaaactcagagtggtgtcaccattgttattgatccttgtagcaaagggtgatcatctcaaaacaattatgtaatccycctcattttttctttaaaaccatttgtcttcccttactttcctgaatacacacatagtttacgatggtatgtgtattcccattgcaatac

SEQ ID NO: 388395 - DNA, 197 bp, Homo sapiens
gattgggtcctactggagggcagacatagggtagtcaatgtgctctaagccaagctagggagagcttcagactgaaacaggtttagccytggcactgccagacaggccaagcactgtcacccctggattccttttctctgactttagcagctgggctggaggacatgggcatgaggccatccatttgtcccactggc

SEQ ID NO: 388396 - DNA, 526 bp, Homo sapiens
cccaattttgcatttccaataagctcctgagtaatgcttctgctgcaggtccaacagccccaccctttgagtaccaaggctctaggtcaattaggagcaggaccttgagagtcaggggcttaaaggggagtggaggtgtattattttggagtcaggggtcctacctgaggtgggatgaaactgtgaatttgggagggggttctgcggtggaccaaaaggcaagtaataagagggcagaagggtgccctgtagaccagtgtcctcagcttttcagattgtggcagaggggcaagaggaaaggaaagaaggattgggacttccttcctgggacctaccctctcacctgcagaggggtgagtcttacaacacatgagcatgtatctagctgccaactgctgcmtccatctgtcctcagggaggaatgctggggctacagaatggccaagaggctgggaacaactggtccagaaagcaagtagccctaggttcctgttcactggggagtaatggcccatctctctgccct

SEQ ID NO: 388397 - DNA, 574 bp, Homo sapiens
tctgagccagacctgaagacagagacaatctgggtaagaaagataagttcgtgacagccaggggcagtgcaggctcccacagccaagtggcagtctcaattttagccctttccagattcccccacaaaaaaagggggacatgaggtgttcccaccccctcagcatttggctgtactgcctgggggtggcctttgacagaggcacaagagctggaccttgccccatctgccagtgggttatagccacctccaagagaccaaagcactggcccaaaacaccaacctccctcccaccaatagagctgcaagccacagtgccagaaatgtgcaagaagaggcactcccagcycgccacaggaagcaacacccactggagtggggatggtgcaatctgaagtggccagtggggctctgcaagtggtaccctgtctccctgggagcttcctccgtcagtgggcagggataggaaatgttaaaggggactggggctacagctctgggcactataggttaagctatggtggactcaaccctcagcagacaaacttagtagcttccaagggcgcccaccacca

SEQ ID NO: 388398 - DNA, 614 bp, Homo sapiens
catatgacgtgattagtcattagaaggaatatctgacacatccttggaggatgggcagggaaggtttcccagaataagtgacatcttgctgagtcctaaaggataagtagcaagttatagaaggaaggaaggcacctgaagaacaacaacaaaagagctcctagcgtgccacagagaagagcgtggcactttcaggacatttcaaacagtttaacttggagaataagggactgaaggggaggagcagaaagtggtgacggggggaactggaaaggtcagtgggctgacttgcaaccctaaccagctcgttattaagaatggaatattcttaatatctaaaatattcttcttccttatatctyctctaagatgtttatcagtttacattttttatactctgtcatcttaattcattgcattctcttttcttcttagaataagggctttcaaaaccagtgaacttctgtccacaaagtacagggactctagttttcttcactgataatctaaattcagttaatggatttctaatattataattcaggcgtttctagagtaaaacttgatttattaaaaaaagtatttttctaataattgatggattcatttaccac

SEQ ID NO: 388399 - DNA, 430 bp, Homo sapiens
gtaactgtatttggagaccaggtctttaaggaaagtaactaaggttaatgagatcttaagggtgagatactaatcctataggactgatgtgtgtgtgtgtgtgtgtgtgtgtgtgtgtaattttttctttttatttttgagaatgtatgtgtgttttgtggtggatcataaggggtagaggaaggattggtgtgagatctatgagagtggtttgtagtattacagacttctattcctctcccttagmcctctgttgggtgatgggaaattaatggtatctgtacctgtgaaacctagagcgcatcccgcccccaataagccaacgttgcagaaggtactctgctttctagtttttattgctccaggctctagaattttgtctgcagggcaactaatatctgcatctacagctatatctagtttttatact

SEQ ID NO: 388400 - DNA, 545 bp, Homo sapiens
ttgaattttcactggaatgctaattttaaagacaaatgtcatttttaaattctcaattgtcaccattttgcttctagatggtggaataaatttcaaacaaaatacatcactgagaataggtcctgccttctatgattctttgttccatcattgtaagtggccacttactatgtcttgaatatagttggtgccaaacaagtgattgattgaatttgctttagcttcactacataccattctctaattgctcrtatttctgttgcctggtaaccttcaaaggcttcattctataaaaaacaaaggtgagagaaaaagcaaaaccaaaaatactcaggatttttttctctctagtatcacaaagtaaaatacacaacaaaacattgagtgctgttacacattggggagaaagattaatttgaaaagtaaggaagcagatttccccaccacgcctggctttggctatgccatcgtccattatggccaaagggaagctacagggccaggacaggcctaagggaaactctccgttcagacctggcaggccc

SEQ ID NO: 388401 - DNA, 630 bp, Homo sapiens
ttctaccagctgtgcttattgaccttgttgcatatcaacttgttatggacacccatgccagaaactgtggagatgggtgcaagatactgaacaaataagcaaatggtactaatggatctgctaatgatgcagaaccrtagagctgattacctgcaagcatattatctcttggttaaatactgactttgaaggtggcacccgttccaagctgctcctctgcttcctcatacgtgatttacaatcagttgtcaagtgataatttgatgagattaaattatgtttttagagaaataagtctgctttgccacacttgagaaattttatgtcacaccaatgttacggatatctcacatcatagtcaaacctttatgtactggatttttattatttattgacaaagcctctgtgggtccttttctgacagctcatatacaagggtcttaatgtcaaggtcagaccagtacagtaggatttgtgtttttaaggataataccaacctattaagaaaggaaagacttggaagaccaaggaggatggagcagaataaaagatggaaagggagagcaaatatattacatttttttttcctgcagaaagagatagggaggaattttctttttaagagttagc

SEQ ID NO: 388402 - DNA, 610 bp, Homo sapiens
tttgaactgtacagtttaagtggattttatggtatgtgaactatatctcaataaagctgtaaaaaatgatcaagaatcctgattcctactgaaaactcttttcaaacctatgctgaatttttgagaatttaaagacttatctagtgtgacatagatggggtgtggcagattaaggatggaaactaaatctaaccctggaatttgggtttttaacctttgctagatcttcaccagacaatagatcttacttgactgagatatccwtctcattcagaggtgtgaagccctgggtggtttagaagtagccattactatcacatagtaagctaagattgaaagatagaattgatgtaattataatcaggtctgcctaagaaaagactgtagatattcatttctcctactgataagatttagattctgtttcacattcattttgtacattgataatgagggtttgatggaaaaattaagactccgtaaaaaaaaaacctttctctaattaaagttagggtgtgtgcatgtgtagtgtgtgaagtataagttttcatgtattttttaaaccccttatacattcagtaaagtgttacatatttagagaaacatcagt

SEQ ID NO: 388403 - DNA, 610 bp, Homo sapiens
tttgaactgtacagtttaagtggattttatggtatgtgaactatatctcaataaagctgtaaaaaatgatcaagaatcctgattcctactgaaaactcttttcaaacctatgctgaatttttgagaatttaaagacttatctagtgtgacatagatggggtgtggcagattaaggatggaaactaaatctaaccctggaatttgggtttttaacctttgctagatcttcaccagacaatagatcttacttgactgagatatccatctcattcagaggtgtgaagccctgggtggtttagaagtagccattactatcacatagtaagctaagattgaaagatagaattgatgtaattataatcaggtctgcctaagaaaagactgtagatattcatttctcctactgataagatttagattctgtttcacattcattttgtacattgataatgagggtttgatggaaaaattaagactccgtaaaaaaaaaamctttctctaattaaagttagggtgtgtgcatgtgtagtgtgtgaagtataagttttcatgtattttttaaaccccttatacattcagtaaagtgttacatatttagagaaacatcagt

SEQ ID NO: 388404 - DNA, 426 bp, Homo sapiens
tactaaaccagtgaagtgcattcgaatcaaaattaggctactgaataactgatggactaatttctagtctgtggcttgttttccgaaattcagttcattggcactgttgcctttcatttccttccccagaatgtgacgatataaccatccgcacctctcttcctcctcacatatatcacccctccccacacgtggattaactccatgctcctaatgactaaacaaaggctgcccggttytaaaaaaaaaaaaaaaaaaaaaagatggcagacaagccccataaacactcctttacccatcactcaaggaacattctagcagaatccttcaaggatagactttggatagtctctccttctatcacaactgccattaaagtcactttagcttccacttatatgaaagaaaagaaccaggagagagaag

SEQ ID NO: 388405 - DNA, 650 bp, Homo sapiens
tcctttatagagctcctagcaacgcataactctttcctgactccagacatttacagttcagccactttcccagattccaggattagttcccagagtgggagactcctgactctatgctccaaattcccagaattttgtttcctttttccttttgtctagatatttataatgtttggtagagcttctatgacgaycatagattcacattatgcttaagctttaaggttatgcaaaatgaaaaatttactacttcagcaatgaagtctgacacttacatggaatgaaggctagggttatgcttattttatttatttttatttatttttattaagattctctatgttattaaagacatcactctatgcttaaaggtgacagaatatctacaccatttttctcacacagaaggcttaattaaggtactaccaaagcctaatatgtaattcccaagaaattaactcacatgcaaatgtacaaataagcagaccccaatgcatcgctaaatccccccagagcacagaatcattttatttagtactattaaaggctgaaatatctattaataccatgaccactagatggctcaagacctatctcccttaaatagcaagtagacaactaagattaaaaaggagcaataaggatgtcac

SEQ ID NO: 388406 - DNA, 650 bp, Homo sapiens
tcctttatagagctcctagcaacgcataactctttcctgactccagacatttacagttcagccactttcccagattccaggattagttcccagagtgggagactcctgactctatgctccaaattcccagaattttgtttcctttttccttttgtctagatatttataatgtttggtagagcttctatgacgaccatagattcacattatgcttaagcttyaaggttatgcaaaatgaaaaatttactacttcagcaatgaagtctgacacttacatggaatgaaggctagggttatgcttattttatttatttttatttatttttattaagattctctatgttattaaagacatcactctatgcttaaaggtgacagaatatctacaccatttttctcacacagaaggcttaattaaggtactaccaaagcctaatatgtaattcccaagaaattaactcacatgcaaatgtacaaataagcagaccccaatgcatcgctaaatccccccagagcacagaatcattttatttagtactattaaaggctgaaatatctattaataccatgaccactagatggctcaagacctatctcccttaaatagcaagtagacaactaagattaaaaaggagcaataaggatgtcac

SEQ ID NO: 388407 - DNA, 571 bp, Homo sapiens
aaaataaaattgttcttgttaatggaaatttggtcctgtactctcatgtacttaatctcactacttattcatgtaatagtgtctgtgtatctgtaaaataaggcaaaatatattctattaagacagatggatggccaagacaatctaatgagtttcctgtatttgcagctatttctccatatcagaaataatatgactgcatagaaaaggtttctttctggwtagttcttcaccttttttttttcactaactgcagtctcttaaaagataatgagttaaacatgatttctttaaatggaaatttgtattatcttctaaatttaaaaagtctcaagtaacaatagattttgacaaatattcatgtgttaaattataattgaaccctcacagatattctctcagtggaacatccactagaaccaggcattttgagtgcatgaaataaaataaacatataatacacatttcactgttgcataaagtgtcaaaacagtagttcatatttatatgtcatctcggagcaccttaaactgctaactttcaggatcttaattagagattcaaaagagac

SEQ ID NO: 388408 - DNA, 571 bp, Homo sapiens
aaaataaaattgttcttgttaatggaaatttggtcctgtactctcatgtacttaatctcactacttattcatgtaatagtgtctgtgtatctgtaaaataaggcaaaatatattctattaagacagatggatggccaagacaatctaatgagtttcctgtatttgcagctatttctccatatcagaaataatatgactgcatagaaaaggtttctttctggatagttcttcaccttttttttttcactaactgcagtctcttaaaagakaatgagttaaacatgatttctttaaatggaaatttgtattatcttctaaatttaaaaagtctcaagtaacaatagattttgacaaatattcatgtgttaaattataattgaaccctcacagatattctctcagtggaacatccactagaaccaggcattttgagtgcatgaaataaaataaacatataatacacatttcactgttgcataaagtgtcaaaacagtagttcatatttatatgtcatctcggagcaccttaaactgctaactttcaggatcttaattagagattcaaaagagac

SEQ ID NO: 388409 - DNA, 571 bp, Homo sapiens
aaaataaaattgttcttgttaatggaaatttggtcctgtactctcatgtacttaatctcactacttattcatgtaatagtgtctgtgtatctgtaaaataaggcaaaatatattctattaagacagatggatggccaagacaatctaatgagtttcctgtatttgcagctatttctccatatcagaaataatatgactgcatagaaaaggtttctttctggatagttcttcaccttttttttttcactaactgcagtctcttaaaagataatragttaaacatgatttctttaaatggaaatttgtattatcttctaaatttaaaaagtctcaagtaacaatagattttgacaaatattcatgtgttaaattataattgaaccctcacagatattctctcagtggaacatccactagaaccaggcattttgagtgcatgaaataaaataaacatataatacacatttcactgttgcataaagtgtcaaaacagtagttcatatttatatgtcatctcggagcaccttaaactgctaactttcaggatcttaattagagattcaaaagagac

SEQ ID NO: 388410 - DNA, 577 bp, Homo sapiens
tggaagcatatataaagcatgctaaagtcttggaatctcacgctggcrcttgctaatagcagagatgtgtgatttgggaggaagaagtgagacacatcttgaaatatgcataaaatcgaagaatgaatctgcatatatggtacatgtggattttgcttatgcagtacactgtattctaaaatggagttatcagaatgattaaggtgctaaaactcaacttttatgtaatcataattatcaggagaaatttaggttctggtaaatgtgtaaaagagggatgagttgattctaccaacacccttggaatataattaagttgcttaagcttatttatatctttagtatccaggttattttgcatacccaggaatagaattatatgaatcagagatgatgtcattgaaaaaaatccacaataggctttcaaaatcatgagatataaatatacacatatgaaatatagatagatataataggcatatatagttgtgtgtttgtgtatttatatatttacatctgcactacttcagagctgaagcaattttgtttttcttgtaaaggagaataaataacattg

SEQ ID NO: 388411 - DNA, 591 bp, Homo sapiens
ttataaaaataaaaatattttcaccaaaatatgattaaaatctgttttactgttccttcacgtggatatgcactaacttaacattttataacttcagtgatattcagtttgctcctaattttcactattgaaagtagtggtataaaaaatgtaatgcataaattttgatccctgacctctctctcactttcttttccatagggacagtcaagttatcattaattaggatgttaggtaaggattgtgttttgcagatgacctgtaacaggttaaggatactctctttatacactaaatgtgatgcatgttttttttatcataaattggtagattttgtcaaatgctttttccttacctatggaaatgatattatggtttctgtcatttaatctattaatatgatatactacactgattttttaaartatgttgagccaatctggaaatccagaaatgggtcttctcagtcatgttaaataactctttaatgggttgttgtaattctttttcaagtttgaggatttgagggtttctatttacagtaataatgggctatatatttttttgtataatttttttttttttgagaag

SEQ ID NO: 388412 - DNA, 552 bp, Homo sapiens
gcaccaaacataacataatactctcttacaagatgcgttctatgcttggtttccaagactttacatttgcatctttgttttatttttttcctggttgctttttctcagtctcctttggagggtggttttcatctgtaaattctattaacactagcgtgtccgagaattctgctcttgatctctcaacctttaaatctgtagaaattgcataaattccttaagttattccttaaattatgtcagttaataacttataagcatgtatgtactgataatccctaaatttatatttctaagtcaggcatctgtcttggaatctagacttacatattcaactgactacttgatatttttcaatgagtgtctartatgcttctaaaatttaattttctactatacttaaaaacacacaacagtgtaggtaaaacatacaacagtgtctgataaagttattttatcctccagtaagctccaactatgtctgctcttcctgcatcctgctctatggcaatttcctcattcattttaaatatatatgtatatattctatta

SEQ ID NO: 388413 - DNA, 608 bp, Homo sapiens
tcatagagacagaaagtagactggcagtttccagggactgggggtcaggaggataagacaggtcttgtttaatggacacagactttcagttttagaggaggaaaacattctggagatggatggtggtgatagttatgcaagaatgtgcatataattaatgccaatgaattggtacataaaatagttaaaatggtaaagtttatgctatgtatattttatgacaatttaaaaaaataaaagaaagaaaaaaatacacaactgtccctggatacatctgttgaacaaagaatgtcatcactgtgcttatagaaccaggtggaaggatgggaactataaagaatctgtttctgtctcttccctctttcttctgtgaattgttctacctaattgatatacctatttatgtttctatatctagttttgttttactttattttgttttttaaaaaacacaaatgttttaatgcacaattctaattgttgggatgcggattatcattcctttagttactctagctaattaggagrtaatctataggatatactttcataaatttatttgtacatttcctctaattttagggttcccatgttaacaaaaaagccac

SEQ ID NO: 388414 - DNA, 300 bp, Homo sapiens
tatagaaggaataattttaattttgagagggttattaaataatatattgtgrtcataattatatgtaagccaaatcctccagtcctcctttatcaattctaaagctattacttttatcaatacttgttctatacttttgtctctcaataagtctagaattttcaagtggaagatcagcgcttaatgttgacacttgaagtttaaaatccattgacaaatactggaaacagatatggactggcatttcctgagcaaaatagcatgtcgtacaccaccaagtatacagctttgatttttagt

SEQ ID NO: 388415 - DNA, 540 bp, Homo sapiens
ataataatcatataaaaaagctcaacatcactaatcattagagaaatccaaatcaagaccacaatgagataccatctcacaccagtcagaatggctgttttaaaaaatcaaaaaatatcagattctgctgaggttgtggaaaaaaaagacatttacacactattactgggagtgtaaagtagttcaaccattgtagaagacagtgtggcaatttctcaaagacctaaagacagaaataccattcgtcccagcaatctcattactgggtctctagtcaaagaaatacaaataattctatttttaaaaacacacacatgaatatgttcattgcatcactattcccaatagcaagkacatggaatcaacctaaatgcccatcaatggtagacaagatgaaaaaataatgtggtacatatgcaccatggaatactatgccacctttaaaaaaaacagataatatcctttgcagagacatggatggggctagaagccattattctcagcaaactaaagcagggacgaaaaataaatactgcatgt

SEQ ID NO: 388416 - DNA, 540 bp, Homo sapiens
ataataatcatataaaaaagctcaacatcactaatcattagagaaatccaaatcaagaccacaatgagataccatctcacaccagtcagaatggctgttttaaaaaatcaaaaaatatcagattctgctgaggttgtggaaaaaaaagacatttacacactattactgggagtgtaaagtagttcaaccattgtagaagacagtgtggcaatttctcaaagacctaaagacagaaataccattcgtcccagcaatctcattactgggtctctagtcaaagaaatacaaataattctatttttaaaaacacacacatgaatatgttcattgcatcactattcccaatagcaagtacatggaatcaacctaaatgcccatcaatggtagacaagatgaaaaaataatgtggtacatatgcaccatggaatactatgccacctttaaaaaaaacagataatatcctttgcagagacatggatggggctagargccattattctcagcaaactaaagcagggacgaaaaataaatactgcatgt

SEQ ID NO: 388417 - DNA, 611 bp, Homo sapiens
ttggaatacattcttaagtaaatgcggttatgttatacatcattttaatgtgcgtttctcactttattttttggctattgatttattactttctgtttatctaatatttattttgaactatggacatgaygttataaaaaaagcaaatttgagcgattttcttatttgagtacaaaatgggttgtaaagcagcagagacaactcacaacatcaacaatgcatttggcccaggaacttctaataaacatacagtgcagtggtggttcaagatgttttgcaaaggagactagagtcttgaagatgaagaatgtagtggccgacaattaaggaacaattgaaagcaatcattgaagctgatcctcttagaactacatgagaagttgctgaagaactgaatgtcaaccattctatagtcatttagcatttgaagcaaatcagaaaggtgaaaaagcttgataaatgagtgcctcctgaactgagtgaaaaatcaaaaagatggtcatttcgaagtgccatcttctcttattctatgcaacaacaacaaaccatttctcaattggaatgtcacatgcgacagtgacaaccagctcagtggttggacagagaagaag

SEQ ID NO: 388418 - DNA, 611 bp, Homo sapiens
ttggaatacattcttaagtaaatgcggttatgttatacatcattttaatgtgcgtttctcactttattttttggctattgatttattactttctgtttatctaatatttattttgaactatggacatgacgttataaaaaaagcaaatttgagcgattttcttatttgagtacaaaatgggttgtaaagcagcagagacaactcacaacatcaacaatgcatttggcccaggaacttctaataaacatacagtgcagtggtggttcaagaygttttgcaaaggagactagagtcttgaagatgaagaatgtagtggccgacaattaaggaacaattgaaagcaatcattgaagctgatcctcttagaactacatgagaagttgctgaagaactgaatgtcaaccattctatagtcatttagcatttgaagcaaatcagaaaggtgaaaaagcttgataaatgagtgcctcctgaactgagtgaaaaatcaaaaagatggtcatttcgaagtgccatcttctcttattctatgcaacaacaacaaaccatttctcaattggaatgtcacatgcgacagtgacaaccagctcagtggttggacagagaagaag

SEQ ID NO: 388419 - DNA, 613 bp, Homo sapiens
ggtatgcaggtttataaatgtaaagccaaaatttttcaaagtacgtacatttggccccaaataagcaagattggtccatgcataataaaacttcatagaaatctgtagtgctgacatataaaaaaattaaagttattattaatcattaaaattatatcagattaaaagaaatacatgaaatttttcccagtctttttctttcattttttttccacagtaagttttctgaaagtgtggtgctttaaatttggtagataactctcaatcataatcatctatctgggtaaatatcaggcaaaattatgcggttaatttgaaatgtggtcatagactattaaaataatattattattctacctaacatttatttctctcttcttccttagtttagatgtagagagtgaaagtctgcatttttcctatatttctccaaagcttgaaacygcatcccaagctcagcaggttatgtttaggtagtgaattctaattatagcaatcctgtttccctagcttatgactcgttgagaaggagctgacccaaatcggactcgttaaatatgtgagtattctgcttagtgttggcaggtgcaaggaacacatggttttcttactg

SEQ ID NO: 388420 - DNA, 622 bp, Homo sapiens
taatattaataacaggccaggcacggtggctcacgcctgtaatcccagcactttgggaggcagaggagggtgaatcacctgaggtcaggagttccagcccagcctaaccaacatggtgaaaccctgtctctactaaaaatgaaaaaatctgttgggtgtggtggtgggtgcctgtaatcccagctatgtgggaggctgaggaaggagactcgcttgagcatgggaggtggaggttgcagtgagcagagattgcacaattgcactccaatctggccaacagagcaagactccatctcaaaataataataataawaataataatatgaataacaacagttgctattatttagtatctactatctcttcttactagctttttatagtattataaataattttagtatcagacttacaaagcaaataataatattgccatttaaaggtctgcgtggttatatggttctcaagtttgtttttcaggtaaatattgggagcagtttttacgtttaaacctgtctgactccaaagtctgtagaattccgttttaaacatagtatatttgagaagattcctaactaagaacattataaatacaagcaagtttatgaagaaaaccttaaaa

SEQ ID NO: 388421 - DNA, 622 bp, Homo sapiens
taatattaataacaggccaggcacggtggctcacgcctgtaatcccagcactttgggaggcagaggagggtgaatcacctgaggtcaggagttccagcccagcctaaccaacatggtgaaaccctgtctctactaaaaatgaaaaaatctgttgggtgtggtggtgggtgcctgtaatcccagctatgtgggaggctgaggaaggagactcgcttgagcatgggaggtggaggttgcagtgagcagagattgcacaattgcactccaatctggccaacagagcaagactccatctcaaaataataataataaaaataataatatgaataacaacagttgctattatttagtatctactatctcttcttactagctttttatagtattataaataattttagtatcagacttacaaagcaaataataatattgccatttaaaggtctgcgtggttatatggttctcaagtttgtttttcaggtaaatattgggagcagtttttacgtttaaasctgtctgactccaaagtctgtagaattccgttttaaacatagtatatttgagaagattcctaactaagaacattataaatacaagcaagtttatgaagaaaaccttaaaa

SEQ ID NO: 388422 - DNA, 672 bp, Homo sapiens
taaaattaaaaaaaaaatagtaagaggcatttatggkaacattagtgcagtgttgtttgaaaatggtggatcatatcatggtcctccataccataaaatagtggcagacataaaaatacactatccttgtacttgtggttttgcatgattttcagagatactgttgagggaaaataaaagaagatacagaaagcaaaaaaaaaaaaaaatacataggtttatttgtatagatatgtctccaaattaatttgaatgtgtaagcataataaaaatattaaaatatttataaaatatgctgccattataactggaatatacaatatcataaaaaattatttcaaacttgatgcaatattaatttgaatttagaatttctatgaaaactctttattctaattaaataaatttactcaaagctaataaggataaaagaatatttaaaaattagcatggacagcttgtgttggagccagggcctgataaggctggaagggaaagagaagtagagagaaaacccaaacaaaatgaccaaaaatgaaaataattgtcttactataaagtatatataaatatatactttatatatgtatactttatatatatactttatatatgtgtgtaagtgtagacaaatgaataaagtatctaaatagatgatatactcacatatat

SEQ ID NO: 388423 - DNA, 575 bp, Homo sapiens
agatgcatttaatacatctaacttattgaacatcatagcctagcctatcctaccttaaaagtgctcagaacactttacagctgggcaaaataatcttgcacagagcctattttacaatatagtattgaatatctgatggaatttattgaatcctgtactcaatatagtattgaatatctgatggaatttattgaatactgtactaagacaraatgcttgtgcagatactcaaagtaagatttttacttaatttgtatcacttttgcaccattgtaaagttgaaaaattattaacttgaaccactggaatttgtggacctccatattcaaaacttcattgtcattttcagttcttatatctcttctctgtcttttaatatttattactaatattatgacacctaatatgcagtgatattctaacttaatgctaagtatttaatgtcattatctcattcaatacttaaaatacctccttgaagatattttatgatgtctatttatatgtgaagtaactgaagttttaggttacataacctgccaaagattccatatcatctaattttcaaagcttaa

SEQ ID NO: 388424 - DNA, 531 bp, Homo sapiens
accaccattctactctctacctctatgaaatttattttgttatcttccaattatgagtgagaacatgtgatatttctttttctgtgcctggcctttctcacttaacatcattacatcacattccattcatgttgctgttgctgcaaatgacaggatttcattctatatatatattgtttcccaggctggagtgcagtggcactatctcaactcactgcaacctccgcctccctggttcaagctattctcctgctcaacctccggagtagctgggattacaggctcctgccaccacaamaagccaatttttgtatttttagtagacaggggtttcaccatgttggccaggctggcctcaaactcctgacctcaggtgatccacccacctcagcctccaaaagtgctgggattactggtgtgagccactgtacccagccctttttgatatattttgaagaatatttccaatttactatactgaatgcgatggtcagcagtctgaccaacatttgcaaaaagatgcttttaatg

SEQ ID NO: 388425 - DNA, 531 bp, Homo sapiens
accaccattctactctctacctctatgaaatttattttgttatcttccaattatgagtgagaacatgtgatatttctttttctgtgcctggcctttctcacttaacatcattacatcacattccattcatgttgctgttgctgcaaatgacaggatttcattctatatatatattgtttcccaggctggagtgcagtggcactatctcaactcactgcaacctccgcctccctggttcaagctattctcctgctcaacctccggagtagctgggattacaggctcctgccaccacaaamagccaatttttgtatttttagtagacaggggtttcaccatgttggccaggctggcctcaaactcctgacctcaggtgatccacccacctcagcctccaaaagtgctgggattactggtgtgagccactgtacccagccctttttgatatattttgaagaatatttccaatttactatactgaatgcgatggtcagcagtctgaccaacatttgcaaaaagatgcttttaatg

SEQ ID NO: 388426 - DNA, 554 bp, Homo sapiens
tgagccctgaaggttgaggctgcagtgagctatgatctcaccactgctctccagcctgaatgcagactgagcccccatcttaaaaaaagagaggccagacacaaagtgtaatttcattttatatggagagtacagaataggcaacttcatagagacaaagagttgattagcagttgccaggagatggrggtagaggtaaaagagaagtaactgctaatagctatagattttgtttaaggttgatgaaaattttctgcaaaaagttgttggtgatatctatacaatattgtgaataataaaaaaagccccactaatttgtacactttaaaatggtgagttttatgatatgcaaattatgtttttttaattaaatgggtgaaaaaagaaaggacctatttttaaacatgcatttgcttatttgaattttttaagtctcttaaagggtataacattgcataatttttcaggcctcatttcctgaagtaaaatgttactaaacaaaataaaaattgtaaaacagaatgatattctatctatctatctatgtatctatc

SEQ ID NO: 388427 - DNA, 554 bp, Homo sapiens
tgagccctgaaggttgaggctgcagtgagctatgatctcaccactgctctccagcctgaatgcagactgagcccccatcttaaaaaaagagaggccagacacaaagtgtaatttcattttatatggagagtacagaataggcaacttcatagagacaaagagttgattagcagttgccaggagatgggggtagaggtaaaagagaagtaactrctaatagctatagattttgtttaaggttgatgaaaattttctgcaaaaagttgttggtgatatctatacaatattgtgaataataaaaaaagccccactaatttgtacactttaaaatggtgagttttatgatatgcaaattatgtttttttaattaaatgggtgaaaaaagaaaggacctatttttaaacatgcatttgcttatttgaattttttaagtctcttaaagggtataacattgcataatttttcaggcctcatttcctgaagtaaaatgttactaaacaaaataaaaattgtaaaacagaatgatattctatctatctatctatgtatctatc

SEQ ID NO: 388428 - DNA, 603 bp, Homo sapiens
cttggactgcctgtctaacattctaactgtgtggcttgctacacaagagactggcttctgtctcacttgtcagagcactgacaggacctggcatacccaagatgtctgggagctactgagaaccaaaaaatatctcatggcatgctgctctaccagttgatccatactagcagacaccagagagatcaagacctgaaraagaaacaattaaattcctctcacttggaattaacacacacaattctaaaaatgatacatagagaagtttgggaggcccccataacctcttccttagctgatatggtgtcataaatatgctcaatgagctcagaaaaataatgcatgcacaaagtgagaacttcaaaaaagatattcaaaatgtgaaaaacaaccaactgtaaatcttggagctgaagaattaaataaataattgaaaaatttactagatgagtttgacagtggatttgcacaagcagaagaaagaatacacaaacctcaagacaggtcatttgcgattatgcagtcatgaaacaaaaatttaaataaaaaaaacacaatgaaagtgtgaacttaagggacttttatgataccatcaagtggacc

SEQ ID NO: 388429 - DNA, 603 bp, Homo sapiens
cttggactgcctgtctaacattctaactgtgtggcttgctacacaagagactggcttctgtctcacttgtcagagcactgacaggacctggcatacccaagatgtctgggagctactgagaaccaaaaaatatctcatggcatgctgctctaccagttgatccatactagcagacaccagagagatcaagacctgaaaaagaaacaattaaattcctctcacttggaattaacacacacaattctaaaaatgatacatagagragtttgggaggcccccataacctcttccttagctgatatggtgtcataaatatgctcaatgagctcagaaaaataatgcatgcacaaagtgagaacttcaaaaaagatattcaaaatgtgaaaaacaaccaactgtaaatcttggagctgaagaattaaataaataattgaaaaatttactagatgagtttgacagtggatttgcacaagcagaagaaagaatacacaaacctcaagacaggtcatttgcgattatgcagtcatgaaacaaaaatttaaataaaaaaaacacaatgaaagtgtgaacttaagggacttttatgataccatcaagtggacc

SEQ ID NO: 388430 - DNA, 603 bp, Homo sapiens
cttggactgcctgtctaacattctaactgtgtggcttgctacacaagagactggcttctgtctcacttgtcagagcactgacaggacctggcatacccaagatgtctgggagctactgagaaccaaaaaatatctcatggcatgctgctctaccagttgatccatactagcagacaccagagagatcaagacctgaaaaagaaacaattaaattcctctcacttggaattaacacacacaattctaaaaatgatacatagagaagtttgggaggcccccataacctcttccttagctgatatggtgtcataaatatgctcaatgagctcagaaaaataatgcatgcacaaagtgagaacttcaaaaaagatattcaaaatgtgaaaaacaaccaacygtaaatcttggagctgaagaattaaataaataattgaaaaatttactagatgagtttgacagtggatttgcacaagcagaagaaagaatacacaaacctcaagacaggtcatttgcgattatgcagtcatgaaacaaaaatttaaataaaaaaaacacaatgaaagtgtgaacttaagggacttttatgataccatcaagtggacc

SEQ ID NO: 388431 - DNA, 586 bp, Homo sapiens
tctttggctgtggcccgtgctccgtttttatagcacatcactccagtctctgcttctgtcaccacataatcttctccctcactccactgcctctggcttatragaacccttgtaattatgttgagtctacccagatgacccaggataacctcctcatcttaagatccgtcacttcatgacatctgtaaattctctttggtcctatatgtgtattcacaggttccatattctctttggtaggatgtggggagtgagggggcatcattcagcctactgcagcacctttctcaaaagtcagttaactttatatgtgtttttttttctggactatttttttcccttgacctataggtatatctttacataaataccacattgtcttgattactgtgactttataatgtcttcttgaaattgggtagtgtaagtcttctttgtccattattttcaaagttgtttccgctattataggtcctttttattttcatatgaattttttgaatgaggttttcagtttctacaaaaaatcctgctgggattttgattgagagtgtgttgattttatagatacatttggggagaattg

SEQ ID NO: 388432 - DNA, 592 bp, Homo sapiens
tacacagatcataactgtattatttcgtcttatggatctcctcagactccctcaggctcatctgcccctagatgcttaaactctttctctaccttgctgtcactatggctatgggtgaccaaagtcattccatcctgcattgttccttgaactgaggccaaccagactcacatgtgggctgtttggatcctcctgtcacttccagactcagatgagacaccacattaaagtggagtctgtcttcccaagaggctgcctaatggrccagatgatgcagttgaaaagtgtgaggaaattaattcttcatggggtaaactcagacaaatgggagacaggaaggagttgacagatacattccttctcctttctccccttgatgaatggctgcaaggcatgcttttctgtttgcctgttgctccacttccttgccaatacttgatgtttccagtctttataattttagtcactttggaggtatgtagtaatatcaccttgtgttataatttgcattttcctggtgaataatgacattgagcatcttttcatatagttattggccatttagataaatttctttgttaagttgctgttg

SEQ ID NO: 388433 - DNA, 569 bp, Homo sapiens
ttccactatgagcaatgatgaaattattcttttttcctccccacatcctcttcttcctctcctattatataggtgtgatttctagcaggttgtattgtcataattgacatttatcttagtgcttttagatatatttataactttatttattgatttgtttactttaactgctttttttcaccagctattaaagaaaaggaaattaatgtacttctactactggccattttttttacccctcttcttcccaactttagttgaaaaattttaaattataatctgacatctgttttgattttacttttacatatataagtaattttttgatattagttgacttaattaattttttaggaacattataggtttatagaatgattatgcagatagtacagagttcctgtgtctaccctcccttcagagtttcccctgttaygaacatcttgctttaatgtggtacacttgttacaattgatgaaccattattgatagattattaactgaagtttattttttacattagggttcactctttgttgtgcagttctatgggttttgacaaatgcaca

SEQ ID NO: 388434 - DNA, 491 bp, Homo sapiens
gtcttgaacaaattgggtcaagttctatcaggaaatgaggtataacgattttgttgatggccttgaggtcttgaacaaattggtatctttgtcgctttgtttctttactcggaggatgggagtgttacaacggctagtgcagagtatgagaagacttttgtatgtaaggcctttaaccatagtttgagcccttcctttggcttcaagggatattggagaagtttgagtaatggcttggtaggatctatctgaacttttatagattctgctctygttatttttcctatgccagtgaaatttttagcccatagaaggtcatggaatagtgtcaagatctttatctggggtatgcatcaaataaaatacagaatgcaaaggtatattcagaacaaacacaacttgattatgaatagaggagtcctctggaaacttaagaaatgctccctctggtgtgcatttatgattgcaatctcatgtataaagtatatctc

SEQ ID NO: 388435 - DNA, 620 bp, Homo sapiens
atggcctgattatttccacctcaaaagtgacttgatctttgtgccttcctacccaggttttttttttttctttaaattttgaagcccaraaatttttgctaaaaaatggcttagttttaaatattttttctctgttttccccaacacatggtcaatatgtaaagtcaaaatttttcttatgtcacgaaaattatctataattgtatcttaaaatatttgttaagttgcattgtttttttctgtcctccaaagactctaattatacactgttcatcttctttgtcttctgtatctgtaatgttttgtcaattaacaaaatacttcctttttatttattttctgacttatatatacatactatgccccttgcagggttttagaaaatgtctgttctttctcgtctgtgttccagttttgccttaattgatttccagttcaaattttatcttctcttattttctcaccatttcttctttgaactcttagtacatttactaggtactcttgttgcatagaggtgattgtttcattaagatttctaaattaatggcaaatttattttccttcacaattttaatcttctttgcattaatatttctcttaagtatatttgttgtctg

SEQ ID NO: 388436 - DNA, 640 bp, Homo sapiens
tatgctcagctctgagcttgggcttttatgggcctcagaggggaggaagttcatgccatttggcccatgggtggtcacgggcaagcccaaaaaaggcaccacaagttcccactccagtccacgggactggcagcctggcccccagccttcaggccctccctgacctgaaggtgagagcctcactggggacctgcccccttccacccaggaactgtctgccttctgccgctgttcatggcatccaggctgtaggtgccaaggggtgcctgcaggccagcgctgagatgccctcaaactctcctcggcttccctcctatgcttgtcagtgcccaaagtctggagcgggctgaggtggcaagaaggagctggtrtgtcagcactgctccaagtgtgtgcacacccagccaggctgcagcagtgcctaggctcagccccaactttgctctgagattggagtgggcactgacagcagggagaagccaggcagtgggagcaggcacttgcagagatgcctgggtcttcagacatggtattgggagcaggcacatgcagagatgcctgagtctgcagccatggattgagcagctgcagctgtgcccaggggctcaggtctcctgcctgctctgtggagtgggagaat

SEQ ID NO: 388437 - DNA, 594 bp, Homo sapiens
tgtgcctattttggacatttcatataaatggaatcatacaatatgtgatcttttgtgagtagcctcttttgtttgacgtggtattttcaaggttcatccatgttgtarcatgtgtcagaattcttcctttttatggctgaataatattccattgtatggatataccacattttgtttctctcctcatcagctgttgcacatttgggttgttgccactttttggctatcatgaataatgctgctctgaacattcatggacaggtttttgtatcggcatgttttcagttctcttaggtggaatggagtggaattgctgggttatgtggtgactctatgcttaactcgatgaggacctgccaaactatttttcaaagtggctgcatcattttacgttcccaccagcaatttctccatatctgcactaatacttattgtctgtctttatggttatagacatcttagtggatgtggagtagaatctcattgtggtttcgatttacattctcctaatgactaataatattgaacatcttttcatgtgtttattgattatttgtatatcttcttaaaataaatgtctattcgagtcctttg

SEQ ID NO: 388438 - DNA, 594 bp, Homo sapiens
tgtgcctattttggacatttcatataaatggaatcatacaatatgtgatcttttgtgagtagcctcttttgtttgacgtggtattttcaaggttcatccatgttgtaacatgtgtcagaattcttcctttttatggctgaataatattccattgtatggatataccacattttgtttctctcctcatcagctgttgcacatttgggttgttgccactttttggctatcatgaataatgctgctctgaacattcatggacaggtttttgtatcggcatgttttcagttctcttaggtggaatggagtggaattgctgggttatgtggtgactctatgcttaactcgatgaggacctgccaaactatttttcaaagtggctgcatcattttacgttcccaccagcaatttctccatatctgcactaatacttattgtctgtctttatgrttatagacatcttagtggatgtggagtagaatctcattgtggtttcgatttacattctcctaatgactaataatattgaacatcttttcatgtgtttattgattatttgtatatcttcttaaaataaatgtctattcgagtcctttg

SEQ ID NO: 388439 - DNA, 597 bp, Homo sapiens
gctttttgttttaaggttttcactgtctgatgttggtatagctacactgcttctttgggttattgattgcagaatatatcttttactatccttttacttatataacctttctattctattatattttacatgtttctctttttaaacatatttgtttaagttaaaaatacttttgacaatcttttagctagagtcttttaattggagcatttagtccatttacacttaatgtatttaaatctaccatttaattatatgctttctatttgtcatatatgactttggtttctcttttctctccttttttgcctttcttaactttctcttttggattttaaaaattattccattttgccggttagtttagaaaccacgtacttttctactrttctcttaatggttatcatatagattgccatgagcactgtgcatttcttttgtccccagtgcttgctgtggctgagttcttaatcagcaatctgtgttttgcttgcggtgtgtgtatgtgtacttactgcagtcactgtggagctttctttatgtcaatctgatggccattaccccagtcgtttcacccctgatagcactacccaccca

SEQ ID NO: 388440 - DNA, 624 bp, Homo sapiens
tatcttgtagaaactgacaagctgatcctaaaattcacatggaaatgcagaacacccagaattactataataatttttaaaaagaatgacaaagttggctgggtgcagtggctcacacctgtaatcccagcactttgggaggccgaggcgggtggatcacctgaggtcagtagttcgagaccagcctggctaacatggtgaaaccctgtctctaaaaactacaaaatttagctgggtgtggtcatgggtgcctgtaatcccagctatttgggaggctgaggcaggagaattgcttgaaccygggaggcggaagttgcagtgagccgagattgcgccacggtactccagcctaggtgacagagcgagactccatctcaaaaattaaaaaaaaaaaaaaaagaattacaaagttgactttcattactaaatttcaactctcgctctaaagacacagtaatcaatacagggtggtactgtcccaagaatatagatgaaagaaactgaactgtgagtccaaaaataaatcttggcatttatggtcaatttacttttcacaaaagagctaagtgccaactcaacctgacatatgtagaacagtcagtccaatgactgatgaatacacat

SEQ ID NO: 388441 - DNA, 624 bp, Homo sapiens
tatcttgtagaaactgacaagctgatcctaaaattcacatggaaatgcagaacacccagaattactataataatttttaaaaagaatgacaaagttggctgggtgcagtggctcacacctgtaatcccagcactttgggaggccgaggcgggtggatcacctgaggtcagtagttcgagaccagcctggctaacatggtgaaaccctgtctctaaaaactacaaaatttagctgggtgtggtcatgggtgcctgtaatcccagctatttgggaggctgaggcaggagaattgcttgaacctgggaggcggaagttgcagtgagccgagattgcgccacggtactccagcctaggtgacagagcgagactccatctcaaaaattaaaaaaaaaaaaaaaagaattacaaagttgactttcattactaaatttcaactctygctctaaagacacagtaatcaatacagggtggtactgtcccaagaatatagatgaaagaaactgaactgtgagtccaaaaataaatcttggcatttatggtcaatttacttttcacaaaagagctaagtgccaactcaacctgacatatgtagaacagtcagtccaatgactgatgaatacacat

SEQ ID NO: 388442 - DNA, 558 bp, Homo sapiens
tcatcttttgccctaggtgagtgtttgttatttggatataatttaaaacacactgctttcaaaaatacttaatttgtttttatttttatgatgcataaaattgtgtatcctgtttaaagyagggttttatggtgccaaataagtaaactcctattgatgagaacttcaaaaaccaaaagaacacctggtcctggtagggattaaaacaaacagaaaagagtattaaattctaggcaagcagtaccttccttgtatcacccagaagatagagaaactcagaaagaaaacaaaatgcaacagtgagaaagagattcacaaaggtacttgctccccacaaattctgcaccttcctccatgcttcctgttccctctaccaaacctccaagaagtgaaggaaaacagatgagttgctcaatccattcgtctacctgactggggaatctaaatggtaagttctcatgatgttccaaccttctgaaatactagaaggttctattatcattattattttctgcacaattaaaaggcacagcagaacaagcatggctggccatgtgt

SEQ ID NO: 388443 - DNA, 501 bp, Homo sapiens
atgtaccccagggaacaaaattacccctagttgagaactactgccctggatgttggaggagtaagaagacagaaggaacctgggtcttcagttggccttgtagaacagaamcactctccatcccaaatggcccacctgccctctggactgctataaaggtttgagaagttgctattttgtttgagcaactctattttgagtggctgtgcagaagcttaaattgcatcccaacaactgccagcctttcagggcctcataagtacttaacactttgttttaatgtgatgggaaaccactagagtttggttaaagcagggtagtgacatgatttgttttgaaaggtccactttggatgctgtgtgaagaacagactgaggggatgtagaaaggatgtgtttgatggactggatgtaggatatgagaaaaagaaaggggtcaactaagcaactgagtgaatgacagtgccattgaccaacacggagatctgtgggggacagggtt

SEQ ID NO: 388444 - DNA, 536 bp, Homo sapiens
ttgtggggaggggggttgtgttgaaatttaatttctgtgctatttgggattcatgctacttctcagaagagacacagttttccagtagagataaacgacctcttccaagaacaatggaaatgaaagggggatgggggtggggtggggagtgctgtgggtagaggggcagcaagcacagatgaattgaaaagagaagagttataagcaggttggcttcctttaaaaagatgggayagggtctccaaaaaataaataaaataaaaagttaggctatctattggactatccttcaaagagcggctgtgacttagtgtgaaagcagatttttaaaaaatatgaatacagtgagtcacaaaattctctcaccaaaaccaagatatgaaaaaaaaaaaaaaaagagtagcttctattttcttcaaaactgctctgagctttgtgtaagcctcattccctggggaatccaggaaaacttagaattgccaagaagcaatattctgatctcttctgatttaaagtctcctttccatttaaccatt

SEQ ID NO: 388445 - DNA, 378 bp, Homo sapiens
aaactgactctttcctatatatagcaaagacaaataatcacccacttccccagttgatctgttttgtgagtccctgtttttaaatattgagttttctgaaaagttcacctcattagcagaagttctaatggcagccatcaagttttatccaggcataggggtgacctggaggtccctgcagagagaggtgaggtgggrgaagggctattgcaggaactgggtgattcctccacaggggaaatctggccacttgggcaaaatcagaagcacagattccggatttctgctcctgctgctcttccagtcctgtgccttgcatggctggaggattttggaggagagtaaatctcaaagctctctccaaatcttcctgctctg

SEQ ID NO: 388446 - DNA, 378 bp, Homo sapiens
aaactgactctttcctatatatagcaaagacaaataatcacccacttccccagttgatctgttttgtgagtccctgtttttaaatattgagttttctgaaaagttcacctcattagcagaagttctaatggcagccatcaagttttatccaggcataggggtgacctggaggtccctgcagagagaggtgaggtggggraagggctattgcaggaactgggtgattcctccacaggggaaatctggccacttgggcaaaatcagaagcacagattccggatttctgctcctgctgctcttccagtcctgtgccttgcatggctggaggattttggaggagagtaaatctcaaagctctctccaaatcttcctgctctg

SEQ ID NO: 388447 - DNA, 547 bp, Homo sapiens
gggtgtatctctgagtgttgggattgtaagattttattttttttttctcattttaaatactttctaaattttctgcaaagagaaccatataatataatcaggacaagttttaatatattttaaaaagtaaatcgaacaaacacaatctctgctttctaagaagtctttcatttttgtacgttggtcatagactatgactatacaatttatttgtgatatttattaagaatttctgkctaacccaaattattatatgtaagctctggaaaaatgatgtcatctttgtttgtagtgtacaaagttctataaacagttatttgatcaactttggtatttccatccctagatttatatacagcaggttaggttccgtacataggcaggttctgaataataaaaaccaacagtgatatagcactcactttgtgccatgcactgttctaagcgatttacatacacttaatttttaaaattgtagtaaaatacacataagtttaccatttgaaccattttaaagtgtacaatcggtagcatttaatgcattcaa

SEQ ID NO: 388448 - DNA, 547 bp, Homo sapiens
gggtgtatctctgagtgttgggattgtaagattttattttttttttctcattttaaatactttctaaattttctgcaaagagaaccatataatataatcaggacaagttttaatatattttaaaaagtaaatcgaacaaacacaatctctgctttctaagaagtctttcatttttgtacgttggtcatagactatgactatacaatttatttgtgatatttattaagaatttctgtctaacccaaattattatatgtaagctctggaaaaatgatgtcatctttgtttgtagtgtacaaagttctataaacagytatttgatcaactttggtatttccatccctagatttatatacagcaggttaggttccgtacataggcaggttctgaataataaaaaccaacagtgatatagcactcactttgtgccatgcactgttctaagcgatttacatacacttaatttttaaaattgtagtaaaatacacataagtttaccatttgaaccattttaaagtgtacaatcggtagcatttaatgcattcaa

SEQ ID NO: 388449 - DNA, 471 bp, Homo sapiens
tgggggacagacttatatttagaggttccctttaattgggcaaatgcaaaaaaaaaattctgctagagaaacacagtgacttctatgtgtccagttgaaaaagatggaattttatgcagttctgtttctcttctgagtttaactgaactcagaggaataaaccctcctagagctgttcacactggtatttagagcaaaattaaaaactgaattctcacctttatcagtcggcgaatactgtaagaaattaagaggatcgttccaataataccagccatcacacacaaaataatgagtattatcactacaggagctaaagagagcagcaaaattatgaaagtctgaaataaatgaccacatagcaatagaaaaataagacagataacatcagcrtaacatcaccttgccttttaatacaaagtacagttaacatactattatgtgtattttgtctttttttaaattgtgtgc

SEQ ID NO: 388450 - DNA, 471 bp, Homo sapiens
tgggggacagacttatatttagaggttccctttaattgggcaaatgcaaaaaaaaaattctgctagagaaacacagtgacttctatgtgtccagttgaaaaagatggaattttatgcagttctgtttctcttctgagtttaactgaactcagaggaataaaccctcctagagctgttcacactggtatttagagcaaaattaaaaactgaattctcacctttatcagtcggcgaatactgtaagaaattaagaggatcgttccaataataccagccatcacacacaaaataatgagtattatcactacaggagctaaagagagcagcaaaattatgaaagtctgaaataaatgaccacatagcaatagaaaaataagacagataacatcagcataacatcaccttgccttttaatacaaagtacarttaacatactattatgtgtattttgtctttttttaaattgtgtgc

SEQ ID NO: 388451 - DNA, 611 bp, Homo sapiens
agaagagagctgagttctgagaggctgagagtcacacaactagtaggatagcacaaggtcacctgaatgcaatgaccttttcactgccccataagatttcacccacccatccatccactcagcattaaatcagaacttcctacatgttatgagtttttaaaaatggtgacaaaatatacataacaaaattaaatatcttaaccatttttatatgtatagttcagtactgttaagtatacttacatcattatgcaagcaatctccagaactttttcatcttcctaaaataaaactctatagccattaaacaacttcccatttctccctccccaagcccctggcaaccaccgttttactttctgtttctgtgaatctgactcttgtagatacctcatagagtggaatcatacagaatttgtctttctgtgactatttcatttagcctaatgacctcaagattcatccatgttgyagtgtatgttagaatttctttcctttataaagaagaatttacaacattttgtttattcattcttccattaacggacaggtgggttgcttccactttttggttattgggaataatgctataatgaacatggatgtgcaat

SEQ ID NO: 388452 - DNA, 611 bp, Homo sapiens
agaagagagctgagttctgagaggctgagagtcacacaactagtaggatagcacaaggtcacctgaatgcaatgaccttttcactgccccataagatttcacccacccatccatccactcagcattaaatcagaacttcctacatgttatgagtttttaaaaatggtgacaaaatatacataacaaaattaaatatcttaaccatttttatatgtatagttcagtactgttaagtatacttacatcattatgcaagcaatctccagaactttttcatcttcctaaaataaaactctatagccattaaacaacttcccatttctccctccccaagcccctggcaaccaccgttttactttctgtttctgtgaatctgactcttgtagatacctcatagagtggaatcatacagaatttgtctttctgtgactatttcatttagcctaatgacctcaagattcatccatgttgtagtgtatgttagaatttctttcctttataaagaagaatttacaacattttgtttattcattcttccattaayggacaggtgggttgcttccactttttggttattgggaataatgctataatgaacatggatgtgcaat

SEQ ID NO: 388453 - DNA, 611 bp, Homo sapiens
agaagagagctgagttctgagaggctgagagtcacacaactagtaggatagcacaaggtcacctgaatgcaatgaccttttcactgccccataagatttcacccacccatccatccactcagcattaaatcagaacttcctacatgttatgagtttttaaaaatggtgacaaaatatacataacaaaattaaatatcttaaccatttttatatgtatagttcagtactgttaagtatacttacatcattatgcaagcaatctccagaactttttcatcttcctaaaataaaactctatagccattaaacaacttcccatttctccctccccaagcccctggcaaccaccgttttactttctgtttctgtgaatctgactcttgtagatacctcatagagtggaatcatacagaatttgtctttctgtgactatttcatttagcctaatgacctcaagattcatccatgttgtagtgtatgttagaatttctttcctttataaagaagaatttacaacattttgtttattcattcttccattaacggacaggtgggttgcttccactttttggttattgkgaataatgctataatgaacatggatgtgcaat

SEQ ID NO: 388454 - DNA, 479 bp, Homo sapiens
tatggttactactcagaagcaagaggcaagaggcaagaaatgcatgattgagtacctgcttgatttaggaggggagaggaaaagaaacaggttgaatttttaaaatgttattgagttggctgggcatggtggctcacatctgtaatccaagcactttgggaggctgaggagggtgggtcacctgaaagtcaggagttcgagaccagcctggccaacatggtgaaaccctgtctctacttaaaatataaaaaattagctcagcatggtggtgggcrcctataatcccagctacttcggaggctgaggcaggagaatcacttgaacccaggaggcagaggttgcagtgagccgagatcgcaccattgcacaccagcctgtgcaacaagagtgaaacttcgtctcaaagaaaaatgttattgagtcacagttgtgtcagagttctcaaaattcagaagccagctttccaatgctgtagactc

SEQ ID NO: 388455 - DNA, 411 bp, Homo sapiens
caggtagaatatggttattgcttaactcagtttactactgctacctaaaaccatggttgatatttaactggcttgygttaaatacattgcgttaccaagtattcattctgattgagtggtaccatgtggtcaaaggggttaaagtttttgaacattatttctgccccaagttaataaacaacacttcttaccagcatgatttagatatgggtttacctgtacattgggagttttttccaagtgtgtttattccaagcattgtagaatttctcagttccttataaggctatcttagagacttagattataatattttcaataataatttgtcagactgtattctcagtcattcaattttgggatattatttgatgactccccctcagaagcctcttttaatgactagtctga

SEQ ID NO: 388456 - DNA, 411 bp, Homo sapiens
caggtagaatatggttattgcttaactcagtttactactgctacctaaaaccatggttgatatttaactggcttgtgttaaatacrttgcgttaccaagtattcattctgattgagtggtaccatgtggtcaaaggggttaaagtttttgaacattatttctgccccaagttaataaacaacacttcttaccagcatgatttagatatgggtttacctgtacattgggagttttttccaagtgtgtttattccaagcattgtagaatttctcagttccttataaggctatcttagagacttagattataatattttcaataataatttgtcagactgtattctcagtcattcaattttgggatattatttgatgactccccctcagaagcctcttttaatgactagtctga

SEQ ID NO: 388457 - DNA, 411 bp, Homo sapiens
caggtagaatatggttattgcttaactcagtttactactgctacctaaaaccatggttgatatttaactggcttgtgttaaatacattgcgttaccaagtattcattctgattgaktggtaccatgtggtcaaaggggttaaagtttttgaacattatttctgccccaagttaataaacaacacttcttaccagcatgatttagatatgggtttacctgtacattgggagttttttccaagtgtgtttattccaagcattgtagaatttctcagttccttataaggctatcttagagacttagattataatattttcaataataatttgtcagactgtattctcagtcattcaattttgggatattatttgatgactccccctcagaagcctcttttaatgactagtctga

SEQ ID NO: 388458 - DNA, 612 bp, Homo sapiens
gaagaaaccccagaagtgagaaactctcattactacaatggtgatgtagacagtgaaaaactgttcccagttgcctctaagtccattgtgctatactgctggaatcaggwatcatacatgatctttctgctgagaattgataggtccagcttgttctacatccaaataataattcaacaaatgatttgtgagcacctaccgggcactgtgccaagtgtggaagacacaaccttcagtaactcaagtttcccttcaggaactgacagcttaattgggaaacaaataaagtaagaaggcaattgcattatggagtgtcaagtggatgatagtagtaagcaaagggtgttataagagtacataagaggggtacctaactcagacttggggttctggaaaggttttccagagcaagcaagacctaaaggatgagtagacaagtcacgggagaagtaagaacattttaagcagagaaaacagcatgagcaatggtctgataccaagaaagagagagatagtgcaagaatacacaatgtagtagttttcaaaactgtttgaaattttaatctcacattggttcttttcaatgtctagtatatcaattcattctgccgt

SEQ ID NO: 388459 - DNA, 612 bp, Homo sapiens
gaagaaaccccagaagtgagaaactctcattactacaatggtgatgtagacagtgaaaaactgttcccagttgcctctaagtccattgtgctatactgctggaatcaggaatcatacatgatctttctgctgagaattgataggtccagcttgttctacatccaaataataattcaacaaatgatttgtgagcacctaccgggcactgtgccaagtgtggaagacacaaccttcagtaactcaagtttcccttcaggaactgacagcttaattgggaaacaaataaagtaagaaggcaattgcattatggagtgtcaagtggatgatagtagtaagcaaagggtgttataagagtacataagaggggtacctaactcagacttggggttctggaaaggttttccagagcaagcaagacctaaaggatgagtagacaagtcacgggagaagtaagaacattttaagcagagaaaacagcatgagcaatggtctgataycaagaaagagagagatagtgcaagaatacacaatgtagtagttttcaaaactgtttgaaattttaatctcacattggttcttttcaatgtctagtatatcaattcattctgccgt

SEQ ID NO: 388460 - DNA, 601 bp, Homo sapiens
atcctctgttcctattttcccctcaaataaaagtagacttaccatgtgtttagagtttctgtgtctgccaagggagyctttaattgctaaaactaaaagactttatccatattttcttttagtgctttcctgtttttattttagtatcttaaccttaattatgtgaaatattttatgttgtaaagaatgagtagtagagatccatttttttcttcttgagtatctgacaagttttctgaatatggtaaacaatctatctttttatattgatttgaaagctgctttcttcatgacactaaattattacatgtatttgaatttacaaatgaattgttatatttcacttatctgaatatatatttctttacccagaatgttccttcaattaatgcttaatataactctatattataattcctggctgaagaagttcccactcattgttcttcattttcataatttttctgactattaacacacatttattcttctagatggaggctgttcaaccttggcactattgatattttggactggataaatagaaatctgtagtgggatccttctaatttcctctactttctttttgtagctctgtttg

SEQ ID NO: 388461 - DNA, 601 bp, Homo sapiens
atcctctgttcctattttcccctcaaataaaagtagacttaccatgtgtttagagtttctgtgtctgccaagggagtctttaattgctaaaactaaaagactttatccatattttcttttagtgctttcctgtttttattttagtatcttaaccttaattatgtgaaatattttatgttgtaaagaatgagtagtasagatccatttttttcttcttgagtatctgacaagttttctgaatatggtaaacaatctatctttttatattgatttgaaagctgctttcttcatgacactaaattattacatgtatttgaatttacaaatgaattgttatatttcacttatctgaatatatatttctttacccagaatgttccttcaattaatgcttaatataactctatattataattcctggctgaagaagttcccactcattgttcttcattttcataatttttctgactattaacacacatttattcttctagatggaggctgttcaaccttggcactattgatattttggactggataaatagaaatctgtagtgggatccttctaatttcctctactttctttttgtagctctgtttg

SEQ ID NO: 388462 - DNA, 601 bp, Homo sapiens
atcctctgttcctattttcccctcaaataaaagtagacttaccatgtgtttagagtttctgtgtctgccaagggagtctttaattgctaaaactaaaagactttatccatattttcttttagtgctttcctgtttttattttagtatcttaaccttaattatgtgaaatattttatgttgtaaagaatgagtagtagagatccatttttttcttcttgagtatctgacaagttttctgaatatggtaaacaatctatctttttatattgatttgaaagctgctttcttcatgacactaaattattacatgtatttgaatttacaaatgaattgttatatttcacttatctgaatatatatttctttacccagaatgttccttcaattaatgcttaatataactctatattataattcctggctgaagaagttcccactcattgttcttcattttcataatttttctgactattaacacacatttattcttctagatggaggctgttcaaccttggcactattgatattttggactggataaataraaatctgtagtgggatccttctaatttcctctactttctttttgtagctctgtttg

SEQ ID NO: 388463 - DNA, 559 bp, Homo sapiens
acttatctgtttttaattgctctgctattgtttgatatttacaagtgatttattattttatcctttttattaggtaagaggtgttaatggtgagtttgagattgataggagctattttgttagaaataaatgaggaactgttgcaagaatggactgtaatttttacattttattcaattgttttggtttcttacatccttatgacactttccttagtgtttaacacaaacaactaaagtaaaataactgccatwtctctccttgcagttttgcaaacagctctttttataagaactgtgattgcctctagcaagcagtctcaagtacttgatatataaacacattattgccccttttcttcacacttgaagtttgtagaataaaccactaaaaatatcacagtatctgaggagaaaggacctctccagatgatgttttcttacctggggccaatatgtgcaccatagagtcccctctatctgccataaaactttgtttattgctttaatcaatcttcacatggtaggacgatacaggcaaaagctgaggtcttcctata

SEQ ID NO: 388464 - DNA, 559 bp, Homo sapiens
acttatctgtttttaattgctctgctattgtttgatatttacaagtgatttattattttatcctttttattaggtaagaggtgttaatggtgagtttgagattgataggagctattttgttagaaataaatgaggaactgttgcaagaatggactgtaatttttacattttattcaattgttttggtttcttacatccttatgacactttccttagtgtttaacacaaacaactaaagtaaaataactgccatatctctccttgcagttttgcaaacagctctttttataakaactgtgattgcctctagcaagcagtctcaagtacttgatatataaacacattattgccccttttcttcacacttgaagtttgtagaataaaccactaaaaatatcacagtatctgaggagaaaggacctctccagatgatgttttcttacctggggccaatatgtgcaccatagagtcccctctatctgccataaaactttgtttattgctttaatcaatcttcacatggtaggacgatacaggcaaaagctgaggtcttcctata

SEQ ID NO: 388465 - DNA, 559 bp, Homo sapiens
acttatctgtttttaattgctctgctattgtttgatatttacaagtgatttattattttatcctttttattaggtaagaggtgttaatggtgagtttgagattgataggagctattttgttagaaataaatgaggaactgttgcaagaatggactgtaatttttacattttattcaattgttttggtttcttacatccttatgacactttccttagtgtttaacacaaacaactaaagtaaaataactgccatatctctccttgcagttttgcaaacagctctttttataagaactgtgattgcctctagcaagcagtctcaagtacttgatatataaacacattattgccccttttyttcacacttgaagtttgtagaataaaccactaaaaatatcacagtatctgaggagaaaggacctctccagatgatgttttcttacctggggccaatatgtgcaccatagagtcccctctatctgccataaaactttgtttattgctttaatcaatcttcacatggtaggacgatacaggcaaaagctgaggtcttcctata

SEQ ID NO: 388466 - DNA, 559 bp, Homo sapiens
acttatctgtttttaattgctctgctattgtttgatatttacaagtgatttattattttatcctttttattaggtaagaggtgttaatggtgagtttgagattgataggagctattttgttagaaataaatgaggaactgttgcaagaatggactgtaatttttacattttattcaattgttttggtttcttacatccttatgacactttccttagtgtttaacacaaacaactaaagtaaaataactgccatatctctccttgcagttttgcaaacagctctttttataagaactgtgattgcctctagcaagcagtctcaagtacttgatatataaacacattattgccccttttcttcacacttgaagtttgtagaataaaccacyaaaaatatcacagtatctgaggagaaaggacctctccagatgatgttttcttacctggggccaatatgtgcaccatagagtcccctctatctgccataaaactttgtttattgctttaatcaatcttcacatggtaggacgatacaggcaaaagctgaggtcttcctata

SEQ ID NO: 388467 - DNA, 580 bp, Homo sapiens
ttatttatttcatttcattctatttgacccatccaaatgtttaacatggttttataaaagtaamtttatttttagcttgtctgtagattcaattttcttgtagttgctggtataagtaatagggaaaaatgtatcagtcttatacaataaagaagttcagatgagtgtgtgatataggaagaagcaatcggtatgtaacaacatatgtctgcctgctacgcttttaatacttgttagagttttagtttctatgagtatcttggaggtgctggaatatatatgcaaatttccttctaaaagattgcaccaagttacattaccataacaacaataagaatttactgcagccttagcacattggatattatcttagaaataccactttgtaggtttcatagataatggataaattttctgttgttttaatttacattttaaaaggagtgaggttgaaaatgatgcaatttgaaatgcatgtgcataagaagttgaatagaagtttattggtcagaatgtgaaatgagttttgaacaagttaaatgttttgaaaaacagtatgaatgtactgaatacttttgag

SEQ ID NO: 388468 - DNA, 580 bp, Homo sapiens
ttatttatttcatttcattctatttgacccatccaaatgtttaacatggttttataaaagtaactttattttyagcttgtctgtagattcaattttcttgtagttgctggtataagtaatagggaaaaatgtatcagtcttatacaataaagaagttcagatgagtgtgtgatataggaagaagcaatcggtatgtaacaacatatgtctgcctgctacgcttttaatacttgttagagttttagtttctatgagtatcttggaggtgctggaatatatatgcaaatttccttctaaaagattgcaccaagttacattaccataacaacaataagaatttactgcagccttagcacattggatattatcttagaaataccactttgtaggtttcatagataatggataaattttctgttgttttaatttacattttaaaaggagtgaggttgaaaatgatgcaatttgaaatgcatgtgcataagaagttgaatagaagtttattggtcagaatgtgaaatgagttttgaacaagttaaatgttttgaaaaacagtatgaatgtactgaatacttttgag

SEQ ID NO: 388469 - DNA, 580 bp, Homo sapiens
ttatttatttcatttcattctatttgacccatccaaatgtttaacatggttttataaaagtaactttatttttagcttgtctgtagattcaattttcttgtagttgctggtataagtaatagggaaaaatgtatcagtcttatacaataaagaagttcagatgagtgtgtgatataggaagaagcaatcggtatgtaacaacatatgtctgcctgctacgcttttaatacttgttagagttttagtttctatsagtatcttggaggtgctggaatatatatgcaaatttccttctaaaagattgcaccaagttacattaccataacaacaataagaatttactgcagccttagcacattggatattatcttagaaataccactttgtaggtttcatagataatggataaattttctgttgttttaatttacattttaaaaggagtgaggttgaaaatgatgcaatttgaaatgcatgtgcataagaagttgaatagaagtttattggtcagaatgtgaaatgagttttgaacaagttaaatgttttgaaaaacagtatgaatgtactgaatacttttgag

SEQ ID NO: 388470 - DNA, 580 bp, Homo sapiens
ttatttatttcatttcattctatttgacccatccaaatgtttaacatggttttataaaagtaactttatttttagcttgtctgtagattcaattttcttgtagttgctggtataagtaatagggaaaaatgtatcagtcttatacaataaagaagttcagatgagtgtgtgatataggaagaagcaatcggtatgtaacaacatatgtctgcctgctacgcttttaatacttgttagagttttagtttctatgagtatcttggaggtgctggaatatatatgcaaatttccttctaaaagattgcaccaagttacattaccataacaacaataagaatttactgcagccttagcacattggatattatcttagaaataccactttgtaggtttcatagataatggataaattttctgttgttttaatttacattttaaaaggagtgaggttgaaaatgatgcaatttgaaatgcatgtgcataagaagttgaatagaagtttattggtcagaatgtgraatgagttttgaacaagttaaatgttttgaaaaacagtatgaatgtactgaatacttttgag

SEQ ID NO: 388471 - DNA, 501 bp, Homo sapiens
  misc_feature (1)...(501): n = A,T,C or G
atcctacttttgtctctgtctccacttgccattttatgtcatgaagctctcttataccaaagccacacaattttctagagtttaattattacaaattacttagtatatgctatgttgtttgatgattgaggattcangtatattttttcattctttaggctttacgtacaaaggttaattggggcttgccttctctttcttggtcacagttaatagttgtgggtgctatatgggctttggagtaaaagagttgggttttctgtcacgaaagtttgagaactgtcatgagttacagctcgtgtaaatagagttcaatcacaacaatgactccagagaaactatttaaaactaagaacataacgtttttcttttctggaggggaaacagttgtaacagaaatttctgaaacttcattagcagtatgagctggayatgtgtcccgtttgtgcttatctgcatataagagaagttgagaaagggaacaagaatgaggtgactgcg

SEQ ID NO: 388472 - DNA, 607 bp, Homo sapiens
tgtgagagaggttttcattgctaacgatgggctcctagcatgaagagattcaggtaaatcctgcctcgaggagtgggctgatatctctgatcagagctggctgcaagcttgagtagtgacaatggtgagatctccaaaagtgccaactcctaccacccaacacccaggagagaataacttctgactcccccgtcacagatcctgagctgagctaaacaacctcttcagttctcgcagtccacctctctcccccgctactgccccattcatgctgcaaagatgtcacaggactgtctacttaaagattayctttctaaagcagagttgactctatgtattctgtaaaggcaattctgcttttttgttttttttcaacactgacccaagaacacttggatataaacagtaatatcaacatggtcaggaagggggaaattccactggctttcttgtttcatttaacattctttgacttgggggtgatattaaaaatataaaaatattatagaacattttcaaagtcaacttgctttataagtcccttcaaaattttatttgtcctctatgttcatagcaattttaaagtgttagtctgtaaaatattgta

SEQ ID NO: 388473 - DNA, 607 bp, Homo sapiens
tgtgagagaggttttcattgctaacgatgggctcctagcatgaagagattcaggtaaatcctgcctcgaggagtgggctgatatctctgatcagagctggctgcaagcttgagtagtgacaatggtgagatctccaaaagtgccaactcctaccacccaacacccaggagagaataacttctgactcccccgtcacagatcctgagctgagctaaacaacctcttcagttctcgcagtccacctctctcccccgctactgccccattcatgctgcaaagatgtcacaggactgtctacttaaagattacctttctaaagcagagttgactctatgtattctgtaaaggcaattctgcttttttgttttttttcaacactgacccaagaacacttggatataaacagtaatatcaacatggtcaggaagggggaaattccactggctttcttgtttcatttaacattctttgacttgggggtgatattaaaaatataaaaatattatagaacattttcaaagtcwacttgctttataagtcccttcaaaattttatttgtcctctatgttcatagcaattttaaagtgttagtctgtaaaatattgta

SEQ ID NO: 388474 - DNA, 477 bp, Homo sapiens
tctcatgtaatttattgaatactgtactgaaagtgaaaaacagaatggttatatgagtacttaaaatgcagtttctactgactgacttttacacaatcttaaaattgaaaaattttaagtagagaactctctgtattgtatccttgaaatctgctaaaagagcaggccttaaaagttctcactacacgcccaggtaactatgtgaagtgatggaggtgttgactaacttgatatcacttcasaatatttacgtatatcaaagcattgtaactcaattgcagattcagtcactcgatgcttgccgagtccagtttacaagagtgaggtctgatataaagaaagtgactttttaatccaaagcttagcttgtggaaagaagtccaggctcttgcctttaaaggcactgcttcacttttggggcagaaagccagagcttttaaaggggaacttggcatgaatgacaggcagggaaggagc

SEQ ID NO: 388475 - DNA, 477 bp, Homo sapiens
tctcatgtaatttattgaatactgtactgaaagtgaaaaacagaatggttatatgagtacttaaaatgcagtttctactgactgacttttacacaatcttaaaattgaaaaattttaagtagagaactctctgtattgtatccttgaaatctgctaaaagagcaggccttaaaagttctcactacacgcccaggtaactatgtgaagtgatggaggtgttgactaacttgatatcacttcacaatatttacrtatatcaaagcattgtaactcaattgcagattcagtcactcgatgcttgccgagtccagtttacaagagtgaggtctgatataaagaaagtgactttttaatccaaagcttagcttgtggaaagaagtccaggctcttgcctttaaaggcactgcttcacttttggggcagaaagccagagcttttaaaggggaacttggcatgaatgacaggcagggaaggagc

SEQ ID NO: 388476 - DNA, 477 bp, Homo sapiens
tctcatgtaatttattgaatactgtactgaaagtgaaaaacagaatggttatatgagtacttaaaatgcagtttctactgactgacttttacacaatcttaaaattgaaaaattttaagtagagaactctctgtattgtatccttgaaatctgctaaaagagcaggccttaaaagttctcactacacgcccaggtaactatgtgaagtgatggaggtgttgactaacttgatatcacttcacaatatttacgtatatcaaagcattgtaactcaattgcagattcagtcactcgatgcttgccgagtccagtttacaagagtgaggtctgatataaagaaagtgactttttaatccaaagcttagcttgtggaaagaagtccaggctcttgcctttaaaggcactgcttcacttttggggcagaaagccagagcttttaaaggggaacttggcrtgaatgacaggcagggaaggagc

SEQ ID NO: 388477 - DNA, 583 bp, Homo sapiens
cttatcattaaagtaggttaaaatgcaaaggtatgtaaatgtgaggaagctcaattttaaagggagacagaacaaaaaatataaattaggtctgaaatggttcaacagaaggtgactggatactccatctaaatcatcttacttcctgtaagatttttgtgaaagtctttcctgcctgacccagaaaatcaatttgctatgtaagcaatttgccacatatatcatacttacatatttacccaaagtgtggtttaaaaaaatcatttatgaagytaatgtttgcagattcaggaaactggaccacagagaaaaaaaagtatttactggataaaagatggagataagtatcagcagagcatcccagagagggaggagcctgagattgagggactaatggatggagggagtggagatgcagacttgggagagacggaagaatgaatgacacagacggggtaatctgagcagcaggaaaagaatccagagtgcctcttaaggccctgccaattcatgtaaaacaactgcagcaaattttattaaaaacttaaaattaaacaatacataataatttaataccttccat

SEQ ID NO: 388478 - DNA, 583 bp, Homo sapiens
cttatcattaaagtaggttaaaatgcaaaggtatgtaaatgtgaggaagctcaattttaaagggagacagaacaaaaaatataaattaggtctgaaatggttcaacagaaggtgactggatactccatctaaatcatcttacttcctgtaagatttttgtgaaagtctttcctgcctgacccagaaaatcaatttgctatgtaagcaatttgccacatatatcatacttacatatttacccaaagtgtggtttaaaaaaatcatttatgaagctaatgtttgcagmttcaggaaactggaccacagagaaaaaaaagtatttactggataaaagatggagataagtatcagcagagcatcccagagagggaggagcctgagattgagggactaatggatggagggagtggagatgcagacttgggagagacggaagaatgaatgacacagacggggtaatctgagcagcaggaaaagaatccagagtgcctcttaaggccctgccaattcatgtaaaacaactgcagcaaattttattaaaaacttaaaattaaacaatacataataatttaataccttccat

SEQ ID NO: 388479 - DNA, 583 bp, Homo sapiens
cttatcattaaagtaggttaaaatgcaaaggtatgtaaatgtgaggaagctcaattttaaagggagacagaacaaaaaatataaattaggtctgaaatggttcaacagaaggtgactggatactccatctaaatcatcttacttcctgtaagatttttgtgaaagtctttcctgcctgacccagaaaatcaatttgctatgtaagcaatttgccacatatatcatacttacatatttacccaaagtgtggtttaaaaaaatcatttatgaagctaatgtttgcagattcaggaaactggaccacagagaaaaaaaagtatttactggataaaagatggagataagtatcagcagagcatcccagagagggaggagcctgagattgagggactaatggatggagggagtggagatgcagacttgggagagacggaagaatgaatgacacagacggggtaatctgagcagcaggaaaagaatccagagtgcctcttaaggccctgccaattcatgtaaaacaactgcagcaaattttaytaaaaacttaaaattaaacaatacataataatttaataccttccat

SEQ ID NO: 388480 - DNA, 583 bp, Homo sapiens
cttatcattaaagtaggttaaaatgcaaaggtatgtaaatgtgaggaagctcaattttaaagggagacagaacaaaaaatataaattaggtctgaaatggttcaacagaaggtgactggatactccatctaaatcatcttacttcctgtaagatttttgtgaaagtctttcctgcctgacccagaaaatcaatttgctatgtaagcaatttgccacatatatcatacttacatatttacccaaagtgtggtttaaaaaaatcatttatgaagctaatgtttgcagattcaggaaactggaccacagagaaaaaaaagtatttactggataaaagatggagataagtatcagcagagcatcccagagagggaggagcctgagattgagggactaatggatggagggagtggagatgcagacttgggagagacggaagaatgaatgacacagacggggtaatctgagcagcaggaaaagaatccagagtgcctcttaaggccctgccaattcatgtaaaacaactgcagcaaattttattaaaaasttaaaattaaacaatacataataatttaataccttccat

SEQ ID NO: 388481 - DNA, 548 bp, Homo sapiens
ctgcaatccttttcaatatactcactttccaatgtaatcccaaactctgactgggttccacattataaacctaattccttaagatttayagtatcttaaactttctttaattagacttccaagttgtaaaggactgagataattacatttggaatgtttataactctcataactatgtgcaaagagatactctgttatcaaaaaatggctagattaatgcccagtagctgtcaactcatcttttggggggtggggcagcaatgcaccatactagttaattttgagtggcaagaaaatttatttcttctgaatgatttaccaggaataacagtaacacaaaaataaaaaggctatacaagtgccaagtaattaagcatggtaatggaattacatcaggctgccatgtggggtctaggcttcagcacaagaatagaaaattgatttatactatctaggtgatcatgtctttactttacatatcttctgttaccaatttataatactttagtctgcttttttcctaatattatgccagctagaaggcattt

SEQ ID NO: 388482 - DNA, 548 bp, Homo sapiens
ctgcaatccttttcaatatactcactttccaatgtaatcccaaactctgactgggttccacattataaacctaattccttaagatttatagtatcttaaactttctttaattagacttccaagttgtaaaggactgagataattacatttggaatgtttataactctcataactatgtgcaaagagatactctgttatcaaaaaatggctagattaatgcccagtagctgtcaactcatcttttggggggtggggcagcaatgcaccatactagttaattttgagtggcaagmaaatttatttcttctgaatgatttaccaggaataacagtaacacaaaaataaaaaggctatacaagtgccaagtaattaagcatggtaatggaattacatcaggctgccatgtggggtctaggcttcagcacaagaatagaaaattgatttatactatctaggtgatcatgtctttactttacatatcttctgttaccaatttataatactttagtctgcttttttcctaatattatgccagctagaaggcattt

SEQ ID NO: 388483 - DNA, 548 bp, Homo sapiens
ctgcaatccttttcaatatactcactttccaatgtaatcccaaactctgactgggttccacattataaacctaattccttaagatttatagtatcttaaactttctttaattagacttccaagttgtaaaggactgagataattacatttggaatgtttataactctcataactatgtgcaaagagatactctgttatcaaaaaatggctagattaatgcccagtagctgtcaactcatcttttggggggtggggcagcaatgcaccatactagttaattttgagtggcaagawaatttatttcttctgaatgatttaccaggaataacagtaacacaaaaataaaaaggctatacaagtgccaagtaattaagcatggtaatggaattacatcaggctgccatgtggggtctaggcttcagcacaagaatagaaaattgatttatactatctaggtgatcatgtctttactttacatatcttctgttaccaatttataatactttagtctgcttttttcctaatattatgccagctagaaggcattt

SEQ ID NO: 388484 - DNA, 557 bp, Homo sapiens
tgctttaacttctgtatttgtagtctgtaaatgtacagaaactttcttgtctttcagagatacgtagataatataaaggattaacttttctctaccctgtacaagtacttatgtatttgattgataagtgtttaaattgaaaatcagaaaatcaagttctattatctgccaatattctaaacagaagttataaaatatattattatggggataaaaaatagaatagggacccagtttataaaagaacagtgatttactatatctctgtttatacatattttgaagaacagtgatttactatattactattcatatttagtgtatcactgttctacatacatatatatatatatctccttcatgccctttaggacactagtacatttgtgagtagaaacttggaaacagaaatgatttmaggaaatcagttctctagaacacacatctcttaaaaaggcaataatatcttggtgtccaagtggccccaatttaaaaataatagttacttacatgttttgtattctaatgggtctgctactcttccattctcccaccta

SEQ ID NO: 388485 - DNA, 495 bp, Homo sapiens
aggtgtaaacagaatataaagtcagctcaactgtaagtattagaagcttcaggatattatttttctaattttgaagttcagaaatgtagcaacaaaacctcacttgcaagaacagatgatcaagtttcaacagatcatagatcagatcaagtgagaaaaaacataagatgacaacgatatctctatttcctattctagagaaataaagctgagatttggtccttaaaatcatgaaactaaattacaaaaatmcatcttctcctttcttctggtttatttttcacaggagggaaaaaaagccctcgactgggaggaatttctagtgcagaatctggaaccccagcaagttctgatagtttcatgtgacatgatagcatgtcacatcgtcaggcactcagtgtgttctcggcttattcacttagaaaccggagtctgtaccaatcaagatgtatttccagctaacctaggggttaccttgagttgttgactgcctgc

SEQ ID NO: 388486 - DNA, 495 bp, Homo sapiens
aggtgtaaacagaatataaagtcagctcaactgtaagtattagaagcttcaggatattatttttctaattttgaagttcagaaatgtagcaacaaaacctcacttgcaagaacagatgatcaagtttcaacagatcatagatcagatcaagtgagaaaaaacataagatgacaacgatatctctatttcctattctagagaaataaagctgagatttggtccttaaaatcatgaaactaaattacaaaaatacatcttctcctttcttctggtttatttytcacaggagggaaaaaaagccctcgactgggaggaatttctagtgcagaatctggaaccccagcaagttctgatagtttcatgtgacatgatagcatgtcacatcgtcaggcactcagtgtgttctcggcttattcacttagaaaccggagtctgtaccaatcaagatgtatttccagctaacctaggggttaccttgagttgttgactgcctgc

SEQ ID NO: 388487 - DNA, 495 bp, Homo sapiens
aggtgtaaacagaatataaagtcagctcaactgtaagtattagaagcttcaggatattatttttctaattttgaagttcagaaatgtagcaacaaaacctcacttgcaagaacagatgatcaagtttcaacagatcatagatcagatcaagtgagaaaaaacataagatgacaacgatatctctatttcctattctagagaaataaagctgagatttggtccttaaaatcatgaaactaaattacaaaaatacatcttctcctttcttctggtttatttttcacaggagggaaaaaaagccctcgactgggaggaatttctagtgcagratctggaaccccagcaagttctgatagtttcatgtgacatgatagcatgtcacatcgtcaggcactcagtgtgttctcggcttattcacttagaaaccggagtctgtaccaatcaagatgtatttccagctaacctaggggttaccttgagttgttgactgcctgc

SEQ ID NO: 388488 - DNA, 620 bp, Homo sapiens
gttttcctgggtaacatcagcaagataacacttcagtcacattccatttgatactttgaatactctggggtccttacccaccaaatggatggarttcagctgctcaatcactgcctttctcagaactctgttgtccaaccacaattcccttcccctactcacgtagggatagggctatattggcaaaatgccgcccgaacagcctgctgacagtaaaccaaatattagtttctctcaccttcttgaaggcatttacagtctttgtaagcttttctcctaattttccctttcccgttcctgcttagattctaagaatgaagtgcatccttctccttttcttcatcaggtgaagtgggatttacccattaccatatattcaccaccaggtcactgacgagagactccagtgaatctcttcccctctgcattcctctccttgtacagactagagggtcacattgtgtaaagcctaacatagccctgcaaaaagatctggcccccgcagtgagcacaagctcagtaattctctttagagtgagggggtaatcagtgcctcttggtttcagctgtggtcctagtggctaattatggaaggataggaatagtctcacaacatcctg

SEQ ID NO: 388489 - DNA, 620 bp, Homo sapiens
gttttcctgggtaacatcagcaagataacacttcagtcacattccatttgatactttgaatactctggggtccttacccaccaaatggatggagttcagctgctcaatcactgcctttctcagaactctgttgtccaaccacaattcccttcccctactcacgtagggatarggctatattggcaaaatgccgcccgaacagcctgctgacagtaaaccaaatattagtttctctcaccttcttgaaggcatttacagtctttgtaagcttttctcctaattttccctttcccgttcctgcttagattctaagaatgaagtgcatccttctccttttcttcatcaggtgaagtgggatttacccattaccatatattcaccaccaggtcactgacgagagactccagtgaatctcttcccctctgcattcctctccttgtacagactagagggtcacattgtgtaaagcctaacatagccctgcaaaaagatctggcccccgcagtgagcacaagctcagtaattctctttagagtgagggggtaatcagtgcctcttggtttcagctgtggtcctagtggctaattatggaaggataggaatagtctcacaacatcctg

SEQ ID NO: 388490 - DNA, 620 bp, Homo sapiens
gttttcctgggtaacatcagcaagataacacttcagtcacattccatttgatactttgaatactctggggtccttacccaccaaatggatggagttcagctgctcaatcactgcctttctcagaactctgttgtccaaccacaattcccttcccctactcacgtagggatagggctatattggcaaaatgccgcccgaacagcctgctgacagtaaaccaaatattagtttctctcaccttcttgaaggcatttacagtctttgtaagcttttctcctaattttccctttcccgttcctgcttagattctaagaatgaagtgcatccttctccttttcttcatcaggtgaagtgggatttacccattaccatatattcaccaccaggtcactgacgagagactccagtgaatctcttcccctctgcattcctctccttgtacagactagagggtcacattrtgtaaagcctaacatagccctgcaaaaagatctggcccccgcagtgagcacaagctcagtaattctctttagagtgagggggtaatcagtgcctcttggtttcagctgtggtcctagtggctaattatggaaggataggaatagtctcacaacatcctg

SEQ ID NO: 388491 - DNA, 541 bp, Homo sapiens
atagacttatttacaaaggaaatgagatctcttgctctaaagttttagattaaccttgagatagctgtgcctttttgtgttagagcacaattattttataaagatcatgaaatggctacaakatgtgctctgagaactaagcgttcggacagtgaagtgtgtgctgatttgcataggagatatatgcttctaaaaactcataatgaaataatatattcattgtaggcatgactttttcataattgatgtgggtagagatgagattaataaaagaataaaacctcctagaaatttaacagagtttgaataatatttaaaaccttaaattattttgatttatagcagatccagaaattctaaccgtttggcatggtattttaaagctgaaagaaaccatatagtctattttccttagtttacaaatgagaaaagtaaaggtcagaaaaataaaatagtcaacaaccaagtaagaattgaaacttgggtctctggcagtggaaatacttatatttcaaccacaaaattcaaaaatagcaacttg

SEQ ID NO: 388492 - DNA, 541 bp, Homo sapiens
atagacttatttacaaaggaaatgagatctcttgctctaaagttttagattaaccttgagatagctgtgcctttttgtgttagagcacaattattttataaagatcatgaaatggctacaagatgtgctctgagaactaagcgttcggacagtgaagtgtgtgctgatttgcrtaggagatatatgcttctaaaaactcataatgaaataatatattcattgtaggcatgactttttcataattgatgtgggtagagatgagattaataaaagaataaaacctcctagaaatttaacagagtttgaataatatttaaaaccttaaattattttgatttatagcagatccagaaattctaaccgtttggcatggtattttaaagctgaaagaaaccatatagtctattttccttagtttacaaatgagaaaagtaaaggtcagaaaaataaaatagtcaacaaccaagtaagaattgaaacttgggtctctggcagtggaaatacttatatttcaaccacaaaattcaaaaatagcaacttg

SEQ ID NO: 388493 - DNA, 554 bp, Homo sapiens
gtacaaagtgtgcactccttattccccacccatgccctgtgagccaagctgctgcagcgtggcactatctcaagactagagatgactctgtagtatgccttgctctggggtcagcagccactgcactgggactccatcttcattccactaagctcacattggtgactgaatgccacaaccccagcagtgtgaattctaggcccagggatagccgtaactttggtcttgcacagcaaggaaggcaactcctactgtcctcacttagaaccagaggaacagtcctgcccagggtgaactcaccctcgagccagccaaactggtgaatgcccttccccaagcgggagaagccctcatatctccaagcagccaacatgcttctgkgttgaaggagcagctatgtgcccacacccaggtcctgagaaacagccgcacagtgcctcccgccactacagacaagccccagtcccacccaacagctttgtatccacaatcagagcctgagaaacagacctgtgtgctgcccctgacagacatgctccttggctgtctgaaca

SEQ ID NO: 388494 - DNA, 554 bp, Homo sapiens
gtacaaagtgtgcactccttattccccacccatgccctgtgagccaagctgctgcagcgtggcactatctcaagactagagatgactctgtagtatgccttgctctggggtcagcagccactgcactgggactccatcttcattccactaagctcacattggtgactgaatgccacaaccccagcagtgtgaattctaggcccagggatagccgtaactttggtcttgcacagcaaggaaggcaactcctactgtcctcacttagaaccagaggaacagtcctgcccagggtgaactcaccctcgagccagccaaactggtgaatgcccttccccaagcgggagaagccctcatatctccaagcagccaacatgcttctgggttgaaggagcagctatgtgcccacacccaggtcctgagaaacagccrcacagtgcctcccgccactacagacaagccccagtcccacccaacagctttgtatccacaatcagagcctgagaaacagacctgtgtgctgcccctgacagacatgctccttggctgtctgaaca

SEQ ID NO: 388495 - DNA, 531 bp, Homo sapiens
taagttctagtattctataccacagtatgatgaccagagttaacaataacataatatatagtttcaaatagccagaaggatattgaatgttctcaaaacaaagaaatgataaacgtttgagatgatggacaggctaactaccctgacctgatcactatgcattatatgtatggcaacatcgctatgtactccataaatatctacaattataatgtgtcartttaaaaaaattaaaaataataataataaagggattcataccagaagataaacaaaccggaacaaaagaaaaacatttgtaaaatcttcatactataattcattgtcactagacaatgagcatataaagcattgccattgcaagtgcttattaagttgattaatattgatcaaagaagtacagaagagggatgcaaagcccggccaatacctagtcatgtcaaataaaattcattttctttttccaatagaatcactagatcagtagatcaggggaacatggccacatagtgtatctatgaataatagatc

SEQ ID NO: 388496 - DNA, 531 bp, Homo sapiens
taagttctagtattctataccacagtatgatgaccagagttaacaataacataatatatagtttcaaatagccagaaggatattgaatgttctcaaaacaaagaaatgataaacgtttgagatgatggacaggctaactaccctgacctgatcactatgcattatatgtatggcaacatcgctatgtactccataaatatctacaattataatgtgtcagtttaaaaaaattaaaaataataataataaagggattcataccagaarataaacaaaccggaacaaaagaaaaacatttgtaaaatcttcatactataattcattgtcactagacaatgagcatataaagcattgccattgcaagtgcttattaagttgattaatattgatcaaagaagtacagaagagggatgcaaagcccggccaatacctagtcatgtcaaataaaattcattttctttttccaatagaatcactagatcagtagatcaggggaacatggccacatagtgtatctatgaataatagatc

SEQ ID NO: 388497 - DNA, 531 bp, Homo sapiens
taagttctagtattctataccacagtatgatgaccagagttaacaataacataatatatagtttcaaatagccagaaggatattgaatgttctcaaaacaaagaaatgataaacgtttgagatgatggacaggctaactaccctgacctgatcactatgcattatatgtatggcaacatcgctatgtactccataaatatctacaattataatgtgtcagtttaaaaaaattaaaaataataataataaagggattcataccagaagawaaacaaaccggaacaaaagaaaaacatttgtaaaatcttcatactataattcattgtcactagacaatgagcatataaagcattgccattgcaagtgcttattaagttgattaatattgatcaaagaagtacagaagagggatgcaaagcccggccaatacctagtcatgtcaaataaaattcattttctttttccaatagaatcactagatcagtagatcaggggaacatggccacatagtgtatctatgaataatagatc

SEQ ID NO: 388498 - DNA, 531 bp, Homo sapiens
taagttctagtattctataccacagtatgatgaccagagttaacaataacataatatatagtttcaaatagccagaaggatattgaatgttctcaaaacaaagaaatgataaacgtttgagatgatggacaggctaactaccctgacctgatcactatgcattatatgtatggcaacatcgctatgtactccataaatatctacaattataatgtgtcagtttaaaaaaattaaaaataataataataaagggattcataccagaagataaacaaaccggaacaaaagaaaaacatttgtaaaatcttcatactataattcattgtcactagacaatgagcatataaagcattgccattgcaagtgcttattaagttgattaatattgatcaaagaagtacagaagagggatgcaaagcccrgccaatacctagtcatgtcaaataaaattcattttctttttccaatagaatcactagatcagtagatcaggggaacatggccacatagtgtatctatgaataatagatc

SEQ ID NO: 388499 - DNA, 518 bp, Homo sapiens
ccaggcccgaggccgcgctgaactgcctcgctagggctccgcgccgggcgccggccgtctccgccgccacctccgccgccacctccgccggcgccgccgcctccttccctccggagccgccgcctccgccgctgcctgtccggagcctggggtcgcccgcagggactgccgcatgttcagggcgctaaacgcgccggccgccgctcagtcgctggtmacttccttcccggaagtcggcccgctctgcgacgctgctcggggaccccttgaggaaagcccagcgacgccgggccagcgcattcttattttatgtatgagcaaactatggaatggaaaagagattatgagttattacttgatttgatttgccctaagtgttttttaaacgtatggatttagcgccaacatttaaaaagaaggtatattttaattaaaaatcaggaattgatttaatttaaaatttggctcctcttacaggaagatctggcaagagttagcgtgcagttctacattgtgac

SEQ ID NO: 388500 - DNA, 518 bp, Homo sapiens
ccaggcccgaggccgcgctgaactgcctcgctagggctccgcgccgggcgccggccgtctccgccgccacctccgccgccacctccgccggcgccgccgcctccttccctccggagccgccgcctccgccgctgcctgtccggagcctggggtcgcccgcagggactgccgcatgttcagggcgctaaacgcgccggccgccgctcagtcgctggtcacttccttcccggaagtcggcccgctctgcgacgctgctcggggaccccttgaggaaagcccagcgacgccgggccagcgcattcttattttatgtatgarcaaactatggaatggaaaagagattatgagttattacttgatttgatttgccctaagtgttttttaaacgtatggatttagcgccaacatttaaaaagaaggtatattttaattaaaaatcaggaattgatttaatttaaaatttggctcctcttacaggaagatctggcaagagttagcgtgcagttctacattgtgac

SEQ ID NO: 388501 - DNA, 536 bp, Homo sapiens
gatcttggggacaaccgaatgtacagagtttagtaccccaaatccatgctaggcaaggcatgctactatccagatagcasctaaggtgtgacacaggttcacacagtatagtcaacttagctgctactagtattattgctattagtgagtcactttattgcttaagtctcaaatttcttatctgaaaaataggaataatatgttcctcaaaggactagtgtgaggattaaatgaagttacgagtgccaactctagagcttacacataagcctaataaatgttagtagaaatgaagaatgacaaactgttccagatcaccccaaaggatatccagctgtttccagattgctaagtccgtaaaggtatgctcccagagttctaacccagtaccaaggaaagatctggatttactcaataaaccatgagcatatattcaacgcacacttcctctctgccaggctctgcaccaggtaatatactttcttaggtagtaattatcagatttaaagtgctaattatagttaacatataattag

SEQ ID NO: 388502 - DNA, 536 bp, Homo sapiens
gatcttggggacaaccgaatgtacagagtttagtaccccaaatccatgctaggcaaggcatgctactatccagatagcagctaaggtgtgacacaggttcacacagtatagtcaacttagctgctactagtattattgctattagtgagtcactttattgcttaagtctcaaatttcttatctgaaaaataggaataatatgttcctcaaaggactagtgtgaggattaaatgaagttacgagtgccaactctagagcttacacataagcctaataaatgttagtagaaatgaagaatgacaaactgttccagatcaccccaaaggatatccagctgtttccagattgctaagtccgtaaaggtatgctcccagagttctaacccagtaccaaggaaagatctggatttactcaataaaccatgagcatatattcaacgcacacttcctctctgccaggctctgcaccaggtaatatactttcttaggtagkaattatcagatttaaagtgctaattatagttaacatataattag

SEQ ID NO: 388503 - DNA, 546 bp, Homo sapiens
cccccatactgattagccgaagactaaacatggtgaagtctttttctttttttttctttttcttttttttttttgctatgaaaaaaagacgattgccttgctttctccaggaatcttaagaataaagccratatttctaattttaaacttaccagagatcttcttccaaatggagaacccattttttctaatatgacttgattcgcagtccctgaattcctgcactcatttgatgattcagtcattacatgtcagattgtgaaccagacactgagcccagggcaggaagaaaaatgggctcccatggaggatacacggaggttgggcacagtggatggtgggagggaacgcagataataaatggaacaacaactatcttattaaaataagataaaaacagtcaaaaataatacaaagcatataaaaccaggtaagatgataaacatgaatgccgaaaactgcttaagaaaagggtagcagggagttattttctgagtagatgacatttatgctaaacgtggaacaaggagaatggagccaaccctg

SEQ ID NO: 388504 - DNA, 546 bp, Homo sapiens
cccccatactgattagccgaagactaaacatggtgaagtctttttctttttttttctttttcttttttttttttgctatgaaaaaaagacgattgccttgctttctccaggaatcttaagaataaagccgatatttctaattytaaacttaccagagatcttcttccaaatggagaacccattttttctaatatgacttgattcgcagtccctgaattcctgcactcatttgatgattcagtcattacatgtcagattgtgaaccagacactgagcccagggcaggaagaaaaatgggctcccatggaggatacacggaggttgggcacagtggatggtgggagggaacgcagataataaatggaacaacaactatcttattaaaataagataaaaacagtcaaaaataatacaaagcatataaaaccaggtaagatgataaacatgaatgccgaaaactgcttaagaaaagggtagcagggagttattttctgagtagatgacatttatgctaaacgtggaacaaggagaatggagccaaccctg

SEQ ID NO: 388505 - DNA, 606 bp, Homo sapiens
tttttagtgagggatctcaacttttagcaatattttaggagagctagaaatttcagtttctggagattttgcctctatcactaccagattttgaaaggaagacaaaataamaagcaactgtacattcacataacgtgaggtttcctcatgattaggaaagacaagtttgaagttgatggactctaggatagaaaggtgttagggggcagtaggctatttataattaaaaatttagttcctcagtcataataaccatatttcaggtgttcagtttgcaatgctaaaagcaccaatataatcagaaaagctgtgaatcctatgacaatatctaaatcacttgctggatatacacagtggggcaaaaaaagtacataatttgacaaaggtaatacaattattatttaatttaaattaaactgcttgaaccttaacagttactactagagcttagaacattgatgactttaaaatcaggaaaatctgtgaagttataaactcagtttgtgtttagtgtacaagatgacacagtgagaactcactttatattataacaatgaagtattaaagactgaaatctttagctttctttttaattgctgaaggatt

SEQ ID NO: 388506 - DNA, 471 bp, Homo sapiens
atctacagctcacaaaagaatttcagagatctacagtgtttcctcctagagcaaagtgctgatcaacgtatacatatgatgcagctatccaggaacaggtaaagagccatctgaaaggattaaaggaaacagtgcccaacactcaaataaaggaaatagtgccatttccactacccyaaatagaaatagttcataactcacatccacttctatttaacattgtactggaaattttagacaatgttgtcaagcaagaataagaaataaaagttatctagatttggaaaggaagaagaaggtaaatagtctttattcacagaacacatgattgtctatgaagaaaacttaatgaaatctgccaaaaacagctactagaactaaaaatgtgagtttaacaatgtgcaggatataaggttaatatacaaaattccattgtatttctatatgcatacaacaatctgaattgaaatt

SEQ ID NO: 388507 - DNA, 515 bp, Homo sapiens
ctcccttctagtctgccatgcttctgctaaaaaacctgctgacaatctcatggggatttccttgcatgtgataagaacttttcttcttgatgctttcaagattttctttttgtytttgattttcgacagtttgattataatgtgtctctttatgagcttctttgggttcatattattggacttgtttaagcttcttgaatttgaatttccatttctttcctccaacttgggaaatttttgaccattatttcttcaagtaagctctctgctccattctctctactccattctctctctctctgtctctctctctctctccccgccccttcttaaattcccataatgtgtacatcagtccacttgaatgtgtttgtaaggctcttaggccctcttctttttgttcctctgactcaataatttcaagtgacctattttcaagttcactgattctttcttctgcttggccaagtctgttgttgacactctgtaatgaatttttcaaatcaattatcata

SEQ ID NO: 388508 - DNA, 571 bp, Homo sapiens
ggcagaattttcatttttttcctttatattttgatttttacaattataaaatttaaaatttaataactagatcttgaaaaaaaacccaatgttttgcatcacaagttttgtactgaaaaaataatctactaggtagtcttttccttcttcaygatttataaggcactgtataatcattccctgcctatttttccatcctcatttagtatcattctatctacagtctccagctatgccatgtcctctcttacttctagatttttactcacactgtactgactttagtctttcaaaaaaattttttttctagagacagggtctcccagtgttgcccaggctggtcttgaactcctgggctctagcattcctctcactttggtcttcgaaaatgctgagattacaattgtgagccactgcgcccagcctctgaattactcttaaacgccagtactgtacacttcctcccaaacttgtccaacttccacttcagatgtcatctttgttagggagctcttccccaaatccccctgccatgctgccatggtattctttatttctcttagtgtaattt

SEQ ID NO: 388509 - DNA, 559 bp, Homo sapiens
aattgttctctgtgtcagcccttgttgaaggaatactcacagcaatggtgataccgctatcatagctaccattaaattactcattgtgagtggttgtcccgctttcctcaggttttcttccaccagctgtgacagcttcttgatctgtccccaggtgggtggctgtgttcgacaggtgttgcttgtgacagttggggtcctcctcagcgtcagtctcgacatggctgcaaccgaggggtcctcgggatcctcccagaatctcttcctcggcawctggcttatgaaaaagtttcaggtgtcttgatggtatccaaattggctgttgattttggcctggagaaacacaagcataacgtctactccaagttattattttacctatttcccaactttttgttatcagatctccccaccaaatcagttgttctgcttctctttgcagctggtttctgtagatgctgttcagctgctgataacatctggcctttgggcaggctcaaaaaatttagttaataatgccagattcagttgtatctgcagtgttccatattctctattt

SEQ ID NO: 388510 - DNA, 559 bp, Homo sapiens
aattgttctctgtgtcagcccttgttgaaggaatactcacagcaatggtgataccgctatcatagctaccattaaattactcattgtgagtggttgtcccgctttcctcaggttttcttccaccagctgtgacagcttcttgatctgtccccaggtgggtggctgtgttcgacaggtgttgcttgtgacagttggggtcctcctcagcgtcagtctcgacatggctgcaaccgaggggtcctcgggatcctcccagaatctcttcctcggcatctggcttatgaaaaagtttcaggtgtcttgatggtatccaaattggctgttgattttggcctggagaaacacaagcataacstctactccaagttattattttacctatttcccaactttttgttatcagatctccccaccaaatcagttgttctgcttctctttgcagctggtttctgtagatgctgttcagctgctgataacatctggcctttgggcaggctcaaaaaatttagttaataatgccagattcagttgtatctgcagtgttccatattctctattt

SEQ ID NO: 388511 - DNA, 486 bp, Homo sapiens
aataaatacatttagtaaagcagtagaatataaagtcaacacataaaagtcagttgcatttctttayataaacaatcggcaaaggaaattataaaaaatttcatttacaatagcatgaaaaagaataaaatacttaagaattaatttaaccaaggaagtgaaacacttgtataatgatatctataaaacattactgaaaaaattaaagaacatataaacaaaggaaaacatatcccatgttcatggattagaggacttaatattgttaagatgtcaatataaaccaaagtgatctatggattcaatgcaacctctatgaaaatccatttttttttttttgcagatatagaacaacacatccttaacttcatctggaatctcatggccaaatctaatagccaaaataattttgaaagagaagaataaagttggaagatttacaatttctgatttcaaaacttactacacagctgtaataagacattt

SEQ ID NO: 388512 - DNA, 298 bp, Homo sapiens
attcataagtaaataactgactgctctcttaccttgggttataagtcagggcttttacctactttcactggggcttcagactactgctctgcatcctgcccctgtcgtgacctgacaggcctctgatacaccctgttgtcgctggacccacgttactgctatgttccatgctattactatgtctcatcacccctgggaccaagtcatcatggcattccccaaagatgacacaggttctyactctataggcaatctgtatatgcccaggcctcagacattggtgtcaatgccaaataaa

SEQ ID NO: 388513 - DNA, 475 bp, Homo sapiens
atacatatccagatttatgaagttcaaaggttcccaaacagattcaatccaaaagacagcttcacacagacacattataatcaaactgccaaacattaaaaaaaattgaaagcagtaagagaatagtaacttgttacatacaagggaacagtaatagtgctaacagaacacttctcagcagaaaccatacagcaccagagaatgggatgatttattcaaagcgcaaaaagaaaaaaaaaaaactgccatccaacaataccgtatctagcaaaattgttcttcagaaatgaaggagagatactttcacagacaaacaaaagtgatgatgaagttcatcaccactagacctgtcttacaagaaatgctaaagggatcttaaattaagctaamatggaagggtgttaattagtaacatgaaatcatataaaagcataaaatatacttataaatgtaaatttatagttaaattcacaat

SEQ ID NO: 388514 - DNA, 511 bp, Homo sapiens
aggttgcacactgctggcggctctgcctatgtggcaggtttcagcatgggcacccaggctttttgatatatcctctgatatctagggggcagctgccaagcctccatgkctcttgtgttctgggtgcctgcagacttaacaccatgtggatgccaccaaagctatggcttgtgccctctggagcagcaaccccagcagtagctgggtccatttgagccatagtgggagctggagttgtagggatgtgaggaacagtgacccaaaggggcacagggcagtggtgccctaggcctgtcccccaaaaccattctgttctcctaggctcctgtgattgtgatgggatgggtggcctcaaagatttctgaaatgccttttgtccattgtcttgactattaataccttgctctcttactggtcatgctaatctctttaggaagtagttgcttagattcctctcctgaaaacactcttttctttactaccacatggccaggctgcaaatttttcaaat

SEQ ID NO: 388515 - DNA, 592 bp, Homo sapiens
tatttcttagcttttataaaagaaataaaattatataaagtagtaattataatgttttattggtttgtaaaatatrtagatttaatttgtataccaataacagcacataagagagaatacagctattaaaaattaacatttctgtatctcactggaattaagtcagtatacatctgaagtagactctgattggatatatacagtaagttctaatgtatacggtaagttttaccactaggaaaactccagaaaatatggtgaaagattaatcaaaggaatgaaatgctgcacaagaaaatattcacttaatgccaaacaaagcagtaaaagactagaggatcaaaaaaaaacatgagacagagaaaaccaaaaggaaaatgacaagtgtaacccaactatatcaataatattaaatgttaagtgattaaacaatccaatcaaaagacatagattgtgagacttttttttaaaaaatcaagatctgcctatatgctgtttatgagagagattttagatttaaaggtgtaaataggttgaaaatgaatgggaaaagatcatatgaacaacagccataagaaaactggagttactg

SEQ ID NO: 388516 - DNA, 629 bp, Homo sapiens
ttggatagggcgtttcacataaagttagaaattcaacaataggatgatccatttcaagtactgtaattgcttttccatgcatgatggttaaacttggtcttctacaagctttgtcataggacagcccaccagagaatattatgaatggttcgctacataggaaaaaacatgaatgagactcagaagtcctttaaaatgacacaaagtcacaggactgaacctataaagaacaggttttgttgcataccatataacatgacagacagcaaaaaacttgcccggctcaaaatttctcattcaataacctactattctaccatttcccactttctagatgtacattctcacattaaatttactaatggaccagtctaaacatattggggtaggtttggggaaaggcagtgagcttggaggaaggtagatgtgctcactgactctcaaaaggacatcttcacrtactttacttggttcccaaactctaaatcactatcattggaatattagtctatgtcagaatatcagattaattagctggcctatggggcctaaaatctgtacaagagaaaagagacaaattttaatataaaatgaaatgtgacagtggaaagctcagaatggcagagggt

SEQ ID NO: 388517 - DNA, 592 bp, Homo sapiens
tatatattacattacattatactacatattatattatactatatagtatattatatattatactatatattatattatatactgtatrtagtgtatatatattatatatagtatattatatagtatattatactatagtatatatattatactatatattatatagtaatagctactaaactatagtagtaactactaaatgttgttttaactgaattaagctgaatactgttgagaatccaacagaaatacaaattgtaaagacctccaagcaataaaatagacgtcataaagtccaggcatgtatacattgtcatggaagaacctctcaggcattatatggatctatttgctctcattttacaagtttggctttcaagtttcttagtctacagaaaatcaaagattggatactagtagataacacaataaagattataagaaatcctcatggctcaaaactgaaggaaagagaaaagatttttaaaaatatatgaaagtgaagcggaatctgggctagcaagatggccaaataggaacagctctggtctgcagctcccagcgacatcaacacagaaggaagtgatttctg

SEQ ID NO: 388518 - DNA, 648 bp, Homo sapiens
aagttggggctcttcctatctctaggaaacttatcaccattcagaatgaagctttgtctttgccaaatatctttaatgtgaagagagtttctcttcttgtagaattgttttcttctttttgtttttgttttgttttttttagacagggtcttgctctgttgcccaggctagagtgcagtggcgtgattcacagctcactacagcctctacctcccaggcacaagcaatccttccacctcagcctcctgagtaaatggaactacaggtgcacccgccacaccagactaatttttttttctgtgttttttgtagagacaagatctggctatgttgtccaggctgatgagggacctctaggcttaactaatcctcccacctcagcctcccaaaatggtggcattacaagcatgagccaccacacctggccttttctggtcgaaactttacaatgtgtttgtgaaattatttatctttgatttgggaatctctattttccagaaatatttattttatttccttattgtctttctagtaacttactgatcttagtatttagtgattttctacrttgaatacttttacaaaatgataatctttattttaataacttaatatcatgtaagatatttcaaataatgtatagactaa

SEQ ID NO: 388519 - DNA, 581 bp, Homo sapiens
gcaattacatggaaatcaaacaacataatcctgaataactattgttattgttattgttgttattgttattgttatataacaaagatctaacatattagaatctctgggacacagctaaggaagtgttaagagggaaattcatagcactaaatgaccacatcacaaagttagaaagatctcaaattaaaaacttaacatgacaaatgaaagagaagcaagaacaaatcagccacaaaactagcagatgagaagtaacaaaactcagagctaaactgaaggaaattgaggcgtggaaaaccattgaaaagataaatccaggagttggttttttgggaatattaataagacaggccactagctagactaataaagaagaaaagagagaagatccaaataaacacaattagaaatgatgaaggaaatgttactactgatgccacagaaataagaacaactgtaaaaactactataaatacgtctatgcacayaaactcgaaaatctggaagaaatagataaattcatggacacacacaccctcccaaaactaagccaggaagaaattgattccccaaacacacca

SEQ ID NO: 388520 - DNA, 523 bp, Homo sapiens
tgctcatgttatccttgagatgttttatatattcacccctttactaatcctttagcaaattctgttgtctccatctcaaatacctctctttgttcttgtgtctctatctctgcctaaatacatatatcaatttctatattgatatctagctctatttttatctaaatctatatttgtgcagttaacccctgaagaacatgggttttaactgtgcagrtccacttatacatggattctttttcaaccaaaatggatcaaaaatacaatatttcctggatgcaaaacttcctgtatacagattccacaggaccaactgcaggacttgaatatgtgcagatttgggtatatgtgggtgttctgcaaccaatcctatgagtataccaaggaatgacagtacatctttatctctatctgtataccttatctttaattctatatgtatgtctatttctacatcaatttctctatgcgtatctgtatctaaatctctatttctatttatatctatagcaacatatcccta

SEQ ID NO: 388521 - DNA, 517 bp, Homo sapiens
cgaaagagagcaatagacctcaatgcaatacaagctagagacttcaacactctactttcagcactggacagatctcccagacagaaactcaacagagacacatcagacttaagctgcactgtagaacaaatggactcgatagatatttacagaacttttcatctaacaggtgaggaatatacattcccaagaacatacactggggaaaagatagcctctttaaaaaattgtgcttggaaaactggatatctatatacgtaagaatgaaactagacccctatctttcwccatatacaaaaatcaaatcaaaatggattaaaggtttaaatctaagacctcaaattatgaaaccactacaggaaaacattggggagactctccaggactttcaactaggaaataatttcttgagtaataccctgccagaacaggaaaccaaagcaaaaatggacaaatgggatctcatcaagttaaaaagcttctgcacagcaaaggaatcaatcaacaaagtgaagag

SEQ ID NO: 388522 - DNA, 653 bp, Homo sapiens
tcctgacctcatgatctgcttgcctcggcctcccaaagtgctggaattacaggtgtgagccaccgtgcctgrcgtaaaatggcttttatccaaaagacagacaatagcaaatgctggagaggatgtgtagaacaggaaatgcttgtacactgttggtgggaatgtaaattagtaccaaaaaacaaaaaaacaaaaaaaaacaaaaaaccctaaaaatagagctaccatacaatccagtaatcccactgctggctatatacccaaaataaaggaaatcagcatatcaaagagatatctgcactctcatgtttgtttcagcacccttcacaatagccaagatttggaagcaacctaagtgtccatcaacatctaagtggataaagaaaatgtgatacatatatacaacagagtactattcagtcataaaaattgagattctgtaatttgcaacaacatgaatggaactggaggtcattatgttaggtgaaataagccaagcacaaaaagacagactacatgctctcattcatttgtgggacctaaaaatcaaaacaattgaacccatggacacagagaataaaaggatggttaccagaggctgggaagggtagcgggggtatatgggggtgggagtgagctgggcatggttaacg

SEQ ID NO: 388523 - DNA, 413 bp, Homo sapiens
tttctaagtggtaatggagttatttcttaagtatctaacatttgagctgcaaaatcaagatagacctggtcattgaattattatatggaagacaatttggttagagaaatgttgaaagctgcatttttcatttttcatttatttgcatgaaaaaaattggaatgctgtgtttaaaacattgagatgtggagattgtttttattatagatttaacctcatgtatgctgattaaccttataaccaatgttttctgctaaagcttgtatagtttttattataaaattgattcagggaagtacaaaaaagaaaataatagcctcacttcacttataaatgcatrtttttaaaaacctaatagaaacatatattaaattttaatcatatatatattatacatatataaggtaagtaaa

SEQ ID NO: 388524 - DNA, 619 bp, Homo sapiens
tgcctgcctctcagccaattcccttcttatctcaacttattttcatataatctcatctttcatcgcttcattcagactatagttttcatattcctttgagattacaaagaatatttctgcaatttctgctttctttagtaacttcttaaagtgcaatttttctgcatcttaattgtcccttccttcttttaatgtacagaatattttcactgaaacagtttttttttctgttttcagggttgtcgyctttaaacaaaggagcgctatgcatggttgatgacagactatgtcagtcgcttcccctcagccctagactactattaaaatacagttcttgatctcaagcataaagatttgttgatattcatggattggtcccacatttatggtgtctagcagtcatttatcgtatgtgctgttggtcttaggagagactacctattcttaaagtattgttaacttgctgtgtgaggcagtatagtatagtaattagagtattagctctatacataaaatggtgcattagaattcttgttctaccaattattaaaagagtagttgaagctcttcaagactcactttattctatctgtgaaatgggcaagataataccataata

SEQ ID NO: 388525 - DNA, 618 bp, Homo sapiens
tcaccctccctgtgcctgatttcttgagctgggatattgatcttcttccctcagtgcttctggttctcaggctatcagactttggaatctataccattggctgtctggctttcaggctttcaaactacaacrctggcttctctgggtctctaactttcaggcagcagattgtgggacttggcctccatgatcgcataagccaaggttctctggagaaccctaacatagttgtctctcagtatccaaggggaattggttccaggataccctgcagatactaaatctgcagatgctcatgttccttatataaaatggcatagttacctaagcacatcctcccatttctttaaatcatctctagattacttatgatacctaatacaatgaaaatgctatatatagagttgttaaactgtattgttttatatttttgttattattattgtattattattctttttcaatatttcaattcacggcaggttgaatctgtggatgtggaacctgcagatacaaagggttgagtatacacaaattggtaccaagaattggggtactgctttaataaatatttaaaaatctggaagtagctttgtaatgagtagaggccggaagaat

SEQ ID NO: 388526 - DNA, 593 bp, Homo sapiens
ttcaattcacggcaggttgaatctgtggatgtggaacctgcagatacaaagggttgagtatacacaaattggtaccaagaattggggtactgctttaataaatatttaaaaatctggaagtagctttgtaatgagtagaggccggaagaatctgcagtatatgtgtattaatccattctcccactgctaataaagacatacatgagactaggtaatttaaaaaggaaagaagtttaattgactcacagtttagcatggcgggggaggcctcagaaaacttacaatcatggcagaaggggaagcaaatgtgtccttcacttggtggcagaaaggagaagtgccaagctaaaggaggaaaagccctttataaaaccatcacatcttgtgagaactcacgcactatcatgaaaacawtctgagggtaaccgccccccaccccaattaaattacctcccacaaggtccctcctatgacacatggggatgtgggaactacaattcaagatgagatttgggcagggacacagccaaaccacataatccctccctggtccttcccaaatctcctatcctaacattttaaaacacagtcat

SEQ ID NO: 388527 - DNA, 593 bp, Homo sapiens
ttcaattcacggcaggttgaatctgtggatgtggaacctgcagatacaaagggttgagtatacacaaattggtaccaagaattggggtactgctttaataaatatttaaaaatctggaagtagctttgtaatgagtagaggccggaagaatctgcagtatatgtgtattaatccattctcccactgctaataaagacatacatgagactaggtaatttaaaaaggaaagaagtttaattgactcacagtttagcatggcgggggaggcctcagaaaacttacaatcatggcagaaggggaagcaaatgtgtccttcacttggtggcagaaaggagaagtgccaagctaaaggaggaaaagccctttataaaaccatcacatcttgtgagaactcacgcactatcatgaaaacaatctgagggtaaccgccccccaccccaattaaattacctcccacaaggtccctcctatgacacatggggaygtgggaactacaattcaagatgagatttgggcagggacacagccaaaccacataatccctccctggtccttcccaaatctcctatcctaacattttaaaacacagtcat

SEQ ID NO: 388528 - DNA, 616 bp, Homo sapiens
tttgcacatagtacgaataaaagaaacgtgcagtgcattaaattaaaaaacaaagaggaaaacagaagatattgtctatcatctcacagaaaatggaaaatggaaataataagatcacagccccattttggctttaaaagtctgaatatctcaggtaatagtttttaaggcttacttatttcatttatccatttcagattgctagaggagatttgtccrttagctacttgtcactccaaagaaacaaggtgtgagaatgtagccctctatttataaagatcagttcacctactgtctcctgatgagtggttgacaagctttaaatagtctcaggcaacatccccattacattttatcataggaacctaaagagaatgaaatattcaattgaaatcccaaggatgttttaagaaataattacccaagtagaagtcctaaaatagcaccagaaaagtaaggccaccctaaatctgctccacaataccccacaccctccaagaaaaaacatactaaataagaaatttaaaatataatcataattattgggatcctgttaaattactttcatacccttggaatttggaggtcagtataagttcttgattagctgaatgta

SEQ ID NO: 388529 - DNA, 616 bp, Homo sapiens
tttgcacatagtacgaataaaagaaacgtgcagtgcattaaattaaaaaacaaagaggaaaacagaagatattgtctatcatctcacagaaaatggaaaatggaaataataagatcacagccccattttggctttaaaagtctgaatatctcaggtaatagtttttaaggcttacttatttcatttatccatttcagattgctagaggagatttgtccattagctacttgtcactccaaagaaacaaggtgtgagaatgtagccctctatttataaagatcagttcacctactgtctcctgatgagyggttgacaagctttaaatagtctcaggcaacatccccattacattttatcataggaacctaaagagaatgaaatattcaattgaaatcccaaggatgttttaagaaataattacccaagtagaagtcctaaaatagcaccagaaaagtaaggccaccctaaatctgctccacaataccccacaccctccaagaaaaaacatactaaataagaaatttaaaatataatcataattattgggatcctgttaaattactttcatacccttggaatttggaggtcagtataagttcttgattagctgaatgta

SEQ ID NO: 388530 - DNA, 616 bp, Homo sapiens
tttgcacatagtacgaataaaagaaacgtgcagtgcattaaattaaaaaacaaagaggaaaacagaagatattgtctatcatctcacagaaaatggaaaatggaaataataagatcacagccccattttggctttaaaagtctgaatatctcaggtaatagtttttaaggcttacttatttcatttatccatttcagattgctagaggagatttgtccattagctacttgtcactccaaagaaacaaggtgtgagaatgtagccctctatttataaagatcagttcacctactgtctcctgatgagtggttgacaagctttaaatagtctcaggcaacatccccattacattttatcataggaacctaaagagaatgaaatattcaattgaaatcccaaggatgttttaagaaataattacccaagtagaagtcctaaaatagcaccagaaaagtaaggccaccctaaatctgctccayaataccccacaccctccaagaaaaaacatactaaataagaaatttaaaatataatcataattattgggatcctgttaaattactttcatacccttggaatttggaggtcagtataagttcttgattagctgaatgta

SEQ ID NO: 388531 - DNA, 616 bp, Homo sapiens
tttgcacatagtacgaataaaagaaacgtgcagtgcattaaattaaaaaacaaagaggaaaacagaagatattgtctatcatctcacagaaaatggaaaatggaaataataagatcacagccccattttggctttaaaagtctgaatatctcaggtaatagtttttaaggcttacttatttcatttatccatttcagattgctagaggagatttgtccattagctacttgtcactccaaagaaacaaggtgtgagaatgtagccctctatttataaagatcagttcacctactgtctcctgatgagtggttgacaagctttaaatagtctcaggcaacatccccattacattttatcataggaacctaaagagaatgaaatattcaattgaaatcccaaggatgttttaagaaataattacccaagtagaagtcctaaaatagcaccagaaaagtaaggccaccctaaatctgctccacaataccccacaccctccaagaaaaaacatactraataagaaatttaaaatataatcataattattgggatcctgttaaattactttcatacccttggaatttggaggtcagtataagttcttgattagctgaatgta

SEQ ID NO: 388532 - DNA, 623 bp, Homo sapiens
atgtaattaattagtgcattccacagcaactgcattcaagcctagtttgcagtcagagacaccagaatggctgagtataggaacctatgggctggcaactcagcaaaagttccctatcactcccctgtaccccacactaaaaagtgagtttggaaaacgctccccagaaagattaaaatatattgaatatgtgatgcctaaaacccttcatttcagtaaaccaaattcagtgcctaaaattagaatgaaagatctccttgtgccagcatcatcatcatctgcgtgtaaccatttgtatctaatcctcaggccaatttgtccatgttgatccttaagtatcactgtgctttactagctcttctcttctgccaaagaggggtgggaagaagggatactacatgagtgactcatgctgtcagaagaaacttaggtttttcaattcagggttaattcagaaagcaacagaaaaacatgctattgtcttttaagcacatttaagggtakgtgctggcagtttctcatgttgtacatttattttttttttttctgaaacgttcataccacataggaacgtgttacatgtttgccaatatgaagcaaagaaaatctttcgtgttagcagt

SEQ ID NO: 388533 - DNA, 572 bp, Homo sapiens
cacaaaatggtgattttctaattttgtcattattcccacatttagtaaatgaaattcctatttaaagaacaattttcccacctcatctatgactacttggttatctttcagtacatattctacagaaaacraagtataaagagtttgtactaaactcttttcttttaatttccgatattcagagaaaggaattggtgtcctaatttctttatgacatttattgagatgtatgctgtacctctctacaggtatataggtatgtattttcattaaattgttttactactctttttatttcaatttaaaattattgtaaagaaatgaggatttttaaaatacatttcaatcatttccatagatttttctttttgatgcacaaaataaagatacttcctaattttggtccttgggttattttgataactcatgagtctttgttagcttccttgttttgggtacaaaaaaaaaatagccagccttatctttcaaggactcacgattcctttgaagaataatattcagggacacaatgaagtgatggttaggctcactgctttggggctataaaatac

SEQ ID NO: 388534 - DNA, 574 bp, Homo sapiens
ctgtctgtattaaatgggttatctagagacttaagagtatctcaaagaatgttgaatcctgattatgaacggctaagaagaaactagtaccaggcagttgtgaagactgagctagtgaaggagcccatcatttctgtgtcacagacaagtcaccaggtcgctgtaattcaaaatcattagtcatgtcttcttgaagcacaaaggcaaaggaatagaaagggagcagacaatggagtgtgtyaggaagacaaattctttctttccatgcgttggtcatattctaaagatcctagagacttttttaaagaaaacacgctggaaataccatactagattcatgccagtctattttaagtatgcagcaaagtcgcagattttgctgattcaggattctatactaggaaaatgaattctgataatcttgttgtgagaatatcattcaaaagtactaagaaaggcagcatttgttacttctttgtaggaaagataggaaggctactaagaaagatttttaaacctagaaaagttaaatatatacatagtatgccaaaaaaatcaaactgaagcaaaactg

SEQ ID NO: 388535 - DNA, 581 bp, Homo sapiens
tagagaattattctaaatttcttagtctcccaggaccacctccaacctatgtctatagctttaatttctgccttcgtcaactcacagttgatgtgcttacactgttcaacatcttggaattaaccacgtttaccattctgtttcctacttgattcattttattccaactgtaaaagtcttcccatgcttatttccctaaatctcatctcatctgtgtgtcctctcctctccttttctgaattatcaggtatatccaacagctctccttgtgttactacaacgttttatgcatgtatcttttacatgactactttctcctcttaggcaataaacacmtggagggcagagcctgtgtctatttccttttgtactcgcagtgcaatgtcgtgtgcttggcatatagaaagtgctcaacttgactaaattttgattggattgactgagcaggtacaagtgcactagtatttgatacatgcttagcccttataaaaccttgaaacttagagaattgggagagacaaaggtaaagaggcagtgtatcatgtgaatcaattactactagctgccccggtggaccactt

SEQ ID NO: 388536 - DNA, 644 bp, Homo sapiens
ttggtgtcagttttgaaataagagttattcccagtgaggtttgaaaaagggagaaccatagcttccaggccgcttattcatgggataaaaattaaatcacgaaagaacattgaaaggaaaacaaaggcaattaggtagaccaaaaacagactctatatcttatttctgaaacattttaaaatttgggyttcatgaaaatctgtgtttgtggaagaatgcagtatgattttgattcagacagatgcatttagaatagacatatgtactgaaggatggcagatgtgtttgatgaagccagatgtacaaaagcagtcagatgtgtatgtctcttgaagtgaaagatgaaatcaaacacatatatatatacacatatacatacacgtatatatacatatatacacatatatacatatatacacttatatacatatatatacatatatatcacattacatttggtagtcatgtctctttaggcttcttttggttgtgacactttcctgattttctttgtttccgatgaccttgatagtttagagagtactggtcagatattttgtcgaatgtccttcaattttgtctgatgtttttccatgattagattaggcatgtgggttttgcgtgaagaatacaagagcagagtc

SEQ ID NO: 388537 - DNA, 644 bp, Homo sapiens
ttggtgtcagttttgaaataagagttattcccagtgaggtttgaaaaagggagaaccatagcttccaggccgcttattcatgggataaaaattaaatcacgaaagaacattgaaaggaaaacaaaggcaattaggtagaccaaaaacagactctatatcttatttctgaaacattttaaaatttgggcttcatgaaaatctgtgtttgtggaagaatgcagtatgattttgattcagacagatgcatttagaatagacatatgtactgaaggatggcagatgtgtttgatgaagccagatgtacaaaagcagtcagatgtgtatgtctcttgaagtgaaagatgaaatcaaacacatatatatatacacatatacatacacgtatatatacatatatacayatatatacatatatacacttatatacatatatatacatatatatcacattacatttggtagtcatgtctctttaggcttcttttggttgtgacactttcctgattttctttgtttccgatgaccttgatagtttagagagtactggtcagatattttgtcgaatgtccttcaattttgtctgatgtttttccatgattagattaggcatgtgggttttgcgtgaagaatacaagagcagagtc

SEQ ID NO: 388538 - DNA, 663 bp, Homo sapiens
aaactatttctttgtattgcaaataaatttatccaaaagaatacaaagccaccgttccttcaaaagcagtggtgggcaggaggctccggactgtgtgacaggcaagagtttgtgtttgcttagtcctgtattgactgtaagcccatcttcctctctctgtcctycctcctgttccagtttacctggggtgaggaagcagtagctgctgccaagctttctgcagaagaggttacagcaggagaatgacacagcactttaaggactctagagaaacaaagaaacctctgcttcctttgtagagcacaggtaatatccttgtattgctacttataattgtgtctattttcagggattaaaaactctcttatttcttcctacgatgacaattctcttatttaaaccctgaacagtgtctccttacccctttatatcaggtgacaaccttattactaaatttccatggttctcatatgactccaacctgcctttctccacctccccttgccttcagtcaacgaggactgtttcaagcaattctcttccctgccctggttctattgtgttctgctttagagacattctttctggatgttttaacttaatcagatcctccctcaatttctactcaccactaaagtgtcacttccctcatgccttcttttg

SEQ ID NO: 388539 - DNA, 663 bp, Homo sapiens
aaactatttctttgtattgcaaataaatttatccaaaagaatacaaagccaccgttccttcaaaagcagtggtgggcaggaggctccggactgtgtgacaggcaagagtttgtgtttgcttagtcctgtattgactgtaagcccatcttcctctctctgtcctccctcctgttccagtttacctggggtgaggaagcagtagctgctgccaagcttyctgcagaagaggttacagcaggagaatgacacagcactttaaggactctagagaaacaaagaaacctctgcttcctttgtagagcacaggtaatatccttgtattgctacttataattgtgtctattttcagggattaaaaactctcttatttcttcctacgatgacaattctcttatttaaaccctgaacagtgtctccttacccctttatatcaggtgacaaccttattactaaatttccatggttctcatatgactccaacctgcctttctccacctccccttgccttcagtcaacgaggactgtttcaagcaattctcttccctgccctggttctattgtgttctgctttagagacattctttctggatgttttaacttaatcagatcctccctcaatttctactcaccactaaagtgtcacttccctcatgccttcttttg

SEQ ID NO: 388540 - DNA, 549 bp, Homo sapiens
gggattacaggcatgagccaccacacccggccaaatrttatctctttagtatcctaatggatgtaagactaagcatttacagatcatgttataatgtaaaaagtcattttaacaaagtgtctaatacatgcctgttggaaagtataatatttttattgttattgttactgtaataagcaatcaaatgattgaaacgaggtgtttctttattgtagcctacagtggttttcttctgctctaacgggaaatgacacttgaattactttcactttattttgatcaagagtttgttcaaattacctttgactcctccagcaatgtagatatttgagtgacttcgctgttgtctttgaagagaaggaacagcatgcctaggctgtaaggtgggaacacaatcagtgttaaatctcagggagacagtttgaatgaagcagggggtggtggggaagttgaggtcagatgggtttgaggatagggttacacagggtcttgtaacagttttgttgttcactctgaataaaatgagaagctacttgagaaattttagca

SEQ ID NO: 388541 - DNA, 575 bp, Homo sapiens
atattgttatatgtatataatgattatatcaaacaataagaagttgtgtacatttatgtggcatatattgtacaatgtacctatattgtaccattacatatattgcacaatgtataattaatatatatttttatatatgatgtaggttaatagatatatatttttattaatttttgtaaagtaataaatggacatagcaaaatatacaaacaaatcaaaagcttataaaataaaactttttctattaattcagccttccaggaagttactattagtcactacttattatacttctagaaaccttcaatgcatatacatggatatcaaagtacaagyacagaagtgagaacatgtaatcccaatttatttattcatttaacattctcctttctaaaaccaatatttctctaatttgctatgtttgtgcattttcctcctgataatttaacaagtttatgggctctttttagtattttggaacgttgtctttaaagtttcatatattaattagatttaaatctttttttctgtatatgtcaactttagataccataaattgatctcctatcaacaaa

SEQ ID NO: 388542 - DNA, 629 bp, Homo sapiens
acgggctaacagcttactcttgttgggacaccacatacatcaatgctatataattagcaatttcacccatgtagcaatcagcattggaacttgaaaatcacctagaaactgagaaattgttgaagggtcaatgcctgaggacagaacaacacactgacctagttgcattgaagggaggaattctgaacctatcatcacagtgatcctggagaaagtgaagagggttaagaggtcccagaaattaatgcagaaatgacatgagagaggcaggtaggaaaataaagtcccatccagtagacaaagagacagacaggttgacaatccctgatgggttactcatgaggaggccaaaaggcttaagccactgaatttgtgaaatttgaaagtggtattctagcccataggaggcctcctggtagtaggagtaactggtgaagttgtaggtgcaagaatactacrtagaacctatgaaaagaatttagatacaggagaattgttctaaggaatatttttggaactgaagtgctcagaaagaacatcatgtatttgaactagcgtatagaggcggatatttttgaggtatacatttttgttgaacacatttggagaaatactgatgtagaaacatt

SEQ ID NO: 388543 - DNA, 629 bp, Homo sapiens
acgggctaacagcttactcttgttgggacaccacatacatcaatgctatataattagcaatttcacccatgtagcaatcagcattggaacttgaaaatcacctagaaactgagaaattgttgaagggtcaatgcctgaggacagaacaacacactgacctagttgcattgaagggaggaattctgaacctatcatcacagtgatcctggagaaagtgaagagggttaagaggtcccagaaattaatgcagaaatgacatgagagaggcaggtaggaaaataaagtcccatccagtagacaaagagacagacaggttgacaatccctgatgggttactcatgaggaggccaaaaggcttaagccactgaatttgtgaaatttgaaagtggtattctagcccataggaggcctcctggtagtaggagtaactggtgaagttgtaggtgcaagaatactacgtagaacctatgaaaagaatttagatacaggagaattgttctaaggaatatttttggaactgaagtgctcagaaagaacatcatgtatttgaactagygtatagaggcggatatttttgaggtatacatttttgttgaacacatttggagaaatactgatgtagaaacatt

SEQ ID NO: 388544 - DNA, 511 bp, Homo sapiens
tgatgtgtcactccaaatatcctcaattccatgactatcacctgaataaaaattatcatcttttcttattggactactttgataactctctgactggactcccctgtttcacctcttgcccttctgcaggctatttaatacaggccagattactcagcataagttacattctttttaaatctttcaggactttcttctccagtgaatcaaattcaaactcttacttactatcgcttcctggtttatgttgctcatctctaaaccaaaatctacacgttttccaagctccttttgtgctagttttcctagttcatgctagttgactgaaagctcagccttttcttgccccaggggatttgcatgtgtccttcctgcctagaatgttcttccccacctgatttccaygggtgagaccccaattcttaacacttttccatttaaatacaaatttctttctctcatgcctatatcctgtctgttgctgttccctttcatggtactttttacaatt

SEQ ID NO: 388545 - DNA, 547 bp, Homo sapiens
atgacttcttttcctctgggtggatacccagtagtgagattgctggatcaaatgctagttctacttttatttctttaaggaatctccacactgttttccacaggggttgtrctagtttacattccaaccagcagtgtagaagtctccccttttcactgcatccaccacaacatctattattttcagattttttgactattgccattcttgcaggagtgagtaaggtggtgtcacattgtggttttgatttgcatttccctgatcatagtgatgttgagcattttttcatacgtttattggccatttgtatatcttcttctgagaattgtctgttcatgtccttagcccactctttgatgggattattcttcctaatttgtttgagtttcttgtagattctggatattagtccttctatgttagcttttcttcatactattctgaggagctatgagtagtaatatcaggtggttaataacacaggttctggggtcagactgccttgattcaaatcaaagcaactttatacaaaagcagtatgaactcg

SEQ ID NO: 388546 - DNA, 585 bp, Homo sapiens
gtacaagacttgcccaagattgcccaactggtaaagggaaacaaagcaaggagacaaacctaaggtgttctttccatttcacaatggctgagtcagtgagaaaggcagagacataaccagaatgctgcattttggcaaatgtgacgttcctggaatggattactaacagtctagaaacatagaaagtaccatgcaattaaaaacacacagtccaggccaggcacggtggtgcacacctgtaatcccagcactttgggaggctgaggtgggcggatcacttgatgccaggagttcgagatcagcctggccaacatggtgaaaccctgtctctacaaaactacgaaaaaaattagccagacatgatggcaggtgcctgtaatcccagctcctctggaggctgagtcaaaaraatcgcttgaacccgggaagcagaggttgcagtgagccaagatctcaccactgcactctagcctgggtgacagagtgagactctgtctcaaaaaaaaaaaaaaaaaaaaaaaaaaacagtcttctgaattttggtgagctttggaaatacagaaagttaccgacaataggtttcac

SEQ ID NO: 388547 - DNA, 526 bp, Homo sapiens
tgcctgcccacacagacagacacacacacacagacacacacaccctgttcctgctcttttcaaattaggtctcccttggatgctgacccaaatctgaaatcttttctcagttttgcyatcttcactaggatatacattatggctttccttttgacggaaaaagtccactgtttctcagcccatgttttatgctcctcccttcccctcccctcctgcctgcaggtttcatccctccccacagcggtggtgcagctgaatcctgccctgtcagaagtttccttgtcttaggaaaagggttggcagttttagaaaacaaacaaacagaaaaaggaaacccagttaaatttgaatttcagatgaaaaacaaataattctttagtatatatgtatgttagtataagttgttcatctgaaattcacatttaactgggtgttctatattttatctggcagccctttttgggggccatgtcaggcaactcagtgtcctctcaagaggagatcttaagaatggtcacagccctgt

SEQ ID NO: 388548 - DNA, 606 bp, Homo sapiens
gcctttgtgatgaccttgtctttctgttgcacttgacaatacagttaccatagaagctgttgttgaaggtgggccagtgtggtacctgtccctgcagagtattgcctgacaactttggacactgaactttttgcagagtttagctctgtctaggattatggatagaatgtcagagatgaaaggcattttgagagtctttggtttgggttgagttcgaccatttaaagatggtgatattcaactgtttttgatctacaaaaatagcagtttcatatggctcaacctaatagttaccattcattcyaagtacttggcaccaaggctcagaaagcgtaagtgatttttttcttattgtattatgaaaaacatttcaacaaaagaaaggttgagggactgcttctgtgaactcccgtatacctgccacccaaattcaattatcaaggtattgccatgctttcttaatcccttttctttctttctttctttctttctttctttctttctctctctctcctttctttccttcctttctttctttttttcttaagtgctttaaagcaactcttatacttcaggtcccttcaccccttccttttttatatatac

SEQ ID NO: 388549 - DNA, 566 bp, Homo sapiens
tgagaacctttcaaataatagaaaatgctattatgtactactggagccttccctacttcaggcaaaacagacccagttcttttaaccttccatcatatgattttaagttttctcaccattgtagctactttcctctgaaaatccaatttctttctctctctcaagtgtggcattcaatggacatatgccacctagcgtggtctgacgagtgcagtcacagtggaccaccccaccttaatctgggttaccatataattccatcaggcaactgcagactggaaagagtactygcttcatttactgagtatctacaatgtgacaggcgtgacaagcactttaatgtgctgatttcaaactgatttcaaaaccttatgtgtaagtgctaccattattcctattttgcacccaagggcacaaagacacagagaggttaagtaacttgtctaaagtcacacagtaattggtgtgctttacactgattcattatgcacctacttttgatttgatagattttgaaactgtgaagatctttttagatctccattcctttcttcaatgtactgtat

SEQ ID NO: 388550 - DNA, 566 bp, Homo sapiens
tgagaacctttcaaataatagaaaatgctattatgtactactggagccttccctacttcaggcaaaacagacccagttcttttaaccttccatcatatgattttaagttttctcaccattgtagctactttcctctgaaaatccaatttctttctctctctcaagtgtggcattcaatggacatatgccacctagcgtggtctgacgagtgcagtcacagtggaccaccccaccttaatctgggttaccatataattccatcaggcaactgcagactggaaagagtacttgcttcatttactgagtatctacaatgtgacaggcgwgacaagcactttaatgtgctgatttcaaactgatttcaaaaccttatgtgtaagtgctaccattattcctattttgcacccaagggcacaaagacacagagaggttaagtaacttgtctaaagtcacacagtaattggtgtgctttacactgattcattatgcacctacttttgatttgatagattttgaaactgtgaagatctttttagatctccattcctttcttcaatgtactgtat

SEQ ID NO: 388551 - DNA, 587 bp, Homo sapiens
ctcatcacagtcacctagtgcaagtgactgggctaccaccaaaacctggtgggttttagccactgaagaaagtgctctggtgagcggggcaggtttggccatctstggtcctgcagtagtgtctccaggtatgggaagtgctcagtagagttccgccatgtccctacaggccctctggtcacacggctctttcagtgtgataatgcatgccacccaccagccactgcaccaaggcatgcccatgctgcccgagtctgcttggctgggtcagattggacacctaatgcttgtgccaggtctttagttaagactgcctaccttcctgttatgggaattcttcccttgggccctctccactgtgtcagaccacttcagcccattgatcatttcccagaagtgcctcagcttactctatagacttgttcaccagcttcccagatacctttgagctttaaagcctaaagtatatgggaaagagtagcctttgccaaactcttccaaccccataataaagccatattatcctttttcccagaacaatggtttcataatagcttttcctcagaagtaatgggaatcactcatgg

SEQ ID NO: 388552 - DNA, 596 bp, Homo sapiens
cttaagttagtgggaaatctatgtgtgcatatgtgaaacatactgtatttacctatgaaatataatcatatatatggatataaaaataatattctctctgaaatcgatatgagcaaaacatgttcacgtctatgtagcctatcaaataagttataattctgatacaatcagagattctatacaggcttcccttacagtgtatatacacctatatgtagacacataacatgactttatctgcatgaatttccatagcacttcctataactctaggaaaaacatgaactgcaagaaataaaatatttaaaaatgttaacgtagagtgctgagcggtagaaggtactccgcagcaaatcctaatgagtgttaacaagctgagaattcattttctccatattttaaaatcaagaaytattgtaaaacatccacagaagctctgttgctttttggagaattctgaaattactcttgtgaaagacgtgtctcttttccctttttttaagaaaaaaatttaattgtttaaagtcagaggcagcacgtagtaaatgtgaaaatgctaaattgtatctcggatgggagggggttattgattttat

SEQ ID NO: 388553 - DNA, 617 bp, Homo sapiens
  misc_feature (1)...(617): n = A,T,C or G
nnnnnnnnnnnnnnncatcagtcggaagtggatttgttaaaatataatttactgctgcctgttctttaaaaggactatatggtttaaaaaatcaaaactgtttgtcttgacaaactatttaaaatagatctagccaaataaattattagggataaacctggtagactggtggtgatcgagataatctttaatgtgacagttattttatgaatttagcrtaaaaaattctacatcactaaaaatatataagtgcagatatgttacttatgaatacattatattattgtggtttaggccagctccgttttctcaattattgatagatctatttctgtgatcatgctttaagaagtgtaataccaacatgtcaccacagatccacagattcataccacaggaaaatgtgtaaatgtggttttgaaaaatgcaaatgaggctccacaatccatgcccatccatttcaaaaaaagcttcattgtgcatgttttacacaacacttttgcttctttcccctctaacattagaaaatatttaagtagctgagaattggtacttcaacttctgaggaagtaaacatgttaaagagcagaaggtgacataaaaaataggtctgagaa

SEQ ID NO: 388554 - DNA, 581 bp, Homo sapiens
  misc_feature (1)...(581): n = A,T,C or G
nnnnnnnnnnnnnnnnnnnnnnnnnnnnnnnnnnnnnnnacatttttgatttgtttcagaaattatgtcattgttgaccaacctcaccaggatacaatascatatgtggtattaagaataatatgttttagaaacattaatttcaatttaatatatgtgtcaatatttataatttatcaaagccagagaccagtcttattatttatctttgctgcaaatgcctaatacccttaatggcaagtgcctaataaatgctgattaataagttgcagttcaaaacacagactcttttctaggtataaaatatcgtattaatcaatgtttcattattttctcaaacaatcattcactgtttctttaatccatactctttctctgtaaaccctgaactgactgtaaggcctggaaaatagttaaaatgtattttatattcaaaaactttcccagtacactattaagttgataaaacctgctcataagcacatgatcaatgaaaaagactcatatattgggaaagaaaatcatatctgaaacaattataaagccttttttgtgggatcaggcatataaatggctaaggc

SEQ ID NO: 388555 - DNA, 574 bp, Homo sapiens
aaaaattgacttgttttagtttagaataggaataagcacatagctagaacttggtgaacatgatatgagcagtaggggatattttggctatttgcttaataacattttctttggaatgtggtcatgggtacaacatgggtacaaattatgatgctgtcactkttcatttttgagacctagagaaattatttaggctttttatagccttattttcttcttttcccaataggcataacaacagtatctttatcttggagataaaccatataatgtacacagaaccaagcctggcccattgaaaggggttattgttatagtaattaatgttgctgttctttattacgttttcattattcttttgtttgtttttagataaactcttgcaacaattgaaattatgactgaatagagaatgagaggttctaatatataggtgcagagacaaggaaggaattttgaagcgcaaattacaatcaaggataatttttaaattagtagtagtagttgtatttgagattagcacgatgaaaataagactttctcatcaatgagtatggtaaagaggtcgcagact

SEQ ID NO: 388556 - DNA, 456 bp, Homo sapiens
cttaagttttgtagctaatttttctcaggccaaactaataagaggacacttgaaataaaagagcaacaataatgccattgcaatgataattactgattaataatgtatgcctagacaggagtctgaagacaaagtagaagttattgtgtaattattttatgacatggaaaagtctaaagtgaaaggacatcaacaatcttaaagatatttacagataactactcttttaacaattcctgcttttctgatttctagtaattagtaactttcaacratttatatggttaaaaaataaattaaattacacaggaaagtttatattcatagataatatatttaattggacttttgtgttaaaagctatatatagctttacagtttatccagtataaaaccctccgagtgattcaaacatgaaaaataccatacagaattcaaactcctactgcctttagt

SEQ ID NO: 388557 - DNA, 617 bp, Homo sapiens
agagatatggcaccttttagacagagaaatcaaaatagctgtttttaggaaactcaaagaaattcaggagaacatagcaaaggaattcagaatcctatcagttaaattaaataaaaatttaaagtaattttagaaaaatcaataccaaattttgaagttgaaaactgcagctggcatactaaagaatgcatgagaatcctctaatagcagaattgatcaagcacaagaaaaaattagtgagcttgacaggctatttgaaaatagcctgttagaggagacaaaagaaaaaagaataaaaacaatgaagcatgcctacaagatccaggaaaaaaaaagcctcaaacgggaaaataagagatattggcctcaaggagaagactgagaaagggataggagtagtaagtttattcaaagggataataacagagaacttcccaaacatagagaaagatatgcatattcaagtacaggaaggttatagaacaccaagcagatttaacytaaagaagactaccttaaggcatttaataatcaaacttccaatggtcaaagatataaaaaaagtttcataaaagcagtaagagacaagaaataaataacataaaatggagcttcat

SEQ ID NO: 388558 - DNA, 510 bp, Homo sapiens
gacaggctatttgaaaatagcctgttagaggagacaaaagaaaaaagaataaaaacaatgaagcatgcctacaagatccaggaaaaaaaaagcctcaaacgggaaaataagagatattggcctcaaggagaagactgagaaagggataggagtagtaagtttattcaaagggataataacagagaacttcccaaacatagagaaagatatgcatattcaagtacaggaaggttatagaacaccaagcagatttaacctaaagaagactaccttaaggcatttaataatcaaacttccaatggtcaaagatataaaaaaagtttcataaaagcagtaagagamaagaaataaataacataaaatggagcttcattacttctggcagcaaacttttcaggaaattgtacaggctaggagagaataacatgacatatttaatgtgctgaaggaaaaaaaacctttaccctagaatagtgtatgtagtaaaattattcttcgaacatgaaaaag

SEQ ID NO: 388559 - DNA, 372 bp, Homo sapiens
ctcacagacacacccagaaacaatactttaccagctatctagacatccttcartccaatcaagttgacatctaatattaaccatcacatccctcaagcatggaagatttatttaacaagtcttctgagaaaataatatattttcagtgaggttatttctgttagaaaaactgttctgtttggaaacaatagacaagatttcagtcttttactgtttctttcttaaatcttctttgcctaccttattaggagaaagatataaaggttctcattcatattcaaaaattaatatttcagcagcaaaatccctttcttaatcatttcccaaatgtcagccaactgagtggtaaaataaaatatagttgtatggatt

SEQ ID NO: 388560 - DNA, 372 bp, Homo sapiens
ctcacagacacacccagaaacaatactttaccagctatctagacatccttcagtccaatcaagttgacatctaatattaaccatcacatccctcaagcatggaagatttatttaacaagwcttctgagaaaataatatattttcagtgaggttatttctgttagaaaaactgttctgtttggaaacaatagacaagatttcagtcttttactgtttctttcttaaatcttctttgcctaccttattaggagaaagatataaaggttctcattcatattcaaaaattaatatttcagcagcaaaatccctttcttaatcatttcccaaatgtcagccaactgagtggtaaaataaaatatagttgtatggatt

SEQ ID NO: 388561 - DNA, 458 bp, Homo sapiens
tatattttcagtgaggttatttctgttagaaaaactgttctgtttggaaacaatagacaagatttcagtcttttactgtttctttcttaaatcttctttgcctaccttattaggagaaagatataaaggttctcattcatattcaaaaattaatatttcagcagcaaaatccctttcttaatcatttcccaaatgtcagccaactgagtggtaaaataaaatatagttgtatggattaagttacaggaaataataaatgtatatatataaaatacatttacagagatgagcatgaygtcatgttccctaaaatggcaactactatttacatgtagattacaggaaacaaaaatcaaatacaaatattttcatgcgtaggttcacatgattttctataaatgcatttttgcacatttctgatgattgtggataatatgaaaacatttcaattaatacca

SEQ ID NO: 388562 - DNA, 660 bp, Homo sapiens
tggtagcactcaacataagcttgccattcttcccacatccagctccagaaattttgccacagagaagaagcaggccataaaacagctcccagtcttttcccaattgaactgactccatttgcaacagagcttagaaaagtttaagtctatgggtactaagtggaggtgtggatcagtggaggttgtggcaaaggacagttgggaggaaatttgtggatgatacaacttagactgtaagtcaattagtttgcaggaaatatctggggaataagacaactgggaaaaaaayttcctggaatcagaacaaacattggacactgaccccagaatctaccctgtaataggagacataatgtgattgggttaatttctagaggaatttatgtcccagacattgttaaaaacaacatagcaatctggtagtaattagtggagcttaacagctggatgttgtcagagaaggagtgaaagagggtcctactagtacgagagtcgtcccagagtgatcgtggacatacctaaaactgtaccaatctgtagatcaacatcagaggcttaacactgttggaggaggagagataaactaaaataatctagccaggtattaagtgaatgaacaagaaaataaaaacaacaatccccagcactgggagactaaac

SEQ ID NO: 388563 - DNA, 660 bp, Homo sapiens
tggtagcactcaacataagcttgccattcttcccacatccagctccagaaattttgccacagagaagaagcaggccataaaacagctcccagtcttttcccaattgaactgactccatttgcaacagagcttagaaaagtttaagtctatgggtactaagtggaggtgtggatcagtggaggttgtggcaaaggacagttgggaggaaatttgtggatgatacaacttagactgtaagtcaattagtttgcaggaaatatctggggaataagacaactgggaaaaaaacttccyggaatcagaacaaacattggacactgaccccagaatctaccctgtaataggagacataatgtgattgggttaatttctagaggaatttatgtcccagacattgttaaaaacaacatagcaatctggtagtaattagtggagcttaacagctggatgttgtcagagaaggagtgaaagagggtcctactagtacgagagtcgtcccagagtgatcgtggacatacctaaaactgtaccaatctgtagatcaacatcagaggcttaacactgttggaggaggagagataaactaaaataatctagccaggtattaagtgaatgaacaagaaaataaaaacaacaatccccagcactgggagactaaac

SEQ ID NO: 388564 - DNA, 575 bp, Homo sapiens
attttggtcacttagccaaggtaaacttggtgttgctttatattatttacagagttcaaattcaataagaaatctcatgtgatccacgagtaagcaccagtgaaatgatcttactattatttttatcttttctacagaaactagcttgataatagaaacattctaggtatatacagagataaaacaaagtgcccrcgggaacaactcagaagcacacttttcttacatttcactctgtggtactgctctaggatttagacatgactgtgatcagaacaattatgtgtcaaggatgtgtacttttactatcttatagaatattctgtagactttatacacacgtactgtttataataaaaagccaacccagaattaatgccaatatcaaattgaactatcaaccataaaagaaaagtgaaagtgtaactttaacagttataatgacaaaaatcataagagaaaatttgcaatgtaacttttacaatctagagactttctttcttggtataagaacctctagaactttgcaatggagtttcagaaaaaggcttattttctattcatccaggacaagg

SEQ ID NO: 388565 - DNA, 618 bp, Homo sapiens
aatgactactaaggtccctttctcctccaaggtgggcagtgggcagccaagaagcaccaaaccatgatctacaggcagcactcaaggaggagaggaacccacactttgagagcattgagagaaaacatggctgaaactgtgagaaaatataggggagccacacaactgagcaagagtttaccaactcaccagtacacctaagtgccacctactggatcacaccctaaagcttccacaccaaaaatacttccctaaaatcctttcctgtgaaattcaagacaagaaatcagcttcaaataaagtcactgaacaaagccttggccctgtgaaaatatccagaaaagaagtctattgactatactcaatctacactgcagttaaattaacactcacatgcagtgatgagaaacagccaatgcaaaaactccagtaactcaaatggctagaatgttgatgtcctccaaactactgctctagttctccaaaaagagttcttaaccaggctgagctggctgaaatgacagaaaaataatttagartatgaataggaatgaagatcactgagattcaggagaatggcaaaacccaattcaagaaaactaagaaacacaataaaat

SEQ ID NO: 388566 - DNA, 604 bp, Homo sapiens
attttccagagaaatagatatcatgaaggaaaaacagtcacaacttctggaaataacagacacaattagagaaatacaaaatgcacaggaaagtttcaacaatagactagaacaagtagaaaagagaaatcagagcttgaagacaaggctttcagattaacccaatcagaccaagacaaataaacttttttttttaataacaaagcctgcaactaatttgggattacgtaaagcagtcaaatctaagaataattggtattcctgaggaagaagagaaatctaaaagtttggaaaaattatttgaggaaataattatgctaaacttccctggccttgttatagatctagacattcaaatacaaaaagctcaaaaaatttctgggaaattcatcacaagaagatcatcacctargcacgcagtcatcagtctaaagtcaaggtgaaggaaagaatcttaagagctgtgagacaaaagcatcaggcaaacaataaagaaaacctatcacattaacagcagttttctcagcagaaacgttataagccagaaggattgaggtccaatctttagcctctttaaacaagatatttggcagccaagaatttt

SEQ ID NO: 388567 - DNA, 604 bp, Homo sapiens
attttccagagaaatagatatcatgaaggaaaaacagtcacaacttctggaaataacagacacaattagagaaatacaaaatgcacaggaaagtttcaacaatagactagaacaagtagaaaagagaaatcagagcttgaagacaaggctttcagattaacccaatcagaccaagacaaataaacttttttttttaataacaaagcctgcaactaatttgggattacgtaaagcagtcaaatctaagaataattggtattcctgaggaagaagagaaatctaaaagtttggaaaaattatttgaggaaataattatgctaaacttccctggccttgttatagatctagacattcaaatacaaaaagctcaaaaaatttctgggaaattcatcacaagaagatcatcacctaagcacgcagtcatcagtctaaagtcaaggtgaaggaaagaatcttaagagctgtgagacaaaagcatcaggcaaacaataaagaaaasctatcacattaacagcagttttctcagcagaaacgttataagccagaaggattgaggtccaatctttagcctctttaaacaagatatttggcagccaagaatttt

SEQ ID NO: 388568 - DNA, 552 bp, Homo sapiens
ttctatgattttcattttaattggcctgatctttacaggtctaatattagacttagctataatcaggtatggatctggttggagggtgtttattctcctctcatcccacttattcactgtttgttcaaaaagatgcctgggaaggactcaaataaaagcagatgcaaataaggataaacagactggatttgtttgcaygaaatttcagcttcagtgtgttggtcatttgttctttgtagtcatttaattgcactgttgaatgtaacatatagtcttctaaaatttgataagtggaccaggaagtcagtaccttcaaacagctttggtctttctgtgaagtctgaagtctatggttacaattatcatggcttctgtgtaccaatggtcattgtattaaccagaagtgaacatcagagaaggcacaaaaagaaaaatatgccactagaaaaggaaattattctaatctccaaactataattttggtatacctctttttatttacttcttatagaaaaaaagagcctccacaaacttttagatgagtaggctata

SEQ ID NO: 388569 - DNA, 584 bp, Homo sapiens
atatcaaaaaaaattattctagatgttggcttaggcaaagaattcatgtccaaaaacccaaaagcaaatgggacaaaaccaaaaataaatagatgggacctaattaaactaaaaagtttctgcagagcaaaagaaataatcagcagagtaaataggtgacccacagcgtgggcaaaaaatactcatgaattatgcatctgacaaagatctaatatccagaatccataaggaactcaaacaaatcagcaagcaaaaaacaatcccatcaaaaagtgggcaaaggacatgaatagacaattctcaaaagaagatatacaaatggctaagaatcatatgaaaaaaaatgctyaacatcagtaattatcagaaaaatgcaaattaaaaccacattgagatatcatcctactcctgcaagaatggccatgatttaaaaatgcaaaaatagtgagccaagatcgcgccactgcactccagcctgggcaacagagtaagactctgtctcaaaaaataaaaataaaaataaaaaaataaaaaataaaaaaaacagatgttggcaaagatgtggtgaaaagggaacactattc

SEQ ID NO: 388570 - DNA, 525 bp, Homo sapiens
ttttacctaattcaattcagttttgtggtgtcataaaatcgtaatttttttttttarcaaaaaaatgctgatctagaaaaaaggtgtcatacagatggcagtaaagtccaaggacagtaaaataataaactggtagtatttcagtccattcatgctgctataacaaaataccaaaccagtaatttataaacagaattttatataaattctgtttatatataattatatatatataattatatacaattctgtttatatataaacagaatttattctcaccattctggaagtcaggaagtccaaggtttacgcaccagcagattcactcgctggagcaggctcactttgtgcttccaagatggaactttcacatggtggaaggggaaggaaggggcaaactctgccactccagcccttttatgacactcatttatcagagcagaaccctcacagcctcatcatttcccaagggccacacctcttaatactatcactttgggggttaagcctcaacacaggaagttt

SEQ ID NO: 388571 - DNA, 586 bp, Homo sapiens
ttgttacataggtaaatgtgtgtgccatggtgttttgctgcacctatcaacccgtcacctaggtattaagcccagcatgatttagctatttttcctgatgctctcctctctgccctttttcctacaggccccagtgtctgttgctcccctccctatgtccatgtgttctcattgttcagctctcacttataagtgagaacacactgtgtttggttttgtttttgcatgtgtttcctgaggataayagcttccaaattcatccatgtccctaaaaaggacatgatctcattcctttttatggctgcatagtgtttcatagcatatatgtaccacattttctttatccagtatatcactgaggagcatttgggttaattccatgtctttgctattgtgaatagctgcaatcaacatacacatccatgtatctttataatagaatatatcatctttataaaagaatgatttatattcctttggctatatagccagtaatgggaatgctgggtcaaataatatttctggttctaagtctcctaggaatcaccacgctgtcttctacaatggttgaactaatttgcattcc

SEQ ID NO: 388572 - DNA, 724 bp, Homo sapiens
accattttcacaatatggattcctcctacccaaatgtaaacacaagtatcaatagtcaagttgaccaagtggaagaaagaatatcagagcttgaagactatcttgctggaataaggcaggcagactagattagagaaaaaaagaatggaaaagaacgaacaatgggactatgtaaaaagacctttagattcaagaactatgagactatgtaaaaagacctttagaactagagattctgtgctamatgaacacaaatgtgaaccagccaaagactcatcatgagatgtaaatttggatacaaaacttaatattttattaaagttttagggtacatgtgcacaacgtgcaggttacatatgtatacatgtgccatgttggtgtgctgcacccagtaactcatcatttaacattaggtatatctccaaatgctatccctcccccctcctgataacaggccccagtgtgtgatgttccccttcctgtgtccatgtgttcttgaagacttaacattttaaagagtactctgtaagagcaagttaaggagtccctcaatcataaaggaggacattgaaataagttaaactacctattgcctgttttcaaatagcccattggagtcttactgtataatgacaacacaagcagaaattgtcccagtggctgcctcctgggtcgaggttagctagcagtgatgcccacaccaatcttctctgttgagataact

SEQ ID NO: 388573 - DNA, 558 bp, Homo sapiens
aactggctgtctggagacctactactttaatgggcattatccaacaaaaggagtacaaagaaaacgtggaaattttcgccaatttctcttagaagcatgacatagtaaatggatcatttcactaaaaggataattggaagtatgacatggaaaccatataatgctacaaaatacttcaaagcaaaggcaaagatacctggttttctaactatttctagaattataaattggatataaagaaacaaaaagacaaacatgataaattttcagatcttaatacccaggaagaaaaaaaataattatttctaaaagaagccagtcctaaaaattgacagtaagccaaaaatctaggaccctggaaacaagacatttccagaacatatgcatggggtgggggtggtagatacatcataaatattgctttctgtttcaagattttaaaatttgaaataattttcrcttccatatgttttctcctaattactattcagaggcatacagacattaaatagttgtacgggcaatttttatttgtgcttccaccttattatcagatat

SEQ ID NO: 388574 - DNA, 583 bp, Homo sapiens
tagaagcacgtgggtctatcaatgaaagtggtatttatattggyttgtaaattagggaaagggagtacccaaagccaccttgatacttagaaagcaacataacatcatttgttatgggtttgaaagaccacagcagctttcagagatgtaagcagttaaatatggctggaaggaggggaaggtgatcagaggctgacacgaggtatctagcctctcctgctttggaagtggtctgaactttagcctacaagcacgaaggatccactgaaaggatttaaagttatataatcttatttcatattagaaagatagctttgagagattttaggccaaaatactggattaatcacatgctacatgattactagccccaattccaaaacactacaaattcctgcaaaggcaagaaaactaataaacattgccattgatttcatggaaaataagaagaggctgggcgcagtggctcatgcctgtaatcccagcactttgggaggccaagaggatagcctgagcccaggagttcaaaacttgcctggaccatatagtgagctctccacggaaacaaaaacaattagccagg

SEQ ID NO: 388575 - DNA, 583 bp, Homo sapiens
tagaagcacgtgggtctatcaatgaaagtggtatttatattggtttgtaaattagggaaagggagtacccaaagccaccttgatacttagaaagcaacataacatcatttgttatgggtttgaaagaccacagcagctttcagagatgtaagcagttaaatatggctggaaggaggggaaggtgatcagaggctgacacgaggtatctagcctctcctgctttggaagtggtctgaamtttagcctacaagcacgaaggatccactgaaaggatttaaagttatataatcttatttcatattagaaagatagctttgagagattttaggccaaaatactggattaatcacatgctacatgattactagccccaattccaaaacactacaaattcctgcaaaggcaagaaaactaataaacattgccattgatttcatggaaaataagaagaggctgggcgcagtggctcatgcctgtaatcccagcactttgggaggccaagaggatagcctgagcccaggagttcaaaacttgcctggaccatatagtgagctctccacggaaacaaaaacaattagccagg

SEQ ID NO: 388576 - DNA, 583 bp, Homo sapiens
tagaagcacgtgggtctatcaatgaaagtggtatttatattggtttgtaaattagggaaagggagtacccaaagccaccttgatacttagaaagcaacataacatcatttgttatgggtttgaaagaccacagcagctttcagagatgtaagcagttaaatatggctggaaggaggggaaggtgatcagaggctgacacgaggtatctagcctctcctgctttggaagtggtctgaactttagcctacaagcacgaaggatccactgaaaggatttaaagttatataatcttatttcatattagaaagatagctttgagagattttaggccaaaatactggattaatcacatgctacatgattactagccccaattcyaaaacactacaaattcctgcaaaggcaagaaaactaataaacattgccattgatttcatggaaaataagaagaggctgggcgcagtggctcatgcctgtaatcccagcactttgggaggccaagaggatagcctgagcccaggagttcaaaacttgcctggaccatatagtgagctctccacggaaacaaaaacaattagccagg

SEQ ID NO: 388577 - DNA, 492 bp, Homo sapiens
tggtgattgtctctggaagggatatggaggcttaaggaacaaagatggggcttttggggtgctgcctggtcctatttcttgacttgcttctggttagttggtgcattaattgtctattgctgtataacaagttattccaaaacttaatggcttaaaatgacacaaatttttcatcttatagtttcggtgagtcagaaacccaggcacagactgagtctcctgcttcagggtctttcacaggctgcaaacaaggtgtttgcctggggtttcttaygaggctgaaatcaaggtgttgccaggggttgcagttatctcaaggttcaactgggacaggatccacttccaagtttgtatagtaattattgaagatttatatccttggtggctgttggccagataccacccccaggtggccctgtctaccaaagaaagcatgcaacaagagctagagagagactaatacaagacggaagtcacatttcttataatcta

SEQ ID NO: 388578 - DNA, 452 bp, Homo sapiens
cctgatgttcttggcaacacaaaaaatagctcccaagaaaaaacagccaaggttataatccayattttacttgctaaggtgaatattactattctgctataaagttggtattcttttgcagcctcttacacttatagtggagaagagagcttagataatgaatatgagtttactaaatactacagatcacttctctacccttctgcccagacttaacatctctccacccagtcagtaagaataaaatgatgatgatgaaataacatagtagtaataacaaaatgtagtgtttactatatttcagcaccttccatcattattttattattccttacaataaaccaataaattagtctgatggatattagaggaagaatacatcttttacctctgttttctaaagcaattgaaagcctcagaattgtcgttttttttttttctttaagacagtc

SEQ ID NO: 388579 - DNA, 452 bp, Homo sapiens
cctgatgttcttggcaacacaaaaaatagctcccaagaaaaaacagccaaggttataatccacattttacttgstaaggtgaatattactattctgctataaagttggtattcttttgcagcctcttacacttatagtggagaagagagcttagataatgaatatgagtttactaaatactacagatcacttctctacccttctgcccagacttaacatctctccacccagtcagtaagaataaaatgatgatgatgaaataacatagtagtaataacaaaatgtagtgtttactatatttcagcaccttccatcattattttattattccttacaataaaccaataaattagtctgatggatattagaggaagaatacatcttttacctctgttttctaaagcaattgaaagcctcagaattgtcgttttttttttttctttaagacagtc

SEQ ID NO: 388580 - DNA, 452 bp, Homo sapiens
cctgatgttcttggcaacacaaaaaatagctcccaagaaaaaacagccaaggttataatccacattttacttgctaaggtgaatattactattctgctataaagttggtattcttttgcagcctcttacacttatagtggagaagagagcttagataatgaatatgagtttactaaatactacagatcacttctctacccttctgcccagacttaacatctctccacccagtcagtaagaataaaatgatgatgatgaaataacatagtagtaataacaaaatgtagtgtttactatatttcagcaccttccatcattattttattattccttacaataaaccaataaattagtctgatggatattagaggaagaatacatcttttacctctgttttytaaagcaattgaaagcctcagaattgtcgttttttttttttctttaagacagtc

SEQ ID NO: 388581 - DNA, 579 bp, Homo sapiens
ttaggttgttaatttgagatcgttctaacttattgatgtgggtgtttagagctataaacatccctctcaacactgccttggctgtgtcccagagattctggtatgttgtatctttgttctgattactttcaaagaatttcttgatttctgccttaatttcattgtttaccctaaagtcattcaggagtaggttgtttaatttccatgtaatagtatggttttgagtgacttttcacagtaaggatttctatttttcagtgtggtctgagtgtggttggtatgattttggtattttaaaaattgctaagtattgttttatgtctgatcatgtggtcgattttggagtatgtgcaatgagaataatggacattctgttcttggatggagacctctgcagatacgtactargtccttttggtcaagtgtttgggttcaggtcctgagtacagttttctgtatgaaaactgaaattatcgataaatctgtagattgagtaaccccaataatatataaataagattttaataaccttctaaaataatcctgaattcaattggaagataacatagatactaatag

SEQ ID NO: 388582 - DNA, 567 bp, Homo sapiens
ttttattactgttgttttagttatgtattttggataatctttatcagaygtatggtttacaagtcatttcttccattccataggatgtttcttcactctgtgtattgtttgcttggctgtgcagagctttttattatgtaatttcacttactaatttttgttttttgttgcctttacttttgcgtttatattcaaaaattatcactcataccaatgtcatggaacttttccacatgttttcttctattagttttacagtttcagatcttacatataaatccttaatccattttgagctgattttagtatatggtgtgaataagcatttaatttcattcttctgcttgtggatatccagttgtccctactctgtttattgaaaagacttctttttctattatgtgctcttggcaatcaattgactgtaaatgcatgaatttagttctgggcttcatattctgcttcactgatctgtatatctgtttttattccagtaccatgctgttttgattactattgctttgtagtatattttgaagtcaggtagtgtgatgcctccagctttgt

SEQ ID NO: 388583 - DNA, 567 bp, Homo sapiens
ttttattactgttgttttagttatgtattttggataatctttatcagacgtatggtttacaagtcatttcttccattccataggatgtttcttcactctgtgtattgtttgcttggctgtgcagagctttttattatgtaatttcacttactaatttttgttttttgttgcctttacttttgcrtttatattcaaaaattatcactcataccaatgtcatggaacttttccacatgttttcttctattagttttacagtttcagatcttacatataaatccttaatccattttgagctgattttagtatatggtgtgaataagcatttaatttcattcttctgcttgtggatatccagttgtccctactctgtttattgaaaagacttctttttctattatgtgctcttggcaatcaattgactgtaaatgcatgaatttagttctgggcttcatattctgcttcactgatctgtatatctgtttttattccagtaccatgctgttttgattactattgctttgtagtatattttgaagtcaggtagtgtgatgcctccagctttgt

SEQ ID NO: 388584 - DNA, 607 bp, Homo sapiens
tgcacggtttgaggaagaccaggattttagaaaagaaagccatccccaatttttcctgctactttgccactgttcttaytcactatatttaatatgtctcatgactaagatgcacatatgttttcagaattttttattttttatttttgagatggagtctcactctgtggtccaggctggggtgcagtggcataatctcggctcactgcaacctccacctcgaggattcaagggattctcctgcctcagcctcccaggtagctgggattttataggtgcccgccaccatgtccggttaatttttttttcttttttttttttttgtatttttagtagagatggggtttcacaatgttggctgggctggtctcaaactcctgacctcaagtgatctgcctgcctcggcctcccagagtattaggattacaggcatcagccactgcgccaggccttgttttaagaacttttaaattacaattgaatactaaaactaaaattgttctgtggtcctggaactcggagtcatactgaaaagggaaagaatgaattgaaatggagatcaagttcaccctgcatatttgtggacagatttacctttatccaacct

SEQ ID NO: 388585 - DNA, 538 bp, Homo sapiens
aaggtgattgtcaactgcattaaatatatttgaaatactctcaactataaagcattcatgagtcacaaaattttttaaatagtcatcttactgtcctgtgtcagttttgatttagtcattgctcttcctgtaactctacctggtaaatttcattttgagtctaaggagaaaggctctcaactcttctagatctgcctgctcatggagggaaaattagtgagtataatcattcttccctgaaactcaggtggactcggacattgtaaaattaaatttataattttcagaaattcccttaagttgagcagtaaaaaaagctcactttctagtgtttcaccacttactgtagtgttatacaaaagggagaagagagaaggtttcttttkgttttttttttttttttttttttgaggtggagtctcactctgtcacccaggctggagtgcagtggcacaatcttggctcagtgcagcctctgcctcccaggttcaaggaatactcctgcctcagcctcctgagtaactgggattacaggcac

SEQ ID NO: 388586 - DNA, 538 bp, Homo sapiens
aaggtgattgtcaactgcattaaatatatttgaaatactctcaactataaagcattcatgagtcacaaaattttttaaatagtcatcttactgtcctgtgtcagttttgatttagtcattgctcttcctgtaactctacctggtaaatttcattttgagtctaaggagaaaggctctcaactcttctagatctgcctgctcatggagggaaaattagtgagtataatcattcttccctgaaactcaggtggactcggacattgtaaaattaaatttataattttcagaaattcccttaagttgagcagtaaaaaaagctcactttctagtgtttcaccacttactgtagtgttatacaaaagggagaagagagaaggtttcttttgkttttttttttttttttttttttgaggtggagtctcactctgtcacccaggctggagtgcagtggcacaatcttggctcagtgcagcctctgcctcccaggttcaaggaatactcctgcctcagcctcctgagtaactgggattacaggcac

SEQ ID NO: 388587 - DNA, 591 bp, Homo sapiens
ttaaaattttgagaagcttcagccattcttccaggttattggcaaagtatttgaagtgaataacataatgataattgttcatagattgtgcctgaccttaactttgaataagaaaatcaaagaagcattgactctcagggcaggaagaggctttacaggtgtctacttaatccgtgttttttttttcctctrtgaagggtcatccacccttggatgccatcactggagatggcaccatttttaagacagttctgctttgaagggaggcatacattaaacacatttttctcttggattgtctgacttcattaaattatctggtagatctggctccatatctctgtaacttatgccattctttcaggtttctacttttatgctcctttgacactggacagaatatctgatcatggtagcttggcttcatgtggctgcagatgctttggtcaaggtgttctgcctttctggaatacttaaacgtcccttgaatactgcagttacactcattcatgcttttgatgtgctcatttccatgttaggaagtagatagacccttgaagtctggatgatacaaaaccacacagaaggaag

SEQ ID NO: 388588 - DNA, 279 bp, Homo sapiens
tttttaaccaaaaaatatcaaatagactttgtaacatatatatagaaaaatatacactagagctaagagtggtttattccagacatgtaaggttagcttaatatttgaaacaaatcagtgaaatccmctatattaacaaaataaagggtaaaattcatgagattgatcaatacagaaaaggcatttaataaaattcagcacttattcatgataaaaactctcaaaaaacggaaacacccttagcttgataaagatcacttccaaaagaaaaaaaaaaac

SEQ ID NO: 388589 - DNA, 460 bp, Homo sapiens
aactgactttatttgcagataacaattgcctccrtaaaagataccaacgaaaaacttctagaattagtaagtttaataagatcacaggagatgaaataaacatacaaaaatcaatgaaatttcagtatactagtataaacacatggacacaaaagttaaaaacgtactgccaagtagtaatttaaaaattaaatacttagttgtaactaataaaaatgtagactgtttacatgctaataattacactgcattgatgaaagctattatagtctaaaatggagaggcttaccatgttcgtggattgttaagacttaatataaaaaatattttctttctaaattgataaacaagctttaggcaattcatatataaatgacagtaacatttttgtagaaatagacaaaattaaaaatttatgtggaaaaatagaggaacaagaatagctaaaacaaatgtgaaa

SEQ ID NO: 388590 - DNA, 460 bp, Homo sapiens
aactgactttatttgcagataacaattgcctccataaaagataccaacgaaaaacttctagaattagtaagtttaataagatcacaggagatgaaataaacatacaaaaatcaatgaaatttcagtatactagtataaacacatggacacaaaagttaaaaacrtactgccaagtagtaatttaaaaattaaatacttagttgtaactaataaaaatgtagactgtttacatgctaataattacactgcattgatgaaagctattatagtctaaaatggagaggcttaccatgttcgtggattgttaagacttaatataaaaaatattttctttctaaattgataaacaagctttaggcaattcatatataaatgacagtaacatttttgtagaaatagacaaaattaaaaatttatgtggaaaaatagaggaacaagaatagctaaaacaaatgtgaaa

SEQ ID NO: 388591 - DNA, 584 bp, Homo sapiens
aaagcacattatggagctatctattgtcagctaagaatttccaccagattttgactttggaggcctaagagttaccatagttactaattaactcctgtgtcctgaatgcattagacacagcagagagactgtttacattatgtaaagtacttttgttctaaataaattaagagaatatgctagatgcattaaatcttattgcaaaataccatcaactcatctttcattaaattctttattgaagattttgaatctaagccccagaattaacacagatttaacttctacctttgactagcttagcctaaaacacagctaaaatattgcctgtctttgttgttttaaaatgtcaaattgtcataaccacaayttatgcttttctgaacccagagtcatgttcctagataattaaatatcaaagtagttactattaaaaatatttaaacataagttatattttctaaattattttattgaaactattttaaaacctatatgaaaattataatagtacatttttctaaaaggcaacttgtagtttctagctgtatagtatttaagacaatatgaaacaatgaagcttg

SEQ ID NO: 388592 - DNA, 227 bp, Homo sapiens
aatacaaagaattttttatccttggaatagttattccagtttcttaggttaaaaacctaagaaaaaaatcctagataaacaaataactgttgaagaggaaataattttacgttaatttttgcccacatyttatccagatttggttaataaattgtccaaataatcatatgttttaatcatatggctgtaatgtaagtcagaaaaaaataaaaatggattaatggttt

SEQ ID NO: 388593 - DNA, 616 bp, Homo sapiens
gctatttgtaatgttacttatttcattagtctaacacctttaagggaacactaagagccatgcgttgaaattacacatgccaatttggccattttctatgatccattaggctttcttcaatagaaaattaattatgttgccattccataattctctcctgaaactttatgcaggtgtcaagaatgcatttgacacaatttagggccccataatgcctttaactaaaacatttagaacagggtgcataaatggggaattgctatggattgaaatgcatataaataaatgaaagtggcaacttttgagaaacaaaacattaaacatacttcagggaacttatagcatggcttttccaagaatgtatttttggtgctttgctttatttctgtatttagatttgcctttttsatattaagatcttgtcttacaggtctttgaaagaaaagtgaagactacagtgacaaatgctttttcctgaggtcctatagaaaatcttcagcaatgtcattgattcctcccacgtcacataattcatgcttatgttttatcaactatctcagtaaaacatatcaacttttaatttttaaaattatcattcacaatctcatgtctttcc

SEQ ID NO: 388594 - DNA, 612 bp, Homo sapiens
gtgattccaagtcagttcccactcacacattcctactccactagtggaagtgtagatttctctttttctttattctgttgcctgaaaccaaaactccaggaaaaacacagcaagccctccaaatgctccccttggaactcttctcacttgcattggtagaaaaaaaaaaaaaatgctaccctaaaatatggatgaaaatgatagtctctcccactcattttctgcactctgtgctctttcatgttcttttttccccagtcatcaccaaatacatgggccatttgctatggaagaaagaactacatgatgaaagaagcttggattcctgagtctaaatttctttctgttatcattttcttttcatgtaacttactatcatgaatagcacaattccatttataatagtcacaaagaaaatgaaatacctaggaatacagctaaccgagaagctgaaagatctctacaaaaacttcaaaatatcgctgaaagaaatcaaagatgacaaaaataaatggmaaaacattctgtgctcctggattggaaagatcattaaaatggccatacagctcaaagcaatctacagattcaacactattcctatcaaactaccaa

SEQ ID NO: 388595 - DNA, 643 bp, Homo sapiens
agggattaacatggtacataaaacactgcccaatgattggagtgcatagttttgccttcagttgttagtctctcattttaagaaatggtcaaagtatatattactttccgggcaagagtagaatgyacctaaaactcaaaaaaggaatttgcctacaaatataaaatctttcatatttgacaacccaagattgctttaaaagaacactagctccccaaagtgatttttatgcttatttaactgtagtttgcaaacagaaaaggcacatgttcttcacaatgacagagcatagccccagcaagaggtcaagggccaggattcaactgagatgttctgagtctacacacagggggctcaattctcccttcggttcatgaactcatcatggattccaaactggatcatagccagtttttaattgcacccaaatgcaaatccgatgggaatgctatgaagaagtcaaaaagtgataacgaagctcgctgaccagtgtagtagggtgagaaatattagattaaatctcaaataacagagagattagagaatatgcaggtagttgataggctagaaacttaaaaagttcccagattttagaagttagtttcactaatacttgagagacttcagtcatgtctgactgaga

SEQ ID NO: 388596 - DNA, 643 bp, Homo sapiens
agggattaacatggtacataaaacactgcccaatgattggagtgcatagttttgccttcagttgttagtctctcattttaagaaatggtcaaagtatatattactttccgggcaagagtagaatgtacctaaaactcaaaaaaggaatttgcctacaaatataaaatctttcatatttgacaacccaagattgctttaaaagaacactagctccccaaagtgatttttatgcttatttaactgtagtttgcaaacagaaaaggcacatgttcttcacaatgacagagcatagccccagcaagaggtcaagggccaggattcaactgagatgttctgagtctacacacagggggctcaattctcccttcggttcatgaactcatcatggattccaaactggatcatagccagtttttaattgyacccaaatgcaaatccgatgggaatgctatgaagaagtcaaaaagtgataacgaagctcgctgaccagtgtagtagggtgagaaatattagattaaatctcaaataacagagagattagagaatatgcaggtagttgataggctagaaacttaaaaagttcccagattttagaagttagtttcactaatacttgagagacttcagtcatgtctgactgaga

SEQ ID NO: 388597 - DNA, 609 bp, Homo sapiens
aggctgttatcacactgtaatgaagctatcctctgccatcagcagcttggcttgtagaacctcatcagatatccctagtaggtcaactcctcaattgcacatttaaagcaaaggaccctacagggcacaagaaaaggctttgaacgattgactgtaatcttctttttaacatcacattttccccaggataacacctaattgctttgtaaatggtctttttttttttgcctttaataatcttgcacaaaaggcaattacagattttttatgtgtaaaatacattcttaggcctgtttctctcaatttttatttatgctgccaagtcatacaacttgtatactttgcagttactattcctcatcatcttccaagttacgtcttttattccttaagaattttcatgtgctttgaagaggtgaattactgggtgaccacatcaactgcatgaatgtggcttgctatcaaggtaggaaagaaagacttacacactttgaatgcaattgatgsaactctcaatatgtagatttctaagactaaagagcagccttgggtagagaatttggaaacggaaaaggcaggttgtttttgggaagaaaagcaagatgccaa

SEQ ID NO: 388598 - DNA, 583 bp, Homo sapiens
tataatctcagcactttggggccaaggtggaaggatctcttgaagccaggagtttgagcccaacccaggtaacatagttagaccttgtctctattaaaaaaaaaaaaattmgcgaggcgtgtggtgtgcacctgtagtcccagttacttgggaggctgaggtgggaggatcactcagacccaggagttctacgctgcaaggctgcagtgagctgtgatggcactgctgcactccagcctgggtaacagagtgagaccctgtctcaaaagaagaaaaaaaatagaaacaacaacaacaaaaaaacaaaagtcaactcaataatttcaattttgggtgctctgtttaatttgtaaaacagttgcttgttttctgagcttttgaaaagtaattatcgatgacctttattcactttgtattataggcttagaatttagatattgctattccaaaaggtattgctttctatgtcctggaattatcacagcttcctccagttggaggtggtcccttggttatttcttcatgactaatggtattggaaaataaaagaaagtatcacattttttctacccagtgatttttt

SEQ ID NO: 388599 - DNA, 583 bp, Homo sapiens
tataatctcagcactttggggccaaggtggaaggatctcttgaagccaggagtttgagcccaacccaggtaacatagttagaccttgtctctattaaaaaaaaaaaaattagcgaggcgtgtggtgtgcacctgtagtcccagttacttgggaggctgaggtgggaggatcactcagacccaggagttctacgctgcaaggctgcagtgagctgtgatggcactgctgcactccagcctgggtaacagagtgagaccctgtctcaaaagaagaaaaaaaatagaaacaacaacaacaaaaaaacaaaagtcaactcaataatttcaattttgggtgctctgtttaatttgtaaaacagttgcttgttttctgagcttttgaaaagtaattatcgatgacctttattcactttgtattataggcttagaatttagatattgctattccaaaaggtattgctttctatgtcctggaattatcacarcttcctccagttggaggtggtcccttggttatttcttcatgactaatggtattggaaaataaaagaaagtatcacattttttctacccagtgatttttt

SEQ ID NO: 388600 - DNA, 511 bp, Homo sapiens
ctaggacaacttttccttcagagccctcagaaggaattgaccttgctaatgccttggttttagatttctggtcttctgaacttaaaagtaaytaatttttattgttcaaagctaccacgtttataatattttgttatagcatccatagaaagcaaatgcagcatcccacacccgcacctgctcttataaggaaactcttactcctctattcccatagtgctataatatttaagtcttctgggatatgttagcctatagtaaccaaaacagcatggtactggtatgaaagtagacacacagaccaatggaacagaaaagtgaacccagaagtaaagccaaatactgacaaccaaataatcttccacaaagcagacaaaaacatatcctggggaaaagactccctatttaataaatggtactggggaaattggacagccacatgcagaagagtgaaactggatccctatctctcaccacatagaaaaattaactcgagataggttaaagactt

SEQ ID NO: 388601 - DNA, 579 bp, Homo sapiens
aagccatgagcatcatttctataagagagcccctcaggttatatgtcaccgagtgtcccacctatgaccacagactctgcttgccacatctctaggcattctgaaaaggacaaaaagagacccagctgaaagaagctayaattattcttgacattttagaacgcacctttgccatgttcagaatattctgtcacaggctttaaataagaactattacaggagaaagtctgggcagaagtctccttttgaaagagagctcacctgtttccagccttgcctcaaattgaaacagatttaacaactgattgaaaggtttttatttcaccctagtgaaatacattagtaactccttctagctttatgctggttaacttatgatgaagaaatgaaatggggaaatacaaattttttgttaagagactagaaagaaacaggtcactcaggctagtattaggtgcaagcttattaatgatatattttcttctttatacggctctgctttcttcagtttttcttcaatgggcatatgttacttttatattcaaaaaagttgtcaaaaaaagaaaaagaaagaaaaat

SEQ ID NO: 388602 - DNA, 591 bp, Homo sapiens
tgaaaggtttttatttcaccctagtgaaatacattagtaactccttctagctttatgctgrttaacttatgatgaagaaatgaaatggggaaatacaaattttttgttaagagactagaaagaaacaggtcactcaggctagtattaggtgcaagcttattaatgatatattttcttctttatacggctctgctttcttcagtttttcttcaatgggcatatgttacttttatattcaaaaaagttgtcaaaaaaagaaaaagaaagaaaaatattactattagtctttaacttgcaaaagtaattttaaaaaggcaaaatacagttactggttattgttggcttttttcttttttcttttttttttttttttttttttggtttatgaatgttcaattgctccagcaccacctgtttatctattttattttattttattttattttattttattttattttattttattttattttattttattttaaacagggcctcattctatcaccaaagctggagtgcaatggcacaatcatacctcactgcagcctcaaattcctgggcttagcctcctgccccagccccccaggt

SEQ ID NO: 388603 - DNA, 598 bp, Homo sapiens
atcaagctataacttgctttctaaaccttgatcactattgtgtcacagacactctgattttttttttttaacttcttgccttttaatattatctttgaatatagatggtttcaattctccagtaacaagatgtagagtggccaaatggtttttcatacatgtttccctagtccagacacccaagagtatgtccctttcttgggcataagaaaacctagagttatatttagggcatcatgtgtggtgaatagttgaccgagctggcatgctcacaatgaccaaattatgtttgtcatattttaatccaatacattgatctactatgaacttgtaaataatgtatttgctttctagacacattccaggaaaactagagaaactgacttttatccatatggaataatccactggccaatttcttttaggacagaccaaagctgatctaggacataatctttacatacttggatccttcmcatcagacgacaaagaacatctggggtgaaaggctccattagaagagcaatgtgggatggtgctgtgctgacaactggtagtccctaccctacatctttgtagaggactggagcccagagta

SEQ ID NO: 388604 - DNA, 598 bp, Homo sapiens
atcaagctataacttgctttctaaaccttgatcactattgtgtcacagacactctgattttttttttttaacttcttgccttttaatattatctttgaatatagatggtttcaattctccagtaacaagatgtagagtggccaaatggtttttcatacatgtttccctagtccagacacccaagagtatgtccctttcttgggcataagaaaacctagagttatatttagggcatcatgtgtggtgaatagttgaccgagctggcatgctcacaatgaccaaattatgtttgtcatattttaatccaatacattgatctactatgaacttgtaaataatgtatttgctttctagacacattccaggaaaactagagaaactgacttttatccatatggaataatccactggccaatttcttttaggacagaccaaagctgatctaggacataatctttacatacttggatccttcacatcagacracaaagaacatctggggtgaaaggctccattagaagagcaatgtgggatggtgctgtgctgacaactggtagtccctaccctacatctttgtagaggactggagcccagagta

SEQ ID NO: 388605 - DNA, 580 bp, Homo sapiens
aacaccatgatttttcaggccatgaccttggctggccttccgtattgaagaaaaaaaacaaagaagctctaccgggaccagagaatggttccagaaatcaaggattcaaaagtgcatcatagcctctaaagttaggcaaagttaacattagctatgttagaccacagagaaaatatgcctcatccagagatgcctacaacataaaaattgctcaataaggaaccattatcgccatcacagtttcagaactctgctaagtatatgtggcttaaagaacagtrggggaaaaaaacaaagagaattatgacactgcaggaggtgagtggaggtaagcaaagtgaggcacatgtcaaagtaaagataaataatagttctgacatgacatgttgatatggtttggctgtgtgtccccacccagatctcatcttgtagctcccataattcccacatgttgtgggagagacgtggtgggagatgactgaaacatgggggcgggtctttcctgtgctgttcttatgatagtaaatgggtctcaagaggtctgacggttttttaaaacaggagtttctctgcacaagct

SEQ ID NO: 388606 - DNA, 580 bp, Homo sapiens
aacaccatgatttttcaggccatgaccttggctggccttccgtattgaagaaaaaaaacaaagaagctctaccgggaccagagaatggttccagaaatcaaggattcaaaagtgcatcatagcctctaaagttaggcaaagttaacattagctatgttagaccacagagaaaatatgcctcatccagagatgcctacaacataaaaattgctcaataaggaaccattatcgccatcacagtttcagaactctgctaagtatatgtggcttaaagaacagtgggggaaaaaaacaaagagaattatgacactgcaggaggtgagtggaggtaagcaaagtgaggcacatgtcaaagtaaagataaataatagttytgacatgacatgttgatatggtttggctgtgtgtccccacccagatctcatcttgtagctcccataattcccacatgttgtgggagagacgtggtgggagatgactgaaacatgggggcgggtctttcctgtgctgttcttatgatagtaaatgggtctcaagaggtctgacggttttttaaaacaggagtttctctgcacaagct

SEQ ID NO: 388607 - DNA, 492 bp, Homo sapiens
tctacttttaatggcacgcggatttaatttcttccacactgccttgcgctgggatgccatccagtagaatgaccataacaaccatcagctcacatttggcctttgttgagataagtcctgttttgtagctcaaaggtaattttccctgtaaattcaattttatatcattggaataaaaacaagtgaataaatattaaagcatttaatggaaaaaaataattttcatggaattagataacacttgaagaattttcaacagagaaaaaaatcagaaataaagtttaaactcactgaatggagacaagaaaattaactgacatactgtataaagtacactgattgttaaataaccaaatatttatgttagaaggtgtggaaaaatactgaaaatctgaaagaaaagcaataaaaaccagccatggctctattatagccactattttggaaaatatccctcctactctgasatgtctgagatccatccaagttatt

SEQ ID NO: 388608 - DNA, 603 bp, Homo sapiens
cctttatatttgacagtctgtcttatttgctagtgtaatagtttagagttccctttgtgagaacagagactgaccacagacatgggatttcaaaataaggctttttatgtataagaaccacattgcagccrggcatggtggctcacacctgtaatcccagcactttgagaggccaaggcaggcggatcacttgaggtcaggagttcaagaccagcctggccaacatggtgaaactgcatctctactaaaaatacaaaaattagctgggcatggtggtgggtgcctgtaatcccagctactcaggaggctgaggcaggagaattgcttgaacctgggaggcagaggttgcggcgagctgagatggtgccactgcactccagcctaggcaatagagcgagactcagtctcaaaaaaaaaaaaaaaaaaaaaaaaagaaccacattgcaggtgagaaggagcagatggctatgagccagaggctgggacccactcccttgctgtatcaaaatagcaagatttcttttatacataagtataactcaagccctccccgctaaaaattgctttgtggtcagcctgagaaatgagattgtgtagtcatag

SEQ ID NO: 388609 - DNA, 585 bp, Homo sapiens
tttggacatccttatagcagcaccctactctactggtatcaaattactgtattagtccattctcacactgctgataaggacatacaagagactgggtaatttataaagcaaagatgtttagttgactcaccgttcagcatggctggggatgcctcaggaaacttmtaataatggcggaaggggaagcaaacatgtcctttttcaaatggtgacattaaggagaagtgccaagaaaaagggggccatctcctttaaaaccatcagatctcttgagaactcacacactattatgagaatggcagcatataggtaaccaccaccatgatttaattacctcccaccaggtccctcccatgacatgtggggattatgagaactacaattcacaatgagatttgggtggggacacagccaaaccacataagggcatttatagtgctatagatttccctcttaacactgccttagctgtatcccagagattctggtatgttgtatctttgttctcattagtttcaaacaacttcttgatgtctgccttaatttcttttttttatccaaaacttattcaggggcatattgttt

SEQ ID NO: 388610 - DNA, 585 bp, Homo sapiens
tttggacatccttatagcagcaccctactctactggtatcaaattactgtattagtccattctcacactgctgataaggacatacaagagactgggtaatttataaagcaaagatgtttagttgactcaccgttcagcatggctggggatgcctcaggaaacttctaataatggcggaaggggaagcaaacatgtcctttttcaaatggtgacattaaggagaagtgccaagaaaaagggggccatctcctttaaaaccatcagatctcttgagaactcacacactattatgagaatggcagcrtataggtaaccaccaccatgatttaattacctcccaccaggtccctcccatgacatgtggggattatgagaactacaattcacaatgagatttgggtggggacacagccaaaccacataagggcatttatagtgctatagatttccctcttaacactgccttagctgtatcccagagattctggtatgttgtatctttgttctcattagtttcaaacaacttcttgatgtctgccttaatttcttttttttatccaaaacttattcaggggcatattgttt

SEQ ID NO: 388611 - DNA, 561 bp, Homo sapiens
ggaagcaaacatgtcctttttcaaatggtgacattaaggagaagtgccaagaaaaagggggccatctcctttaaaaccatcagatctcttgagaactcacacactattatgagaatggcagcatataggtaaccaccaccatgatttaattacctcccaccaggtccctcccatgacatgtggggattatgagaactacaattcacaatgagatttgggtggggacacagccaaaccacataagggcatttatagtgctatagatttccctcttaacactgccttagctgtatcccagagattctggtatgytgtatctttgttctcattagtttcaaacaacttcttgatgtctgccttaatttcttttttttatccaaaacttattcaggggcatattgtttaattttcatgaaattgcatggttttgagcaatgtttttagtgttgacttctatttttattgcactgtgatctaagagtgtgtttggaatgattgtggttcttttgcattttctgaggattgttttatgtcatattgtgttcacttttaaagtatgtg

SEQ ID NO: 388612 - DNA, 561 bp, Homo sapiens
ggaagcaaacatgtcctttttcaaatggtgacattaaggagaagtgccaagaaaaagggggccatctcctttaaaaccatcagatctcttgagaactcacacactattatgagaatggcagcatataggtaaccaccaccatgatttaattacctcccaccaggtccctcccatgacatgtggggattatgagaactacaattcacaatgagatttgggtggggacacagccaaaccacataagggcatttatagtgctatagatttccctcttaacactgccttagctgtatcccagagattctggtatgttgtatctttgttctcattagtttcaaacaacttcttgwtgtctgccttaatttcttttttttatccaaaacttattcaggggcatattgtttaattttcatgaaattgcatggttttgagcaatgtttttagtgttgacttctatttttattgcactgtgatctaagagtgtgtttggaatgattgtggttcttttgcattttctgaggattgttttatgtcatattgtgttcacttttaaagtatgtg

SEQ ID NO: 388613 - DNA, 508 bp, Homo sapiens
tacaattcacaatgagatttgggtggggacacagccaaaccacataagggcatttatagtgctatagatttccctcttaacactgccttagctgtatcccagagattctggtatgttgtatctttgttctcattagtttcaaacaacttcttgatgtctgccttaatttcttttttttatccaaaacttattcaggggcatattgtttaattttcatraaattgcatggttttgagcaatgtttttagtgttgacttctatttttattgcactgtgatctaagagtgtgtttggaatgattgtggttcttttgcattttctgaggattgttttatgtcatattgtgttcacttttaaagtatgtgccatgtggtgatgagaagaatgtatattctgttgttttggggtagagagttctgtagaggtctatcagatccatctggtccaatgttgagttaaagtcctagataattttgttaattttctacctcaatgatctgtctgatac

SEQ ID NO: 388614 - DNA, 445 bp, Homo sapiens
tgggtttgtttatgtctttttaattcctrcactgtcattttggtgcatttggaagaaaatggaggttaatgcatgtgtttactttgtgatgtttaattgaaagttgaactcttctcaagtcgtttttctatatgtagattactatttatatacacacatgtgtatgcatatgctcatacgtttgctaaatgtatatatatattttacaaaattaggtgcaagctataagtcctgttacatggcttttttttctcatttagaattctatcattaacatttttatgtcattaaatattcttgaatgcttggacttttacatcaattaaattatatcatattgccatattattacttatttaattacgtccttacacttgggtgttgaaattgctttcagtctttcagtacagtaatactgtcgtgagatttttcacctaaatatttg

SEQ ID NO: 388615 - DNA, 445 bp, Homo sapiens
tgggtttgtttatgtctttttaattcctacactgtcattttggtgcatttggaagaaaatggaggttaatgcatgtgtttactttgtgatgtttaattgaaagttgaactcttctcaagtcgtttttctatatgtagattactatttatatacacacatgtgtatgcatatgctcatacgtttgctaaatgtatatatatattttacaaaattaggtgcaagctataagtcctgttacatggcttttttttctcatttagaattctatcattaacatttttatgtcattaaatattcttgaatgcttggacttttacatcaattaaattatatcatattgccrtattattacttatttaattacgtccttacacttgggtgttgaaattgctttcagtctttcagtacagtaatactgtcgtgagatttttcacctaaatatttg

SEQ ID NO: 388616 - DNA, 572 bp, Homo sapiens
atctgttcataaacatttttatattttccatatatgtatattataagcttttttatggagaaaggatattattctttacctggtacttacattttttcagtttttatttgctttcagaatttttgatgtctctgatgaatagttttaatttttatgttgtccattatagaaaactttatatcttcttttgcttttgaacttcaaaagttatttccctattcccaaatgagataaatattctcttgtatttttctagattttaatgatttgattttttattcttcttcatgttcaactctttatagttatgaattaattaattagctagttaattaatttttcattcaccatgtgaatagaatctaagtccattgttttttcaaatactatagttaatcagtrttccagaaccatgaattaatagtttagcctttctcccctcattaaaagtggggctgttctcatcaaatgcattctcatatatggtctattgatgttctttcttcttcttgtcattagcctgtctgtttttatgtcagtacaacactcttttaattattgtggctttacta

SEQ ID NO: 388617 - DNA, 611 bp, Homo sapiens
aggaagcctttttaaaagaaatagccagtgttgttaagcctgtactcagtaacctccatgccctcccttggataagtagcctcatctgggagaattttctgatttgcaccttattggctactacagcctcattgcatttccttggctgagagcagcagtttggagagagatgttatacacacaccgtcactaatggttactcacttggccacaaacactgcagagtgcccacatagggacaagcacccacaagactctcagattcaaaacatacttgcacatatacacataagtacagtggcaagaaaaggaggcctatcagaaaatccaatgacactagcaaaatgggttttaaaaktcaccagacctggagctctggtcctgtacatatgattctatgggctaaatacaaattactgggcttcggagctgatggtttatgtattaatttattaaagtcgtattttatagttctaaaattgacttttagctctgtaataaacactgaaatttcctctttctcattagtgagctttctggcaccagacttttggcaaggccgggggtgagaacctgcctctgccagccatctcctgacatgtgccttttct

SEQ ID NO: 388618 - DNA, 603 bp, Homo sapiens
tcagccctcatcactgggacactaaatggggctttagagtcacatgccacagccatcaatgtctctcacagacctgtagctgccacagttgagtgatctgctggctgaagggaaggccacccacaggtgacactcccaggacttccctgggcctaccatgttcaccttgagactgtttagactttgcatcaatgacagggcaagaggcagtgatgtttccatcctgttagaaaacagaggtctttaaaaaattttttccataggtttttggaaaacaggtggtatttgggtacatgactaagttatatagtggtratttctgagagtttggtgtacccatcaccctagcagtatacaccgtacccaatttgtagtattttatccctcacccccctcccaccctttccccgagtccccaaagtcattgtgtcattcttatgcctttgcatcctcagagcttagctcccacttatgagggagaatatatgatgtttggttttccactcctgagttccttcacttaggataatggtctccaattccatctaggtcactgcaaatgccattattttgttcctttttatggctgggtaatattccatg

SEQ ID NO: 388619 - DNA, 566 bp, Homo sapiens
accctttggtctgatatatctacattaactcagcattgtcagtgccttttagctcatgtggcttggccctgagtattttggtctcattcaggaatcaccatcttaatcaagaaaactaagcagaagcctcatatgaagaactttgtattagttaaggttctccagagaaatagaaccgacagaatatataaagatatataagaggagacttatggaaattggctcatgcaattatggaggccaggaagtcccccagtatgctgtctgcaagctggagaatcaggaaagccagtggtataatttagttcaagtcctaaagcctgagaactagaagaggtgatggctgatggtataactctcagtctgaggccaragtcctgagaacccaggatgagaaggtgtaagtctggaagtctgatagcccaacaaccagaagctccaatgcccatgcataggagaagagtcctagctcaagaaaagagagaaaaaatgaactcctctgcccttttgttctattctggtgctcgaacgattggattaagcttgcccacattggtagacttctt

SEQ ID NO: 388620 - DNA, 584 bp, Homo sapiens
ctggggctggaagcctagaaactacatcttactttctggcagggttccagctcagtcttcaccaatgacagaggcaaagactgggccctcaccagacactgagcctgctggcaccttgatcttaaacttggaattcccagcatccagaactatgagacataaatttaaaaatttacatatggcctttttttttttttttttgtgacagagtcactctgtcacccaggctggagtccagaggygctatgtcggctcaccacaacctccacctcccaggtttaagcgattctcctgcatcagcctcccaagaagctgggattacaggtgcctgccaccatatctggctaatttttgtattttcagtagagacgagttttcaccatgttgaccaggctggtctcaaactcctgacctcaggtgatctgcccgccttggcctcccaaagtgctgagattacaggcatgagccactgcacccagcctatgtatcacacattttgtggcattttgttacagcaatatgaatggacaagacggaaattaataccgagaagtagagtgttgtaacaaatacataaaatgtgg

SEQ ID NO: 388621 - DNA, 594 bp, Homo sapiens
tatttaaaatcacatgtttccacccaatcctgggtaggaaaactgaggtccagaggttcaagtcaacagagcaaggcagagacagaagtgttatgtccatgtgctaaaaggtggatgcctgggagtcatcagtgggtgccactgacttgagctgctttggttcaaatccccttcccagcacttccaacctctatgatgaagggcaagttgcttaatctcttcgtgcctcaattttccatctataaagtgggaacacatgttacctacactgcatagggttttgtgaaccataaaggaaacaaggctttaaagcacctggcacagaatgagtgctttataaatgctagctattactattctcaaagagagatatccctgttggtgggaatacaagtgacgtcataaaaatctaataatctaggagagtattgaccaatagaaacacaatgtgagccacrtatgcaattctaaattttctaataggcacatttaaaaaggtaaaaaagaaatgggttacttttaataatttatctaacccaatacatctaaaatataatcatttcaacatgtaatcaacataaacattattaataa

SEQ ID NO: 388622 - DNA, 610 bp, Homo sapiens
gttattatcacccttattttaaagaggaggaaactgaggcccagaatgtcaactctctcaaaagtgagttacagtaaatggaggagctgagatttgaattcaggccgtctggatccagaatctgtgccctgaaccactctctatttttcaattaatattttatgaaacgtgattttaaratgtatgtgtaattaaattgtatattagataccataagtggacttttgcctaattcaatcatctgtacacttaaaattgtatttattaaagttgcccgaaaacttttttttgaggagaggatgtcttctcactggaaaaatggaagaaatgctttacttttaatggagggttgatcctgtcagtttgttgaattgtctaagtctgtcagtgtctctgtaaatgcagatacagtgaacctgcatgttgttcggagtaaattctttgaaaaggaagcatcacaaaaacagtcgtgtgtcagcgacacatttaacaggaccacagagatgacgttcttcaagattcctctgtttcctgctgcttcaactttagccactcccagggcagccggagaggaagacgttgctgagaatcatcctgatcatggtgatgc

SEQ ID NO: 388623 - DNA, 601 bp, Homo sapiens
acctttgaatcttttacagggacaccataaagctggttactttatccccttccatccctgcagcttgtttggctgcagatatatttcacatgaagccccaggccacatcagatgacagcccaaaccgcagcccccaaagaccatccagaaatcctgctgcacgcttgggagttcaaaactgttttgattcggattcacaagaatcaccctgatttcctcctatgagtttttacataaatttctcaccgcagcttctctacaaccctggraggctcctccaggcaagccctgagaatagagctgtgccgcggttggccatatccacgtaccaggaatttgttgggaaacagcaaccagctcagtggtagaatcaatgaaaatttttatatcctcctttatcatttcctattttggggggaaaaactatgtaagatagggaaactctgttgtctagccattactgaaatcttaggagaaatgatgttgacaggatgagcttaaaggaaattcattccactggacttcccccaagtaatcgacagctggctatggggtcaaactaaacagatcactgagagtcacatacttgatctcagccata

SEQ ID NO: 388624 - DNA, 601 bp, Homo sapiens
acctttgaatcttttacagggacaccataaagctggttactttatccccttccatccctgcagcttgtttggctgcagatatatttcacatgaagccccaggccacatcagatgacagcccaaaccgcagcccccaaagaccatccagaaatcctgctgcacgcttgggagttcaaaactgttttgattcggattcacaagaatcaccctgatttcctcctatgagtttttacataaatttctcaccgcagcttctctacaaccctgggaggctcctccaggcaagccctgagaatagagctgtgccgcggttggccatatccaygtaccaggaatttgttgggaaacagcaaccagctcagtggtagaatcaatgaaaatttttatatcctcctttatcatttcctattttggggggaaaaactatgtaagatagggaaactctgttgtctagccattactgaaatcttaggagaaatgatgttgacaggatgagcttaaaggaaattcattccactggacttcccccaagtaatcgacagctggctatggggtcaaactaaacagatcactgagagtcacatacttgatctcagccata

SEQ ID NO: 388625 - DNA, 597 bp, Homo sapiens
ttaattaaactgagcaatcattaaactggatttaagagtgcttgtgtttgcaaaacaacaaaatatttacagacattttcttcatccccttcattagtttcagactccacaggaaatatggaggttgggaacaggtcctaatgagatcatgcaaattttaactactgaggttagcctggcaaagagacagcacggcaaaatgctcatgatgaaatgttaagtgaggaaagcaggatagaaaatgagcttgcactaacattatgagtgattccgataattataagcatggtagggggatgacaagcaggggctggacattaaaatattctatcagtgatggtacaagagcgatggaattaggggattattttcatctctgttttccaaaatttctgaaatatatgagtgtattacttttatttctttcaaaataagaaggtacactaaagcaagaccatcacttgaggccaggagtccaagacaagcctgggcaacatagtgagatacctacagaaaatgtagacytccaaacagtgagatctctataaaaatgtagatctcaacatagtgagatctctacaaaaaatgttaaaagtt

SEQ ID NO: 388626 - DNA, 597 bp, Homo sapiens
ttaattaaactgagcaatcattaaactggatttaagagtgcttgtgtttgcaaaacaacaaaatatttacagacattttcttcatccccttcattagtttcagactccacaggaaatatggaggttgggaacaggtcctaatgagatcatgcaaattttaactactgaggttagcctggcaaagagacagcacggcaaaatgctcatgatgaaatgttaagtgaggaaagcaggatagaaaatgagcttgcactaacattatgagtgattccgataattataagcatggtagggggatgacaagcaggggctggacattaaaatattctatcagtgatggtacaagagcgatggaattaggggattattttcatctctgttttccaaaatttctgaaatatatgagtgtattacttttatttctttcaaaataagaaggtacactaaagcaagaccatcacttgaggccaggagtccaagacaagcctgggcaacatagtgagatacctacagaaaatgtagacctccamacagtgagatctctataaaaatgtagatctcaacatagtgagatctctacaaaaaatgttaaaagtt

SEQ ID NO: 388627 - DNA, 506 bp, Homo sapiens
gggcatctgtttcttctttttagattttgtgaatatcccatactcagattcactacatctacttgcaggtatttacttttctgatgagaaggtagtccctattttcatttatcttactcaatttagaagacagtccygaagattttgctacgattagagaaagttaacctcctccataacccccttcctttgctttgtttatacccccatcccggccccaagccattttttcttattacttaatcatatgagagaaaggataatgatacccagtaaacttgattttctctagatgtttggtattgaggaatccccaaactatgttactaatatgctttttggtgggtggggaaaaagatttagaagcctagctatacctctccacatcactctgtgtctcctgtttctttccatacttaccagtgtttaaaacttgcatttgatagttttctttcccttgttttggtgttgtggtgaattttatttatttttcttttcttgtattc

SEQ ID NO: 388628 - DNA, 365 bp, Homo sapiens
cactacatctacttgcaggtatttacttttctgatgagaaggtagtccctattttcatttatcttactcaatttagaagacagtcctgaagattttgctacsattagagaaagttaacctcctccataacccccttcctttgctttgtttatacccccatcccggccccaagccattttttcttattacttaatcatatgagagaaaggataatgatacccagtaaacttgattttctctagatgtttggtattgaggaatccccaaactatgttactaatatgctttttggtgggtggggaaaaagatttagaagcctagctatacctctccacatcactctgtgtctcctgtttctttccata

SEQ ID NO: 388629 - DNA, 633 bp, Homo sapiens
ggcaagggctcataatatggtttgtccttaggcaacagactggctttttatctgtggtttcattttatcaacagtttttgggctgagcgcagtgactcacatctgtaatcccaacactttgggaggctgaggcggatggatcacatgagttcaagacaagcctggccaacatggcgaaaccctgtctctactaaaaatacaaaarcagcagggcgtggtggtgggcacttgtaatcccagctactcgggaggctgaggcaggagaatcgcttgaacccaggaggcagaagttgcagtgagccaagatcatgctactgcactccaacctgttcaacaagagcgaaactccgtctcaacaaacaaacaaacaaaacagtttacgtgagggcctggtactccaaagctgccacccagtttggaaaaagtgttcctttttccctcttacttctccgaaaggacagatggatatctgtctagggtgcaaatgtgaacaccaagagccacctttgacccctctttccctcagtccccaatcctatcccgttttcctcctaaatgtctgctgaaattattctattttctcctttgccaccaggataccatcatctctttcctggcagtcactcttcactg

SEQ ID NO: 388630 - DNA, 633 bp, Homo sapiens
ggcaagggctcataatatggtttgtccttaggcaacagactggctttttatctgtggtttcattttatcaacagtttttgggctgagcgcagtgactcacatctgtaatcccaacactttgggaggctgaggcggatggatcacatgagttcaagacaagcctggccaacatggcgaaaccctgtctctactaaaaatacaaaagcagcagggcgtggtggtggrcacttgtaatcccagctactcgggaggctgaggcaggagaatcgcttgaacccaggaggcagaagttgcagtgagccaagatcatgctactgcactccaacctgttcaacaagagcgaaactccgtctcaacaaacaaacaaacaaaacagtttacgtgagggcctggtactccaaagctgccacccagtttggaaaaagtgttcctttttccctcttacttctccgaaaggacagatggatatctgtctagggtgcaaatgtgaacaccaagagccacctttgacccctctttccctcagtccccaatcctatcccgttttcctcctaaatgtctgctgaaattattctattttctcctttgccaccaggataccatcatctctttcctggcagtcactcttcactg

SEQ ID NO: 388631 - DNA, 555 bp, Homo sapiens
ttctctccttgaatttacatgcctagaagcctccagcttcctagtttaatatcgcctgtgttctctttagatcccagacacatcacttgttttggaatttcckgctacctctctcctttttctaggtcccatgagttctttttttgtgtggggtttactttctcattctattagagcatggtatataggagcttcctgagaaaagttatatttgaaggtaaaaaataatttaaatatcttgcctagcagataatcattttatgttatccttacatttgattgacagtttggctggatataaagttctggtaggctataattttttctcagaattatttttttaattgacatggagtaactttccctccttttggtacacatatatagttttatgggtttagacaaatgtgtagaatcatatatccattactctagtacatacagaagagattcagccctccaaagaaattaacatctgggaaaaggaaaaagggtggtggggtacggtgaattaaagaataaaagattgatcagattattggaagagaaacccca

SEQ ID NO: 388632 - DNA, 482 bp, Homo sapiens
tgtttgctcaaattttttgcccgtttaaaaaattgagctgttattaagctttgagagttctttatatatccaaatataagcattttgtcagatctgggatttttaatttttttttcccagcctatggcttgtctttttattctcttaccagtatcttttacagagcaaaatattttaatttcgatgaagtctaacatcagttttttacttttatggatgatgacactaagacgtgtcttatttaacaatttttagcctagtccaaggccacaaagattttttcctgtttttgattttatattttacatttaggtttatgttccattttgagtaaacttttacatatagtgagaggtataggtcaagggtcctcctttcttccccccgctcygtgtgaatgtctaattgttctggtactatttgttgaaaagcctgtcctttctccactgaattatctttctaactttgtcaatccctcagaa

SEQ ID NO: 388633 - DNA, 558 bp, Homo sapiens
tccactgaattatctttctaactttgtcaatccctcagaatttcacagatgttggctgtgttgtcttctgatttcccttcacaatattgagaagtccagtgccattctgattccttatcttttatatgagacatatgtctgcttttatcttgtaaatgtttagtctttttttccttaaatgagatggggcctcgctttgtcatctagtgtggagtgcagagatgtgatcatagctcactgcatccttgagctcctgggctcaatcaatccatcctcctgcctcagccttytgagtagctgagactataggcacatgccccactttatttattttatttatttatttattttttcagagatggggggtctcgctatgttatccaggctgctctcaaattcttgggctcaggcgatcctcttgtctcagcctctcgtagtgttggcatttacaagcatgaaccttcatgcttggccaagtttttttttttttcttttaatttcagtgttttgaggtttcataatgactttaggtttttttttaagttatactgcatgact

SEQ ID NO: 388634 - DNA, 558 bp, Homo sapiens
tccactgaattatctttctaactttgtcaatccctcagaatttcacagatgttggctgtgttgtcttctgatttcccttcacaatattgagaagtccagtgccattctgattccttatcttttatatgagacatatgtctgcttttatcttgtaaatgtttagtctttttttccttaaatgagatggggcctcgctttgtcatctagtgtggagtgcagagatgtgatcatagctcactgcatccttgagctcctgggctcaatcaatccatcctcctgcctcagccttctgagtagctgagactataggcacatgccccactttatttattttatttatttatttattttttcagagatggggggtctcgctatgttatccaggctgctctcaaattcttgggctcaggcgatcctcttgtctcagcctctcrtagtgttggcatttacaagcatgaaccttcatgcttggccaagtttttttttttttcttttaatttcagtgttttgaggtttcataatgactttaggtttttttttaagttatactgcatgact

SEQ ID NO: 388635 - DNA, 571 bp, Homo sapiens
gcaaccaacagcaaatcataagcagcatagacccaagcagaaatcacaaacagttaaatggctgggaaaatacatttactcaaatggcgatgcaatttggagttgtgtcttaagtgttgtactgtgaaatttcaattaggagctaagtgctgtgaaatgggctgtgctcaaggactttggccaaccgttagatgtgcactacaattttccaagacagagcgagtgagatcagggtgagcatggtatattgtttgggttacattgaaacgttttgatgcctttcaagatgtgtgttttctaccacgggaggagagatgggtgcacttattcatacacttgcacaaaatgtacaagatgttggtgtaaagtgtcacactggaagtaaaacaagatatgagttcccagcaatgcggcacactcaaattcccttaatgagaagaaagaaaaagacttcattatggtcccttccrgtaggtttatcatctgaaacacaaagtgaaggcaggtgggaagagcacattgttttactgtagataaaaacactcctaaaagcagctgctccagaacagag

SEQ ID NO: 388636 - DNA, 572 bp, Homo sapiens
ttccttctgttgacttaatcatgtgatgaattagttaaaagaatataaattaaaatagtaayagatgataacagtagtttcaatttttaacatttacatctattaatgcactttcacattcatgatctaatttaattctcaaaacatgattgcttgtctttttcatatgaagacagtcaaagaaactaaatgacgtgcttgaaatcgtggctaatgcaggttagccaggtctcacaaccacagctgcgacttcctagtagggaaaattttagctgacacacatagtcaagaggaaaaaaaaaaatggaagtgacttttacaaataaaaatcaatactactgattctaccaggaaagagaatcaccaaaaaagcacaaatgaattaatttttcccttctacagacatttttgtagcaacttagcactttccagggaatattttttgcacatgcaggatcattaacaagatttagcttcttctcatggcatttactcccctcgaattaggaattttgactgaaacagaatctgtaaagggagtgttgtttgttttattggaaacctgactctga

SEQ ID NO: 388637 - DNA, 572 bp, Homo sapiens
ttccttctgttgacttaatcatgtgatgaattagttaaaagaatataaattaaaatagtaatagatgataacagtagtttcaatttttaacatttacatctattaatgcactttcacattcatgatctaatttaattctcaaaacatgattgcttgtctttttcatatgaagacagtcaaagaaactaaatgacgtgcttgaaatcgtgkctaatgcaggttagccaggtctcacaaccacagctgcgacttcctagtagggaaaattttagctgacacacatagtcaagaggaaaaaaaaaaatggaagtgacttttacaaataaaaatcaatactactgattctaccaggaaagagaatcaccaaaaaagcacaaatgaattaatttttcccttctacagacatttttgtagcaacttagcactttccagggaatattttttgcacatgcaggatcattaacaagatttagcttcttctcatggcatttactcccctcgaattaggaattttgactgaaacagaatctgtaaagggagtgttgtttgttttattggaaacctgactctga

SEQ ID NO: 388638 - DNA, 572 bp, Homo sapiens
ttccttctgttgacttaatcatgtgatgaattagttaaaagaatataaattaaaatagtaatagatgataacagtagtttcaatttttaacatttacatctattaatgcactttcacattcatgatctaatttaattctcaaaacatgattgcttgtctttttcatatgaagacagtcaaagaaactaaatgacgtgcttgaaatcgtggctaatgcaggttagccaggtctcamaaccacagctgcgacttcctagtagggaaaattttagctgacacacatagtcaagaggaaaaaaaaaaatggaagtgacttttacaaataaaaatcaatactactgattctaccaggaaagagaatcaccaaaaaagcacaaatgaattaatttttcccttctacagacatttttgtagcaacttagcactttccagggaatattttttgcacatgcaggatcattaacaagatttagcttcttctcatggcatttactcccctcgaattaggaattttgactgaaacagaatctgtaaagggagtgttgtttgttttattggaaacctgactctga

SEQ ID NO: 388639 - DNA, 567 bp, Homo sapiens
tgggagtttgagaccggactgacaaacatggagaaaccccatctctactaaaaatacaaaattagctgggcattgtggtgcatgcctgtaatcccagctactcagaaggctgaggcaggagaattgcttgaaccttggaggcagaggttatggtaagccgagattgtgccattgcactccaagctgggcaacaagagtgaaactaaaaaaaaaaaaaaamaaaactcttctaattgatgaacaaaaaacttcccttcatttattgaggtctttcatttctctcagcaaagattcaaagaatctttaatctcttgaagtttgtaattttaatttttgtttctgtttcataaaagagaaataaattcacatgccattatccctggagccaaaaaccttaccctaccttttcaaagtcatcaccattgcttacttggggaaaataatttcaatcttcctttcagctacaatttgcctacaagtgaagtgggttttttttcttgctccacagagatgttgtaagttcaattatttatcataattattttaaaatccaaggtgtcattgtat

SEQ ID NO: 388640 - DNA, 545 bp, Homo sapiens
gggagccggtggtgtggctcagtccaartactgaggtctgagagccagggaagccaaaggtttaactctcagtccaaggtcaaaggcctgagaacccggtgggccacagctgtaaatcttggtgtgtgaaggctagagaatctggagtgctgatgtccaaggcaggagacgatggatggtccactccagaaaagaaggtggttcacctttcctctgccttcttgttctatccaggccctcggttgattggatggtgcctacccacatcagatgagggcagatcttccttcctcagtccgttgattcaaatgctagtctcttctggaaacactctcactaaacagacccagaaattgcatgagcgtcatggttcatgcctgtaatcccagcactttgggaggtcaaggcaggaggatcacttgagcccaggagtttgagaccagcctggacattttagcgagacccatcttcacaaaaagtaaaaaaattaaccaggtgtggtggcatgcgcctgtggtccacactaatcaggaggctgaggcggg

SEQ ID NO: 388641 - DNA, 545 bp, Homo sapiens
gggagccggtggtgtggctcagtccaaatactgaggtctgagagccagggaagccaaaggtttaactctcagtccaaggtcaaaggcctgagaacccggtgggccacagctgtaaatcttggtgtgtgaaggctagagaayctggagtgctgatgtccaaggcaggagacgatggatggtccactccagaaaagaaggtggttcacctttcctctgccttcttgttctatccaggccctcggttgattggatggtgcctacccacatcagatgagggcagatcttccttcctcagtccgttgattcaaatgctagtctcttctggaaacactctcactaaacagacccagaaattgcatgagcgtcatggttcatgcctgtaatcccagcactttgggaggtcaaggcaggaggatcacttgagcccaggagtttgagaccagcctggacattttagcgagacccatcttcacaaaaagtaaaaaaattaaccaggtgtggtggcatgcgcctgtggtccacactaatcaggaggctgaggcggg

SEQ ID NO: 388642 - DNA, 545 bp, Homo sapiens
gggagccggtggtgtggctcagtccaaatactgaggtctgagagccagggaagccaaaggtttaactctcagtccaaggtcaaaggcctgagaacccggtgggccacagctgtaaatcttggtgtgtgaaggctagagaatctggagtgctgatgtccaaggcaggagacgatggatggtccactccagaaaagaaggtggttcacctttcctctgccttcttgttctatccaggccctcrgttgattggatggtgcctacccacatcagatgagggcagatcttccttcctcagtccgttgattcaaatgctagtctcttctggaaacactctcactaaacagacccagaaattgcatgagcgtcatggttcatgcctgtaatcccagcactttgggaggtcaaggcaggaggatcacttgagcccaggagtttgagaccagcctggacattttagcgagacccatcttcacaaaaagtaaaaaaattaaccaggtgtggtggcatgcgcctgtggtccacactaatcaggaggctgaggcggg

SEQ ID NO: 388643 - DNA, 389 bp, Homo sapiens
gcaatacttaaatattgatataaagtcaaaatttttttttcttaatagagataggggtctctctaggttgcccaggctggtttcaaactcctgacctcaagctattctcctgcctcaatctgccaaagtgttaggattacagamgtgagccaaggcacctggctcaatatatcttatagttacatgatgagggaatgagagaggaaagaaaacagatatatcatttgcttgatatatttatatatacacacaaacatgttctttttttttttttttttttgacacaaggactcacactgacgcccaggctggtgtgcagtggtgtgatctcagctcactgcagtcttgacttcccgggcttagtacagactgtgtctcactatgttgtg

SEQ ID NO: 388644 - DNA, 389 bp, Homo sapiens
gcaatacttaaatattgatataaagtcaaaatttttttttcttaatagagataggggtctctctaggttgcccaggctggtttcaaactcctgacctcaagctattctcctgcctcaatctgccaaagtgttaggattacagacgtgagccaaggcacctggctcaatatatcttatagttacatgatgagggaatgagagaggaaagaaaacagatatatcatttgcttgatatatttatatatacacacaaacatgttctttttttttttttttttttgacrcaaggactcacactgacgcccaggctggtgtgcagtggtgtgatctcagctcactgcagtcttgacttcccgggcttagtacagactgtgtctcactatgttgtg

SEQ ID NO: 388645 - DNA, 543 bp, Homo sapiens
tgttggccagtcacattagctctgcctggaagacgtacttccaatttgtccatgtctgtctatccaatgccaggtgtaagccacctcttaatttacacctctcctgctccaactctgctcggaatcaattttctatctattaaaagagcatataagatcttctcatctcacgcctctctgcttggggcagcccatggctccctattgcasttggagcaaatccagagacttgtcctttccaaaggctagtgaagccctaaatgctggccactctgctgctcctcatggctaccctctcctgcatccagacctgctcttgaccccagactgacatcaccactgccagcacgactcctgctcctgagggctggtgggcacctccagttctgcctcatcttctgtcttcccaactcactagatgaaacttgggtttttagctgttgggccaccctcacctcctctcttgcacatcccacaaccattccaacagcatgtcccgcatgctctgaggaggctatgtcccacatccaccatggccaccca

SEQ ID NO: 388646 - DNA, 613 bp, Homo sapiens
cattggcacagaacccttaaaaggaaaatacaaaagaaacattccctttgtatcttggtgttttactagtgagttatttcccctaagtacttccagtagatgtaactgtaactctgccatacagtccagcagttaatataagcttatctttttcaatgcacagggatagatttattgagctgataatatttgctcactcttcttttcagtggtgatttatttaaactctccagctaatttaaatttaataaaaaaggaaccttgtacattgctttattgaagctagattcatctccaaaaacactgcagtattcaagattgtgcaaaagtggcaataactgttactggatttaattaaaaacaacaaatcatttggtcagtggtaatggatgctctgtacarcccattggatacatggtaatttaagaaactgatatcttaatcttaaaatgttggattagacaagaccctggagccgatggccctgctcccgctttgctcaacatggtaccatttcatccgcaatggctttcctttgatgttgggaccgcaagggttgactggccagcggggagatgaggctggcttctaccttcctttaatttggtgttgg

SEQ ID NO: 388647 - DNA, 568 bp, Homo sapiens
ttcttttgtagcttacggtctgtgattttgtttatgcctcctgccaaatgtactattacaagagtagaacattacatgctcaatggcttaaaaggccaaggagggtggaacatgagcacgagtcccatgtagcacccagtgaaagacgttcagggcatggaacaagctcctctaacaggaagmgtgagacttcaccagcgagccgagctgtgctgctctgcgtttgctgcaggtggagaggtgtcttctttatcagccgtgaagctggcagtcaaaggagccatgcattaagttgctccgagtgggagagcaggggccaggggagtctggctctgggggctgtgatgaggacaagcactcagctgtgggccagaggagactctccttatttcacagagggtctttcaggttctttggcatccatcagagaatcctactgcatagaagtataaggatttcttaagaaaatcatcccactattttctcttcttcaaaatggggagggaattgtgactaccttgaagagaaagtaccttgcctatgggggacacacttgaatggtgaacgt

SEQ ID NO: 388648 - DNA, 568 bp, Homo sapiens
ttcttttgtagcttacggtctgtgattttgtttatgcctcctgccaaatgtactattacaagagtagaacattacatgctcaatggcttaaaaggccaaggagggtggaacatgagcacgagtcccatgtagcacccagtgaaagacgttcagggcatggaacaagctcctctaacaggaagcgygagacttcaccagcgagccgagctgtgctgctctgcgtttgctgcaggtggagaggtgtcttctttatcagccgtgaagctggcagtcaaaggagccatgcattaagttgctccgagtgggagagcaggggccaggggagtctggctctgggggctgtgatgaggacaagcactcagctgtgggccagaggagactctccttatttcacagagggtctttcaggttctttggcatccatcagagaatcctactgcatagaagtataaggatttcttaagaaaatcatcccactattttctcttcttcaaaatggggagggaattgtgactaccttgaagagaaagtaccttgcctatgggggacacacttgaatggtgaacgt

SEQ ID NO: 388649 - DNA, 568 bp, Homo sapiens
ttcttttgtagcttacggtctgtgattttgtttatgcctcctgccaaatgtactattacaagagtagaacattacatgctcaatggcttaaaaggccaaggagggtggaacatgagcacgagtcccatgtagcacccagtgaaagacgttcagggcatggaacaagctcctctaacaggaagcgtgagacttcaccagcgagccgagctgtgctgctctgcgtttgctgcaggtggagaggtgtcttctttatcagccgtgaagctggcagtcaaaggagccatgcattaagttgctccgagtgggagagcaggggccaggggaktctggctctgggggctgtgatgaggacaagcactcagctgtgggccagaggagactctccttatttcacagagggtctttcaggttctttggcatccatcagagaatcctactgcatagaagtataaggatttcttaagaaaatcatcccactattttctcttcttcaaaatggggagggaattgtgactaccttgaagagaaagtaccttgcctatgggggacacacttgaatggtgaacgt

SEQ ID NO: 388650 - DNA, 568 bp, Homo sapiens
ttcttttgtagcttacggtctgtgattttgtttatgcctcctgccaaatgtactattacaagagtagaacattacatgctcaatggcttaaaaggccaaggagggtggaacatgagcacgagtcccatgtagcacccagtgaaagacgttcagggcatggaacaagctcctctaacaggaagcgtgagacttcaccagcgagccgagctgtgctgctctgcgtttgctgcaggtggagaggtgtcttctttatcagccgtgaagctggcagtcaaaggagccatgcattaagttgctccgagtgggagagcaggggccaggggagtctggctctgggggctgtgatgaggacaagcactcrgctgtgggccagaggagactctccttatttcacagagggtctttcaggttctttggcatccatcagagaatcctactgcatagaagtataaggatttcttaagaaaatcatcccactattttctcttcttcaaaatggggagggaattgtgactaccttgaagagaaagtaccttgcctatgggggacacacttgaatggtgaacgt

SEQ ID NO: 388651 - DNA, 540 bp, Homo sapiens
cctgtctccaaaaaaaaagagaaaatttactaagtgggtagatcttatgttaagtgctcttatcacaaatagtaataataataattaataaacagggcaggaggaaacttttggagttggtaaatatgtttatggcataaattgtcatgatgatttcataggtacataattatctccaaattcatcaagttgtgtacagtaaatttgtacagctctttgtttatcagtcatacttctrtaaagtggctttttaaaagcagagagagaattctgatagccaaccatgggatgggaaagaagggagagacaagagatggaggcaccaatgaaggtgctcatctgtctacagatgcatgacgcagcctacatctgtgggctgagcatgtccttaagcaaacctggttcatgtaccagtctgcacaggtgtaatttcacaacagaatcactgcagccatgtcagctacaggaatgaaacagaggcacttcaccttttgtactctgcatgggtaaagcctcttctgtgttaattttggttgtcac

SEQ ID NO: 388652 - DNA, 509 bp, Homo sapiens
ccctttgctaacatttgctattttttttctttttgataatagccatttaaactagggtgggatggtgtctcattttggctttgagttgtatttccctgatgattagtgatgttgaacattttttccatatacacattgattatttgtcttcttttgtgaaatatgtattcagatcatttgcccatttttaaatcagattattttaatttcactattaagttgagttccttaatattctggttattaatcctttggcagatggatagtttacacatattttctcccrttctgtaggttatcttttctctctgttggttgttttctttgctgtgcagaaattttagcttgatataatcccatttgtctatttttacttttcttttttctgagacagggtctcactctgttgcccaagctggagtgcagtggtgtgatcacaactcactgcagcctcaacctcctgggctcaactaatcctcccacctcagtctcctgagcagctgggacta

SEQ ID NO: 388653 - DNA, 643 bp, Homo sapiens
cattctgcttgaagctgcagtgaagggaactcagaacctgacaagtcagcaaaaggaaattcatagaaagaatattgacaagtacttgtgaacacagatttctcataactttcaagataataccattggaataggtaaaaactttcaggacttcagttaaaaagctgatgtgggcctggtgtgtggctcatgccagtaatcctagcactttgggagactaaggctggtggatcacttgagcccaggagttcaagacagcttgggcaacatggcaaaaccctgtctctactaaaagtagaaaaattagacaagcatggtgtcccatgcctgtagtcccagctacttgggaggctgaggtgggagaattacatgagcccaggaggtggagattgagctgaggtgagctgagattccgccattgtactccaacctggaccacagagcgagactctgtctcaaaatcatmataataataataataatagtaataagaaaaagttgatgtgcttatgaggattgctaacccaacatcaagcagaacaaaagttaattacatgggactgaactgatagaagactgaaatgctttttatgacttttttggttgaaacattactgattctttttatattttgttttcagag

SEQ ID NO: 388654 - DNA, 583 bp, Homo sapiens
gtgaatttgaatttggtaacagaaaaagtataaaattactctatttcataaaagaaacagaaatgatcttttgtctttttcatgtataaatttggctgtgacccacagaagtatgaagatatggtttccacaccaatgttaggccttctcaaggagcttagagtgtgtcggtggagagggagaagcccaacgggagatcttattccacctctgcacgtcttcaggacccctgtggaaacatgtgatctctaacagtctctctggggctctgcccacccccagcagtgtcacctcacatcaccgcacaataagaactttctcatcatgaacatagctttctctggagaagctgggaagtgcttaactatgccagaagctggacaattcaggtagaagtgtaaatgttggcctaaccttcaaaggacagaaatagctttctttgaaagttctcaaaggtgwttcagaactctggaaaattttaaatcttaaaataacactacaattgtccatttgtcttggggatgcctgtgcggagtgagagtgaatccctaaatttgactttccgtctctcctccactgcagg

SEQ ID NO: 388655 - DNA, 442 bp, Homo sapiens
atcaatgtggcttcatcaatcataaagaaatgtgccactctgctggaaatatggacggtaggggaggctatgcttgtgtgggggcggagaagatgttgggaccctctgctcatcttgctgtgaacctaaaactgctgtaaaaagataaaatatttttttaaaatgagattttattgataaatagaacgtgctagagaaattgttatgtgcccattaagtgggaggtatgttatgcagaaatgccagccacataatttgaccctctcatgatttcttattcctgcaaagacggatgtggctcatagcttggtccacccagtgcaggaacratatgaataagtatttccattctagcctaaatgccttccccataatgcttccaaatcctttatttcctttcccaactcaaaagcagtaaattgaaggtagcaattttaggatc

SEQ ID NO: 388656 - DNA, 584 bp, Homo sapiens
cagcttttacaaaaaagttggaaatttgcctccttgggaagctccaatccttggaaatgcaatcttgaaaatataatataaaacataaatatayttcactaagtctggtcatatttgctactaaaattagagagaacaatgtaatttttgtctatcctaggtaacttatgtcacaagattatatttttcttttcttataacttgaaattatcacttttggtgggtttatcttctttctgaaatcagagatttagagtgtgagatagattatactgccggtcttgatgaaattaagttgccatgctgtgaaagcaccaagtaggtaggactcaagggttagcactagaagccaattttgatccctgggccaaaagctagtaggaaagtagagattttagtcctacaactgtaagaaactgaattctgtcaacaaccacatgttctagggatagggcccaagccttaaatgggaacaagccctggccaagagttagatttcaggcttgtgagaccctaagcacaatgcgtgctaattttgtgcccagaattcaaactcagagaatggggagatcataactacgtat

SEQ ID NO: 388657 - DNA, 584 bp, Homo sapiens
cagcttttacaaaaaagttggaaatttgcctccttgggaagctccaatccttggaaatgcaatcttgaaaatataatataaaacataaatatatttcactaagtctggtcatatttgctactaaaattagagagaacaatgtaatttttgtctatcctaggyaacttatgtcacaagattatatttttcttttcttataacttgaaattatcacttttggtgggtttatcttctttctgaaatcagagatttagagtgtgagatagattatactgccggtcttgatgaaattaagttgccatgctgtgaaagcaccaagtaggtaggactcaagggttagcactagaagccaattttgatccctgggccaaaagctagtaggaaagtagagattttagtcctacaactgtaagaaactgaattctgtcaacaaccacatgttctagggatagggcccaagccttaaatgggaacaagccctggccaagagttagatttcaggcttgtgagaccctaagcacaatgcgtgctaattttgtgcccagaattcaaactcagagaatggggagatcataactacgtat

SEQ ID NO: 388658 - DNA, 573 bp, Homo sapiens
gttagtatgataatacagctaatataataatacagctagtaatgatcaagttgaagtccatgaccttgtgaatcttcttttattaaaggaaccatttggtagatgtttaaggaatataaattccatctcgttcaagagaaaataaaacttggtagaagacagatcctgaatatattgtaatcagtagagatcaatataaataacatttttgtgaggtttcacctgttaaaccaaaagctggttataattctttttcccaaaatgaagattctgcaaatcaagactcaagacttagctgcttcagcttcagtgacatttagtgagagctgacaattagaaaagtctagcgaatcaaaccaacacatcaccaagttatctttatagattcacttagaaggtattttctggagtacttgtatttaagctggatctaaatttatactgaactcttcaacatcaagttacataataaattatcatgtaaaaaatgaakaatagctttgtaagatacattttccataaagtaagtatattcagggtaccatgtgactaagaacaagtatattttgccag

SEQ ID NO: 388659 - DNA, 568 bp, Homo sapiens
aagtatattcagggtaccatgtgactaagaacaagtatattttgccagtgcagtgaattcagaaatttatttttttaacttgcagcaaagattgcatttttagatattttagatgtacagaaatatacaaaggtaatagaaaaaaacattgacctcagtaattgcaaacaccagcaaaacactgaaattcccttgtgaattatctccaaattataacctctctccttatgtctataattagtaatcatctttaatatagtgttaactatccatattaaattacatttatacttcatgcttatatttatactataaatttctcctaatgacatatttcttgcatatttttaaaattttrtaattggtttatactctaagtattctgtaaatccaaaattcattacaccatgtttataaaattaattccagtcatacgtgaagttgttatttttattatttaatgggtaatatataaaaataaatttataatgcacgtatgcatgttataattaatagtaatattaacaaaattatgattatagtacccaactaaagaaatgaaatatta

SEQ ID NO: 388660 - DNA, 456 bp, Homo sapiens
gaataatcttctaccttttatttccttcaagtacaactggaaaaccctgggcgttatatataaaacagactctaaaatgtggagagaagaaagcaaactggctaggtgctttggaaatcaaggaatgaaataatggtgaaatatttgggtttgcttttgccttttaatcatagacttggagctaaaatatcaggcaacctagaaaagccaagaggccctaacagcccctccaccccccgacacacataaaacaaacaaaaagccaccctaaaaagccagttatctctatcttatggagcaagatagtagcatcctagcaagacaaaatattttgaaacaactactctactacaagtatattccacacacacaaaaamatcttgtaatgagtgacacatctgctgggataaagccctagaatacagaacagatagctgagactttcatacctgtcag

SEQ ID NO: 388661 - DNA, 596 bp, Homo sapiens
ctcagcaattgatataataattagaaaattagcaagaatatagaaaaaaaaatcaataaaattatcaaccaacagggttcaatttacacttacagaactcctaatcccacagtagcagatgacacatttttttcaaacactcacaaagcatatctggatatagcatatcatagagaatataatctatgaatgcaaytgaatcaatccaaacatcaataatggaaagataagaagtctccaaacacttagaaactaaacacttctttgaaacatctataaattaaaaattaattgaactaaataaaagtgaaaatgtaatacatcaaaatatgtgggaggcagctaaatcagtgctgaaaagaaatataagagaattaacattagaaaaggaggaactgtcttcaacaatcatctaatttccacatcaagaaccaagaagaatatcaaaacaagtcaagcagaaggaagaaaataataggaccagaaataatgcaacaaaaacaaaaacaaaaaagcaagtaagaaaaatgatcgaacaagtagctggtccttgaggaaaatcaatacaacggacatatatctaacaagagtgacaa

SEQ ID NO: 388662 - DNA, 512 bp, Homo sapiens
cacatttttaattccttactacaaatccttgttagttgaatcctaagttcctattaattttcaacatagaggagaagaatgttcatagagattaaccactatgttttcacacatacataatgcattcttaccaacttttattgacatgctaatatgataacacccagtgcaaggtgccaatttaaattaataagtggctataatatattttaatatttctctatartaattttagtataagtgagattgacagaaaaaatacatttaattagaagaatatgtctctattgtaggattgtttggagttttatctgtgaaaaaaatcctctctagaaagcagctgtcctaaaaaatgttctattgcaataaagttagtcattttcagtgtctctttttctgcaagataacctcaggaattgagataatgtgaataagttaaactttaatcagttgaggaaacatcattctaaagatgtttaaattttctccctttcctaaacttatatagtctt

SEQ ID NO: 388663 - DNA, 569 bp, Homo sapiens
taggaagaactataaaaataaatatattatattttattaaatcatggcattaaataaccaattgtaactttaatacaacattctcctcaaatcctcatgttatgaagttgtagatgagaaattgatgagagagcagagctatatttagatcatagcctatgagcttattctctttcctacttgacatttttatgcattgtgacaaatttttctgtctttttgttataaaatcagagaagaagaaatatggtttttgataggaatgtgtcaatgctaacagtttcttatgtgttataaaattctgttttctactctccttctcaacaaggagaaaacatttttgagataacacacaataacaagtctagaaartaaaatcttactatataaatataaaagttttattatttttgcttttgtaaaaatcatataatgtattctcacttagtaatgaactttttgttttctagctataaatccaattctgtttaataactcattattttttccttttatgaagaaaacacaatttttttcaacagcaaacgttgttgcaacaaattccctcg

SEQ ID NO: 388664 - DNA, 410 bp, Homo sapiens
gccaataagctttgcagactcaatttgaaacctatactatgatggctaagcagtattacaattacagctcactaacatatatgacatgcttgatttaataataaaagtaccttcaaagagataatgaaaaataaatcataagttctaaacaaattttacaaaagatacaattttagtactcatactatcacacaacatacaaacacagtcatataatctgcttagcttttttgccatattgatacaatttaggaaaacattataatttatgtcatatattttgtttggataagttcaataatgtcaacaactcaaatgatgtggatcacaactgcaaaattcaatggattacaatggaaaytattgcctaaagctcaaactgaaaacatcctatcacatttcttgtccac

SEQ ID NO: 388665 - DNA, 568 bp, Homo sapiens
gacagctgccactttctcaatcacaactttacccttagttcattttcttagatgttctgttatcacaattctcaggttactaaaaaccctaagtaagtcattgtcatataaaggtcgttgttatgtttatcacaatctacgattatctgttatacagrggtaatgtgtcatgaaaactatattgtagtatctcattattaaaaagtacatctgctcctccaaggacactttacagcgcattttaatatctgcaaataaccatttttttctttataaggcagaataatctagttcatcaagctagttggtctttaagatgtttaacatactgtctggtgttttatttgttcctgtctaaagatgttgataaacttaatcgttttggtgtggattctccagctttaagatagctgtattaatacttgttatctaccaagttaccagggataatgtgaagaataattaaattaaaaatgcggtgtttcttgcataaaaatcactaaatagtgctatatttggcatcatcggtatgttaatgctaggaaaaagcattccttgaaatattgct

SEQ ID NO: 388666 - DNA, 588 bp, Homo sapiens
ttttcttcaggataacagagatatttactgttgtaaactttactcagatataaaaccttaggcccacagaatcaattaatttgcaaaagaacaaatgtatttaaaaagtagagacaggatttggatacaagtgctttctgctatatcaccctgtttgccaaaaragagcctctccccctgagatcttatcactcttcaaatagtgatttctgtttctgtcagaacaggccacattaaggagctatatcaaacacatctaaatttcagtggcttatgatgaatatttgttctcatttactgtatatgtctatagtgatttggctatggttttattatttattgtgtttttctgaaggacccaagtcaatgcaacaatctctctttagaacatttcttctgttatcaaggcagagcagaaagaaaagaattccaccataaactggctcttcagatttatgttcagaagtgataaatgaatgtcacatgtcactggccaaagcaagtcacttgatgatgcctgagatgaatgattggtatgcattatcatctcacagggagtggtgctgaatattttggaaaacatatatt

SEQ ID NO: 388667 - DNA, 568 bp, Homo sapiens
actttccgagtgacggaaacagcctgtatcttcatgccagttacataggaatgtgtatttgtggaaactcatcaaactcatgaattttacttcaataaattcaagtaaaaatctgtagtaagaaaagtgaacattaagagcaagtattttggggtcaagtaacacaatggaatgttcctagtgcaaaagtggggtcctggctgggagcggtggcttactcctgtaatcccagcaccttgggaggctgagatgggcagattgcttgagctcaggagtttgagaccagcctgggcartataatgagatgctgactctacacaaaatacaaaagaaaaaaaaatccaggcattgtggcatgtgcctatactcccagctacatgggaggctgaggcaggaggatgcctgagcccaggaggcagaggttgcagtgagctgggatggtgccactgcattccagcctgggcacaaggtgagaccttgtctcaaaaaaaaaatccaaaaaacaaaaaaacaagatagctactgtaactaatctgttgactttgctgttactgatgagaactggtgg

SEQ ID NO: 388668 - DNA, 568 bp, Homo sapiens
ttactttgctgaacttaagctgcactttatactctgaataaattaggccattattattctatgttcaaattcctaagggtaccttgcctttggtttgtacctatttaattcagatcagttattagtgaacacctttggttaatgtcatgatatttccattatgcaattcaaactctcctgaaagaagggtgtcaagttgctacccttcagygaaggtgcattccattaaagactgaatttagaacttctttagaacatgtttcaacagcagaaggtattaagaaacactgtataaaggtacaattgattcacagaaactctttcttgctaacatgtgctatttttgtacatttatctcttccaataaagcctttcataatttttctttttttcatttcaattgtcctgttccaatccatattttgcactctctgattcagtatatttacctgccacatttttattatttttccaatgttaaccccataaagaaaagctatttcagttgactggagctcacagtattcattatagccaatcaattgtgtaagtagtggtaatgaataat

SEQ ID NO: 388669 - DNA, 576 bp, Homo sapiens
atataatcaacattgtctgggggggggggaactacttatcaaaaatacagataaatttagtgtarcaatttaattctgaaggataataatctgttttattaataaatatatatgaataagtaaagtgtattacattttggacaaaaataatgtatttggcccatctcagagaaatggcactttgggtatgtaaatagatgtggtgtggagaagaaaggtgtggcccagaacctggttaaggcaaaaagaaaattcagctctttatgatgcagtgagttagaaatgcctgattcacagctgctgtgaaacttcttactgcacactaaaaagtaattttctaatactatatttttctgcccacatcttccatctcgtggaactcaaaatagtttattttgtgagagttcaccttaacttctcaaattaaatgaagagtttcagattttagaaataacaggaatggacttaaaagtttgcaaatgtgaagtagaaagttttagatttccaactttaatatggtgcatttagatagtacctgcagatatgatcaaaatgtctccattaatttttaagaaa

SEQ ID NO: 388670 - DNA, 391 bp, Homo sapiens
aaaaattccaagggctcacacaaggcttggactcatccaaggcttcacaagccagaatggagagaccttgccgaatacatggagcttaaagtagagaccctaaacaacagtaatgtaatgggggagctaaattagccctagtgtaaagactacaacatacatgtccttaaaaagsctttaaaactggccttgaaagaatgaaacggctgtgccagaactgtaattcccttcagagcaaaaggccaatagtgtctatctaagtaaatacaatgcattgtacatatggacaacatttacgatgtctaagatccaatcggaaacaaattacatcttatagactgttaaatagttcatcattaggaaaaaatgcaccttctacatttaccacgca

SEQ ID NO: 388671 - DNA, 610 bp, Homo sapiens
aattgtttttgctggcagtgtgattttgcatcagctactcttgtactatctcttgcttctgatgaaaaatagaattaccttactaaaatattttaatattaaaattttgagtttcatgacatattttctgggatttttaaacctctgagctaaagttctgtctgtagcttggatctatatcagaacttaatatttataaaacaaagaagatcctgacacacccttgcatgaaaacattgcatgattctaagacctgaagttagcactgaacaacaatggatgtcaaagttgaccagaattgtgttcagatggaagccttatcatttactatctatgcaactttgactgattgtttaactcctctgaatttgagattaccccctgtaaattgtgaataatactgcttaacatgtaggcttgttgcaaatattacatcacataatgttagaaaacacataataggagtcgaatcaaccaaagttttaattatcataactatctagagatgtggtttacagtattataacctyaaaagtcgatagtgaaatgttacatttttgcagaacccaatatgaaactattccaacaatagggtccactgatggagaaa

SEQ ID NO: 388672 - DNA, 564 bp, Homo sapiens
atgtggtttacagtattataaccttaaaagtcgatagtgaaatgttacatttttgcagaacccaatatgaaactattccaacaatagggtccactgatggagaaaatacatggagaaatatggattcttatattgactcataggcttaaagctcaaacattaagaaatgctaatgtagagaaagaatggtgatgtgattggtagcaataaagtttggagctgtgaaaatataatgctggctatgaagctgaagtaggaaaataaaggatgcttcatagaaaaaatggcaggaaattcaatatatagatacatagttagatttaagagccgtttgtttaataaaccattattggttgagagaagaacttgtattttaggcaacagattataatagaattttgtccttgctaatcttaaacttgattgacttatactaaatggtcacctccttagttcaattttcatattataaattgtaggcaaacacaacttcttataattttactaatattaaataaaattatrtatttaaagcatcaagctgaatacttgatacctgtatgt

SEQ ID NO: 388673 - DNA, 566 bp, Homo sapiens
attttaatggaccataaaataatagctaaccaggaaatcatttctacatatcagactttttgtaaaatgctttatatatattaacttaatcctcaaagcagccatatgatgtatgaacaattatatgccaattgaaataaatgaaagaaaagtagcaagcagaggtaaagtaacatgtttaaggttatatcacacaggtagctgaccttcaaagccagggagcctggatcttgcactgtctttagtaatagtcttttattattgatcccattaatggaccatcagtttggggtgtgtgtgtgtgtgtgtgtgtgygtgcgtgtgtgtgtgtgtgaaagagagaaagagagtacaagcttgtattttggtattacaaacaatgtagccatgagccctatggtatatctattggattaaatttcaaccattggaattgctggatcaaatttgtatgcattatatatacagcatatgtgttagtacatatatatgtacacatatatgtacgtatgctatgtgtatatatatatgtatatacatatatgtacatatatacatacacatgc

SEQ ID NO: 388674 - DNA, 353 bp, Homo sapiens
gtgtttttgccattttaaaagaacattcatgtgcattatcctgattgstgtgcctaactcttcaaaacagggatctaaaactccatgttccacatacttttacgaagcaaagttctgaaatattcatcgcttctctgtgagtcagtcaaaatagaatctttactcctcacatgatagtgagtaaaactgttatgcgacacgcagagtgggctgtatttattatgaaaggtcttactataacagggctccctttatatgacaagtcaggtcatagcaaaacactgttaaatgttgtggtaatgatagattttaaaaatatttattgagtctattccttgtaccaggtagtgtac

SEQ ID NO: 388675 - DNA, 617 bp, Homo sapiens
tataattaacattgttttccatggcctcatggaaattcttcaaagttgcaacacattcaacttccagttgctgataagaccaaggcaagacatgctatcaaggccactgatatctcatgttagactggaggaaattttttgtatatatctcaaaatttatgggtatgagatttcaaagattggccctaaaccttgacattcaaacctgaaagcttacacgattacaatgttttgtgaaaataatacytgctagcaaggagattgaagtgaactttttgactattttttaaattaaaatgttttggtgtttttgtgtgacacattatgagtatgctagttacacttacaataagtgatgcaggtgtttttgaagaacaattgttattttgccatggaaattccttaatgaagaaattggtttcttgaaattagaaacaggattatctataagaaaaaatcagacaggaatatctaccttaaatacatattaggaatcctataacttttcagaacctttgcccaaataataacactttcacagaattcatttcaaggactcaaagtttaacactgaaacagctttagacccccaagatttccattacaatatgaggaaa

SEQ ID NO: 388676 - DNA, 617 bp, Homo sapiens
tataattaacattgttttccatggcctcatggaaattcttcaaagttgcaacacattcaacttccagttgctgataagaccaaggcaagacatgctatcaaggccactgatatctcatgttagactggaggaaattttttgtatatatctcaaaatttatgggtatgagatttcaaagattggccctaaaccttgacattcaaacctgaaagcttacacgattacaatgttttgtgaaaataatacttgctrgcaaggagattgaagtgaactttttgactattttttaaattaaaatgttttggtgtttttgtgtgacacattatgagtatgctagttacacttacaataagtgatgcaggtgtttttgaagaacaattgttattttgccatggaaattccttaatgaagaaattggtttcttgaaattagaaacaggattatctataagaaaaaatcagacaggaatatctaccttaaatacatattaggaatcctataacttttcagaacctttgcccaaataataacactttcacagaattcatttcaaggactcaaagtttaacactgaaacagctttagacccccaagatttccattacaatatgaggaaa

SEQ ID NO: 388677 - DNA, 598 bp, Homo sapiens
tatttttcaaatatatattagaaataatatgttatacrtcgtatataatatgtgcagtatatattatggataaagagtaccatttgcatattaattataaattaataggactaatatctcatatattgatttatgatggaccaatacgtatgaaatattagccctttatgtgtgatatatattataaatattttctcctggtttgttatttctcttttgtctttgcttataattttttgccatgcaaaggttttcgttgttttaatcttatgaagttgcatttagttcatctccattttgactcaaaatcaatattcttttctacaccaagtttataaagaaattaactcaggtttctgctattactttattactttcatggtttcatttttacatttagctccctgatctacttggagtttatttttgtgtttaatgtgaagtgtaaaccaaattttattctgttgatatagtaatcccatttcttcagaactgtttagaaaatgtttatatttccctagttatttaagatgccacctatattcctgtgtacctaggactatttctggacttttattctattccactggtgtgtctg

SEQ ID NO: 388678 - DNA, 576 bp, Homo sapiens
aaagctaagcagtgcctgaaaactcctgcgaggggtgtggtctaatccgtctgaagcaaaagagagagagagagaatgtgttgcactgtaactgggagaaatgggagggaagtcatcaaaacccaccccattagaattcatgttaaagaactttaaaaatgttacaagggggattatggaacccagttgaccccctagaggttaaaaactctgtgtgaaataaaatagccttcttttgaagtcggatggccagccgaagggacagtatataaaggaacaattggccatgtacatcaggtagtaaccagtgtcggaggacagccagggcacccaaacaagtttcctaacgttgacttgtggctaaatgtggtccaaaagtaacctgcatgattccagccctgcatggtgtcttactgcaagatgctcgtagcctgarctgagcataaagtgaaagtcaagtcagcttcaccggcagctgtggaaataaaggaggaatcacttaaagggcaggaaaaaccaccattacaggagccaccggaggaaacagaaatccctcctccctgtactccattatcc

SEQ ID NO: 388679 - DNA, 566 bp, Homo sapiens
gacacacaatccaacctggccagattgcaagcaagtccttctaatgctgttaaatactgaagagtgctgaagagtgacccaggcagccctccactggctagaagccactatgccggaaggcacacttaatgtccaagcatatgctcaagacctattcccagaagcagaccctcactgggacccaaatgatgcaacccagtttcagcacctgcagaagtaccaagaagcacttctgcaagggctaagggaaggcgaaaataagccaatcaatttaggaaagatctcagaagtgcttcaaggaactgactctgtgaggcattcaggctttacactctgtttgaccttgaggctactgaaaatcagtgcatggtaaatagagtgtttgtaggacaagcccagggagacatcaggctgaagctgcaaaagccagagggttttgcaggcatgaatcctactcagyttatagaagtagccaccaaggtgtacgtcaaccatgaccaggggcaaaaaaggaagctaatcagagacttaggaaaaaggctgatctgcttgtggcagccctcata

SEQ ID NO: 388680 - DNA, 604 bp, Homo sapiens
aggtttgtatgtcttttaattttttgctcatgaattagaaattcaactttatgaatcttagagggttttattaattaacacaattgaagtaagtaaagcaatatgccaacatcatgtgataggactatgcatttatgaaagcttatgtatttcaagactctcctggctttgtaattattttctggtcacctctattttaccttaatattctttccaccatcaygacaacccctatccattaataagcagtatagcattatggttaaaagaataagctttgaataactacttagtttcacacctttggactcattatatatagcttgttcatttacaacatgagtataattatagtaattacattataatgttggtgagaaaataaaggagaaaatacatgtaaaacatagtgtcatgtacttgatatccagtgtatatgtagttattttcaacagtattgagctacctttttctttataaatatttcattttaccaatatagctgcttattttctcttttacatagctcaaattactctcccttaataatttattaaaaatatagcaattcttggtttgggttgcaagtaactgagtagcttcc

SEQ ID NO: 388681 - DNA, 522 bp, Homo sapiens
ttaccataatagctctataaagtaggcactacaattatcctcatagtatgaatgaaaaaactgaagcccatagaagtttggtaatttgacctaggtcacacaggttttaagaggtagagccagagttagaaaatatcagattagttgcagcatctctctttttaaccactatacttggtcatacttaaaagtaagatgtttatgtattcatttatatattttagatatgcatyctaatcactgtactgaaaaggaacatattttaactaattctttcacctacctactatgccaatgtctggggctgccactgaccctaagtaattatcagctgtgatgaggaacatccacaattcttccactgttctagtcattcattcttctttttggaaatgtgagagaaaatctaacattcaaaaataattagcctgtcttttccaagatcacaaaggtcaatttgcaggttaatagttaaatgctttcttttaatcacaatcctcaagaataaaaccaattatttaa

SEQ ID NO: 388682 - DNA, 476 bp, Homo sapiens
caccggctcaataccatgtggaggctgccaaggcttggggcttgcaccatctgaagccatggcccaagctttacactggcccctttcagccatggctggagtgactgggacgcagcggaccaagtgcctatgctgcacacagctcagggaacctgggcctggccccgcaaaatcactttttcctcctaggcttgtgatggtaggggctgccgtgaaggcctctgacatgccccgragaagtcttccccattgtcttggggcttaacatttgtctcctcattacctatgcaaatttctgaagcccacttgaatttctcctcagaaaatgggattttcttttttatcacgttgtcaggctgcaaatttttcaaacttttatgctctgtttcctctttaaaactgaatgctttcaacagcacctgagtcacccctggaatgctttgctgcttagaaatttcttctgtcagataccctaa

SEQ ID NO: 388683 - DNA, 476 bp, Homo sapiens
caccggctcaataccatgtggaggctgccaaggcttggggcttgcaccatctgaagccatggcccaagctttacactggcccctttcagccatggctggagtgactgggacgcagcggaccaagtgcctatgctgcacacagctcagggaacctgggcctggccccgcaaaatcactttttcctcctaggcttgtgatggtaggggctgccgtgaaggcctctgacatgccccgaagaagtcttccccattgtcttggggmttaacatttgtctcctcattacctatgcaaatttctgaagcccacttgaatttctcctcagaaaatgggattttcttttttatcacgttgtcaggctgcaaatttttcaaacttttatgctctgtttcctctttaaaactgaatgctttcaacagcacctgagtcacccctggaatgctttgctgcttagaaatttcttctgtcagataccctaa

SEQ ID NO: 388684 - DNA, 522 bp, Homo sapiens
ttaccataatagctctataaagtaggcactacaattatcctcatagtatgaatgaaaaaactgaagcccatagaagtttggtaatttgacctaggtcacacaggttttaagaggtagagccagagttagaaaatatcagattagttgcagcatctctctttttaaccactatacttggtcatacttaaaagtaagatgtttatgtattcatttatatattttagatatgcattctaatcactgtactgaaaaggaacatattttaactaattctttcacctacctactatgccaatgtctggggctgccactgaccctaagtaattatcagctgtgatgaggaacatccacaattcttccactgttctagtcattcattcttcttttwggaaatgtgagagaaaatctaacattcaaaaataattagcctgtcttttccaagatcacaaaggtcaatttgcaggttaatagttaaatgctttcttttaatcacaatcctcaagaataaaaccaattatttaa

SEQ ID NO: 388685 - DNA, 453 bp, Homo sapiens
aaattgcaacaaaagcaaaaactgacaagtgggactaaaactaaagagcttytacatggcaaaagaaattaccaacagaggaaactggcaatctactgaatgggagaaaagattcacaaatgctgcctctggcaaaggcctactacccagaatcttaaagaaacaagcaaaaaacaaataatccaattaaaaaataggcaaaggacatgagcaggcatttctcaaagaaggacatgcaaggagaaaataagcgtatgaaaaaaatgctcaacaccaatattaatcaaattcaaatcaaaaccacaatgagatactagcttatacccatcagaatggttattatcaaaatgtcaaaatatagtaggtgctggcaaggttggaaaaaaaaaaaagctgatttagtttggatatttgtccctgcccaaatctcatgttgaatagtaatccccaatg

SEQ ID NO: 388686 - DNA, 453 bp, Homo sapiens
aaattgcaacaaaagcaaaaactgacaagtgggactaaaactaaagagcttctacatggcaaaagaaattaccaacagaggaaactggcaatctactgaatgggagaaaagattcacaaatgctgcctctggcaaaggcctactacccagaatcttaaagaaacaagcaaaaaacaaataatccaattaaaaaataggcaaaggacatgagcaggcatttytcaaagaaggacatgcaaggagaaaataagcgtatgaaaaaaatgctcaacaccaatattaatcaaattcaaatcaaaaccacaatgagatactagcttatacccatcagaatggttattatcaaaatgtcaaaatatagtaggtgctggcaaggttggaaaaaaaaaaaagctgatttagtttggatatttgtccctgcccaaatctcatgttgaatagtaatccccaatg

SEQ ID NO: 388687 - DNA, 574 bp, Homo sapiens
tattattacttacgttagtgtggagtatttgttacaaataataaatcaatattgatatattatyatcaactaagcccacaatttaagttctattattgtgttctacagttctatatattttgacaaatgcacaatattatctatccaccactatagtatcatatagaactataatcttttacagaatacagtatcatataaaatgatatcatatagtatcacacgctttggatcccctatgcttcacttattcatcccttctcttcctctcactgaaacccgtagaatcaccaatcctttaactttctttataattttgcctttcccaaaatgccatgtagccttttcaggttggcttcttccttaaatggcaatatgcatttaagggtccttcctgtcttttcacagcttagtatttcgtttctttttatcattgggtaatatcccactgtatggccatatcacagcttgtttacccatttacctattgaaagacatcttggttccttccagtttgagcttattatgaataaagctggtataagtattcatgtgaaggcttttgtgtggatga

SEQ ID NO: 388688 - DNA, 616 bp, Homo sapiens
ataattttaaaaagtatataaacatacccactgagttatttgggaaaaaattaaggaatacactaaaacattaaacttttagtgttttagcactacatacgatttttaaaatcttttattctactgaaatatctgaacctactataattaatcaaacaaatatttattgaatgtatgctgtattctttgcttacatgagtatttttagaaaaaggtattgtatctttctgaaagtttccttctatcccttcaatatctatactcagatctccratactcctaccatgattttaccccatctaatacctgacagccaatacctttatgctcatctcccccagtagattgtgataatccttttttgcgagggacgatgtcttgtcctattgtatttttagcacctggcacatagtaggatctcaaaacgtctaattttctttcttatttgaataataataaaaatcttgagaaataaagtcagatagttatcaggacttgttgaatttttggttatgttttaagaataaagatctttccaatgatatagttgtttgctgttttctggagcctattatcacaatgaaaaggctggctggtctcccataggagcccctgc

SEQ ID NO: 388689 - DNA, 575 bp, Homo sapiens
actcctaacttctatcatcaacaaaaacaactgatagttgttgaaggttcaagaaaaacttcttggttatgtattaaaatctatgggcctatgctgatattcatgttctgactacatctatcaatagcaataatgcttgttttggttataaaaattgtaattatgaatgtgaatgtctcattttcagccaagaataccattcttcttttatttgggatcatttgggtcacttggagagctccaaatatgagaaatcactttctttcattcatgattcttttgtacraagtaccacattctgaaccaagtaccacaggatatgtctcagtacaactgagcctccaaagtccattctaatgttgtacttgatgacctctttctctcttgtcaataaatatagatgaaatcaattgtgaggcaactgggttattcagggaagcaaacatgctaaatatagcagagtatgatggtaaggctgagaatttaagaaaataatctagttcatgcacatttacatgaaacaaagcctaagtctgtcaattagaatgagctgaaagccaaagttgtgctgagtg

SEQ ID NO: 388690 - DNA, 620 bp, Homo sapiens
gcttccaactcctcttcatccttcttgcccttccatcacttctgttcattcccaattaatattatggctaaggtaagagaaaccacattcaaattatatcaaggcaccatatacattgtcaatttctcttgctccagaggttgccttctttcttccgcagtgaactctgctacacactccccacccccaacacacctgtcatttgctacccatgccactcatctcatagtaatctgctttccctgtcctattcrccatcagtacttttgttagataagatattttgtgatcaggggttcagaggaagaagagattcatttgatgcctcagtgcaataaacaattaggtcaggggctatagaaatatttccttaactcaaaagctctgaagaatattgttctccttgttcttagcctctaaagcaggggtgtccaatcttttggcttccttgggccacactggaagaataagaattgtcttgggccatacataaaattcactaacacaaatgatagctgatgagctaaaaaaaattgcaaaaattctcataatgctttttgaaatttatgaatttatgttgggccacattcaaagccatcctgggccacatgcagcccagg

SEQ ID NO: 388691 - DNA, 494 bp, Homo sapiens
aataaattactgtcgtttgaaaccatccagtttggggtactttgttatggaggccctaggaaattaatgcagtgcccatacctagtgacaggaaaacctgggtatcatttttactgctccactgaaaagactggtactccttgacctcagagaacataagaaagaccatgtcccagttggcccctcttcctcagatgctgctgagctcaggactataaataatagttcccaaaccaatgttggtagtgttttgcccaggagctctacaaatggaagagtcatggatgagcaagtggatgactcagtggagtatatgtgtgctgactcccaaatgctggagagaaccaaaagtaatcctaaaaattaagttcatttttttggtatgaagtagttgtgtttttgtggtttatsaaattaattcccagatctgaggcaccaatgcttgaaaaaccatgtagatttaatagctaatggatctacagtgtctcccagta

SEQ ID NO: 388692 - DNA, 611 bp, Homo sapiens
cttgcagcatcattagtaattagctcaagtactgcctgtaaccttatgatgcggttgagcatatatataggggtgcagtatccccatgttccatattctgcccaggtggctgggccatagtattggattattctttcagggggcaattcattgtctttccacttccctatggttatgccrtctcctgtggttatgcccctcttgcttttccttttagttacatcatagatggggtaccgtaagacttccccttgccttagcaggattagaaagaaagagggcctaattgttccaagtacacaggcccctgaccatttagctggcagttgtcaatatgcctgtggcccacagttccagtagaggccagagggtgcctgccaggtattggagcttcaagctggtaccaggagtggtttaaagaagggaaacgggagaatgggcctgggtgcggtgatttggagtcattctttttgcatctccataaagtttttcctagtatctcattgtaatattgctgtcctaggcaagttaattctcctactgggtctgtaaaggcttttccccagtgcacaatgcagaatctcttgataagagaggtttttaagagccag

SEQ ID NO: 388693 - DNA, 431 bp, Homo sapiens
tctcccaatttcaatgtctgataatgycagtcccacggcccttgcagtcttgtggtctcccagtctcatggtgataccacactcctgcattcttacgggctgctcttttgcagtttcacaggcttgagttctcattttctctgaatcttgtggttttgtgctcttaaaattttatggacttgcagacctggtatctcttagtctcagtctagcaagttcaagatctaggaaacttgcactccacaaaaaagatgctttaagtcaccttcaaacatccaaagccagaggtgaagcgagactacctgaaactgcaacaatatccctagttaatgcaatttctgctaagaacaaagatatctgtccttaggtggtctcaaaaatttggagtgaagccagaggtgaagtgagactttctgaagctgcaacaatac

SEQ ID NO: 388694 - DNA, 583 bp, Homo sapiens
aggaaacttgcactccacaaaaaagatgctttaagtcaccttcaaacatccaaagccagaggtgaagcgagactacctgaaactgcaacaatatccctagttaatgcaatttctgctaagaacaaagatatctgtccttaggtggtctcaaaaatttggagtgaagccagaggtgaagtgagactttctgaagctgcaacaatacctctactctacttaaagcaatttctggtaagaataaagatatctgtcccttgatgatctcaaaactttgaagctattgcttactggtgattaaataccaaggtcctaaaagagtgattaaagatattacgtccctaataacctcaaaatctactgcttaacttttattattttttaatgtaaratgaccacaataaactttaaaaattatcagatgcatgatgatatgggattactatgacatgagaagctgaatgcccctgtagtaccctcccctcccttccttctttccatgaggttgacagaggaagcatggcatgcattcttgaggggagcaaatacctcctgcacagaagcttgcaggaggaaatgcccagct

SEQ ID NO: 388695 - DNA, 600 bp, Homo sapiens
agtgcccctggaggaagcccatcaatttaatccatacagtttctcccaggtagggactgaatggcaggcttggcagctatgccagctgccccctcctgtctcccaggaggatactggaaggcttttaaagattccactccttttttgccatgaaagtgcttgatacctgctttaattgaactctgcagagagatcaccagggcagtttacacacctccaccttccattgcatgaagtgcctttggcccagcaagccctgcatgcaaaatggcacatactccttgtacatttcacacactgccgtttacctactgcaccttctccaccttaggttccatggtgctcatgatcttcattctccatggaaagtgtggtggacacattttggccttgagaaattatttctctttawcattgccttggctgcccaccacataagaccatatcttcacttggtctttggtttctggttatttcaggttgtttcaagcaaacctgaaactgagattcctctttttaagttctgggatgcatgtgcagaatgtgcaggtttgttatatggataaacgtgtgccatagtggtttgctgcacctatcaac

SEQ ID NO: 388696 - DNA, 612 bp, Homo sapiens
gtctcacttctgtttagagtactccacatgccattatctaatctaataaaattaactatcatattattttagtctgtgttcaaatttctcaatttcttgagatgtcttgttacaattgacatgcttgagtaaaggtccaagccaggtatacacattatttttccagaacaatattaccattcaaattacatgttttactttttattttgcatatagtctgtctccctcactagaatatcaattccaggcaagcaggaatttttgtctgttttgttgtttrttctattttttgtttattattctattttgttgtctatccttcagcacctagtacagttcctgacacatagtaggcattcaagaaatgtgtgtagaatgaattaatttatgaattaatgaatagatgaagttgacaacctgggagtgatagccctggaagtatgctgtgtcaacatggtaaaatttgttgcttccttacaagttctaaaacactgggcaactttacttagcctcaattttctcacatgtaaaatgaaataataactccaacttttcaggtttgttccaagaattaaacaaaatatgcatatggtacctgccataaattgcatg

SEQ ID NO: 388697 - DNA, 613 bp, Homo sapiens
aagcctaaactcataatgtcatcctgacccttggtcccaaacygttggtatctgattatctagttctcagggtgaatttggatatttgtagacttgaaggcccaaatagacaagtggacactccatgttaatcatagcccaacttatcctagaaagaaaattaagtttaattaagttcctcaatatatttgacctaagatgcaagaacaaataaaccctgaaaaatattttttatagtgaagcccttgctcagagaaaaaacagaacaaaacctcaagaactgtgattaattatactaaaggatattttgaggcatggacttgtcttgaaaacgtgctgttgggcctaattgtatttacagttcacactcatatatagagcactggtggaccagtcagtgagtgaatgattatagtcctatttttggcttgaacattcatcaatgtgtgagtgttggcaggaaagccactaaacttttcacagtatgtcttctcattgtaaaatggaaatattaattcctgccattattgtggtatggttatgaagaacaaacaaaacacagccaaatgatgctataaatctgttttgagattatccctggcacatttaccta

SEQ ID NO: 388698 - DNA, 615 bp, Homo sapiens
tagtgataagtcacattttccattccagattgcaagcatagatttgtaattgagctgtttttcatgagataactgtatrtattgtgctccagggcgactgacagcaaggattaaatcacaagattatgaaagaataataattatgatataaaacaagattatttacaaagcagaaaaattgtacagttctgaattagctattaaaaataaaattattgctaatccaattatttgtatgtattaagtgttttggatggctaatgattttcatgagaaatattggatgatacatctaattttaggtgaaaataaaaagatcacaaattttatatacatgataatcacatcttaaataaaattacatttaaaaagtgccaaaaaattaaaatttgttacgtgcaaaaacttctgctcctggttatgatgcagtcaatggtactagattagtcttcctgccacaatcaactataaacttgaacagactgtgtatggtgcccgttgtcaggcagtggaaaactggcagcatgaggctataatttctaagaaaagtgaaatgctgaaggtagcacctatgtttgccttgacctgagggaaatttcataattccagtgcagc

SEQ ID NO: 388699 - DNA, 615 bp, Homo sapiens
tagtgataagtcacattttccattccagattgcaagcatagatttgtaattgagctgtttttcatgagataactgtatgtattgtgctccagggcgastgacagcaaggattaaatcacaagattatgaaagaataataattatgatataaaacaagattatttacaaagcagaaaaattgtacagttctgaattagctattaaaaataaaattattgctaatccaattatttgtatgtattaagtgttttggatggctaatgattttcatgagaaatattggatgatacatctaattttaggtgaaaataaaaagatcacaaattttatatacatgataatcacatcttaaataaaattacatttaaaaagtgccaaaaaattaaaatttgttacgtgcaaaaacttctgctcctggttatgatgcagtcaatggtactagattagtcttcctgccacaatcaactataaacttgaacagactgtgtatggtgcccgttgtcaggcagtggaaaactggcagcatgaggctataatttctaagaaaagtgaaatgctgaaggtagcacctatgtttgccttgacctgagggaaatttcataattccagtgcagc

SEQ ID NO: 388700 - DNA, 615 bp, Homo sapiens
tagtgataagtcacattttccattccagattgcaagcatagatttgtaattgagctgtttttcatgagataactgtatgtattgtgctccagggcgactgacagcaaggattaaatcacaagattatgaaagaataataattatgatataaaacaagattatttacaaagcagaaaaattgtacagttctgaattagctattaaaaataaaattattgctaatccaattatttgtatgtattaagtgttttggatggctaatgattttcatgagaaatattggatgatacatctaattttaggtgaaaataaaaagatcacaaattttatatacatgataatcacatcttaaataaaattacatttaaaaagtgccaaaaaattaaaatttgttacgtgcaaaaacttctgctcctggytatgatgcagtcaatggtactagattagtcttcctgccacaatcaactataaacttgaacagactgtgtatggtgcccgttgtcaggcagtggaaaactggcagcatgaggctataatttctaagaaaagtgaaatgctgaaggtagcacctatgtttgccttgacctgagggaaatttcataattccagtgcagc

SEQ ID NO: 388701 - DNA, 490 bp, Homo sapiens
aagattcccatgcattcatcacccagcttcccttaatattaacaccatacacaaccattgtaccattatcacaactgagaaggtaatctaagtataataccatgaactaaacaacagactttattcatatttcatcagttttcccagtaatatctgttttttcagctccaggatcccaaagtacatttagctattatatctccttgcctccagcctgaaacaatgatcatgttcrtcttaattacttggataatatgtcttctgggttcctctgctctcaagttaatactttctcctttgtaattaataagtgtcttaaggaagatactttgagattctacagatatgccattgtatcgttttgttgcccactaattttagcatccatcagtggatcttgcctgtcttaattattactgtgatgttctaacagtgattttctatttccctcattctccttacatttattaattccttcaacttcatttga

SEQ ID NO: 388702 - DNA, 595 bp, Homo sapiens
ggttattttttaatgggtacatagctttagttttgcaaggtgacaaacttctggagatggatggtaacaatggtcacacaactacgtagatgtacttaatgccagtgaattgtactcttaaacatgggcaagacagtaaatttcaagttgtctttattttaccatagtgaaaaaagagttaatttgtatcaagtgtttagagtgttgcctggctcttagtataaggctttgctatgatgatgatgatgatgatgataatgatgatgatgatgattgtccttatcattatttattaacaactttacttgtgcactagccctttgtaagtctgtrtaaattaatgctcctcactttctgtctccatatcgcaaggatgataataagccaagagttaaacagaagattcatacttggcataacctacctacctgccaaattcttcacaatgctgacgttttaatgtctgagagaaatgaatattaatgatttccaatttctttctttgaccttcatgactaaccttatagcatccaaataaagtagagatgcaggaagattaaactgatttcattttttaaatagcaattcaaaaaat

SEQ ID NO: 388703 - DNA, 386 bp, Homo sapiens
aacagagctaggtgttcctgcacatatggtagcagcactggggtaaacagtcatcaagttattattgatgcatctatgaccattatttaacattaaactgtgatagcatgttttcttagtagtcactcttataagrcaaaggaaaagaaatatgttaggatcatatattcataccacaaatacttactgagcacctactacatttcaggcagtaggctaaaggatacagatatgacagccagctctcatggaacttaactttcagcaggagaatttacaaggaaaaagaaaccagttatgatggcaataattgctatgaaatatacaaggatctgagaaagagaaacacacatgggcttacctttagataaaggaattggagaagg

SEQ ID NO: 388704 - DNA, 588 bp, Homo sapiens
cactcacaatcacatgacaaaatttctgagtttacaaagacaaaagtgtttatggactgtttatatttgtgtgtttgttaaacagcagaggggatagtgattattgatcttgatgtagcatctggaaataagtttctatttaagaatttgcactccacttaagtttgcctaggtgaacgttttayagtttgggtagagagatgatggccactgagaagcttggagctttgatgctaatctctgcagcttcctttaacaaaacttagggtcatttgatctttttgcgttttcatccctccttctttaaaaataatcccgattttaggtgtggggtgttaaaggacctttagcctgatataaccacccaccttgtatttctgactttaatagcactagattgcttataatctgggcaatttctctgcttatttggctgctcacttcagctcacttcaattccttctcttccttaaactgtacatatgttttttttcctccccccaggcttcctttgctgtttaactgtacttcatacatgcaggtatcatgtctttatgaaggttttcaaattaaggagggtaccactcc

SEQ ID NO: 388705 - DNA, 570 bp, Homo sapiens
gttcaagagctggtagaagaagcacttatggaaacaactcgggggtcttagtttacaaaaagctcaattagagttgactgtggctgatgaaatgtacatttcacctcaggctctgttactaagggtctgaaatgaggaagctggcatcccactcgaacacacctggagtattaaattccatgttgggtcccctacttgctagaggcttactatgctcactacatgcagacactatgctaaacctttcatacacattaggctgtttaagcttcaagacaacaaatgcagcagtaactattattatcccctacttgcaagtgaggacatggaaggttagagtgtgcagtggccatctgcctattggcctggccaatatccattccatctcttcttctttgggtaactacctctccacctttatrgacaggcttagttgaacaccaatcaaaccctaagctaaagggtgaaaatttgaatcaaaccgaacccatagtattactttttttaggaatttgaataatgaatggagtattataagaacataaagtaacataaagtaataacacctca

SEQ ID NO: 388706 - DNA, 570 bp, Homo sapiens
gttcaagagctggtagaagaagcacttatggaaacaactcgggggtcttagtttacaaaaagctcaattagagttgactgtggctgatgaaatgtacatttcacctcaggctctgttactaagggtctgaaatgaggaagctggcatcccactcgaacacacctggagtattaaattccatgttgggtcccctacttgctagaggcttactatgctcactacatgcagacactatgctaaacctttcatacacattaggctgtttaagcttcaagacaacaaatgcagcagtaactattattatcccctacttgcaagtgaggacatggaaggttagagtgtgcagtggccatctgcctattggcctggccaatatccattccatctcttcttctttgggtaactacctctccacctttatggacaggcttagttgaacaccaatcaaaccctaagcyaaagggtgaaaatttgaatcaaaccgaacccatagtattactttttttaggaatttgaataatgaatggagtattataagaacataaagtaacataaagtaataacacctca

SEQ ID NO: 388707 - DNA, 409 bp, Homo sapiens
ccacatttatactatgcacatttgcctatgccactattttcatgaattccctgagaatgaaattagtcatttattcaacaaacttttattgaatgtctgctatataccaggcacarggataagccctggtcatgcaaagatgactaagacatggactataaatttgttcttggtgagctcctaatctggaaaaaacaaaggtacagaaaaaagatattttctttttatgtctttaatgtgcctggaagaaggtgggttcataatgaatatttgttaagtgaatatctatgttgaaagggtcataaattagatgatgaatacattcaacaacagaaaccactggaaagaaagcaatctatgtaagtcattagattggaaagcactttcttctattttttggaattatatg

SEQ ID NO: 388708 - DNA, 624 bp, Homo sapiens
agaaaaaataaatatttgaggtgatgaatatgmtaattaggctactttggtcattccacaatgaatacacgtatcgaaacatcacattgtaacccataaagttatacaactgttatttgtctattaaaaataaactttgaaaggaaaaggaatttgggcagtctcattgctcatattcttgaaatgtgtgttcaattcaacaaatatgtaataggctaatggtccttttatttacaaggtaccttacaaagtcctgaagggactgccaaataaaaagactcctaatttaaggcaatagtttcctaaagtggatgtgtaggctggtgacatctgaggcatcttgagtaccctaaaaatacatattcctgggccccattccaagccaacaaaaccagaatctctaatggtaggatcaagaatctgcatttaaaacatattcatcagatgaaactgacacagagtaggtttggtcctacatatgccagaacttctccgttataattgacagacatctaaccccagctggcttaaaccaaaaaaggaatccatcaaccctagtaactgagaagttcagcgaggagaacaggcttcaggcacagctggattcaaaggctcaaacaatga

SEQ ID NO: 388709 - DNA, 613 bp, Homo sapiens
atcctgcccaaaagcaggatgctggccaggttgacctcatgagactcactctgcctgaaagattccactctccaatcagtgagactggcgttccgctccccaaaggtaatttgaacttgaacagcccagaaaagtgacgagcttctctgtcctgatatgttcctaacaaccaggttctcacagggctagggcccctgccaatcagaaccccccattctgccccacrcaactgcagatacgaatccggccctacctctctggctttgtctaggctacaagtgagagctttcactgcatgaagacaaagctttctgtttcctctcaaattctcaatgacaaacacactgacaaaaatattttggtacagttcttttaaatgttcactcttaatgtagtgtgggaagcaaatgtttgctaaaataaacaaagtgctaagaaaatactatcactagcaaagccatcactctatagctaataattcatgaccacctcataaataattgtcagccttctaatctgaatgtgtggatggtgggaaacaggcctttcccaaatcccccttcgatattttgtcatccctccttgcctgttttctcctcagcatcattaattt

SEQ ID NO: 388710 - DNA, 613 bp, Homo sapiens
atcctgcccaaaagcaggatgctggccaggttgacctcatgagactcactctgcctgaaagattccactctccaatcagtgagactggcgttccgctccccaaaggtaatttgaacttgaacagcccagaaaagtgacgagcttctctgtcctgatatgttcctaacaaccaggttctcacagggctagggcccctgccaatcagaaccccccattctgccccacacaastgcagatacgaatccggccctacctctctggctttgtctaggctacaagtgagagctttcactgcatgaagacaaagctttctgtttcctctcaaattctcaatgacaaacacactgacaaaaatattttggtacagttcttttaaatgttcactcttaatgtagtgtgggaagcaaatgtttgctaaaataaacaaagtgctaagaaaatactatcactagcaaagccatcactctatagctaataattcatgaccacctcataaataattgtcagccttctaatctgaatgtgtggatggtgggaaacaggcctttcccaaatcccccttcgatattttgtcatccctccttgcctgttttctcctcagcatcattaattt

SEQ ID NO: 388711 - DNA, 613 bp, Homo sapiens
atcctgcccaaaagcaggatgctggccaggttgacctcatgagactcactctgcctgaaagattccactctccaatcagtgagactggcgttccgctccccaaaggtaatttgaacttgaacagcccagaaaagtgacgagcttctctgtcctgatatgttcctaacaaccaggttctcacagggctagggcccctgccaatcagaaccccccattctgccccacacaactgcagatacgartccggccctacctctctggctttgtctaggctacaagtgagagctttcactgcatgaagacaaagctttctgtttcctctcaaattctcaatgacaaacacactgacaaaaatattttggtacagttcttttaaatgttcactcttaatgtagtgtgggaagcaaatgtttgctaaaataaacaaagtgctaagaaaatactatcactagcaaagccatcactctatagctaataattcatgaccacctcataaataattgtcagccttctaatctgaatgtgtggatggtgggaaacaggcctttcccaaatcccccttcgatattttgtcatccctccttgcctgttttctcctcagcatcattaattt

SEQ ID NO: 388712 - DNA, 590 bp, Homo sapiens
aatctttctgtaagtgaaaaaaaaaatcacatgttaaatatatgttcttccccatgccccctaaaatattatttactttcaaatagaagagaagagaaaacaaagatagacacctcaaacttaattatttttctacatggttttgggaacgggtagctgaatacagaacaagataatttgtgaaaattttgcaagtaaagttattgactagtcaggatctttttcttctaaaattatagctattgttttcggggtaaagtgttcagaagcgggtgatgagctyctaaaactcctatttggtatgacttggctaaactttaaagctgagaaaaagaatccatacaagcaggtgctactgaaataatgaatgccataaatgtgacagctttaaatcataatggcaacagtaattaaacagaaaggtgaccaacaaacatagaaaagggccagagataagatataaataattcgttccagctgctggcttgctcttagaagtgatgcagcgtgtgctatttttatctccaaagggagagctttttttcatcctgtaattttttttttatcctaaattgaatatgagagctttg

SEQ ID NO: 388713 - DNA, 569 bp, Homo sapiens
ccccaccatccctgctgcagacccagaaaattgcagctgctacaatgtggtctctagtcacatagagaaagtcatgaagaaaagtgaaagggtgtagctttaaatgccagttctgcctcctcttagctgtgtaacattggaagagtcactttctgagccttggtttgttgtctggaaaatgaggaagccataatttctaacttttggagatgttgtgaggattcagtcacatgacccacagaaagctcctgacatgggcctagtaggtatgaggaatttaaggttgactactgatcttagtccccatctcccctcagttcctaactccattttgaccagccccagcaatgctgaagtagtgttaagggagagtgtagaagaaaagacaggaaacaggagggcagagcaaggccacaggccctggagcagtaaccattcttctcccttcttttcaccctcatgttaacaatagcaaacaggaaccacagcattaatggtagttaacactttttgagcacttagtgcattcctgacaccacatgyagtatcttatttgatgctcacaagaa

SEQ ID NO: 388714 - DNA, 580 bp, Homo sapiens
taggtatgaggaatttaaggttgactactgatcttagtccccatctcccctcagttcctaactccattttgaccagccccagcaatgctgaagtagtgttaagggagagtgtagaagaaaagacaggaaacaggagggcagagcaaggccacaggccctggagcagtaaccattcttctcccttcttttcaccctcatgttaacaatagcaaacaggaaccacagcattaatggtagttaacactttttgagcacttagtgcattcctgacaccacatgcagtatcttatttgatgctcacaagaaatactattgtttgttcaccacaggtcacattagattttttgcagccctgtctattatttattcrcagtgagtctcctctcagtctaaaccttgaagtctcttcacttcttatacttgtacagttagtgttaagcatgtcttctgtattgttatccaagtcgttgataaaacccatctctttctaaaacactttcagctcgtccttatcctagtaggtgagtccttttggatctccagtggagtttgggggacaaattctataatatattcccac

SEQ ID NO: 388715 - DNA, 580 bp, Homo sapiens
taggtatgaggaatttaaggttgactactgatcttagtccccatctcccctcagttcctaactccattttgaccagccccagcaatgctgaagtagtgttaagggagagtgtagaagaaaagacaggaaacaggagggcagagcaaggccacaggccctggagcagtaaccattcttctcccttcttttcaccctcatgttaacaatagcaaacaggaaccacagcattaatggtagttaacactttttgagcacttagtgcattcctgacaccacatgcagtatcttatttgatgctcacaagaaatactattgtttgttcaccacaggtcacattagattttttgcagccctgtctattatttattcacagtgagtctcctctcagtctaaaccttgaagtctcttcacttcttatacttgtacagttagtgttaagcatgtcttctgtattgttatccaagtcgttgataaaacccatctctttctaaaacactttcagctcgtccttatcctagtaggtgagtccttttggatctccagtggagtytgggggacaaattctataatatattcccac

SEQ ID NO: 388716 - DNA, 616 bp, Homo sapiens
attcttctatgattctatgtatactgatatgagcatttcctattaaagctttctaccttctgtgccatgcttctgtgttgtttagggtttacagaaatccatttcacatgccctcatatacagaacacaagtttggcagaaacaatgctggtgatcgaacagcaatgccattgtgaacattacatcttcttatcctactgtgcacatagtaatttttgaaacagtcagtaagctttactggcttcttcaggcaaattcagctttaattcattaaaacctcctgaaatgtcataagtaggaaggtatatgatgcatttttaaactgaagttttctttgttgctgtatgcagtggctaatccactcatttgacttttccaccaaatgcaaataaagacaataacaagataatagttttgcctaacatgacgtaactatcctgcatacaactgaaaatgcactaatcccttccccagactttggctttcyggatttcaacattcaggattttaatcttttggggttgtgaatttcacaattttagacattaggaattttgatctttcaggatttaaacttttggaatttcatcattcaggattatggcatttgaaattg

SEQ ID NO: 388717 - DNA, 616 bp, Homo sapiens
attcttctatgattctatgtatactgatatgagcatttcctattaaagctttctaccttctgtgccatgcttctgtgttgtttagggtttacagaaatccatttcacatgccctcatatacagaacacaagtttggcagaaacaatgctggtgatcgaacagcaatgccattgtgaacattacatcttcttatcctactgtgcacatagtaatttttgaaacagtcagtaagctttactggcttcttcaggcaaattcagctttaattcattaaaacctcctgaaatgtcataagtaggaaggtatatgatgcatttttaaactgaagttttctttgttgctgtatgcagtggctaatccactcatttgacttttccaccaaatgcaaataaagacaataacaagataatagttttgcctaacatgacgtaactatcctgcatacaactgaaaatgcactaatcccttccccagactttggctttctggatttcaacattcrggattttaatcttttggggttgtgaatttcacaattttagacattaggaattttgatctttcaggatttaaacttttggaatttcatcattcaggattatggcatttgaaattg

SEQ ID NO: 388718 - DNA, 526 bp, Homo sapiens
agtgaccaaaaaatccctcatgtgtataatagcataaaagctctacttggagagcaatgtatcaccttaaaaacatgtatcaaacaaaaggaaaattgaaagccaacgagctaagtragcacctcaagaagctgaaaaaaagaacaacagagtaaatgcaagcaagccacagaaaggaaataataaagataagagcaaaatttaagacaattttaaagaaacaaatagtaatgaggatcagcctaacctaactccagccctttgagaagctaataaaatagacaaacttatggaataatttatgaaaaagcagaggagaaacacttggtaagtggaatgaatgaataattagcccacaggtaacttgacttccgtgattataaggaaacaatggaattacataggtgaaaagtatggtccagtgcctgcaactcagtaggaacccagtaagtatcagtttctcttctctaaactaaatgaattaaaatgaagtattaatggacaattatggtttagcatagtgatt

SEQ ID NO: 388719 - DNA, 603 bp, Homo sapiens
tcacagtaacatgtccattgagacttttacccagtaaatgtgtgggaaaatacaaatactgtctaggccaatgttcaccacacaacatccaagagaccattagtgacccagccaagagtcttcaattggctttccctgtagtctttccttgactttttacatttattaaaccaactccacatatagaaagtttgcacgaagagagcaactttgtgagaaagaacagaaccccacaaatctacagggtgtctatgttaaagaaataataaaatccatgaactcagacagctgaaaaaaatgactgcactaattttggaaaccatatctattcatccttaaggcacttaaccctgaaatatatgcsaagaagtggccatctgataaatagtaccatggaaatggccagtaaacatatggaaagtttcttaacatcactagtcatcagggaaatgcaaattaaaatcacaacaggatagccctgtaccctccagaatggctaaagttaaaaagattcaccataccaaatgttgtgcaggatgtggagaaactgaaactttcaaaagctgtaggtggaaacttaaattggtataataattttggaaa

SEQ ID NO: 388720 - DNA, 498 bp, Homo sapiens
accctgggctttccttttgtcagccctcttmttccagtacctttaacctggataattcctactagtctttatgatgcaagtgtagatgtcacttggtgtaggaaggcagtaattcctgcacactgatgagatcacacccagtcttttccatgtcacagtgggcatcatcagggtacctacttttaacaacagaaagtgactcagatccaaaagaaaaggagttatgaaatgagtaatgagggccctagcatctctggaaaggctgaagaaatcaccagaaaaaaaaaacatctaaaaccatgcttctgagagattctgatgaggaaattgcctcacccgtcacagtcaccatcagaaaaattaaatgcctgctccattccttgaggtaccaggcccctactcaaagtctagcaagatgccgtctgattggcaaaacctgtgtcacatgcctgtgacatagctgcaagggatgctaggagaaaatactcagtattttta

SEQ ID NO: 388721 - DNA, 493 bp, Homo sapiens
caaaaaaggttcattaatgatatacagtatatataagatgaagcaatgcattctctgtagtcagggaacatttctccttctattttgtgtccctagcaccatatcagacagtatgtattcaacaatgtttgttgaatgaatagttgaatcaaagaatgagtgagtatgcatcawtgtaattaatccctagtagggtatatccaaagaactgcttagatcgaagactgatgaatgcttgaaggttgagcaatgacccattgaggcagctggatcctgcaggaaggggaaccctgggagtggagaagtttgatgatgggatgggcttcctaccaactgtcactacaagtccactgaagcccatatctgcatatataatctatatatgaaccagacataatacaaatgcttcttttctcttgttcatctacttctgaaggttcatattgcttctcttactcccagtaccctacccatgtagaaacagaggaatatt

SEQ ID NO: 388722 - DNA, 424 bp, Homo sapiens
tctttactcttggaattctccagagcaacacctattcaatgaaaatattttctctccaatttacaatttgcagttaaattaaacaagcagagacatctattttagcagagcaaagtgtagctgccagaacttaggtctggatgtggtcattttggtgtacctgcctaggctgtatcctcaagctttctccctgtgtttgcttgtaccactcccaaactccctacaaaaacacctagctatgagtactagctattcacggtttgactgtgtcccctaaaaagcatgtgttggaaatgtaatccccaatgcaacactgttgggggatggggtctaataagaggtgatgaggtcatgagggctctgccygcatgaatggattaatgttgttatggcgggagtggatttgctatggggggaatgggtt

SEQ ID NO: 388723 - DNA, 621 bp, Homo sapiens
acaattcaacatgagatttggaaggggacacagatccaaaccatatcaggaactgaggctactgatcacagaccccgaacccagaaagaccagcatattctaattccccataytcatctaaatcatcaggataagtctttcctaggcagatactccactccaaggtggcagactacggaacacattcatagagtgtgttacaaatcacctgtgctgtcacttttgctcaacacctactatggcccccatggccaggcagcccctcattcaaacccaggttcatccagcctcacttcacccagcacttatttaacccccagcctgcacacctctgaggctgttgaaatggagtcagaaagctctaggtgtgagctgcagctcccctagtcacaagctgtgagaacttgggcacattgcttaactccactaagtcttaatttctccatctgtaaaatggggtgataatgaccctgttttataagctgctgtaagatcaaaatgaagcattagcccagtgcctgagacatggaaagtactctgatgtagttgttgttgttgttgttgttcacaatgagctttgctctcgtttataggtgaggaaatttacattctaagtgagca

SEQ ID NO: 388724 - DNA, 358 bp, Homo sapiens
agttgtttatcatctctctctcatcagaatttgacatcataagtacagaaactttattttgttttgtttgctgctatctccctggaggccaggagagtttctgtcatgtagtaggtaggcaataaagtaagttagttgttgagtgaaccatgagattgttgtggaaaagacgagaatatgtgtaaaatgttccacatggtacatggcacaaaggcccttggcacaaattagttatttttgttattgtcatcacttttccacagagactcttaagaatgatgactatgatctcatccagttcttcatggcttagtggatctctttaatccactccytaagttacaacagagattcccac

SEQ ID NO: 388725 - DNA, 514 bp, Homo sapiens
aagttgaacacaagattcttggcactgaccctagcaacttttggcctggagtctaatgaccaggcccagtgagagctctgctgagcaggtttcaggctgaccaaggtcatccagcagcgaaccctgtagatggggtcagaggaagagtctaacttgcagctgtggcctagagtcgccaatgacagcaattattgatggctgtcctttgtcctgactkgggggcagtcagatgacaatgaatataaggatgaagacgttaacatgggactaggtacatgagtataggcttgttaagagaaaacagtggaagaaaaatgcccaaacaccagttaaatggctctttttagagctccaatattgtctagattagaaagggctgcattttaatatttataatggtttcttgtttattacatcttatttggcctttggaaaatatttcaaggatgaatttcatggttgttactgatgattaagttccacaattaattttaaacttaacatgacctactgc

SEQ ID NO: 388726 - DNA, 514 bp, Homo sapiens
aagttgaacacaagattcttggcactgaccctagcaacttttggcctggagtctaatgaccaggcccagtgagagctctgctgagcaggtttcaggctgaccaaggtcatccagcagcgaaccctgtagatggggtcagaggaagagtctaacttgcagctgtggcctagagtcgccaatgacagcaattattgatggctgtcctttgtcctgacttgggggcagtcagatgacaatgaatataaggatgaagasgttaacatgggactaggtacatgagtataggcttgttaagagaaaacagtggaagaaaaatgcccaaacaccagttaaatggctctttttagagctccaatattgtctagattagaaagggctgcattttaatatttataatggtttcttgtttattacatcttatttggcctttggaaaatatttcaaggatgaatttcatggttgttactgatgattaagttccacaattaattttaaacttaacatgacctactgc

SEQ ID NO: 388727 - DNA, 514 bp, Homo sapiens
aagttgaacacaagattcttggcactgaccctagcaacttttggcctggagtctaatgaccaggcccagtgagagctctgctgagcaggtttcaggctgaccaaggtcatccagcagcgaaccctgtagatggggtcagaggaagagtctaacttgcagctgtggcctagagtcgccaatgacagcaattattgatggctgtcctttgtcctgacttgggggcagtcagatgacaatgaatataaggatgaagacgttaacatgggactaggtacatgagtataggcttgttaagagaaaacagtggaagaaaaaygcccaaacaccagttaaatggctctttttagagctccaatattgtctagattagaaagggctgcattttaatatttataatggtttcttgtttattacatcttatttggcctttggaaaatatttcaaggatgaatttcatggttgttactgatgattaagttccacaattaattttaaacttaacatgacctactgc

SEQ ID NO: 388728 - DNA, 583 bp, Homo sapiens
ctacctctctttgccccttcccctacacattacattgtttcactttggcatttgtttagtatgactgtctctttaacatttgtttccctaataaaactgtaagctccatcatggtaaagacctagcacagttttgctcacttttccacagtgccaggttcttagaagggactcaaatattttttgagtgaataaacatattagtgcctgtggggtgtggttggagtggtagaagactgagagaaagaaaactaaacttttctacttcaaaaagcaagaactgaggagttaatacaagccaaacagcaaggaggccctggtgcccaggtaatggattaaaaaaatggtgggtgggcaacatggcagttggcatgggggtgtaatggaagccatggtgttagttgaagccacttatatgaaataaatagctaatgttcaatttgttggttatttgctagctatgaatgatgggaagccatttcatatcatggaaggaccagtaacatccactatcaacacagtcttgagtgagtagracccagtgagaaaaaagaacacagaggcccaaacagaacggagaggaa

SEQ ID NO: 388729 - DNA, 597 bp, Homo sapiens
atccattacccacctcatggcctgcattcatcccagcctggtagatgagtatttttatgctgaacatgaaaaagagcattcctsttttccagacactcagctataaacttcatggtcagaggcatcgatactatgataatcttctggccaaactttcctctcagtatccatttttaagtgttgattatagatgaaacaggaaagaggaaaacagaataaaataaacacactgtattagttaggtctcttttgtttatgctgcaataacaaccctgaaatcttagtggttcaaaaaaataaaggcttatttctcgctcgtgtaacatgacaatggaagtcaacattagctctccttcaagttgtcttcatttctgatcctagcagaaggagtagcaaaagggtaagagagattaccgaacaaggccataacttaaagtttctgctccaaaatgcacaggtcacttctactcacctttcattgcagaagcaactcccatggccaagactgatatccaaaatgttaagtattgttctccagcagggtcaagccatatggggtggtgtattagttcgttttcacactgctataaagaacta

SEQ ID NO: 388730 - DNA, 509 bp, Homo sapiens
cagtcacatgttgtacagatttgtagcctaagagcaacaaactatactatatatcgcaggtatgtagtaggccataccatctaggttagtataagtacacactatgatgttacacaacaataaaacttcataacaacacatttctcagaaagtattgccattgttaagtgacacctgactgtatatcaaaaatccagactaggacaatctatagaggcaggaggtagattagagatttcctaggactgagagygggagattgagtgattgctatgagtatgggttttttgggaagagagaaagatgaaaatgttctaaaattgatcatagtgatagttgtaaaactccttgaataatgtaaaaaacattaaactgtgtactttaaataggtgagttctatggtatgtaaattatatctcaataaaggtctttttttaatatcctgcaggtcagaggacagtttcgtactgtgtgagactatattgtcatcttctttatgctttgcaaga

SEQ ID NO: 388731 - DNA, 538 bp, Homo sapiens
aactcccatggccaagactgatatccaaaatgttaagtattgttctccagcagggtcaagccatatggggtggtgtattagttcgttttcacactgctataaagaactacacaagactgggtaatttataaaggaaagaggtttaagtgattcacacagttccttgtggctagggaggcctcaggaaacttacaatcatggcagaatgtgagggggaagcaaggcatgtcttacatggtggcagsagacagagagagtgaggtgaaaagtgccacacttttaaacaatcagatcttgtgagaactcactcactatcatgagaacagcttgggggaaactgccctcatgatccaatcacttcccaccaggtccctccctcaatatgtggggattacaatctgagatgagatttgggtgaggacacagcgccaaaccatatcattccaccactggcccctcccaaatctcatgtccttctcgcattccaaaacacagtcatgccttcctaaccgttcctcaaagtcttaactcattccat

SEQ ID NO: 388732 - DNA, 568 bp, Homo sapiens
ggtaagtaaactaaggctcagagagatcatgtaatttcttacagtattcctagcattgtaataactggtagaaataagtctcaaaaccagatctgwctccaaaatacatgcttttggtatgttggtaaaatatctcttgcaaccattagcacacacatgtgcacacacatacaactagtgtatgtcccagaaagggaggaaaaagagggtccctttattacagtatccaggttcacttacagaattctcaggatcttgacaaagaaagaggtttttgctttgcaggctcagaagtctgacaagaggggttgagagagaagacaaaatctaattgactgaagagaaaaagaaagtaagttaaaggtattaagtagaccacacacgtctctccttatggccctgtgctaaggaagcacacagacctgtcggaatgtttcacctcttgcctcagagaatggcagggactgggtaatgtagggttcacatatttatctgcatgtgaatgtaaaatgtgatcctagggattattttcaactttacttagcagagggtagtacagggttaataa

SEQ ID NO: 388733 - DNA, 619 bp, Homo sapiens
tggcattcaggttaagttaggaagagtatagtttattcgagtaaagagggaaaaaacagagacgaagagaactatagttgcaaaggccctgtagtcagaggagtagagcatagataacccaataaaacttgaatgtataaattaatgattgagtgactcagaataacaactaacatttctatggtacttaccatgtgccaggaattattctagcgtttaatttataccaactcatttaacctccacaacaaccctatgtgataggtattatttttgtctccattttgaaaatggggaaactgaattacagagaaaatatgtaacttgtgaaagttgaacaattatcaaactgtgcaactgggatttggacccaggaatctgggctgaagcagataactagggcttctytggtgatctatgaaatccctggaataacatgttattaaatagagcaaatatggtggcctgaaacagggaacatcagttctaaaattgagtctacgagatccaggagcaaagttttttgaaagatgtgagctactcaaaggaatatggaataagaagaagaatgcaatggaattaaacatgcttgaaggttttaaaaactcaattaaaaatg

SEQ ID NO: 388734 - DNA, 539 bp, Homo sapiens
tattaagtccttgtttgtgagtgacttctattgtctaggtactttgcaggctcacaccaggcaacactgggcctgttgttccaatccactttgagattctgtaatttaaacagcacagagcgtgggccagccccgagagttataacctagtttaactggatttagaaaactggttaaactaggctacaactcccttggtcttgaacctgcagttttggttttggttttgtttttctttcccttctgttcagagtataagttcacttgctttagaaaaatggaaacaataagaaaatgraaaatgacaaatatgctggggaatttatttgaactggcacagtagtcttacctataacaaagaaattctttaaacttctagcatttgctaatgacactggccagcactataccataactgcttaagatctgactttcccactagaccagtggttctcaaactccaccccacatctgtgctgtcaggaggtcctgttaagatgcagacagatgccccactcatggtgttgctatttcagtag

SEQ ID NO: 388735 - DNA, 474 bp, Homo sapiens
acttctgagggctatgataagagaaaacaaaaaccttcatgaactgtgcctagcacagtacctggcatgtagtaatcactcaataaaggtaatgaagctacctcttccttctcatccttatgattactgctcttmttttggctaaactgaattcatagtgcatgatacagtgcacacaagcctgactcaaggcattttattatctgcttaggctcaaaataattatgtttgtcgagacataaccatttataaacccaaagtcaatggcttagctttgggtgcccaaagacttggctgttttactttgaaccaggtagttgcattagttaacctgagcctcacttgccccatctaataatcttcataaggttgtgaggctagcatgaataattcatgtattgggtttaacatagtacctggaccttatacaatttcaatacaaaataataacagtaatcatatttattattatta

SEQ ID NO: 388736 - DNA, 474 bp, Homo sapiens
acttctgagggctatgataagagaaaacaaaaaccttcatgaactgtgcctagcacagtacctggcatgtagtaatcactcaataaaggtaatgaagctacctcttccttctcatccttatgattactgctcttcttttggctaaactgaattcatagtgcatgatacagtgcacacaagcctgactcaaggcattttattatctgcttaggctcaaaataattatgtttgtygagacataaccatttataaacccaaagtcaatggcttagctttgggtgcccaaagacttggctgttttactttgaaccaggtagttgcattagttaacctgagcctcacttgccccatctaataatcttcataaggttgtgaggctagcatgaataattcatgtattgggtttaacatagtacctggaccttatacaatttcaatacaaaataataacagtaatcatatttattattatta

SEQ ID NO: 388737 - DNA, 474 bp, Homo sapiens
acttctgagggctatgataagagaaaacaaaaaccttcatgaactgtgcctagcacagtacctggcatgtagtaatcactcaataaaggtaatgaagctacctcttccttctcatccttatgattactgctcttcttttggctaaactgaattcatagtgcatgatacagtgcacacaagcctgactcaaggcattttattatctgcttaggctcaaaataattatgtttgtcgagacataaccatttataaacccaaagtcaatggcttagctttgggtgcccaaagrcttggctgttttactttgaaccaggtagttgcattagttaacctgagcctcacttgccccatctaataatcttcataaggttgtgaggctagcatgaataattcatgtattgggtttaacatagtacctggaccttatacaatttcaatacaaaataataacagtaatcatatttattattatta

SEQ ID NO: 388738 - DNA, 565 bp, Homo sapiens
tgatggttttataaagaggagttccccctgcacaagctctcttgcttgctgccatgtaagatgtgcctatgttcctcctttgccctccaccatgatcgtgagggttccccagccatgcggaactgtgagtccattaaatctcttttctttataaattacccagtctcaggtatgtctttattagcaatgtgagaatggactaacacagatggacagcaggaaaataactggagaatactgatttaaacatttgctttcttcaaggaatgaaaatagagccagatcatccattcatttctcttccagatccagtattaagaatctagaatttcatggctctgatgccaattttggttttgcatattcatcttgttcatttcgccatttttgatagaattgaactgaaaaatgcatccgatgctaaaagtttgaaagaacttttgagataatctttgacttccttatatcatttattcatttaytttgaaaaatattattgagaatctactctgttccgggctgttgggcactattttagacacttagaatacatcaagaaagaaac

SEQ ID NO: 388739 - DNA, 584 bp, Homo sapiens
tttctccaggtctttataaatagaaaacggtgagactgagactaaacctagatctgactgtttcatcatttgtgctcttattaagacatgaatgattctgaccaggtgtcttccrtcaaggagtttaaattatggtgggagatgcagtggtaaacacattgacaagatgattccatggagataggtactgggagaaatataaaatgggacaaagagaagaagactgtagagtgaaggggaaccattttatattaagtataaaaagtattcaaaattttctttgttacgggaaaattcaaatatacaaagtagagagaacagcaaaatgaacccccatgtaacgacagcctcctgcaacaatgtcatctcatagccattcttattctatcttcccaccaactctgatgatttcagttgtaaatctttcattaagtatttgcaaaagataactaactattttttttccttttatacaaaaccacaccaccatgatcacatctaaagacaagttaataattcatggtattattttagatttggggtttgaggaaaggcctgttggaagaggttatgttttgatgata

SEQ ID NO: 388740 - DNA, 386 bp, Homo sapiens
actgggagaaatataaaatgggacaaagagaagaagactgtagagtgaaggggaaccattttatattaagtataaaaagtattcaaaattttctttgttacgggaaaattcaaatatacaaagtagagagaacagcaaaatgaacccccatgtaacgacagcctcctgcaacaatgtcatctcatagccattcttattctatcttcccaccaactctgatgatttcagttgtaaatctttcattaagtatttgcaaaagataactaacyattttttttccttttatacaaaaccacaccaccatgatcacatctaaagacaagttaataattcatggtattattttagatttggggtttgaggaaaggcctgttggaagaggttat

SEQ ID NO: 388741 - DNA, 386 bp, Homo sapiens
actgggagaaatataaaatgggacaaagagaagaagactgtagagtgaaggggaaccattttatattaagtataaaaagtattcaaaattttctttgttacgggaaaattcaaatatacaaagtagagagaacagcaaaatgaacccccatgtaacgacagcctcctgcaacaatgtcatctcatagccattcttattctatcttcccaccaactctgatgatttcagttgtaaatctttcattaagtatttgcaaaagataactaactattttttttccttttatacaaaaccrcaccaccatgatcacatctaaagacaagttaataattcatggtattattttagatttggggtttgaggaaaggcctgttggaagaggttat

SEQ ID NO: 388742 - DNA, 544 bp, Homo sapiens
gttcaaacgttttggagtcaatctctttagaaaaacacctagatggcaggccctagctgtggcgttttcataccagagttaggctgagccaaaaagaaaccaaagtatctgacagtatatctaagtctgcatttcttcctctattcctttcaacttctgcttaggcagaaataaatgggcaactataaaataaatcacaaaaataaaataaaacaaggttagtttttttacagtcctcaagatggaacacagaaatttgtaggctgttttggcctgagtrtaattgagagatgcatttatttatccctaagttttacttttgtctgctcatctaattttgctttattgatagatgttgtcctaggtcaggttctcccagaaacagaatctaagccaagaattcaggtgcaagttatttattaaggaaattctcccaggagaaacctgtaaggaagtggaaaacaagctatcagcagtcttgcaaactgagggaatataaatcagagttcacaaccattaaggtcaagggctctgacccccagat

SEQ ID NO: 388743 - DNA, 544 bp, Homo sapiens
gttcaaacgttttggagtcaatctctttagaaaaacacctagatggcaggccctagctgtggcgttttcataccagagttaggctgagccaaaaagaaaccaaagtatctgacagtatatctaagtctgcatttcttcctctattcctttcaacttctgcttaggcagaaataaatgggcaactataaaataaatcacaaaaataaaataaaacaaggttagtttttttacagtcctcaagatggaacacagaaatttgtaggctgttttggcctgagtgtaattgagagatgsatttatttatccctaagttttacttttgtctgctcatctaattttgctttattgatagatgttgtcctaggtcaggttctcccagaaacagaatctaagccaagaattcaggtgcaagttatttattaaggaaattctcccaggagaaacctgtaaggaagtggaaaacaagctatcagcagtcttgcaaactgagggaatataaatcagagttcacaaccattaaggtcaagggctctgacccccagat

SEQ ID NO: 388744 - DNA, 537 bp, Homo sapiens
catagttttcagtctaagaccaggacccattttcactttaagaccagcactcaagtcagaaatagagacagggctggscacagtggctcatgcctgcagtttcagcactttgggaggccaaggtgggtggattgcttgagcccagaagtgtgagaccagcctggtaaacatagcgagactccatctctacaaaaaataaacaaatttagccaggcttggtgatactcacctgtggttccccactactcaggaggctgaggtagatggatcacttaagcccaggaggtcaaggctacagtgagctgtgattatgccactccactccagactggacaacagagtaaaaccatgtctcaaaaaaaaaaaagaaagaaaagaaaaagaaagaaagaaagaaaaagaaacagagacagtgatttgatctggattttaaatctatatttgggtctgagaaaattagagtctttggcaaatgaggaacttttgcaaaagccattaagattttcataataaatctaaagccactctttaaagctt

SEQ ID NO: 388745 - DNA, 547 bp, Homo sapiens
gatcattttaacagtcagtttctgaagccagccgtacagtctctatgattcactcagatccagggaaaatcatcagactgaccatttttcatctcaaaatatttattctcattggcataagaaaggatttattatcaacttatgcaagatgcagataataaatcagccttaggagtttgtagtagaaatgattaaatatggcaggagtttgagctcatctggtgtctggaatggtttggggttttgaaattctttttaactactattatacagttttaaaamccgaaacatattttcttaaggcttttttccttcatttctgaacccaagcgtatgatcaaggaaaatggaatccttgtgctattgaatgtatttacactccattcagttcagtgcattacaatgtatgacactgacattctcttttgtaggagttatttcaaggcctaaatgattctgaagctaaaattttagggaattttctttcccagcccctgaaagagtcccaaaatttgcaagccatacttttgactcctcacctggaata

SEQ ID NO: 388746 - DNA, 614 bp, Homo sapiens
tcaatatcagctcaaaagaagggagaattatatcgcaattaactgcctacaaatgcaaataatgagttcccccatcactcaaggtgttcaagcaaagactgaaatatcatgacaacgaggttgtaagaaggctggaacctcaaataaatgacctctcagatctgcttcagccccaggttgtatcacgaccatgaccatgtcctcagggatcagcttttaggctgtctctgctgctgtattttatgttctctacaaggaaacatgggagatcaacctcagttagatttcacttctggtgccacttactttgaatgtataatcattccctgcaaaagcagatgagccagtaaaatagcctaccatctgcctctccatgttttttttaataaccattccactagctcctgagaaaaccttctctgtgcagccatgaatcagacaagctgatttgaaaccattatcagagagaatgatgtgccagaatcaaagagcaactctaaagtgagaagaaatatrgaaaataaattctaggatagtctgatacactggggacatttctttgccgttggttcattagaatgatgtcaaaaaccacagtagttattgagtctcca

SEQ ID NO: 388747 - DNA, 587 bp, Homo sapiens
cagcttttaggctgtctctgctgctgtattttatgttctctacaaggaaacatgggagatcaacctcagttagatttcacttctggtgccacttactttgaatgtataatcattccctgcaaaagcagatgagccagtaaaatagcctaccatctgcctctccatgttttttttaataaccattccactagctcctgagaaaaccttctctgtgcagccatgaatcagacaagctgatttgaaaccattatcagagagaatgatgtgccagaatcaaagagcaactctaaagtgagaagaaatatagaaaataaattctaggatagtctgatacactggggacatttctttgccrttggttcattagaatgatgtcaaaaaccacagtagttattgagtctccatcataaaaggaatctcgatttaattgcctttggttgagattctgcacatgggttgtttgctcaggcacgaatttattttgaccaaaattagtcttaatcagcttggctgactaatgatatagcccaaaatcacagccagtgggcagtttgagaggcttctctgacaattcatgtagcagagac

SEQ ID NO: 388748 - DNA, 587 bp, Homo sapiens
atattatacaggggttttcaactgtaccgggggtcagcaccccaaccccccatgttgttcaagagtcaactgtacttaagaataaatttaaccaaggaagtgaaagacctatgcactgaaagctataaaatatttatgaaataaagtgaagaagacacaagtaaatagaaagatgtcccatgttaactatgttaccccatggaaaaaaagaagaaagctatctcatgctaatagattggaagaattaatattgttaaaatgtccatactactcaatgtgatcttcaaactaatgcaatccctatcaaaattccaatggtgtttttcacagaaataggaaaacaaatcctaaaaatgtatatggacaaaaaaaagagccagaataaccaaagaatcgaagtgcaaaaagaacaaagccagaagcatcacattycttggctttgaaatatattacaaagctatagtaaacaaaccagcatgatgctggcataaaaacagacacatagaccaatggaacagaataaagtgcccagaaataagtccatgcctttatgatcaagtgattttcaagagggatgccaagagcac

SEQ ID NO: 388749 - DNA, 589 bp, Homo sapiens
agaagcacagtacctgggacacaacaggaaccaatgaataacagtaagattaactgggaaagccattactacaggcaggtgttttactaatttggtttctggcagaaatgcacttgagtcttggaaggcgaggcagaaaggaaggttgggagttgttttttatgctggaattgagaaacgaagaagagacatgacccaactacactgctcctggaagcagaagcccacaggaagacmgtaccgagagcagctcacccaaatgttgggaaaataggaaaaggggagccttttccccatattctgatattttagtagattcttgctttgactaaagtggtgaacctaaagcacttaggttttgacacgatacaagaatggtaacagcacagtacctggccatggtaagcaagtaggaaccgaaggaacctcagggagaaaggcttgcatctctcaggctctcagcaggaaactgagagcacctcagatggagagactgaggagggcttaataaaggcactatttataaggagtcaggtgggtttaatggaaaccaagaaagtttacataatctggattagctggggtcatt

SEQ ID NO: 388750 - DNA, 551 bp, Homo sapiens
atacatttccatatacatacacttcagggtagatttgactcagttgagaggagtgtgttgaattctttgtcagactgtgatgcctggcctggcaggctgctaaacacctttctttttcttttcttttttaaagaggtgggaattgctatgttgcccaggctggtctcgaacttttgggctcaagcaatcctcctgcctcagcctcctagagtgctgagattacagacatgagccaccatgcccgtccactaaacacctttctattctaatacctctttagattctgcagtaagtagaatcctaggtattagaatagaaagctgaatcaaatgtgaaggatgaaataatctcttctctaccatcttggtgtagacagatgagaagccaagtgcaggtaatttttaaacattgtatacattaaatatgcacatttttatgtcattcatacctcaatagtggttattmaaaggaagaaaaaggaaaaatgtgaaaccaaaagttaagacctgaaaaccaaagttacttgtttgcataaattaaatttcaaagtt

SEQ ID NO: 388751 - DNA, 551 bp, Homo sapiens
atacatttccatatacatacacttcagggtagatttgactcagttgagaggagtgtgttgaattctttgtcagactgtgatgcctggcctggcaggctgctaaacacctttctttttcttttcttttttaaagaggtgggaattgctatgttgcccaggctggtctcgaacttttgggctcaagcaatcctcctgcctcagcctcctagagtgctgagattacagacatgagccaccatgcccgtccactaaacacctttctattctaatacctctttagattctgcagtaagtagaatcctaggtattagaatagaaagctgaatcaaatgtgaaggatgaaataatctcttctctaccatcttggtgtagacagatgagaagccaagtgcaggtaatttttaaacattgtatacattaaatatgcacatttttatgtcattcatacctcaatagtggttattcaaaggaagaaaaaggaaaaatgtgaaaccaaaagttaasacctgaaaaccaaagttacttgtttgcataaattaaatttcaaagtt

SEQ ID NO: 388752 - DNA, 551 bp, Homo sapiens
tctcatttaactttccttgactatcttagataaatagttcttgacaaaatcatgatggtggccaggcatggtggttcacgcctgtaatcccagtactttgggagtccgaggtgggtggatcacctgaggtcaggagtttgagaccagcctgaccaatatggtgaaaacccgtctctactaaaaatacaaaagttagcctggcatggcagcgtgcacctgtagtcccggctactcggcaggctgaagcaggagaatcgattgaacccggaaggcggaggttgcagtgagccaagattgcgccactgcactccagcctgggtgacagagcaagactctgtctcaaaaaaaaaaaaaaattcatgatggcaggaaggttgctccttcctttgcctttcccatataatrtctcatatccatcccacagggagtggtaaagtaaccaaattctcctacaagggcttatagcagttacctctctggaggtataagtgcctgtaatagaggaaaactgaagaagatgcaagccatgggtctctaataatgaaatttca

SEQ ID NO: 388753 - DNA, 647 bp, Homo sapiens
ctttatatgtggtgtctctctttagtcacctactttccaattcattgaatacatttgttaaaatatatctgactgtacgttttcttggtaaaaccttagtttattgttcatgatttaataacctaaatgtcgatggacctggtctcctaacagttgttcctttgtttaaattacattacaaaatttgacacacattgttagaaaactacattttcattaccttatttttcttttctacttaatcattaaacttcctagaacttataagttttttaaaaaycttaaaaatctggtattatttggttagaattgtgtttattttttccactgtcataaaatcatagagtggaaggtgctttagccatcatctattccaatctttcagctcataaatgagaaaatgaagacctgtggtagtgctatgcttaaagtcatagaactcgttagtgcaagcactgagggtttctaaagttctgtctaacgcttctccattaaacacactactctattgtttttttatttatatttaataggtttccttagaaatatatagtttaaaactgtcaacaactgctttaatactgagccttgatcctcagaagcaattgatttaactactcaaactctttcttctgctgtttatacat

SEQ ID NO: 388754 - DNA, 647 bp, Homo sapiens
ctttatatgtggtgtctctctttagtcacctactttccaattcattgaatacatttgttaaaatatatctgactgtacgttttcttggtaaaaccttagtttattgttcatgatttaataacctaaatgtcgatggacctggtctcctaacagttgttcctttgtttaaattacattacaaaatttgacacacattgttagaaaactacattttcattaccttatttttcttttctacttaatcattaaacttcctagaacttataagttttttaaaaatcttaaaaatctggtattatttggttagaattgtgtttattttttccactgtcataaaatcatagagtggaaggtgctttagccatcatctattccaatctttcagctcataaatgagaaaatgaagacctgtggtagtgctatgcttaaagtcatagaactcgttagtgcaagcactgagggtttctaaagttctgtctaaygcttctccattaaacacactactctattgtttttttatttatatttaataggtttccttagaaatatatagtttaaaactgtcaacaactgctttaatactgagccttgatcctcagaagcaattgatttaactactcaaactctttcttctgctgtttatacat

SEQ ID NO: 388755 - DNA, 622 bp, Homo sapiens
ttaatgatgtgctagcaagtcaactaaaccttttaatggattttgttgtgggtgagttgatataaatggggaaatcttgaagtaaaagaaagtagaagcagctsatagaaagggatattattttcctgtagaaggacatctttttagtctttttctcttaccttctctccccgctccccaccgcccacacacacataaaaaagtatttctaaaggaaagaaataatatttagattagtataaaatagcccaaatatcacaggtgaagaggaaaaataactaagtaaatgacacagaaagtaaccatcagaaagccatcgcaagcagcacaaagaaaaacaatgagtttagttgcacagaaagaaagaaatccgagtagagagaaagaaagcaagccaaagaggcacgataatatagtgaagaatagaaagtaaggacaccggaggaaaaacaacaggtgacaattaatgctagagagaggagactaagttgaaagcagcagaacacccagatggaagccaatccgtgagctgattttagagcatctttctcctttggtcacagtaactctcctcctttatgcaccttctctgcaaatacctgaaatacaaggtagctatgac

SEQ ID NO: 388756 - DNA, 528 bp, Homo sapiens
tgcacagaaagaaagaaatccgagtagagagaaagaaagcaagccaaagaggcacgataatatagtgaagaatagaaagtaaggacaccggaggaaaaacaacaggtgacaattaatgctagagagaggagactaagttgaaagcagcagaacacccagatggaagccaatccgtgagctgattttagagcatctttctcctttggtcayagtaactctcctcctttatgcaccttctctgcaaatacctgaaatacaaggtagctatgacctgccaggtcctcttgttaacaggttatcaaaatagatatctcatttatgagataagcagatttcatataggtgctgaagttcctaatatcatcaaaatcccattatttttggacatagttaaaaaacagagaggaagcccacctgtttctgtaacggtcagtgaagctattcagatcactcatgccacgtcacagaaatatatagctagacaaacatttttaattaaaaataattttaaatctttcataaaagcat

SEQ ID NO: 388757 - DNA, 392 bp, Homo sapiens
ataaaaacatcaacagcacagagcaataaagtcaaataaaaatctcactatgmtagagtatttgtaaagaattagcagtaaaaatctaggtggcaaatttacttgttacaattactaaagaatatgaattctcaaatttagtagaaatgctgtcttcatagtcaagggcctcaagtcagttctaaaatattaatttctctcattagtaatgttcttgtttccctgaaaaaaaaaaagttaatgtttatgctgtcacataatactttagcatctgcttttttcatccatcccccaagggtaagaaaattgttaagctttttcctcctctcttggaattcatcagttactgtcaatgaagggcctgtgctatgcacagtaatgtgctatgtttt

SEQ ID NO: 388758 - DNA, 568 bp, Homo sapiens
ttatttctaccactcttgtccaggccaccatcttttataacatggactactcaatagctctccccacctctaaatgccttattcactcaggagccaaggtaatctggctaaatattaatcagataacataactctcctatttaaagcttcctagtgtcttagaattaaatccatacacacttaaaaagaatatcatgacctggcctctgcctaccttgtaggacttccccttccaccgtatgctccaatcatattgttctttctgccacctactatggagggcttgcctttagagtctagtttctaacagatagaacaggtctactaacttttctctgataagaaacttcttctatttaatctgggtatagctgaaatgtcacctcttccaagaagtctttttcttattctagtctcaagtggctgcttatcactctctattaccctattttaattttctgtatagtgcttayagttgtctaatatttttctttttttattttttctctgcatgcattacgtgagaattttgaccttgactatcttgattgatgctttaaccccagaa

SEQ ID NO: 388759 - DNA, 568 bp, Homo sapiens
ttatttctaccactcttgtccaggccaccatcttttataacatggactactcaatagctctccccacctctaaatgccttattcactcaggagccaaggtaatctggctaaatattaatcagataacataactctcctatttaaagcttcctagtgtcttagaattaaatccatacacacttaaaaagaatatcatgacctggcctctgcctaccttgtaggacttccccttccaccgtatgctccaatcatattgttctttctgccacctactatggagggcttgcctttagagtctagtttctaacagatagaacaggtctactaacttttctctgataagaaacttcttctatttaatctgggtatagctgaaatgtcacctcttccaagaagtctttttcttattctagtctcaagtggctgcttatcactctctattaccctattttaattttctgtatagtgcttatagttgtctartatttttctttttttattttttctctgcatgcattacgtgagaattttgaccttgactatcttgattgatgctttaaccccagaa

SEQ ID NO: 388760 - DNA, 553 bp, Homo sapiens
cataatcccagtccgagaagtcttctcctttgatcttattaagaaaaatagattgagacaccctagacctcaaaataagccttctggttccacttgggcaaaatatgattgcagccaagcgcaagagggatttcaatagcttagagactcatggtccactggaccttggaatcttgttggaggctttgaaatatttataattagtcaccatatttagaactgaggaatctctatattttctgtacatgtggtaggttattaatcattgtatagatttgaaattattgattttagactgttaatttcattttaaagagatcaacagggaattaatatccttctagtaattttggttgaactgtcactggaggtgaacttgttatcctgaggggaaatttgtccttgggttcttctgaattgcctggttcatttgtttctttagcaacgttgtcagcttttccttaagggctggtttatgtgtcaaggacttcaytaggaatagaacagggaaatcttgcacagggccctggaagagccagtggggaggaaatgt

SEQ ID NO: 388761 - DNA, 546 bp, Homo sapiens
tcgtaagacattttcactaccaaaaataatagtaatgaattgttaatattgtamataatgaactttaaaaaattacaaacatagccatcctgagtggcagtcgcattgggcggatatttgagtgctgatgggtaaacatgactacaatcagtaaacataaactaaaacataactggaatcagtaaacaaactaaaacctaactggtagcaaaagtaacaaattggtcctgattctgttgaagttgtcaacaccctctagcggaaatatgtttttttttaaaagcaagtttttaaatgcagagacctttctcacacatttttccagtcattgaaatttggcagttacagaaactaacatttggaggcagtaaaaaaacagtgtagtgtttcattttattatagtaaataaatgtaaatcatttaatacagtttgttgcctcattcagaaaaccaacccaaaatgaagcaaaaacgaatggaaatctagaaagaacaggaaccacaggagaacagaaactactgattcaatgtttctgctttgtctgg

SEQ ID NO: 388762 - DNA, 546 bp, Homo sapiens
tcgtaagacattttcactaccaaaaataatagtaatgaattgttaatattgtacataatgaactttaaaaaattacaaacatagccatcctgagtggcagtcgcattgggcggatatttgagtgctgatgggtaaacatgactacaatcagtaaacataaactaaaacataactggaatcagtaaacaaactaaaacctaactggtagcaaaagtaacaaattggtcctgattctgttgaagttgtcaacaccctctagcggaaatatgttttttttwaaaagcaagtttttaaatgcagagacctttctcacacatttttccagtcattgaaatttggcagttacagaaactaacatttggaggcagtaaaaaaacagtgtagtgtttcattttattatagtaaataaatgtaaatcatttaatacagtttgttgcctcattcagaaaaccaacccaaaatgaagcaaaaacgaatggaaatctagaaagaacaggaaccacaggagaacagaaactactgattcaatgtttctgctttgtctgg

SEQ ID NO: 388763 - DNA, 546 bp, Homo sapiens
tcgtaagacattttcactaccaaaaataatagtaatgaattgttaatattgtacataatgaactttaaaaaattacaaacatagccatcctgagtggcagtcgcattgggcggatatttgagtgctgatgggtaaacatgactacaatcagtaaacataaactaaaacataactggaatcagtaaacaaactaaaacctaactggtagcaaaagtaacaaattggtcctgattctgttgaagttgtcaacaccctctagcggaaatatgtttttttttaaaagcaagtttttaaatgcagagacctttctcacacatttttccagtcattgaaatttggcagttacagaaactaacatttggaggcagtaaaaaaacagtgtagtgtttcattttattatagtaaataaatgtaaatcatttaatacagtttgttgcctcaytcagaaaaccaacccaaaatgaagcaaaaacgaatggaaatctagaaagaacaggaaccacaggagaacagaaactactgattcaatgtttctgctttgtctgg

SEQ ID NO: 388764 - DNA, 617 bp, Homo sapiens
gtggatggagaggcaatgctgaagaccaggttgaagagagaggaaggtgagaaccctgtgtggggtgtccacatgccaggtttagttcctggccccaaatggytcctgggaaaggggtgagtgagggaactgagggatgcattatgcttgcagcagacctctaagatcctagctacagggaaccttgtatcccccatggatgtgtgagctggcagtggatttccctagggaacaggtagagacagccctttggacagcaagggacctgggagcttttgtgagccaggcaagtccagcagacaatggccacagatgccaattcctcagagatccccattctcctccaggaggcaaagccccagctgatctccaagccaggagacagtggggctagcttccctatgagagtgagacacatctgctctacaaggcttcatacctgccggtccctcccagggtccatgcctagtcatcctgcaggagaggtgcaggagtgggtgcacagtgcaacccccacagcccagcctgagtatgttgctgcacctgagtgatttcctggtgacccaggagcatataagatcccctaggagagttggaactagaacctgaaccccaag

SEQ ID NO: 388765 - DNA, 598 bp, Homo sapiens
tgatggtacaagaaaaacattcttccaawataatgaccatgcttgcttaagaagaaaagaatcatctttattttgttttgttaaataccaccattaactgcagaagctatgattcattgctcgtgcagtaatatatgcccttttaaagtcattctggaactatggcattaacacctatgaagattttgcaatcatgtatgccctagatcactcgctgaatgtacattcatgtaaaaatatgtttagaacaagactgaacattttttgatattaaagtcacttttgattattcattctgatactaaatggacatttccaccatttttcttataatatctgagttctagaggcacagataatttacaatgaagcaacagttcctggctgcctgaggatcactcagagggattacaacaacaggtttctggactccagccccagagtttctgatttggtgctactagggtggagcagagagtacacgtctaacaagttccaggtgatggagatgctgatttcctggggaacacacaagaaacactgcaataatgaaacaggcagggagaatgccaaaaggccattttttgggaaaagaaaa

SEQ ID NO: 388766 - DNA, 598 bp, Homo sapiens
tgatggtacaagaaaaacattcttccaaaataatgaccatgcttgcttaagaagaaaagaatcatctttattttgttttgttaaataccaccattaactgcagaagctatgattcatygctcgtgcagtaatatatgcccttttaaagtcattctggaactatggcattaacacctatgaagattttgcaatcatgtatgccctagatcactcgctgaatgtacattcatgtaaaaatatgtttagaacaagactgaacattttttgatattaaagtcacttttgattattcattctgatactaaatggacatttccaccatttttcttataatatctgagttctagaggcacagataatttacaatgaagcaacagttcctggctgcctgaggatcactcagagggattacaacaacaggtttctggactccagccccagagtttctgatttggtgctactagggtggagcagagagtacacgtctaacaagttccaggtgatggagatgctgatttcctggggaacacacaagaaacactgcaataatgaaacaggcagggagaatgccaaaaggccattttttgggaaaagaaaa

SEQ ID NO: 388767 - DNA, 575 bp, Homo sapiens
gttattgtatggaagtcactgattcagtttattgaagcacaaattaaaactyttcaggagatacttacccttttctgttcttttatatactctatcaattcatctcttgttcttttcactgcctcttccacagccttttcacttcgtttctgctcttctattattgctgccttaacagtataaaatttgtgggagaaggcaaaacagtcagggaggtgagcactatgacatatctgtgtccatttcatataaactaaacatcctcttcagcgggtttcagctcattctattcaaagtgtacctttacacaggaataagaacttacagaatcttttgcgatctgttagagagttcacagaactccctttcctaaactgaatgaaaggaaaggaacggaatatgccatttattgcagggagtgcctgacagattccaatggcttccctaccaacctttcatttgatgtttacatgattcattgccttcctgtattttgcactatccacataagacttccaacttgtgtttattcttccaagaacactctaatgctctacctgttttattcacgttta

SEQ ID NO: 388768 - DNA, 575 bp, Homo sapiens
gttattgtatggaagtcactgattcagtttattgaagcacaaattaaaactcttcaggagatacttacccttttctgttcttttatatactctatcaattcatctcttgttcttttcactgcctcttccacagccttttcacttcgtttctgctcttctattattgctgccttaacagtataaaatttgtgggagaaggcaaaacagtcagggaggtgagcactatgacatatctgtgtccatttcatataaactwaacatcctcttcagcgggtttcagctcattctattcaaagtgtacctttacacaggaataagaacttacagaatcttttgcgatctgttagagagttcacagaactccctttcctaaactgaatgaaaggaaaggaacggaatatgccatttattgcagggagtgcctgacagattccaatggcttccctaccaacctttcatttgatgtttacatgattcattgccttcctgtattttgcactatccacataagacttccaacttgtgtttattcttccaagaacactctaatgctctacctgttttattcacgttta

SEQ ID NO: 388769 - DNA, 575 bp, Homo sapiens
gttattgtatggaagtcactgattcagtttattgaagcacaaattaaaactcttcaggagatacttacccttttctgttcttttatatactctatcaattcatctcttgttcttttcactgcctcttccacagccttttcacttcgtttctgctcttctattattgctgccttaacagtataaaatttgtgggagaaggcaaaacagtcagggaggtgagcactatgacatatctgtgtccatttcatataaactaaacatcctcttcagcgggtttcagctcattctattcaaagtgtacctttacacaggaataagaacttacagaatcttttgsgatctgttagagagttcacagaactccctttcctaaactgaatgaaaggaaaggaacggaatatgccatttattgcagggagtgcctgacagattccaatggcttccctaccaacctttcatttgatgtttacatgattcattgccttcctgtattttgcactatccacataagacttccaacttgtgtttattcttccaagaacactctaatgctctacctgttttattcacgttta

SEQ ID NO: 388770 - DNA, 620 bp, Homo sapiens
tgaggggcatttggcaaagtctgagacttttttaaaagtcacagctcaaggacagaggggcatactactggcatctagtgtgtagaggccagasatgccgctaaatatcctacagtgcccagcacagccctccataacacagagttgtccagcaaaaatcactggtggtgttggaatggagaaccttgccccagtggttttcaaacatgggtctgatgcttacttggcatcagagaagcagtaaaactaggtgatctttataacccttccttccagtgctgagattccgagattcagttatttcagctttgggttaagtcggtcttaccaatggcgtgaagggcaaacagctgatcaaagggcctgatagcagagtgcttgctggagccgttaacaagcaccgcaagccagtcacgccctttgctgaggataaaagtcctgggaaaccagcatgcgatatttctcccccagtgtgtctttgctgtattcttggcattcttcagtccaagagccatacctaaattggaacatttacgagtgttatgaggttgcaggaaacaaccatttgcctaagtaaaaataggtacagtactaacctatagtagagaaaatactgcgtg

SEQ ID NO: 388771 - DNA, 365 bp, Homo sapiens
ctcactgcaacctctgcctcctgggttcgagctattctcctgcctcagcctccagagtagctgggattacagggatgcaccaccacgcccagctaatttttgtacttttagtagagacagggttttaccatgttggctaggctggtcttgaactcctgacctcaagcgatcctcccatctcagcctccaaaagtgctgagattacaggcatgagccaccatgcycagcctattacccattttaaaaattaggctgttttcttattatagagtttgagagttctctgtataatctggactatagttgtttatcaggtatgtattttgaaaatatttttcccagcctattgtttttcttttcatttt

SEQ ID NO: 388772 - DNA, 602 bp, Homo sapiens
tgaatcccagggctcagtctaacttcaagggagcagagtagtctaatactctgtgtagaagaagtggaacttggttacatttgtaatgtstgccacagggtggtactaactttgtgattttcatatctgtgtacatatgttgatatatgcatatatacatacaaatgtaaacatgtatacacatatatattcacatatataagcttcaaaattatttgctcagaggaaatcttacatggaaacgtaagtataacaaatgaaagaactactgaggatgatgttcttggctttcatcacccttctatacttgaggaagaccaatgtttcacaatccctggacagttgtaaaatgctatgatgctattcagtggtcagaaacagaataacttaagaaactcgcttaaaaataacagaccagcacaattattaaaatcagatgtaagtagaatcatgtaactgagaagacctatactgtatgaaaaagttaaccaactcacaaagaaactgagaagagagacaaaaaacaggtcaaatcccagtctgaataaatatcattcccaatagcatgaagaggatttgggtccccaaatcctagtaaatat

SEQ ID NO: 388773 - DNA, 602 bp, Homo sapiens
tgaatcccagggctcagtctaacttcaagggagcagagtagtctaatactctgtgtagaagaagtggaacttggttacatttgtaatgtctgccacagggtggtactaactttgtgattttcatatctgtgtacatatgttgatatatgcatatatacatacaaatgtaaacatgtatacacatatatattcacatatataagcttcaaaattatttgctcagaggaaatcttacatggaaacgtaagtataacaaatgaaagaactactgaggatgatgttcttggctttcatcacccttctatacttgaggaagaccaatgtttcacaatccctggacagttgtaaaatgctatgatgctattcagtggtcagaaacagaataacttaagaaactcgcttaaaaataacagaccagcacaattaytaaaatcagatgtaagtagaatcatgtaactgagaagacctatactgtatgaaaaagttaaccaactcacaaagaaactgagaagagagacaaaaaacaggtcaaatcccagtctgaataaatatcattcccaatagcatgaagaggatttgggtccccaaatcctagtaaatat

SEQ ID NO: 388774 - DNA, 626 bp, Homo sapiens
cacacacacacacacacacacacacacacacacacacacactcacgcatgtcttccctgtccacttgttactggggcttagatccaatttagtccacagaggtgcatgcttagamaaaagctgttttttttctcagcaagttgtatgcttattgcatctgtgtatatatacgttaaaaagaaatgcacagacagaataatgcacaccaaaataaatactttgaaacagtgggtacttctggatactaggagttttttctctactggcttctaaaagctttctatttttctaagacatcataattataagaaattataaataaacataattataagtaattactttcattataaaaaaattaaaaggaggtatgttttcttccaaagaggtcatactagtagctaagacacacatatacaaataatagtatacatcccaatgtggcaagtgctgtctataagaactttatgttataagagtataccacatagcaaatgactttaactttactggatggagtcacatcctggacctgagatccattcctgtctgaacaggatccctgtaaatagaccatagcttaggcccagtatcaggctctaaaggttaccattgttttattatga

SEQ ID NO: 388775 - DNA, 653 bp, Homo sapiens
atgttggttgactgatgcatttttagagattttattgttactactccaattcttggtcttcacagaagtcttttgctctgcaaagcaggaatgcataggatagggagggttaggtcttctgctctgctgtaatgagtcagcatctagaaagtcagagcactgctgatttacagtccagctggatgtcttttgagcttcatcacatggccattttcctgttggcaggagtctctgtgctggctgatgacccttaggcagccaccatattctgatraagcaaattgactgtgctgctttaaatttgtatcatgcctgttgctgaaaaagtagggaatctggggattatccaggcccctccaacaagctctcttcaccaggttttgggcaggaaataagagagtggtgaagctctcattattctgaaacacttgagcatgaatctttctgatgacagagattggcccaatgcctcgggcagagatataatcaatgaatacaaccagcaatagtgcttataatttaaccttttttctgcaaaaggatttcctggctcactcagctcaaatgtcttttcttccaggcacttaccactttattttgaagttttatttttccacatccagttccacagctctgcagaatgttggttgagg

SEQ ID NO: 388776 - DNA, 545 bp, Homo sapiens
acttgccttgtggccatatttcatagacgtcagatattttcccatttagggctttgcatagatttttccctccaaaatattaacatagtgtattagtccattttcacatkgctataaagaaatatccaagactgggtaatttacaaaaaagagctttaatgaagtcacagttccacatggctggggaggccttgggaaacttacaatcattgcagaaggggaagcaggcacatcttacacggtggcaggagagagggaaagtgtgaaggaggaactgtcaaactcctataaaaccatcagatcttgtgagaactcactattatgagaattgcgtggaggaaaccacccccataattcgatcacctcccaccaggtatctcccttgacatgtggggtttatggggataataattagagatgatatttgggtggggacacagaatcaaaacatgtcacatagcttaaccttctcatctcaaatatttgcccaaatgtcactttctcaaagaagactctactgacaacccttaaacttagtcatctct

SEQ ID NO: 388777 - DNA, 595 bp, Homo sapiens
gtttagtcacatgccagaagaaaaggtaattcataaatagtgattttaaggaaaggtaaagtcttactattcaaatgaatatatgaaatactgaaacagtctgtcattctatatcatgtcatatgcagttcatttcctagactttctacaccagttcactctaccatatttcatggcttttatctaaagagtgaatgatgaaaaataattatcaacttctctctaaaaccagaaaaccttggataaaaatggatattgaaaaattattactacaagttttgtttgtcattttgaggtggagttgcacttagaagccccaatttatacagtccaaccggccagaactttataacatctggtgccatttttaaaattatgttgtcttctaactgatttttatttgaaatgcattgattcaggtatcacaaataaaaaatatttatatttaggagccagtaaattctagttattttagatataggcaatgtctaatcaaagaaagagaaagtaagtgaaaaggaggcaatgtcaagatraaatcacaacaactgctttttaggaagataagaatgtcacacccgtcttagcatttcac

SEQ ID NO: 388778 - DNA, 489 bp, Homo sapiens
atcttgcattccacaactcacaactgtagttggagttttcatgttaacttacacatgtgtrtatacaaataatctgtacagaaagatattattgacaagcttgaaaatagatgtgcattgttaggttgaaatgcttttgagtctcactcatgaatatagctagtctgcttcaagtttacttatggagttcttccattctgcccacccgctaccgtttttaaagcagtcaaccgtgtttagaggaacatttattcccaaaggatatatttgaaaaataacaatctttggattcaggataactaacaaattcaatatagaataaataaataatgaacccacacttagacgagtgctagtaaatttacagaatgtcaaggaaataagattatcaaaaataccagacaaaaaaagaaaaatcaccttccccaaatcagttgcaatgaagaatgatttaccaataacaacactggaagctagaagacagaggaa

SEQ ID NO: 388779 - DNA, 489 bp, Homo sapiens
atcttgcattccacaactcacaactgtagttggagttttcatgttaacttacacatgtgtgtatacaaataatctgtacagaaagatattattgacaagcttgaaaatagatgtgcattgttagkttgaaatgcttttgagtctcactcatgaatatagctagtctgcttcaagtttacttatggagttcttccattctgcccacccgctaccgtttttaaagcagtcaaccgtgtttagaggaacatttattcccaaaggatatatttgaaaaataacaatctttggattcaggataactaacaaattcaatatagaataaataaataatgaacccacacttagacgagtgctagtaaatttacagaatgtcaaggaaataagattatcaaaaataccagacaaaaaaagaaaaatcaccttccccaaatcagttgcaatgaagaatgatttaccaataacaacactggaagctagaagacagaggaa

SEQ ID NO: 388780 - DNA, 489 bp, Homo sapiens
atcttgcattccacaactcacaactgtagttggagttttcatgttaacttacacatgtgtgtatacaaataatctgtacagaaagatattattgacaagcttgaaaatagatgtgcattgttaggttgaaatgcttttgagtctcactcatgaatatagctagkctgcttcaagtttacttatggagttcttccattctgcccacccgctaccgtttttaaagcagtcaaccgtgtttagaggaacatttattcccaaaggatatatttgaaaaataacaatctttggattcaggataactaacaaattcaatatagaataaataaataatgaacccacacttagacgagtgctagtaaatttacagaatgtcaaggaaataagattatcaaaaataccagacaaaaaaagaaaaatcaccttccccaaatcagttgcaatgaagaatgatttaccaataacaacactggaagctagaagacagaggaa

SEQ ID NO: 388781 - DNA, 489 bp, Homo sapiens
atcttgcattccacaactcacaactgtagttggagttttcatgttaacttacacatgtgtgtatacaaataatctgtacagaaagatattattgacaagcttgaaaatagatgtgcattgttaggttgaaatgcttttgagtctcactcatgaatatagctagtctgcttcaagtttacttatggagttcttccattctgcccacccgctaccgtttttaaagcagtcaaccgtgtttagaggaacatttattcccaaaggatatatttgaaaaataacaatctttggattcaggatractaacaaattcaatatagaataaataaataatgaacccacacttagacgagtgctagtaaatttacagaatgtcaaggaaataagattatcaaaaataccagacaaaaaaagaaaaatcaccttccccaaatcagttgcaatgaagaatgatttaccaataacaacactggaagctagaagacagaggaa

SEQ ID NO: 388782 - DNA, 643 bp, Homo sapiens
agctaccacttaatttatttgcttccattcacaaccagtttctttaaagagctttctatatttatgtctccagttattgtttatattttcttgattttaaaawggaaaagtggacatatcataagtgtatagcttgaggattttttacaaattgaacacacgcatgaaaatagtactcagaacataacattaccagcatcccaaagatctctcttttatctggttccaagaacgactgcctcacattgtcaatttttctgggtcctaacaccatagattgctggtgtgtgtttgttttatttgttgttgttttgtttttgttttttttttacataaaaggagtcatatagtatgtactccatttgtatgcattccttgaatcaacattatcttactgagttacacattttattttataaaatagtgtatccatttccttttaaacacactctttgtcaggctttttttcccatccctccacgagtactactattatcaagtcaaaataatcccacattgctcaactcactgacccaatatgatcctactggacctacttgatctcgtttatttacttttttaatacacaatctttaatttgccatcagagcacttccatcttgtagttttctatttttctcat

SEQ ID NO: 388783 - DNA, 643 bp, Homo sapiens
agctaccacttaatttatttgcttccattcacaaccagtttctttaaagagctttctatatttatgtctccagttattgtttatattttcttgattttaaaaaggaaaagtggacatatcataagtgtatagcttgaggattttttacaaattgaacacacgcatgaaaatagtactcagaacataacattaccagcatcccaaagatctctcttttatctggttccaagaacgactgcctcacattgtcaatttttctgggtcctaacaccatagattgctggtgtgtgtttgttttatttgttgttgktttgtttttgttttttttttacataaaaggagtcatatagtatgtactccatttgtatgcattccttgaatcaacattatcttactgagttacacattttattttataaaatagtgtatccatttccttttaaacacactctttgtcaggctttttttcccatccctccacgagtactactattatcaagtcaaaataatcccacattgctcaactcactgacccaatatgatcctactggacctacttgatctcgtttatttacttttttaatacacaatctttaatttgccatcagagcacttccatcttgtagttttctatttttctcat

SEQ ID NO: 388784 - DNA, 643 bp, Homo sapiens
agctaccacttaatttatttgcttccattcacaaccagtttctttaaagagctttctatatttatgtctccagttattgtttatattttcttgattttaaaaaggaaaagtggacatatcataagtgtatagcttgaggattttttacaaattgaacacacgcatgaaaatagtactcagaacataacattaccagcatcccaaagatctctcttttatctggttccaagaacgactgcctcacattgtcaatttttctgggtcctaacaccatagattgctggtgtgtgtttgttttatttgttgttgttttgtttttgttttttttttacataaaaggagtcatatagtatgtactccatttgtatgcattccttgaatcaacattatcttactgagttacacattttattttataaaatagtgtatccatttccttttaaacacactctttgtcaggctttttttcccatccctccacgagtactactattatcragtcaaaataatcccacattgctcaactcactgacccaatatgatcctactggacctacttgatctcgtttatttacttttttaatacacaatctttaatttgccatcagagcacttccatcttgtagttttctatttttctcat

SEQ ID NO: 388785 - DNA, 537 bp, Homo sapiens
ctgtgtggatgacaaaataaacagctccaattactgaataatttcttagctaagcttatttatttctaatgagttttctctgtattttcgacaatttatgggagagtttataaaatcattttttaaatgtataataactgaccattatctgagaattgagattatgcaggtaagtaaatttaataatgcttagtgyaaatgtttttacttcccaacctcctgaaattgtctaaatttcctatagagaaatacaattcactagaaaatggccaattctgttttatttttgaatcaatcaatctagcagtgtctactagctatatgaacacacaaaacaacaaatcaagattccctttcagcgtctgcatctaaaatactgctccatgctaaaattacttaagataattcctaagaaaaactttttacattttactacacttgattttcgtgtttcttgctctcatttactgcaggaaaaatcttttcagaaaattggtcaatcttataatgcaaatataccttaaccaggatttttta

SEQ ID NO: 388786 - DNA, 537 bp, Homo sapiens
ctgtgtggatgacaaaataaacagctccaattactgaataatttcttagctaagcttatttatttctaatgagttttctctgtattttcgacaatttatgggagagtttataaaatcattttttaaatgtataataactgaccattatctgagaattgagattatgcaggtaagtaaatttaataatgcttagtgtaaatgtttttacttcccaacctcctgaaattgtctaaatttcctatagagaaatacaattcactagaaaatggccaattctgttttatttttgaatcaatcaatctagcagtgtctactagctatatgaacacacaaaacaacaaatcaagattccctttcagcgtctgcatctaaaatactgctccatgctaaaattacttaagataattcctaagaaawactttttacattttactacacttgattttcgtgtttcttgctctcatttactgcaggaaaaatcttttcagaaaattggtcaatcttataatgcaaatataccttaaccaggatttttta

SEQ ID NO: 388787 - DNA, 537 bp, Homo sapiens
ctgtgtggatgacaaaataaacagctccaattactgaataatttcttagctaagcttatttatttctaatgagttttctctgtattttcgacaatttatgggagagtttataaaatcattttttaaatgtataataactgaccattatctgagaattgagattatgcaggtaagtaaatttaataatgcttagtgtaaatgtttttacttcccaacctcctgaaattgtctaaatttcctatagagaaatacaattcactagaaaatggccaattctgttttatttttgaatcaatcaatctagcagtgtctactagctatatgaacacacaaaacaacaaatcaagattccctttcagcgtctgcatctaaaatactgctccatgctaaaattacttaagataattcctaagaaaaactttttacattttwctacacttgattttcgtgtttcttgctctcatttactgcaggaaaaatcttttcagaaaattggtcaatcttataatgcaaatataccttaaccaggatttttta

SEQ ID NO: 388788 - DNA, 543 bp, Homo sapiens
tctagcagtgtctactagctatatgaacacacaaaacaacaaatcaagattccctttcagcgtctgcatctaaaatactgctccatgctaaaattacttaagataattcctaagaaaaactttttacattttactacacttgattttcgtgtttcttgctctcatttactgcaggaaaaatcttttcagaaaattggtcaatcttataatgcaaatataccttaaccaggattttttagaaactataattctcaaaactcttcaactttggactttgaaatttaagacaagggagtttggaaaaatatatcgccttaattttaaacattgcctccctgttagaagagacagtctttttaatcagtctgtatccctctatgctgttaaaatacctgtgaatttcaagtgcaatataattggcattataaaagaagatctagcaaagtgttgttgarcagtaaaggacacagagatattatgtccccttgttactatgaataaaactacccagacaccaattaacatctcattgctatgattact

SEQ ID NO: 388789 - DNA, 551 bp, Homo sapiens
aagtttgaggccaaagcagccagaataaagctttgctaaataccaaggctagaaccaaacataaggaatctctgattccccatttatttacaatatttgctaacagatttatattctcaatcacattttactcatactaacaatttcttttaattcctatgtaactataaaattttagaactagatgttgaatcaaatactttctttgcacagagagatgtgacaaactgatagatttcttgatattgaaccaaatttgcatttgtagaataaactctgcttggtcatattattttaatactattctaatctggtttaacattatttatttcatttaacataattaattatattgaagtgtacatgattctttcccatacgttaccttctctagcatggaacatagtttcgtttttcaaaatcatatcaatttactagttacatattcactttttgaacttasatatccaagaaatgaattcacaatgaatgttttgctctgcatatatatatctgatttaatgatcaaatatcttacatctattgtattc

SEQ ID NO: 388790 - DNA, 607 bp, Homo sapiens
agctattttaatctgaatcttytctcttttttcttagtctaggtttaataaaagtttgttattcttgtttatttttaaaaaaaaaaaccaactcattttgttgatattttaaattatttttctagtctctattttatgtttgctctgagctttattattttcccccttctgtgaattttggactcagtttgttcttgttttttttttttatttcattttattttatttcttcaatgcctagttaggctttgtattagatttttttttttgatgtaggtgtttatcaccatattgttttgctatgtcccataggttttaatatgatgtatttttattctaatttgtctgcataatttttaaaatttctttattgacccattggtcatttaggagcattttgtttagtttccatgtatttgcaaagtttccgattttttttgctgattttctatgtatttgcattttcgatgtatttgcaaagtttccaatttttcttgctgatatcattgtattcagaaaagacacttggcacaatttctttttataatatctttttaaatttgttaaacttatttcttggtctaacatgatttatctcggaaaatgt

SEQ ID NO: 388791 - DNA, 607 bp, Homo sapiens
agctattttaatctgaatcttttctcttttttcttagtctaggtttaataaaagtttgttattcttgtttatttttaaaaaaaaaaaccaactcattttgttgatattttaaattatttttctagtctctattttatgtttgctctgagctttattattttcccccttctgtgaattttggactcagtttgttcttgttttttttttttatttcattttattttatttcttcaatgcctagttaggctttgtattagatttttttttttgatgtaggtgtttatcaccatattgttttgctatgtcccataggttttaatatgatgtatttttattctaatttgtctgcataatttttaaaatttctttattgacccattggycatttaggagcattttgtttagtttccatgtatttgcaaagtttccgattttttttgctgattttctatgtatttgcattttcgatgtatttgcaaagtttccaatttttcttgctgatatcattgtattcagaaaagacacttggcacaatttctttttataatatctttttaaatttgttaaacttatttcttggtctaacatgatttatctcggaaaatgt

SEQ ID NO: 388792 - DNA, 607 bp, Homo sapiens
agctattttaatctgaatcttttctcttttttcttagtctaggtttaataaaagtttgttattcttgtttatttttaaaaaaaaaaaccaactcattttgttgatattttaaattatttttctagtctctattttatgtttgctctgagctttattattttcccccttctgtgaattttggactcagtttgttcttgttttttttttttatttcattttattttatttcttcaatgcctagttaggctttgtattagatttttttttttgatgtaggtgtttatcaccatattgttttgctatgtcccataggttttaatatgatgtatttttattctaatttgtctgcataatttttaaaatttctttattgacccattggtcatttaggagcattttgtttagtttccatgtatttgcaaagtttccrattttttttgctgattttctatgtatttgcattttcgatgtatttgcaaagtttccaatttttcttgctgatatcattgtattcagaaaagacacttggcacaatttctttttataatatctttttaaatttgttaaacttatttcttggtctaacatgatttatctcggaaaatgt

SEQ ID NO: 388793 - DNA, 595 bp, Homo sapiens
taccattgaccccacagaaatacaaaaaactcttggagactattatgaacacttattagcacataaactggaatacctcgaaaaaatgggtaaattcctggaaacatccaatctcccaagattaaaccaggaagaaattgaaacccagaacagaccaaactgaatcagtaatttaagaagaaaaaaaaaaaacctatcaaccagaaaaaccccaggacaagatggattcaragctgaattctagcagatgtttgaagaagaactgttacaaatcctactgaaactattgaaaaaaattacgagaaggggtttctctctaactcattctttcaggccagcatcactctgatatcaaaaatggcagagacacaatgacaaaaaaagaaaacttcaggccaatatccataaggaacatggatgcaaaaatcttcaacaaaatactagcaagctgaatcttaactgcacatcaaaaacgctaatccaacatgatcaagtaggctttattcctgggatacaaagttggttccacatacacaattccataaacaagactcaccacataaatagaactaaaaacaaaaatagcataatcatc

SEQ ID NO: 388794 - DNA, 583 bp, Homo sapiens
gctctggcagagggtggccataggcacacatccaccaggactccccatctccctctgagaagttctggctccagttgactgcaggcaaagagagagcaggattgacttccccatcagacaagggcatgcttattctgaaggccctcctcctagtcagcccctcccaggtcccctgactggccatcctgcagggatatgtgcacagtgcagcctccattgtccagtctgggtgctttggggcaactgaatactttcctggtgacctgagagcattttaaattccatagggcatctggaactcaaccccaagctgcaggccagtccyggagcctccaggctggggacataggttgggagtgttgagctaggatctgtggtctgcacttatgtaggagaggagcccccactctcagagcactgagaggagtgagaagggcaggtttgtggaatggtgtggaagtggagcctacttcccttctcagggccaatctgggaaggatggggcgtatctccctgctgaggccactacccaggggaaaccactgcccagaacacctgacaaatgaattgcaagtgccacacc

SEQ ID NO: 388795 - DNA, 583 bp, Homo sapiens
gctctggcagagggtggccataggcacacatccaccaggactccccatctccctctgagaagttctggctccagttgactgcaggcaaagagagagcaggattgacttccccatcagacaagggcatgcttattctgaaggccctcctcctagtcagcccctcccaggtcccctgactggccatcctgcagggatatgtgcacagtgcagcctccattgtccagtctgggtgctttggggcaactgaatactttcctggtgacctgagagcattttaaattccatagggcatctggaactcaaccccaagctgcaggccagtcccggagcctccaggctggggacataggttgggagtgttgagctaggatctgtggtctgcacttatgtaggagaggagcccccactctcagagcactgagaggagtgagaagggcaggtttgtggamtggtgtggaagtggagcctacttcccttctcagggccaatctgggaaggatggggcgtatctccctgctgaggccactacccaggggaaaccactgcccagaacacctgacaaatgaattgcaagtgccacacc

SEQ ID NO: 388796 - DNA, 474 bp, Homo sapiens
atatggtttggctgtgtccccacccaaatctcatcttgaattgtaattcccatagtccccatgtgtcatgggaggcacccagtgggaggtaattgaataataggggtggttacccacaggctgaggttcttaagataataagtgagttctcatgagatttgatggttttataaggagcttgtccctctttgctcattcttctccttcctgccaccacatgaagaaggaagtgtttgtttccccttctgccatgactgtaagtttcctaaggtctccccagccctgtggaacagtgagtcaatttgtgatggttaatattgagtgtcamcttgattggattgaaggatgcaaagtattgttcctgggtgtgtctgtgagggtgttgccaaaggagattaacatttgagtcagaggactgtgagaggcagacccaccctcaatctgggtgggcaccatctaatcagcagccagcac

SEQ ID NO: 388797 - DNA, 596 bp, Homo sapiens
aaactataatttcaaattatacttaattatctattatcaayatttaccttaattttcaatttttggaagatagcagcaacatgaaaaatggtcaataaacttcattgtcaaggtcaacaattttagtattaaagtcaatttacagtatgtttgcttgagatatacataaatttgaagcggcagtaagtataaacagaatagctgatttcttggatgcactccaatacaattatagctactcacccttgtgactatatgtgcgtttgcagcttcaggctgtttcccggagccaagccacactagcagtatttttagatatgtgtgcaattaatcgaaacgcaaaatctctgtaaactggaaaaaatactatttaaaataaatagtagataaacatgtagtttggcattcttgtcaattcttaacttgtaatctcctgacttggaattgagttacccctaagtatttaatcacaaaatggtatttctaataggcaattgtaaaaaagaatcatcaatcacatttattacaaacatctcataaaatagtaaaaatgtttatgagattgtagaaggcagctaggttgttctgtgatgtat

SEQ ID NO: 388798 - DNA, 473 bp, Homo sapiens
tattattagaaagtcaaaaaatagcagatgctggcaaggttgccaagaaaaaaggaacaattatacagtgctgatgggaatttaaattagtacagccactgtagaaaacagtctgaagatttctcaaagaacttaaaatagagctactattcaacccagcaattgcatcacatagtatatacctaatggaatataaatcattctaccataaagacacatgcacacrtattttcatcaaagcactatttaccttagcaaagacatgaactcaaactagatgcccatcagcaggggagtggactaagaaaatgtgatacatatacaccatgaaatactatacagctataaaaatgtggttatgtcctttgcagcaaaatggatggagctgaaggtcattatcctaagtgagttaaagcagggacagaaaaccaaatattacatgttatcatttactgtaagtgagatctaaacat

SEQ ID NO: 388799 - DNA, 574 bp, Homo sapiens
ttgctcagaaaatcagaagaagggatttgtctataaggttcattaactcttggcctctattggcagtaacccatgttcaggaggccaccattgtaacaccctcaaaagaactccccgaaggaggcaaagtctagaaggagaatacctgctctgaagtttcccaccttccctgaactgaatctgcagagccaccccaggaggggagaatgcagctttgaaaaataacacctttgttattccaagtgttagagatgaagctgagttttcagatggcctcaaggtttgtgcatccttcaccaaacacagatggaaactggactctttgaactgctttgaaaatctgttactaagtattgctgtgggtctgtgaagcagccattgctaacttctgactgcctgcaatttttatggctgtgtgatgacaagggataaaatagctttattttagaagtaaayggttcatatgccagagaggaaaaaacccaccatctaagcaagatttaatcttaaatattatggtaattctaaaagttagtctttttaaaaggttggtttaaatattagaattataaac

SEQ ID NO: 388800 - DNA, 576 bp, Homo sapiens
catgtgtcgtatattaagtttctatatatgcttcattataatattatgggactactgtcatatgcaatctgcttttggctgaaacgttatgccatgcaaaactatatgtgtgtgtatatatatatttgtgtgtatatgtatttgtgtgtgtattgtatgtctgtgtgtatatatgtgtgtatatagagttttatatatatatatgcgggcgtgtatataattaagcaataaagatttcttttcaaagaaactgaagtatttactatataaagtgttcacatatcatttcttctggcatttatatttgatgcagcaagaaatataaaattattgctaggaaattcatggaaaacaattttgtcatattgtggtcacatgaatwatttattcaattttaatgagaggtaatatttttaaaaataaatcactgtttatgttttgagttcattgcaatatttagttcacttactttttaaggggatgttttattttctcttcctttctccacaaacctctactaaaaaattaaggtttaccagcatatctttctatggtaagaatggtttatcaaagtat

SEQ ID NO: 388801 - DNA, 613 bp, Homo sapiens
gagactgactgttggcaggaaactgcttggcagagggagactcagctgccatgcttggttccctggattggaagaggcaggaaggctttggtctgggtctggagctccaggaagaaaaccaggcagacctcttctttggttctgggcatctgcaagagaatggaaatcccaatccatatttaaatttaggccattttatttagtccttcttaaagtatttgttacttcttgattgataggatagtttatctcctgcctctcattttaatgcccttttccttcttttcactactcactgccattattacttgtcccctaagttagaaaaaacgaaacgcagaagactgctggtagtagttgtgagaaaaagttgaatttagccaaaataaaagactttagaaaaaaatatgcatatgtgtatatgtatctgtatatatatawatacttgcatatatatacttactgcatatatatttatatgcatacataaattatatattatatacatatatgaaccaaaatgtggagagtaattatcggttactttatacatatataaattatatattatataactatatataggtatatacatacaaatcgatgttacttg

SEQ ID NO: 388802 - DNA, 613 bp, Homo sapiens
gagactgactgttggcaggaaactgcttggcagagggagactcagctgccatgcttggttccctggattggaagaggcaggaaggctttggtctgggtctggagctccaggaagaaaaccaggcagacctcttctttggttctgggcatctgcaagagaatggaaatcccaatccatatttaaatttaggccattttatttagtccttcttaaagtatttgttacttcttgattgataggatagtttatctcctgcctctcattttaatgcccttttccttcttttcactactcactgccattattacttgtcccctaagttagaaaaaacgaaacgcagaagactgctggtagtagttgtgagaaaaagttgaatttagccaaaataaaagactttagaaaaaaatatgcatatgtgtatatgtatctgtatatatatatwtacttgcatatatatacttactgcatatatatttatatgcatacataaattatatattatatacatatatgaaccaaaatgtggagagtaattatcggttactttatacatatataaattatatattatataactatatataggtatatacatacaaatcgatgttacttg

SEQ ID NO: 388803 - DNA, 481 bp, Homo sapiens
gacacaagctgaaaacaggccaattaataactctgtaatggcctctaagtgttcaagtgaaagtaagagtcacatgtctctcacgtccaatcaaactcagagatgattaagtatactgaacaaggcatgtcaaaagccatgataggtcgaatgctagcaccggttagccaagttgtgaatgccaagaaaaattcttgaagaaaattaagtgaaacagcattattgctgatatggagaaagttttagtggtctgaatagatcaaatcagccacaatatttctttaaatccaagcctaatccagtacaaggtcctaactcttcaatcctgcaaagggtgagagataaggaagctgtaaataaaaagtttgaagctagcagaagttggttgatgatgtttaatgaaaatarccatctccatagtttaatgaaaatagccatctccataacataagagtgcaaggtgaagcaacaagtgctgctg

SEQ ID NO: 388804 - DNA, 610 bp, Homo sapiens
tttcctgctccctcattatcaaaattttttgaaacaacaggttttttgttaagaagacgaatgcattttacaaaggctttaagtcatggccttcaccatatcagcaaagagattacagtatgtacacaaatttaaaaattattaaattttatagagagagtgatataaaatacctgttttacttacagcaagagagaatatgaatttaacarttcatattcaatagcaatttaaatagtaaaggaaatttagcccattctattccatgaagatttgtgctattgtgagtgcaaaattgaagcataaatcagttcttccttcgcttcgtactaattgtaatgttgctgtttgttatcagtataactttttattggaaaaaatgatccctaattgcggatccaattcttcatctgatgctccagttaagaaacaccagtatatgctaatatgggcatatttgtgctatggtttgaatgtgtcccccaaaaagcacatattagaaacttcatccacaatgtaactgtggtgggaggtggggcttaatgggaagtggcttagcatgtgaaagttccactttaataaatggattaatgccaattataaattgctt

SEQ ID NO: 388805 - DNA, 587 bp, Homo sapiens
aaaattttctttaaaacaattggcctagaaagtctaaaaattttgtgatcaattacttcatgttcactcaaaattcctctaatataccagtggaataaggctttcaaatattacacttaagtagaaataaagtaatattcaggttgctattcacaaaaaactcagtattacctattttgctccacaaacaaaggtccattaagtcattgaaagccagatagtttattaaacaaatatgcgatcccacatgagcagttccttcagaaagtgaaagtgagaaaaggagtaccatgtgacctctcaggctaaagattattttcatgttcttgtttaaaatctggcatttatctgttttagggagttctcttattgtcttcttactcttatcaagataatattcaattagtaagcaagcataatttgtccatttactgtataaatattgcattttcatgttgatactgaatctagaagcaatctgtaattttktccaggcaggcggaggtatgaaacctgcctatcaagtaacacagaatgccttaagtggctctgccaccaagatatcttgataaaagagtgagggaatt

SEQ ID NO: 388806 - DNA, 612 bp, Homo sapiens
tttaacaataatacatctctgttatagcctttctatggacctgtcatggtcctggacaaagtacttagaatcaaatgaaatacacacatgaccttttaggagctctaagtccagagaccctcagctctctcttagatctatttctcagaggctaccaggccaatttgtccttccccagcaaagcttttgttatgctatgctatatccaactatttccttatgttagtttctgtcaaaaggacagaaatttcccctatcttgtttctttcattctaactcaataaaggtttttgaatgaattttcccaagtgccacatactcactgtcttagtgtgtttgggttgccaaaacaaataccataaactcggaagctgataaacaacaaaaatttatttctcacagttctggaggctgagatatccaagatcagggcactggaagatttgatgtctggacactaatcccatccatgagaccttcatmctcatgacctaatcatctcccagagatccttcctccaaataccatcatcttgggggttaggatgttaatatatgaatttggaagacagaggactcaaacattcggatcatagcacccatgtgactatta

SEQ ID NO: 388807 - DNA, 616 bp, Homo sapiens
taccaaagaatgacatctcatcttttcagagaattacctttgggctggtactaaatctctgcctttaaaaagttgttccagcctttgataaaaccagctgcttctggatgttaggtgtgtgatttaacctgtagattccatggtcataggctcactcttatacctctgctctgtagaacccctgctcagatgctatgctatgtgaaattcttgctatgtgaaattcttgcttttagattagaaattccataaattcttataaagtgactgattgaaacggtgtgggtaaaaatggcaaaatcaaacctagaacaggcatatatccctctaagagaaatgtactgatgacctttccagtatgggaggggccaagtggttggttgctctccccaactaataaggacatattgatgtcaagaactgtgaaggatctgacattttacctaatttgtcagtaattaatttgtctgccatcgtttcattgattttggaagaaaaaatgagactcttggataggagacaatgtgccagttaatayttaaaggaaatgcattagtcagaggatcattttttaaaaattaatattattttcaactgacaaatcataattgtatta

SEQ ID NO: 388808 - DNA, 486 bp, Homo sapiens
ctcagtgccacgccctgtagaatcctcatccttggcttctagcaccctgagaggtagtcagagtgtccccatttcacagatgtggtgactaagccacaaagagatcaagtatcttaccccaaatcactctggtagacagtgacccagctagcaagaacaggcattctgcctctaaagcctacacatgcagcctaccctttgctgcaagaaatagcacagccaccaggggctgtgcctgggaggagacccagaagggcaggagcgtactgacccatttggaagactagacaaagaggtggacagacagaaactgagtgaaactagctgaattaagygctatatgttcagctgaccaggtcagaaaagtgagatcaggtgagcagaagttatccaacgtggtcagaagagggaggagtggcaagcttgtggttctttgggatggacaagaaggactggagaggtgggcaggcctctgcctcgagcacg

SEQ ID NO: 388809 - DNA, 486 bp, Homo sapiens
ctcagtgccacgccctgtagaatcctcatccttggcttctagcaccctgagaggtagtcagagtgtccccatttcacagatgtggtgactaagccacaaagagatcaagtatcttaccccaaatcactctggtagacagtgacccagctagcaagaacaggcattctgcctctaaagcctacacatgcagcctaccctttgctgcaagaaatagcacagccaccaggggctgtgcctgggaggagacccagaagggcaggagcgtactgacccatttggaagactagacaaagaggtggacagacagaaactgagtgaaactagctgaattaagtgctatatgttcagctgaccaggtcagaaaagtgagrtcaggtgagcagaagttatccaacgtggtcagaagagggaggagtggcaagcttgtggttctttgggatggacaagaaggactggagaggtgggcaggcctctgcctcgagcacg

SEQ ID NO: 388810 - DNA, 561 bp, Homo sapiens
  misc_feature (1)...(561): n = A,T,C or G
accttatacttagtaacaaagactgctntgcttttaatttccccatctggccttcttctatgtaaactatatggtgccgttgatcattcttgtcttaatgtgtgtgtgtgtgtgtgtgtgagagagagagagaaaggataccactgtctgttactcatgttgtgttttgtaagtaatcaaaggaccgtcgatgataaaagtataggagctgcctgtttcaggtgtcactgaaatgctgctaccttttggcttcttctgaaattctgctttaagaaaataatctgaaaattagaaagagccactgtataaaaatgctctctgcaccattatttgccatggtgaraacttggaagtgatctgaatatacagtataggaggagaacaaattacagaacgacaggctgatggagtattatgtagtacttagaaatatgaagattagccacatgggaaaccttaacatgctctgggaacagaatgcggttacattacagacatatttaggaaaacagtcttcaagggaaccctctaaggggacaagagttacatatgaaaaaggga

SEQ ID NO: 388811 - DNA, 628 bp, Homo sapiens
ttgtgtgtattaacccctttaatcttcataaccacccatcagaggtgggcactgtcataattcctcactggcagatgcagcaccatccacataragacttgaaatcacccacccagggtcacacagccagctggtggaggagctgagattcaacccaggccatctggctgcaagccctggctcttggccatcaccctattgccttctaaagtactagtttctaatgagagcaggcagcttttctgggagctagctgtgggccatgcactgtgccagtgcttcatgtgcatggctcattcaccttcacaagagcctaaaagtaggtgttgttatccctgcttctcaaatgaaaatgtgtcttgaattcaagtctgtctgattctaatagcccatgtccttaacccctactcagcagtgcctccttttttttttgagaaatattgaagaaaatgttaaaagaatagaaatgtactaatttccctgccttcacccatgtcacatggaaagtagtggactgtcttggacaggactctccatgaagacccacatgggctttctgtcccagctcctggcaatgcctgccacaaagaaggccctcaacagatatttgtgggatgaggggactaag

SEQ ID NO: 388812 - DNA, 524 bp, Homo sapiens
gtgctcactaaccatgataactgccctgtagatcgtctaaaccacatgggattcatctggggagagagaaatttttgtgtgttaagcttctaaaactggaggatttattattgcagctagcctagtctatcttgacaaatatgttattttgagacattccctgttattcctagtttaagagtgcctgccataaatgaacrttgaattttattaaatgatttttctgcaactcttgattgtgtgattttttttctcctttacttagttaatatggtaaattgcattgattaattttctaatcctaaactaacactgcattcctgagataagccctatttggccaagatatattacctttcttgtgtactggtgggttcactttgctaatttgttttttaggtagtaagacaggtctataattttcctttctctcactgtcctaatcagattttggtatcaaggttgtgctagcctcataaaaagcgttggagagttctctctttctatgctgtaagagatcttgt

SEQ ID NO: 388813 - DNA, 568 bp, Homo sapiens
actgcctgtgtagttccaggaggtaggtgcaggtcaaaggaaacagccattgacagggaattctccacatttaggttttatgtttagtattttactaagtgamatatatgtggtaggaaatcaaactgcttttttttcccttccaaatacttaagtgactatgttgttttcttttactaaataacctccctgactcccacttattttttggttttaccttatattatctttttatatagaggcatgttccattatgctgtctggagtcagtatcacactcatttaatcactttcaaaaacaattaccttttgatatctctgaaagctttctgagcacctgggtagtcttctgggagagcctctggatacttttctcaagttaacaaataaagaaaaatatccacccattggcattttcaccggaaagccaatcaataaatgactgtttttgtgaggagctggtcatgtttccatttagtccagcctcagagcaggccgagctgctgcctgctgcccttggtgcccttcatgtatatggttcaggttagtcctagtaacaaatgtcctt

SEQ ID NO: 388814 - DNA, 553 bp, Homo sapiens
tctttaaaaattacaaaatcttaaaagcctattaggagcattagaaacaaaccttccaaagccagatgcattgatttactgctgttaatttgaatctgggatcattaaagcatgaggcctaaaatgtatcatgaagttttcatatttgggtttctgtggtaagccgtttttcaacttggatatgtttgtttgaaaagatagtctaaggcaacaggatttcagtgactttgaagtccattttgcatgacttcatgtagcctgccaagccaccactgggctctgcccctcattttagaagcctagtccagccatcagttggcccaaagagttatccagtaataccagttacaaggwtaacatcacactaactgcttctaactgctaatatttcttacattttctggtgtgtttttcacatatgttctattacctagtttcatgttgacacttcctcgtgatatgataattattgttattcacttgttgtggaaaaagctgagtatggaatgatacacaactggctcagtttcttgtatcctattgagtagcagag

SEQ ID NO: 388815 - DNA, 509 bp, Homo sapiens
gcttcccaccaaaacgtacccacatgccttatccctgctgtaaaccaagtcccaggaacactrccctgctcgaaggtgctctaaaaactactcttcccagaagaacagaaggggaaaggcaggtagagagccagcaatgaatatccatttgcacagaaacaaaattggccaaaaataaaataagagtggatgaacagtagaggaagtataggggcatatgcaatcaactagacttggatggcaaggggcgtcgctattcgtatccatggaaaggaccactggtatggattaaatggggaagatacataatctaaaaaacacaaatctgtatctgcaaaaagaaaggtattgctgggagcaggggcacatgcaggtgacatagggaaaagtgtgctcttaattcatatgagtaagggatgcctaactgtggttctgatgtcatcactgatcacaaaatttggggtaactggcaaggtctgactgagcaaaatccagttagagcttccctg

SEQ ID NO: 388816 - DNA, 644 bp, Homo sapiens
acatgccaggcacttggcatgtggtaagcatgtgatgactattaacaatatcaattttgcaataatttttagcaactactatgtaccaggtactgttctaggaatacagtaaacagctgtgayaagacaggcagagtccctgccctattggatctcatgttctcatgagggagacaggcaacaagcaaataaatctacaatataatgtgtcagggatagaagccataagaacagagctatatgaagagacagactgaatagcacactgtttacctatcaacatggctctgctgcacgagggatcatggccccacctgcaagtcaggaggcagcaaggcagagagaataggctttggatcccctcagaactgaggtataggactgactccactattttattaatctctctaagcctcagtttcctctctgcaaaacggcaagaataacagcaactaattcatagagttaaatgagctgatgcttgaaaacagcatagcatagtgtaccaatatgagcactaaattaaataacaatgattatgagcactcaaaaaaagctacaataactactgtcgtttccaactctctctactccaaaccctgggcccataaactagatgtctcactaatccctcaaactccacc

SEQ ID NO: 388817 - DNA, 574 bp, Homo sapiens
ggatctcctgtatctaaatatctaactcttttgctacatttgggacattttcatcaattatgtccttcagtaggatttctaaagtttttgatctctcttccccctcaaaaatattgataatttataagtttggtcattttgtrtagtcctagacatcttgagggctgttttcattctttttcattttttccttatttttgtgtggctgaattatttcaaaagatctgtcgtcaagttttgaaattcctccttctgcttggtctagtctattaccaaagctttcaaatgtattttgtatttccttcaatgaattttcagttccagaatctgtttggttttttaaattaaagatatctatttccttggtatatctctcattcacatcttgaattcattttcttatttttgtactggttttcagatttctcttgtacctcaatgaggttctttaaaatcaatattttgaattctttatctgttatttcaggaattcttactgattgggatctgttcccagaaaattgttgtggtcctttactggtatcatattttcttgctttttcatgtttcctgt

SEQ ID NO: 388818 - DNA, 574 bp, Homo sapiens
ggatctcctgtatctaaatatctaactcttttgctacatttgggacattttcatcaattatgtccttcagtaggatttctaaagtttttgatctctcttccccctcaaaaatattgataatttataagtttggtcattttgtatagtcctagacatcttgagggctgttttcattctttttcattttttccttatttttgtgtggctgaawtatttcaaaagatctgtcgtcaagttttgaaattcctccttctgcttggtctagtctattaccaaagctttcaaatgtattttgtatttccttcaatgaattttcagttccagaatctgtttggttttttaaattaaagatatctatttccttggtatatctctcattcacatcttgaattcattttcttatttttgtactggttttcagatttctcttgtacctcaatgaggttctttaaaatcaatattttgaattctttatctgttatttcaggaattcttactgattgggatctgttcccagaaaattgttgtggtcctttactggtatcatattttcttgctttttcatgtttcctgt

SEQ ID NO: 388819 - DNA, 574 bp, Homo sapiens
ggatctcctgtatctaaatatctaactcttttgctacatttgggacattttcatcaattatgtccttcagtaggatttctaaagtttttgatctctcttccccctcaaaaatattgataatttataagtttggtcattttgtatagtcctagacatcttgagggctgttttcattctttttcattttttccttatttttgtgtggctgaattatttcaaaagatctgtcgtcaagttttgaaattcctccttctgcttggtctagtctattaccaaagctttcaaatgtrttttgtatttccttcaatgaattttcagttccagaatctgtttggttttttaaattaaagatatctatttccttggtatatctctcattcacatcttgaattcattttcttatttttgtactggttttcagatttctcttgtacctcaatgaggttctttaaaatcaatattttgaattctttatctgttatttcaggaattcttactgattgggatctgttcccagaaaattgttgtggtcctttactggtatcatattttcttgctttttcatgtttcctgt

SEQ ID NO: 388820 - DNA, 670 bp, Homo sapiens
ctctcattcacatcttgaattcattttcttatttttgtactggttttcagatttctcttgtacctcaatgaggttctttaaaatcaatattttgaattctttatctgttatttcaggaattcttactgattgggatctgttcccagaaaattgttgtggtcctttactggtatcatattttcttgctttttcatgtttcctgtttccttccattgatatctgcatatctggtattgttgttccaatttttaaaaattgcttttgtaggrgagaatatttttcctgaagatgtatatatgttgttggttaagtaagacaccttggcttttatttttggtgctgttgtagtgtggtctttgtgtgactttttcagtagtacacaaggttcgtggtatgtgtaatttcctcagtggcttagggtatggttattagctgaagctgtgaaattttgctggggacttggatgccaactgagtcagtctttgggccccagtggtggcagcagaagggtgaatatgcctgtttttaggccctaaagcagcttatgctggctgtggtgttagagagttctgaatggctgattcttgggcctgcaggtgaactgcttgcttagaagctagtaatgagagcagtgggctaggtgtgtggacaagttgttagccccctgagc

SEQ ID NO: 388821 - DNA, 587 bp, Homo sapiens
tatatatgttgttggttaagtaagacaccttggcttttatttttggtgctgttgtagtgtggtctttgtgtgactttttcagtagtacacaaggttcgtggtatgtgtaatttcctcagtggcttagggtatggttattagctgaagctgtgaaattttgctggggacttggatgccaactgagtcagtctttgggccccagtggtggcagcagaagggtgaatatgcctgtttttaggccctaaagcagcttatgctggctgtggtgttagagagttctgaatggctgattcttgggcctgcaggtgaactgcttgcttagaagctagtaatgagagcagtgggctaggtgtgtggacaagytgttagccccctgagcagctggtatgatgtgaatgatggcagtagtggtggtggagcaacccactgagacccaagaggtccatgttggtgttgtgggtagctacaatgggttaagcatgctagtcctcaattccacagctgcctagagtggggcagtgggtactgtcctaagtgtccattatggcattcctggaggtggctgttctctgcttttgtgcttatgg

SEQ ID NO: 388822 - DNA, 540 bp, Homo sapiens
tattgaaatgcctacaaaattcagtcctcattcaactgtttattgagtgtctactatgtcctargcactgtgccaggtgttgggaaatgagtcatacacacactaattcttacctttagtgtaatttctattttacctgtttcaaagtaaaagagaaagcaaaagtgctaactcacccttgattttgattttaattttatttaactcagttaattgagaagaaacacccgtgttctttaataaacctattagagcgaaaaaggactgaaagcctaaaggctgaggaaattgaaagcaaaatttgcacagcctgcaggacccttgctggggactgaggaaagttcttgacctttcctcacagcttcttccagcattatgcaatggaggatattttacccaacagtgtgaacttttagtggctgcaagctgcagggagccctttctggggtaagttctcttgcttattgtatgcaaagcaaactgccacagcagtgccaaggttaacatttttgttgtgctgaaatttggaagtagaacaga

SEQ ID NO: 388823 - DNA, 540 bp, Homo sapiens
tattgaaatgcctacaaaattcagtcctcattcaactgtttattgagtgtctactatgtcctaggcactgtgccaggtgttgggaaatgagtcatacacacactaattcttacctttagtgtaatttctattttacctgtttcaaagtaaaagagaaagcaaaagtgctaactcacccttgattttgattttaattttatttaactcagttaattgagaaraaacacccgtgttctttaataaacctattagagcgaaaaaggactgaaagcctaaaggctgaggaaattgaaagcaaaatttgcacagcctgcaggacccttgctggggactgaggaaagttcttgacctttcctcacagcttcttccagcattatgcaatggaggatattttacccaacagtgtgaacttttagtggctgcaagctgcagggagccctttctggggtaagttctcttgcttattgtatgcaaagcaaactgccacagcagtgccaaggttaacatttttgttgtgctgaaatttggaagtagaacaga

SEQ ID NO: 388824 - DNA, 546 bp, Homo sapiens
agggcaacctgctcttgaggaggttataatctagttgggcagacagatgtaaacagacaattttaggcaggcaattaattgctaagagccacagtatgaatattctccaaaggatatactctaaatgatttataagaaaacggagtgttgaagctaaagacagctagactaattaatttcacttctttaaactgctaaaatcttggcagcattgggtagatgtccataacttaattggtgctgttctgcaaaacctagtcacttgaacatttatcactggaaaaccgttcagacaaggaaaacagaacaaaacaaaaaaccaatacaatagttcacttaataagtcctgcctcttgtcatgatgtgcatgtggacaatgttcaaatgcttggaaatgtccaacagatcttccccttatartatcatccagaggaatggatttaaggagactatgactagtccaaatgcaaatgagacagcttagagcagcttttaataaagccatgaagaacagcatgtctgaaataattatccttttttttttgg

SEQ ID NO: 388825 - DNA, 540 bp, Homo sapiens
tattctatatgttaagattttaattagtaaattgttggaaataaacctgcttttctcttcaaattgcaggctttytaattaaaaacactttttaggacatacagagtggaatggtagacattggagactccaaaaggtgggagagtagaagaggggcgagggatgagaaattacccactgagtacgatagacactcttcgggtgatggcttcaccaaaagcccagacttcaccactgtacaatatgtcgatgttacaaaactgcacttgtacctcttaaatctataaaaattttaaaaaattgtgtcaaaaaatggaagtgaaaatttggccacctcatcttcagatattctttattcatcttaagttttatccagtgttcctgccaccctttgttctttagtttttttgttccccatgcccttttatgagtaaaaaaaaaaaaaaaaaaaaaaaaaagtagcaaactgattatgttctatacagtaatttatcttattttatgttagtgtcactcataattctttcattaatatagtac

SEQ ID NO: 388826 - DNA, 633 bp, Homo sapiens
cacattctacactagttatatgtagaataaactgtattctatatgttaagattttaattagtaaattgttggaaataaacctgcttttctcttcaaattgcaggctttctaattaaaaacactttttaggacatacagagtggaatggtagacattggagactccaaaaggtgggagagtagaagaggggcgagggatgagaaattacccactgagtacgatagacactcttcgggtgatggcttcaccaaaagcccagacttcaccactgtacaatatgtcgatgttacaaaactgcacttgtacctcttaaatctataaaaattttaaaaaattgtgtcaaaaaatggaagtgaaaatttggccacctcatcttcagatattctttattcatcttaagttttatccagtgttcctgccaccctttgttctttagtttttttgttccccatgcccttttatgagtaaaaaaaaaaaaaaaaaaaaaaaaaagtagcaaactgattatgttctatacagtaatttatcttattttatgttagtgtcactcataattmtttcattaatatagtacaatgcagaatcagatatgccatctctgtagttaccaattcttctaacaaggttaagtgt

SEQ ID NO: 388827 - DNA, 537 bp, Homo sapiens
gctgttctctgtgcagagaaagaagctaaggcacaagagaggttaggtgacttgctcaagatcacccaactaatagttaatggcagcctggctaaggattgtgatccagatctctgttggctcctaagaatacttgtgctcagcagctctgcctcacygtctttttgataatacataactgttatccttgataacactttattagacaatgcctgttatgaacactgcttaccacccaaaaatagatgaaaatgaaaatcattggtcattctaatagaggtgttatactttttaaaaaactgctttattgaaatataattcacataccatataatttacccacttaaagcatatgaattcaacagttttaataccttcacaaaattggacaaccatcattgcagtctaattttagaatattttcatggatccagaaagaagccccatatccattctcccaccctgcaattccccagctctgggaaacaactaatctactttctgtccctatagatttgcatattctagatgttcata

SEQ ID NO: 388828 - DNA, 601 bp, Homo sapiens
cagaagttctccaaatccaatcacttagagttttttgtttttatttttgtttttgagacggagtttcactcttgtagcccaggctggagtgcaatggtgtgatctcagctcactgcaacctacccctcctgggttcaagcggttcttctgcttcagcctcctggatgggcagctggaactacaggcgcataccaccacgcccagctaattttttgtctttttggtagagacacagttttgccatattagccaggctggtctcaaactcctgacctcagatgatccgcctgcctctgcctcccaaagtgctgggattacagatgcgagacgccgcactggcctatttaggggttttaatggagktttcaccacataggcacaattgactaaataattggccattgctgattaactcaatctttagcagctcctcccatccccccagaggttattgggggtggggctggaacttccaagcttctaatcaaggcatggtctttctggcaaccagccctcatcctgaggctatccaggagcccactgagacaattagaacaaaagaagctcttgtcacctctatcagttgaagtttcaagggttt

SEQ ID NO: 388829 - DNA, 586 bp, Homo sapiens
attggtataaaattaggcaaataaaccaatggaacagaatagagaacccagaagtaaattcaaatagttactgccaactgatcttcaacaaagcaaccaaaaacataaagttggggaaaggacacgtttttcaacaaatagtgctgggataattggctagccacatgaaggagaattaaatgatcttcatcccttaccttatacaaaaatcaacttaagatagattaaggacttaaacctaagagatgaaactataaaaagtctagaagataacattggaaaacccttctagacattggcttaggcaaggatttcatgaccaagaacccaaaagcaaatgcaataaaaacaaagataaatagctgaaacctaattaaactaaagagcttttgcacggcaaaaggaacagtcagcagagttgacaacccaccacacggaatgggacaaaaatctgcacaatctatacatctgacaaaggattaatatccaraatctacaacaaactaaaatcggttagaataaaacaacaatcccatcaaaagtgggctaaggacatgaatacacaattctcatggaaggtatacaa

SEQ ID NO: 388830 - DNA, 618 bp, Homo sapiens
gctggctccagccaggctggtggcacacgtctgtaatcccagcactttgggaagccaaggtgggtggatcacctgagggcaggagtttgtgaccagcctaacatggtgaaaccccatcactactaaatacaaaaaaattagttggttgtggtggtgcatgcctgtaatccgagctacttgggaggttgagacagaatagcttgtacctgagaggcagaggttgcagtgggctgagataacactattgaactccagcttgggcaacaagagcaataaaaaaaaggctggctcctaggttgagaacaaagacagctgtagctataggaagggtttcataattttctgttgcagcagctatcagctcccctagtctttatttgtatctagtatttatttttttaacttcaaggtataattgacaaataggaattacatacatttaaggtatacaagttaatgttatgatatgtgtacgccatgaaataatcatgaataattagcttcacagtgaagctaattaacatcaatcaaatcayatagttctttttctttatggtaaaaacacaagatttggtcatagaaaatttcaagtatacaatatggctgactgtagtcatc

SEQ ID NO: 388831 - DNA, 597 bp, Homo sapiens
tctaattctatgtgtatatgacatatattatccagttacaaaaggaaaatgaagttggtaagtgggtggctggttcacagctatatccacattatgaatgagattaagttaaatttgggggtcattctggtctcttacacgttctctgctttcaatctgcactcattttactgtcatcaggcaattttctgcctcctctctagaaaaaccaatggcgatatatttgtagtaaaacctcaggagccaattttatttttcacacccacatattctctttctacagttactctataaatctttgtttttcttgtttatctagagttctctgacaccacacttcagcaactccttaaattttcttcttagcttggcaatactttttagagaatagctctcacaaggaccataacgtgtatctgggaaatttaactggtgtgtagagcagcagaaacttggactcatacccttaaagatttctagcaacaaagttaattgactcagagatatcagacctaagtaygtttttttaaaataaagcttagatattgatagtttaaaaagatttcaagtgatttagttgtttttaaggttatataa

SEQ ID NO: 388832 - DNA, 519 bp, Homo sapiens
agtttgtcagaattcttaaaaaatatatatatatatttaaatttccattagttatcttgtagaataccttttaatatgggtttgatatttactcatgattacatttttggcaggaatatcacagaagggatattgtgtcctgtggaaggcctcatagaagaagcacatgataatttgtcaaatattggtgatattaatttgatcaggtggttaaaaatgttatctgcaaaggtttctcctgtgaaattactgagtaatgcatggaaagatattttgaaactctgtaaatattgtattccatgtcacatttgtgccttcagtcattttaacattcattgataaygccatttcttctatggttattgtttggcattctaatgcaaggaacaactcttatttatacctgcatggcttcaggggtccttgtttcattcaatgagttttaactctttactggtactattttgatattctgaagatctttggccaatttgagtaccttcaagctgacatccatgt

SEQ ID NO: 388833 - DNA, 519 bp, Homo sapiens
agtttgtcagaattcttaaaaaatatatatatatatttaaatttccattagttatcttgtagaataccttttaatatgggtttgatatttactcatgattacatttttggcaggaatatcacagaagggatattgtgtcctgtggaaggcctcatagaagaagcacatgataatttgtcaaatattggtgatattaatttgatcaggtggttaaaaatgttatctgcaaaggtttctcctgtgaaattactgagtaatgcatggaaagatattttgaaactctgtaaatattgtattccatgtcacatttgtgccttcagtcattttaacattcattgataatgccatttcttctatggttattgtttggcattctaatgcaaggaacaactcttatttatacctgcatggcttcaggggtccttgtttcattcaatgagttttaactctttactggtactattttgatattctraagatctttggccaatttgagtaccttcaagctgacatccatgt

SEQ ID NO: 388834 - DNA, 623 bp, Homo sapiens
ttggtgatattaatttgatcaggtggttaaaaatgttatctgcaaaggtttctcctgtgaaattactgagtaatgcatggaaagatattttgaaactctgtaaatattgtattccatgtcacatttgtgccttcagtcattttaacattcattgataatgccatttcttctatggttattgtttggcattctaatgcaaggaacaactcttatttatacctgcatggcttcaggggtccttgtttcattcaatgagttttaactctttactggtactattttgatattctgaagatctttggccaatttgagtaccttcaagctgacatccatgtactttttattgctctcaacattctttggccactaatcagtcttttttccaagagtccttttttcccttagtcgggaatgtcttttagagagccaaatttggattctgaatatgcttattgttactgatatgccattgttattaagcccmttcagtggacaaagctaaggaatattcaaatatgttctccctctctctccttatctttagtatatttatttggtaaatataaaacaaatgtagtttggaaattgataaatcatgccattttggctccctcaagttttca

SEQ ID NO: 388835 - DNA, 594 bp, Homo sapiens
ccgcttatatttcaacactagatgaacctagagtttgcctcatgagaagtgtgtgaggtgctaacatgactctttatgaaccaattctttactccttttcgataagacaattaagtgatgcactcgctcaattgactttgcagcaggtagtactgactagagtgagcaacgtatgttttcgtgcccaatttatttcgaacttggcaatataacttgctttggccaaaggaatgtgtacagatgggacagtatagtacttccaagccaagattttaagaagcacattgtcttcatctrtttgtgttgctctaaaggaattcctaaaactgagtaattgataaagagtaagaagtttatttggctcatggttctgcaggctgtacaagaagaatggcactagtatctgcttttgctgagggcttcaggatgcttctactcatggtaaaagatgaagcaaagcccacatggcagagattacatggcgaaagaggaagcaaaatagtgagaggggagatgcccagctttttctaaaaaacagatctcatggaaacaacagactgaaaacacacttattactgtgagtacagcaccaag

SEQ ID NO: 388836 - DNA, 575 bp, Homo sapiens
actaggcagttagacaaagtagagaatagtggaaacagaacatttgtcagaagaaaatagatgcagcttaaattctgattagattttgggtaagagcaagagtgagaaaaaggatggccatgagtggattgtgacaaattattaactgaactaggaaggttagtgatggagctgtttaaagaaagcaatttaacaagtatgcgtgaagtagtaggatgtacagaacactatggtaagcacawgcacacaattaaggcaccactcttctcatgaagagcctatcaagttgaggatatatattctaaatatattttcatccttacatcagagattttttaatcaacaaattatacgaagaatctctgaggaaagacgaataaaacaaatggcttttaacagtgacaattaaacccaaagactgttgaacagaatatataaatcattctatgttttaagaataacaagatgaataaggcaaagtcaacaattaccaatagaattcttacctacatggggaaaagggaggggctatatttatgatgatcatgatgataacattataaagatggccaact

SEQ ID NO: 388837 - DNA, 570 bp, Homo sapiens
atacaaaaattagtagcacttctaatcaccagtaatgaaacggacaaaaaatcaagaaggcaaaccatttacaatagcttaaaaaatacctaggcattaatttaacacaggaagtaaaagatctctacaggaaaaattataaggcggtgataaaagaaattgaagatgatgcaaacaaatggaaagacaacccatcttcatggatcagaagaagtaatattaaaatgatcacactgcccaaagcaatatacagatgcactgcaatttctctcaaaatattagacatttttcacagaaatagaaaaaacaattcaaaaatttttatggaaccaaaaatgaaccagaatagccaaagccatctggagcaaaaataacaaagctgggagcatcacactacctgactttaaratgtatttcaaggctacagtaaccaaaacagcatgatattagtagaaaaatagacacatagaacaatggaacagaatagagaacacagaaacaaatccacatatttacagccaactgaattttgacaaaggtgccaagaacgtacagtggggaaagaaaata

SEQ ID NO: 388838 - DNA, 640 bp, Homo sapiens
attatcactaaatatttatatagttgacataatgcatattatgcccttgaataatagaatttgtttttttttttacttcttatccataagcattgggcttayagtgcctcaacaggaacagtatttattattaaacaagattcctaaatccataacttgtgacttcagacattttgtaaccctagtagtgaatataccctaaaaacctataaatcccctaagtaactttattgatttaataaaattaacaacatataagatgaaaatttctactactacatttcttttgtagaaacatcaatactttattcattctaagggaaagacttaccaggtttttattttttttggtattctcaataaaatggttttttatcatctgaataataaacttagacaagttaccctctaggcagagtccttacttcatttctagttaaaattgcatttctcatattgattcatacttcataatgcacctccaagagctgagttttccaggaaaaaattgtcaaggacaaaaaagactattatttattaattaggcctcatacagagttcattgctgatttggcatattgagaattcaacttttttttccaagaacatgccattaattataactaaaattccataaaca

SEQ ID NO: 388839 - DNA, 640 bp, Homo sapiens
attatcactaaatatttatatagttgacataatgcatattatgcccttgaataatagaatttgtttttttttttacttcttatccataagcattgggcttacagtgcctcaacaggaacagtatttattattaaacaagattcctaaatccataacttgtgacttcagacattttgtaaccctagtagtgaatataccctaaaaacctataaatcccctaagtaactttattgatttaataaaattaacaacatataagatgaaaatttctactactacatttcttttgtagaaacatcaatactttattcattctaagggaaagacttaccaggtttttattttttttggtattctcaataaaatggttttttatcatctgaataataaacttagacaagttaccctctaggcagagtccttacttcatttctagttaaaattgcatttctcatattgattcatacttcataatgcacctccaagagctgagttttccaggaaaaaattgtcaaggacaaaaargactattatttattaattaggcctcatacagagttcattgctgatttggcatattgagaattcaacttttttttccaagaacatgccattaattataactaaaattccataaaca

SEQ ID NO: 388840 - DNA, 389 bp, Homo sapiens
tgtctgtttttcagagggccttcagtgtgccttctaagcagactattgagttccatgaatctgtgaccactgcaatcatctcagcactagaggattctctaagcccaggtatacagggaatgtcccaaggactccaaggttgaggtggctttccaacctagatgaatctgtggaaaaaccaaggagaatacttgggctgagtgggaatattagccagggacttgagtccagaagactgtcacagtgggccagataggcatgcctcccaacaagtccctgaacagacagtatagttccctgattgtagcaggaggagstggagctgggactggggaccttcaggatctcctgtgaaattaaggttgaaaagatcatttcattggccagac

SEQ ID NO: 388841 - DNA, 583 bp, Homo sapiens
aaaatgagttgttttccttactttcataattatcctagtatattgactatttcaatataaactgtctggaatttgagctcaaataatgatttactgaatctctgtattgagaaaatcagccatgtttagtgcttggtcttgaacagtgcttctgaataccactgtcatgacacagaatcattacgcttgccatatgcagattcatttttagtcatagatgttcatttttcatctaaacttttagtttataaacctttaaagtccattatatgtcattttcatttttgtttttctgaacctttaaaatggaatgtaacagaaaatatttgtgaatacattactgaataacaggttaggtattttatttaatacaaatcgatgtattttaataaaatatgcagatatcaccacaggtagaaatattaattttgggggaagatatttgggcctgggacttttytaatgcattagaaaccctcaaatcacttaaaatatatgatgaggtagagaacattttagtatttttccagttcatctccccatatgcttcaatcttttttttcagatgtcatgaacacattta

SEQ ID NO: 388842 - DNA, 612 bp, Homo sapiens
agtgaaccgtttttagacctttaagtcaaaactagtctcattgtaaatcagttgtctgataatgactttgagtttttaaaaagacactgcttatctttattatttgttggtcagaagccctatatttctcaggagtttttrattattcatttatttttaattctagagaatcttttaaacagcatctccagcatattttcaagagcccaatggagtgaagattttcttcctgcccacaccctacttcaaatgtccttactagacaaaagcagatttatgtagcattctgcagctttctgtgtgagatatgttttaataaaggaaatgaaacacaagtaaaacaaaaacaaacgagaaaaattgttatttgaaggaggtatccagaaattcaaagaatcaaactagacaggttcaaaaattcaaaattttggacctaatattaaagtgttagatatgtagtcccaaatacacattttcaagattacaacaaataatgaagtacagtaaaccagtatgttgcatagagagtattggcaacaaatgcatattggagagtccagtcttcatttgaattaatatgtgtgtctaatccatcttcctatctaatctggc

SEQ ID NO: 388843 - DNA, 612 bp, Homo sapiens
agtgaaccgtttttagacctttaagtcaaaactagtctcattgtaaatcagttgtctgataatgactttgagtttttaaaaagacactgcttatctttattatttgttggtcagaagccctatatttctcaggagtttttgattattcatttatttttaattctagagaatcttttaaacrgcatctccagcatattttcaagagcccaatggagtgaagattttcttcctgcccacaccctacttcaaatgtccttactagacaaaagcagatttatgtagcattctgcagctttctgtgtgagatatgttttaataaaggaaatgaaacacaagtaaaacaaaaacaaacgagaaaaattgttatttgaaggaggtatccagaaattcaaagaatcaaactagacaggttcaaaaattcaaaattttggacctaatattaaagtgttagatatgtagtcccaaatacacattttcaagattacaacaaataatgaagtacagtaaaccagtatgttgcatagagagtattggcaacaaatgcatattggagagtccagtcttcatttgaattaatatgtgtgtctaatccatcttcctatctaatctggc

SEQ ID NO: 388844 - DNA, 612 bp, Homo sapiens
agtgaaccgtttttagacctttaagtcaaaactagtctcattgtaaatcagttgtctgataatgactttgagtttttaaaaagacactgcttatctttattatttgttggtcagaagccctatatttctcaggagtttttgattattcatttatttttaattctagagaatcttttaaacagcatctccagcatattttcaagagcccaatggagtgaagattttcttcctgcccacaccctacttcaaatgtccttactagacaaaagcagatttatgtagcattctgcagctttctgtgtgagatatgttttaataaaggaaatgaaacacaagtaaaacaaaaacaaacgagaaaaattgttatttgaaggaggtatccagaaattcaaagaatcaaactagacaggttcaaaaattcaaaattttggacctaatattaaagtgttagatatgtagtcccaaatacacattttcaagattacaacaaataatgaagtacagtaaaccagtatgttgcatagagartattggcaacaaatgcatattggagagtccagtcttcatttgaattaatatgtgtgtctaatccatcttcctatctaatctggc

SEQ ID NO: 388845 - DNA, 604 bp, Homo sapiens
tattttaatgtttaccttttgtggcacttatggtatatattataattatttgtgactgtatctcatattctccactctaatgctgccttttaaaatatctttcttctcaatgctctgagctgaagcaaatatgaaaaagactaattgactattatagtctgtttagaaatttgattgatcatatgmgattatctatagatttttttataataatataaaggttgaatagcacccatcaatgtcaagattcaattaaggtatgtgagtcaaaaaaagaagttaacacaataaagtcaacgagtgctttgtgattcctttaactttagacaccaatgtaccatagcactggataaatttcctaatatgattaatttttcttccatgtgccttagctgcctttttctgggactgtcaacactccactcaaattttcaagcatgcattttttctgattttctctcctttgcacaccgacacagaagcatcacaggaaaatagttcctttattgtcatcccaattcaaaagataatacacatactactttcccttctctacctccttttgtatatgcacaagtggaacacatgtgagccttgctgtcgt

SEQ ID NO: 388846 - DNA, 604 bp, Homo sapiens
tattttaatgtttaccttttgtggcacttatggtatatattataattatttgtgactgtatctcatattctccactctaatgctgccttttaaaatatctttcttctcaatgctctgagctgaagcaaatatgaaaaagactaattgactattatagtctgtttagaaatttgattgatcatatgagattatctatagatttttttataataatataaaggttgaatagcacccatcaatgtcaagattcaattaagktatgtgagtcaaaaaaagaagttaacacaataaagtcaacgagtgctttgtgattcctttaactttagacaccaatgtaccatagcactggataaatttcctaatatgattaatttttcttccatgtgccttagctgcctttttctgggactgtcaacactccactcaaattttcaagcatgcattttttctgattttctctcctttgcacaccgacacagaagcatcacaggaaaatagttcctttattgtcatcccaattcaaaagataatacacatactactttcccttctctacctccttttgtatatgcacaagtggaacacatgtgagccttgctgtcgt

SEQ ID NO: 388847 - DNA, 519 bp, Homo sapiens
tggagaaaccagtccaaaaaggctgaaaattccaaaaaccagaatacctcttctcctccaaaggatcacaactcaccagcaaggaaacaaaacttgatggagaatgagtttgatgatttgatagaagtaggcttcagaaggtggataataacaaactcctctgagctaaaggagcatgttctaacccaatgcaargaagctaagaaccctgaaaaaaggttagacatattgctaactagaataatcagtgtagagaagaacataaatgacctgatagagctgaaaaacacagcacaagaactttgtgaagcataaacaagtatcaatagccaaatagaacaagcagaagaaaggatatcagagattgaagatcaactcaatgaaaggaagtgagaagacaagattagagaaaaaagagtgaaaagaaacgaacaaagcctccaagaaatatgggactatgtgaaaagaccaaatctacgtttcattggtatacttgaaagtgacagggagaaagcaatc

SEQ ID NO: 388848 - DNA, 519 bp, Homo sapiens
tggagaaaccagtccaaaaaggctgaaaattccaaaaaccagaatacctcttctcctccaaaggatcacaactcaccagcaaggaaacaaaacttgatggagaatgagtttgatgatttgatagaagtaggcttcagaaggtggataataacaaactcctctgagctaaaggagcatgttctaacccaatgcaaggaagctaagaaccctgaaaaaaggttagacatattgctaactagaataatcagtgtagagaagaacataaatgacctgatagasctgaaaaacacagcacaagaactttgtgaagcataaacaagtatcaatagccaaatagaacaagcagaagaaaggatatcagagattgaagatcaactcaatgaaaggaagtgagaagacaagattagagaaaaaagagtgaaaagaaacgaacaaagcctccaagaaatatgggactatgtgaaaagaccaaatctacgtttcattggtatacttgaaagtgacagggagaaagcaatc

SEQ ID NO: 388849 - DNA, 447 bp, Homo sapiens
gtctggcactacccagtgagatgaacctggtacctcagttggaaatgcagaaatcacccatcttctgtgttgctcacgctgggagctgtagactggagctgttcctattaggccatcttggctccaccacccactttatttcattaatttgattttcaatcacggatacccttttttccacttgatcgaataggctgcggaagattgtgcatgtgtcatgtagttctcgtgycatggttttcagcttcattgggtcatttaaggtattttctacactgtttattctagttagccattagtctaatcttttttcaaggtttttagcttccttgcaatggattcaaacatcctcctttagctcggagaagtttgttattaccgatcttctgaagcctacttctgtcaatttgtcaaaatcattctccatccagctttgttctgttgctg

SEQ ID NO: 388850 - DNA, 560 bp, Homo sapiens
ctgtcatccacccgttcctcagaatgtctttgtattaaactaatggtccagcagagcagccagtctgacaggcaggttatttatttgcaatctggtaaaagaaccgacaacttcattgttttaattgttcatttttcatcggttgatgcattagctcacccggatctttatgcctcagtcagagaataaatacttgggagtcaggacaccagaatgactgggtccctcttaaagttcaagaagttgcagakagcctcagtgctagctgtgattaccagcagcccatgtgcatttggggacttttttggtcttatctctgctctgcatctctttcctttctttcaggaagacctatgatgtcagctactgatctgattgtttcttgaaacaatgttcctagttctcacagcctattaaaggagaaagactggagtgggatgagagtctccacagctccatgagggtgggggcctgccagacagacagaagtagaggcccagagacctcaaatatatcatgatatcatggaaaatagatttagctcaggccagtgtctctcg

SEQ ID NO: 388851 - DNA, 536 bp, Homo sapiens
cacagttaaatgccccatcacaaaggtgattcatagaaatcactgagaattaaggcaattaaggtgtggtccagatagtattcttgagacccaagcttccagctactctttgggaattgaaatgtgtatttcgtttttcttttcactcagagaaataatgacctaaaatataaagttctaattcttcagggactgtcttaagaagaagagagagtagattgagtaattttgaactaatcacttgctactagacttaatggatgcttatcagatgaaragttttatataattcacaatagacctgaaggactgaccctgccacagatattacccaaaatagagggtttaatctcagagtttacttttctcatctgcaacagagaaggcttgaagcttcattgctaaaagaagggttatttctaaataaagtcatggcctacacagatgtcctacaaggtattttattttcatttttattttcaattaaacacggttcatctgtgatattaagtgtgaacagctgtgtctatgcaggc

SEQ ID NO: 388852 - DNA, 374 bp, Homo sapiens
gaatggatacggtcatatgcactcacaagagatggtctgaaattggaacttatgtttaaaagggaagcagactgtaaaagcttggaaaatttgcagcctgaccatgtggtagaaaagaaaaatcaattttctgtaaagaaattcaagccagctggagaaatttacayaaataatgaggagctggatgttaatagccaagacaaaggggaaaatgtctccagggcatttcagaaatcttcatggcaacacctcccatcacaggcctggaggcttaggagggaataatggtttcatgggctaagaccaaggccttgctgctctgtggagccttgaaacataacaccctgaatcccagccactccaggtccaggaat

SEQ ID NO: 388853 - DNA, 537 bp, Homo sapiens
ccttacatagaacctaaaatactgaaggcactcaatcaatgcttggaggatagagaaaggaaagaaaaaagaaagaaaagaagggaggcaggcaggcaagcaggcaaacttctctagtacaatatacataattgygtaaaaagcttgctctataaaaagacagaacactggctccctgtatggtgtgtttacatgttcatttgcttattaaacaattattcaatatttactatggatcacggtcctgtgcttgacgctgatgacataaaattgaataaaattagtgttgtggctgggcgcggtggctcacatctgtaatcccagcactttgggaggctgagatggtggatcacctgagataaggagttcgagatcagtctggccaacatggcgaaaccctgtctctgctaaaaatacaaagattagctgggcatggtggtgggcacctgtaatcccagctactcgggggcgctgaggcaggggaatcactggaacctgggaggtggaggttgcagtgagctgagatcgtgccattgc

SEQ ID NO: 388854 - DNA, 535 bp, Homo sapiens
tttactgagtgtttactacattccaaatacgttatatacagtaccattaaaagagccttttattgcacaccaatttctgtcttttgagaattggtctcagtcattcgtataatttttttaaatttatgcttttcaagactgtaaattttataatggcagrgtatacatcttgtttatcactgcatagccagcatttgatacataatcagttatacattagttcagacaaatatttaccattgtataaatgaatatataagtgaatattgatattattacatatcaattgatattatcatttgatacacctcattggtattattacacctaacttacttagacccatgtttcttacacccatcttattatttgcccagggtcaaataataagtggggagtcagaacctgaacccatattttttcccccaaatccatgctatgatgtgctatggtctctagttcttgaaagtaagcactatcgttttatcatttattctccaaagtaattgtgtaatgtgtgttattgttttatatt

SEQ ID NO: 388855 - DNA, 604 bp, Homo sapiens
ctggtctcgaactctagagcttaaaagatccattcaccccagcctctcaaattcctggattacaggtgtgagccactgcgcccagcctccatttgcttttgtcagttttagattgaagaatattaaagcaattgtagatatttaatattttttctagttctatcagttttgcttttattagrtagaaacatacttagaatttgaacattaaaaaattcctattttagttctggtaatgattcttaccttcaagtctactttgtctgatattagtatagctatacaaggttccttttgtttatggtttgcaagatataaatttcttttccttcaacttttagcttttttaatctttaaaatgtgcctcttatagatagtatataatttttattgttgcttttctttaaaattcagcctgataatctttttcttttttgtagcatatacttcattttactttagtatattttcttatatatttagttttaaatctaccatctaactattgttatatttgttacaacatttctgcattccttttccttttctcttgtcttaatttgtcttccattagcttgttaattattcatttttctactctctt

SEQ ID NO: 388856 - DNA, 479 bp, Homo sapiens
ctttgtgagggccagtctaattccattttaccccatacttaaagtgtggccctttggggaagcccarttgaaagcttggggtcttttctagggtttcttgttgatgagtcctaaactccaattattgctacccagtccttccaaagatctatttaacttctctgcctctttgcttttgctcgtgaatcagtaaacggcagggggaaaatggtgcaggacattgggctcatctttctacttctgtctaaccctgtgtcttggatattttgacctttgtaattgtcactgccttaatagctccccaattcttaaacacaaaaattttctattgtctatctatctatctctttatctatctatctgtctgtctgtctatctgtctgtctgtctatctatctatctatctatccagctacctacctatctatctgggtggttggggaagagagagagatgcatttgtgtgtatatgtgtgtct

SEQ ID NO: 388857 - DNA, 609 bp, Homo sapiens
gcagtgcaatttgaaatcatatagtgtgatacctccagctttgttctttttgctgagtattgctttaactatttagatgattttgtggttccatacaatttattaaagttgcaggatacaaaatcaacataaaaatcagtatgctaagagtaatcctgaaaaagaaatcaagaaagcaatcccatttacaatagctacaaataaaatatgtaggaatcagtttaactaaagaagtaaaagatctctacaaggaaaaatactccccaaagccatctattgattcagtgcagtccctataaaaacaccaatgacattcttcacaggaatagaawacacaatcctaatcttttaataatctttgaattttacagctcatgcatgtatgacttattaccaaaatattttcaatcaaaaatttgcattacctttaaaatgcttttcaatgaaattcttcaaaatttctaattcacgtaattcctttaatcaaattctctaatattgaaaggataatttctaccatatgattggcaccattataaaaatccattaactttctttcatggacagcaggatttcccatcatatcagctgcctagtgcacccaaccag

SEQ ID NO: 388858 - DNA, 598 bp, Homo sapiens
aattttttaattggctcagagagcattttagagaagagaaatgcataattgcataaattacaaagtttgagtaagacaacgagggtgagaaacatgattctattaaaatcagaataaaaaaccatgcattatcctgaaagtatatacaaatgtgaagaatgttggattctaggaaattattttttaagattgttaggaagagaaactcgggtctttgtttggcctgcttcaccatacacatacacacatgagcgcgcgcrcacacacacacacacacacacacactctcttaattccatgtgattaagagctccgttcctgtcattttcaacatgccactgcttcccagaacttggggaggctttgcgagacagggctgcctagttcttaagtgtccctctttgcataactctggtttctgaagaggtacgccagaggaaaagtgcacactgtgtcatttccaggatttacagggaaccaaatgcttgagtcagaagttgccaagtacacatttcattttgatttaaaagacagttaatgtctaaagttgaaaagaacacaaatgattattaataaaataagttacagtaacagctga

SEQ ID NO: 388859 - DNA, 624 bp, Homo sapiens
aataatgcaattttattgaaatacgaatgtggcttttttgttggtgggaggatgtgctgctctcccaccatatatacttgtttcaaaaaatgcagcataaggaaaaaaccagatcccatctgccaggccaaatagctataaagtrgaaaaatcaggtttttaatgaatccattgagagtaacttgagttattttttaatgtaagggcaaataaacttttgagcagagttacataaccatgtagtagtcttttaatttatagctaggccaaattcagatcctggttttagctaaattagagtgctcccaaaagacagaatgattagataatacaagtaggcttttgttggcctcttcttctaaaatatagctcacagtctaagaagactagaattcaattttcaattcaagacaagtaaacatgtctgcatatattcataagactcactgaacaactgaactttgtttttttattttctttagcacatatccacaataagagtgttgctctttcatagtccagtcggaagtagtgtagaataaaggcagacacctgttctttcacccgttttggccacatcttctagctccattttaagacttcaattttgacaattttttctct

SEQ ID NO: 388860 - DNA, 624 bp, Homo sapiens
aataatgcaattttattgaaatacgaatgtggcttttttgttggtgggaggatgtgctgctctcccaccatatatacttgtttcaaaaaatgcagcataaggaaaaaaccagatcccatctgccaggccaaatagctataaagtagaaaaatcaggtttttaatgaatccattgagagtaacttgagttattttttaatgtaagggcaaataaacttttgagcagagttacataaccatgtagtagtcttttaatttatagctargccaaattcagatcctggttttagctaaattagagtgctcccaaaagacagaatgattagataatacaagtaggcttttgttggcctcttcttctaaaatatagctcacagtctaagaagactagaattcaattttcaattcaagacaagtaaacatgtctgcatatattcataagactcactgaacaactgaactttgtttttttattttctttagcacatatccacaataagagtgttgctctttcatagtccagtcggaagtagtgtagaataaaggcagacacctgttctttcacccgttttggccacatcttctagctccattttaagacttcaattttgacaattttttctct

SEQ ID NO: 388861 - DNA, 431 bp, Homo sapiens
ttgataaataattaattataattgtgttatgtaaaggccaagatattgcagacaaacagaggtatttagggcttgtcactgttaatatttgttgttctccttgagcatcattatacttcacaacgtttttcttcacaacaggaggaagaatttcgcagaaacatgactttgaatccaacatacgtcctgtaccaattgaatggtgctggccactagtttaacacatctgtctcaggaagggaataatgatgttctatctaccttatgggttaatgtgaacattttcatattacgattattaagcagtacaggttgtttggctaattatatatgaatcaggtgaaggcatttcgtaaattmtttgcctcagtcttggacttaggaaaccttagcttgcgtcccaactctacctctgggcagttttgtgatcc

SEQ ID NO: 388862 - DNA, 594 bp, Homo sapiens
  misc_feature (1)...(594): n = A,T,C or G
atttttattaccatatgtctgatatccaccccacctcttcttgaatgccatccacaattcttgagtatcagtctgtttctttgttgctagaaatgtctttcttaagacaagtgctgtcgttatagaacctctagtcttgacaatcctctacttgacagttctaatagttgaaggtagctttcatgtttcattactctttttctctgagtaaaaaaatcaktgctttaatagctctgatattgttaaccaacctcctctgaagataaacagtaagttctttttgtaattgccaaagccatggggctgtggtttaaagtacattattatggaaaatttaattttttaaattatgtaagtaatatatgtattttacgccaaatcattcataatcccaccctgaaataaccgctgtttacattttcatgtgcttttctttatgtattttatatcgtttagaaaaataggttatataaataattttgagtcctgctttgtttnccaatgttatggttccaacaatgtttctgtgtctttaatgctcttttagaagatgtcatcagcaattcatcctaaatccagtattcttttctgata

SEQ ID NO: 388863 - DNA, 602 bp, Homo sapiens
atgctgaatgtaacattcagggcaaaataatragatcaaaaggggtgtattatagttatattaagctagtctgatcctttgaaatctgtgtaaaaggcctgacaaagcagtaatttttacatatggaaatgtatttataataaaagcatacggataataaattgcctttgttgaatgaataaagttagattaaattcacaatgcctgtaaaaccagcatattgtgaaaaacaaacaaacaaaaaatcaacctgtagtctggagcttcatgttctagtacaactttttgtcctaaaattttcatgggcattatgataaattatcataatctgttggagattcagcttcaccacacgtaaaaatacacttagattaaatgatcttaagtattcctaccaagtttactgttgtattagtccattttcatactgctgataaagacatatctgaggctgggaagaaaaaaaggtttaattggacttacagttccacatggctggggaggccccagaatcacggcaggaggggaaaagcacttcttacatgctgcagcaagagaaaatgaggaagatgcgaaggtggaaacccctgataaaaccatca

SEQ ID NO: 388864 - DNA, 521 bp, Homo sapiens
atgctgaatgtaacattcagggcaaaataataagatcaaaaggggtgtattatagttatattaagctagtctgatcctttgaaatctgtgtaaaaggcctgacaaagcagtaatttttacatatggaaatgtatttataataaaagcatacggataataaattgcctttgttgaatgaataaagttagattaaattcacaatgcctgtaaaaccagcatattgtgaaaaacaaacaaacaaaaaaycaacctgtagtctggagcttcatgttctagtacaactttttgtcctaaaattttcatgggcattatgataaattatcataatctgttggagattcagcttcaccacacgtaaaaatacacttagattaaatgatcttaagtattcctaccaagtttactgttgtattagtccattttcatactgctgataaagacatatctgaggctgggaagaaaaaaaggtttaattggacttacagttccacatggctggggaggccccagaatcacggcag

SEQ ID NO: 388865 - DNA, 602 bp, Homo sapiens
atgctgaatgtaacattcagggcaaaataataagatcaaaaggggtgtattatagttatattaagctagtctgatcctttgaaatctgtgtaaaaggcctgacaaagcagtaatttttacatatggaaatgtatttataataaaagcatacggataataaattgcctttgttgaatgaataaagttagattaaattcacaatgcctgtaaaaccagcatattgtgaaaaacaaacaaacaaaaaatcaacctgtagtctggagcttcatgttctagtacaactttttgtcctaaaattwtcatgggcattatgataaattatcataatctgttggagattcagcttcaccacacgtaaaaatacacttagattaaatgatcttaagtattcctaccaagtttactgttgtattagtccattttcatactgctgataaagacatatctgaggctgggaagaaaaaaaggtttaattggacttacagttccacatggctggggaggccccagaatcacggcaggaggggaaaagcacttcttacatgctgcagcaagagaaaatgaggaagatgcgaaggtggaaacccctgataaaaccatca

SEQ ID NO: 388866 - DNA, 602 bp, Homo sapiens
atgctgaatgtaacattcagggcaaaataataagatcaaaaggggtgtattatagttatattaagctagtctgatcctttgaaatctgtgtaaaaggcctgacaaagcagtaatttttacatatggaaatgtatttataataaaagcatacggataataaattgcctttgttgaatgaataaagttagattaaattcacaatgcctgtaaaaccagcatattgtgaaaaacaaacaaacaaaaaatcaacctgtagtctggagcttcatgttctagtacaactttttgtcctaaaattttcatgggcattatgataaattatcataatctgttggagattcagcttcaccacacgtaaaaatacacttagattaaatgaycttaagtattcctaccaagtttactgttgtattagtccattttcatactgctgataaagacatatctgaggctgggaagaaaaaaaggtttaattggacttacagttccacatggctggggaggccccagaatcacggcaggaggggaaaagcacttcttacatgctgcagcaagagaaaatgaggaagatgcgaaggtggaaacccctgataaaaccatca

SEQ ID NO: 388867 - DNA, 353 bp, Homo sapiens
ttttatccatctgtgcatggagagagagagaagtagaactctctgtctttttccttttataaagccacctatgcagccatgaaggccccaccttcatgacctaaactaaccctgattacctcccwaaggctcaacatccaaataccatcacaatgggggttattcaacacctgaatttcagggagacacgagtattcagtacataacacgatctgaactataataaaacagtaaataacaacagcaataatactagctaggatttatttagcaagcactttgtgtgctgaatattcaatgataattaaatcatataatcctcagaaagaaattatgaaattggtattggtatt

SEQ ID NO: 388868 - DNA, 602 bp, Homo sapiens
agatgaagtgtctgctcccatgcagattatcttttttgacgtgagataaaccataaagaaggaaataaataaataatcatgatggcttcttaaagcaataattctataartagcataaatgaagtaatgcactgaagagagtatatttgtggtaagaaagtactcatgcatatgtgctataagaggtagggagataaggggaaagctctctgaagaagtgagcttctgacatctggataaggaaccagccatgtggaaaactgtgggaagaacattgtaaaccgaatgaattgcaagtgaaaaggctctgggtcagaaataagcttggcgagaataagttcttgaagcagaaagaagaccaatgagctggagcataatgaaaaagagggggagtggtaagacatgagattagagagagagaaaagtaccacaacatggagcactttctgtactttggaaatgagattacattttatcttgaatgcattggaaaccattggataattttagtaatctgtgacatgacttattttgattctttaatagattactttggctatagcatagagaatagattgacaattaatccctgacttgataac

SEQ ID NO: 388869 - DNA, 602 bp, Homo sapiens
agatgaagtgtctgctcccatgcagattatcttttttgacgtgagataaaccataaagaaggaaataaataaataatcatgatggcttcttaaagcaataattctataaatagcataaatgaagtaatgcactgaagagagtatatttgtggtaagaaagtactcatgcatatgtgctataagaggtagggagataaggggaaagctctctgaagaagtgagcttctgacatctggataaggaaccagccatgtggaaarctgtgggaagaacattgtaaaccgaatgaattgcaagtgaaaaggctctgggtcagaaataagcttggcgagaataagttcttgaagcagaaagaagaccaatgagctggagcataatgaaaaagagggggagtggtaagacatgagattagagagagagaaaagtaccacaacatggagcactttctgtactttggaaatgagattacattttatcttgaatgcattggaaaccattggataattttagtaatctgtgacatgacttattttgattctttaatagattactttggctatagcatagagaatagattgacaattaatccctgacttgataac

SEQ ID NO: 388870 - DNA, 575 bp, Homo sapiens
gagctgaacaattgccttgctgcccccacagggaagacagaatttggattttgaggcttatcctaaatacattcaagggacttagggggaaatatgcatataatagagaaataatgtgaaaacctagccgagaaatagaaactataagaccccaataagggttctcattcgcctctgctttctaaccttagaagtcacaattccatccttgggtctcaggtttgtcttgactgagctaagtcacctgctgtgctttcctcaccagagcaaactgactggtcatcagggtttagtggcaactgacacagagtgggctgccactccttccctgagctacctgggaaggatgagacagcagcaggcttcctaggctctaaaactcattcctccaaactaatgctgttcaaaaggtggtaagtgcctccctgggataccttaacagcaagacaaagcattatgaatggcctatgttggcctgtattgtggtgttctgaattcaggcatattagagagtatgtgrtagcgaggagtattttcatttaaagatttcctctcattcaccccaagtgcagtca

SEQ ID NO: 388871 - DNA, 611 bp, Homo sapiens
ttcaggcatattagagagtatgtggtagcgaggagtattttcatttaaagatttcctctcattcaccccaagtgcagtcaaaggtggcattttgcctgagtgagattgtcctggagcaaagcaaggatagtgtgagttaaaaatacctgacatgaaggggacttactttagaggaaaactttatatcaagtaaagtggtcactgggatgcctgttaatacatttatttgacttgagaagtgaagtcagagtttttctgacagaaattaaacctgattttggtttaaaaaaaagaatcaaataaaaattctataactataaagtataatatttgaaagaacacattggctggataaactggaaagcagattggcaaataaaaggatacaaaaaataattcatcatcatctgacctacactacaagaaatattaaacaagattctttaggatagaatgaaaccaaaagctgttggatggaaacttgtrtctacaagaagaaagaaagagcactgaaaaaaaaaatatatacatatatatgattttttcttctcttaatttctttaaaggacataagaatgttcaaagaaaaattataacatgtttaatggagc

SEQ ID NO: 388872 - DNA, 602 bp, Homo sapiens
agtacaaagttaaaaataattgtagaaggcatgcacagcagtgcttagagtgaatctgtagcatataacaatcataacttcaagtgtttatattagaaaacaagaggggtttaaaaaccactgatcgaagtttctaacttatgaagttagaaaaagaacaaattaaactcaccataaatagaagcaaggaaaacttaaacacaagaatagaaactaatgaaatagaatacagaaaaatggacaatatagacaattaacagasaatgtaccaactgatacggttttcatttctgtccccatccaatctcaggtcgaattgtagtccccattgttggaagaggggcctggtgggaggtgattggatcatggggatgaacttcctccttgctgctctcatgataatgatttctcacgagatctggttgtctaaaagtgtgtagcacctcccccttcactctctcttctttcttcttcaaccaggtaagacgtgcctgcttccccatcaccttctgccatgattgtaagtttcctgaggcctctttcctaaggtttctcttttctttataaattacccagtctcagatagttctttatagcaacgc

SEQ ID NO: 388873 - DNA, 602 bp, Homo sapiens
agtacaaagttaaaaataattgtagaaggcatgcacagcagtgcttagagtgaatctgtagcatataacaatcataacttcaagtgtttatattagaaaacaagaggggtttaaaaaccactgatcgaagtttctaacttatgaagttagaaaaagaacaaattaaactcaccataaatagaagcaaggaaaacttaaacacaagaatagaaactaatgaaatagaatacagaaaaatggacaatatagacaattaacagagaatgtaccaactgatayggttttcatttctgtccccatccaatctcaggtcgaattgtagtccccattgttggaagaggggcctggtgggaggtgattggatcatggggatgaacttcctccttgctgctctcatgataatgatttctcacgagatctggttgtctaaaagtgtgtagcacctcccccttcactctctcttctttcttcttcaaccaggtaagacgtgcctgcttccccatcaccttctgccatgattgtaagtttcctgaggcctctttcctaaggtttctcttttctttataaattacccagtctcagatagttctttatagcaacgc

SEQ ID NO: 388874 - DNA, 572 bp, Homo sapiens
aaaatcaatgttccattatgcagcatctttaaccaagcacctcaaagggatgttgttggcactgtgtrcctataaccccagtgtcagacatctggaggagcagggcctttcagcctgctgaagttatcttgatccttggcttttgacgtatagctggagtcccaagtattatatggtgaaaaattcagcgtcttcctcactatctttgtggtttcttgtgagagtcatgtttctcctggttatcttatttggaatctctacttccattaatctgtatctttctcatgtctcttcttgtggctatttccttttctatgctcttcattaaacaacgtagaacattaaagaaaagggctctttaatttaatttctttaatttctccctgtaccacttaaatactttatgtaatagattttattgtttgagatgcaggataaacataggggaagttgtattatcttaaaaatttttcagtccctttagttttaagtggcaatgatttggcaggaaatggcacaattttcaaattcccattcttaaagactgacatcagtaacctgctatactggta

SEQ ID NO: 388875 - DNA, 572 bp, Homo sapiens
aaaatcaatgttccattatgcagcatctttaaccaagcacctcaaagggatgttgttggcactgtgtacctataaccccagtgtcagacayctggaggagcagggcctttcagcctgctgaagttatcttgatccttggcttttgacgtatagctggagtcccaagtattatatggtgaaaaattcagcgtcttcctcactatctttgtggtttcttgtgagagtcatgtttctcctggttatcttatttggaatctctacttccattaatctgtatctttctcatgtctcttcttgtggctatttccttttctatgctcttcattaaacaacgtagaacattaaagaaaagggctctttaatttaatttctttaatttctccctgtaccacttaaatactttatgtaatagattttattgtttgagatgcaggataaacataggggaagttgtattatcttaaaaatttttcagtccctttagttttaagtggcaatgatttggcaggaaatggcacaattttcaaattcccattcttaaagactgacatcagtaacctgctatactggta

SEQ ID NO: 388876 - DNA, 538 bp, Homo sapiens
aatgaatatatgctataaaactataccagcaaaggaattactgacttttaaaaatttaaatcatatgaagttatatacagtagataaaacttaggtccactcctaaatggacttttcttgctttgtttcaaaagtaytttcaatctctgtttcaatatctcagtgaattagctgatggtatagtacaacaacaaggcaacctcactgcaaactgaaatttccagctgggaactcttctgcagggtgtcatctgtaacttcagtccacaaatcacttaagttatcccagatattatggactttaaatggtctccagagaaaactatcctgatagccttcttttattgttagtacaactgtaaagaattatggtcatccccttattgaaaaatgcatgagacaagataataaaaagtgagaattatataataaatcattttgagcaggtatggaagtaataaacataggtcaactaaaaggctagcacattgactaatggcagtatcatggctatttctatagggagcgaccagttcatc

SEQ ID NO: 388877 - DNA, 608 bp, Homo sapiens
aatgtcaaaaaatattccttcttataatcttcaagcatgcttcattatgtcttcctcccgcttcagatgcatcaacggtatctgggggaaagctattatcttagtccattttgtgttgctataacagaataccagatgaaatttataaagaaaagagatttatttggctcacagtcctggagtctgggaagcccaagactgagagaccacatctggtaaggttcctcttgctgtgtcataacctggcagaaggcaacacatggtggggaagttcacttgaagacagagagagaaagttgggccaaactcatccttttatcaggaactcagttctgaaataatggtattaatctgttcataagggcatagccctcatgactgaatcacctcttaaaggtctcatttcttgataacatcaccacaatgtcaactaaatattarcatgagttttggagaggactttcaaaccgtagaagctgttaaagcaggcaggtgcggtcctagctttggaatggaagctgtattaattgtgtcctctgggaaatagatgactatgtggagttaggagtatgagttttatcgggtgtgaaagagaaaaagaaaagaag

SEQ ID NO: 388878 - DNA, 536 bp, Homo sapiens
taagacaaactatatgaatgtttttgaaaatttcatacatttcactgmaccatgctttttatcttctgtaaatgatagtaactgcttacccaattctctcactgttacagttttgctcatcttaaagcattttccaatttgttattcatgaaaaaacaaccattttcttttgcatttatttgattgttagtaagattaaatttttttatgtttattgcccatttttatttcttattttgtgagctgctaggcacaaatttgaaaatagatacatttctgggctaccagtttaaacagagttgagctcagcaaaatgacaagcagcttataattggaccaatacccacaaatgatctttcttgaaggatgtttttaaaaaaactgtattatttctgattacttctggcaaagtcctttgcttttctccccctactaatgagtgatcaaaaacagcaacatgactatctttgtcaatcagtgtattttattgttcttttcccaatgatttttaggtacatgttatgggtatgtatctg

SEQ ID NO: 388879 - DNA, 536 bp, Homo sapiens
taagacaaactatatgaatgtttttgaaaatttcatacatttcactgcaccatgctttttatcttctgtaaatgatagtaactgcttacccaattctctcactgttacagttttgctcatcttaaagcattttccaatttgttattcatgaaaaaacaaccattttcttttgcatttatttgattgttagtragattaaatttttttatgtttattgcccatttttatttcttattttgtgagctgctaggcacaaatttgaaaatagatacatttctgggctaccagtttaaacagagttgagctcagcaaaatgacaagcagcttataattggaccaatacccacaaatgatctttcttgaaggatgtttttaaaaaaactgtattatttctgattacttctggcaaagtcctttgcttttctccccctactaatgagtgatcaaaaacagcaacatgactatctttgtcaatcagtgtattttattgttcttttcccaatgatttttaggtacatgttatgggtatgtatctg

SEQ ID NO: 388880 - DNA, 536 bp, Homo sapiens
taagacaaactatatgaatgtttttgaaaatttcatacatttcactgcaccatgctttttatcttctgtaaatgatagtaactgcttacccaattctctcactgttacagttttgctcatcttaaagcattttccaatttgttattcatgaaaaaacaaccattttcttttgcatttatttgattgttagtaagattaaatttttttatgtttattgcccatttttatttcttattttgtgagctgctaggcacaaatttgaaaatagatacatttctgggctaccagtttaaacagagttgagctcagcaaaatgacaagcagcttataattggaccaatacccacaaatgatctttcttgaaggatgtttttaaaaaaactgtattatttctgattacttctggcaaagtcctttgcttttctccycctactaatgagtgatcaaaaacagcaacatgactatctttgtcaatcagtgtattttattgttcttttcccaatgatttttaggtacatgttatgggtatgtatctg

SEQ ID NO: 388881 - DNA, 623 bp, Homo sapiens
tcaggttcttatgaagaaaacattaatagtagaaattatatacacattattcctctttctgtcagcactgaaaaattctcgttgattcctctttatgaaatgagattccacagaagtcaaagagtaagaagataaagaatgtttcccccttagtagagataatataaagaaagacaatacaagcccattgtaaaattacagatcataagtcactgctattaccctgcaggtcttggtgttaaatggaaaacacaggaaggggagggaacattggttaagttgtttaaaaacatttaactatcctcacttcctggaagcatatatagaaaggcatacatttaagtgtctacataataagagaaagtatattgcaccaatacatcaacactagagcaacaattacattatgtcactctacagtggtgaatcattaggaagccacagtcagcatcagtgaaaagaatgtttccttgaaattggattgtttaaattacaggatgtgcatttggatactacattcaccatgctgggttttaaataagaaacttgagttacaagwcttgtggagtcctgacttccgtccccttgcttctaagcaagaataaatctccctcacacacttg

SEQ ID NO: 388882 - DNA, 615 bp, Homo sapiens
acatcattaaagtactgaaagtaaaatatgtcagctgagaaatctatacccagcaaaactatcttttgaataagtgaaataaaaaggattaaaagggaatactgtgaacgactgtatgtcaacaaattatataacctagagaaagacaaatgtttagaaagattcaaactactgaaacaaactcaagaagaaaatgaaaatmtgaatagatctgcaacagaatatattgaattagtaaccaagaaattttccccaaagaaaagcccatgaccaaatggctttactgataaattctaaaaaaaactgaaagaactaacaccagattttcaaaaacttccagtaaaatagaagatggagaatacttcctaccttattctatgaggacaacactaccctcatccaaaaagcagacaaagatatcataagaaaactgtagatgagcatccattattcatgtagactcaaagctccttaacaaatagtagaaaacataatttattaacatgaaaaataatcacaccaccaccaattgtgatgtatcccagaaatgtaagattgcttcaacatatgaaaatcagtaaatgtcaatataccatattagtagaattagagaca

SEQ ID NO: 388883 - DNA, 615 bp, Homo sapiens
acatcattaaagtactgaaagtaaaatatgtcagctgagaaatctatacccagcaaaactatcttttgaataagtgaaataaaaaggattaaaagggaatactgtgaacgactgtatgtcaacaaattatataacctagagaaagacaaatgtttagaaagattcaaactactgaaacaaactcaagaagaaaatgaaaatatgaatagatctgcaacagaatatattgaattagtaaccaagaaattttccccaaagaaaagcccatgaccaaatggctttactgataaattctaaaaaaaactgraagaactaacaccagattttcaaaaacttccagtaaaatagaagatggagaatacttcctaccttattctatgaggacaacactaccctcatccaaaaagcagacaaagatatcataagaaaactgtagatgagcatccattattcatgtagactcaaagctccttaacaaatagtagaaaacataatttattaacatgaaaaataatcacaccaccaccaattgtgatgtatcccagaaatgtaagattgcttcaacatatgaaaatcagtaaatgtcaatataccatattagtagaattagagaca

SEQ ID NO: 388884 - DNA, 564 bp, Homo sapiens
agaaaaaaggaaaaacaatgacgtgagagaatcaacttgcagaaaaaaattaactattaatgatccagaaggtttggatgaacaatattcccctgtcttgccaaaaaagaaaacaaaacaaaaccaaaaacccagagcatttcttatttaagagtgccttcacttagctattttaataagacctagtcaactgaaaaacatctttgcacaaatgacaaagaacagtgtctcatrtataaaaactgtagtgtcctgagagtcaagctggatgggcttagagccaggacagatctggatattaatcccagattctctcattagctcagtggccttgctagaacaactttctgatctacttcattatctgtaaaatgtggctaaaagttattcttctttgtaagtttataaatatttgcaaatttcctagcccttgatagatacttagtaaagcccaagatagcaactgattaatcaaaatatgtactatgtgcaaggtcaaagaatatatatggcatgacatcgagttgcaggagcttgtaatttgtagattttacgtatttaata

SEQ ID NO: 388885 - DNA, 564 bp, Homo sapiens
agaaaaaaggaaaaacaatgacgtgagagaatcaacttgcagaaaaaaattaactattaatgatccagaaggtttggatgaacaatattcccctgtcttgccaaaaaagaaaacaaaacaaaaccaaaaacccagagcatttcttatttaagagtgccttcacttagctattttaataagacctagtcaactgaaaaacatctttgcacaaatgacaaagaacagtgtctcatatataaaaactgtagtgtcctgagagtcawgctggatgggcttagagccaggacagatctggatattaatcccagattctctcattagctcagtggccttgctagaacaactttctgatctacttcattatctgtaaaatgtggctaaaagttattcttctttgtaagtttataaatatttgcaaatttcctagcccttgatagatacttagtaaagcccaagatagcaactgattaatcaaaatatgtactatgtgcaaggtcaaagaatatatatggcatgacatcgagttgcaggagcttgtaatttgtagattttacgtatttaata

SEQ ID NO: 388886 - DNA, 564 bp, Homo sapiens
agaaaaaaggaaaaacaatgacgtgagagaatcaacttgcagaaaaaaattaactattaatgatccagaaggtttggatgaacaatattcccctgtcttgccaaaaaagaaaacaaaacaaaaccaaaaacccagagcatttcttatttaagagtgccttcacttagctattttaataagacctagtcaactgaaaaacatctttgcacaaatgacaaagaacagtgtctcatatataaaaactgtagtgtcctgagagtcaagctggatgggcttagagccaggacagatctggatatkaatcccagattctctcattagctcagtggccttgctagaacaactttctgatctacttcattatctgtaaaatgtggctaaaagttattcttctttgtaagtttataaatatttgcaaatttcctagcccttgatagatacttagtaaagcccaagatagcaactgattaatcaaaatatgtactatgtgcaaggtcaaagaatatatatggcatgacatcgagttgcaggagcttgtaatttgtagattttacgtatttaata

SEQ ID NO: 388887 - DNA, 564 bp, Homo sapiens
agaaaaaaggaaaaacaatgacgtgagagaatcaacttgcagaaaaaaattaactattaatgatccagaaggtttggatgaacaatattcccctgtcttgccaaaaaagaaaacaaaacaaaaccaaaaacccagagcatttcttatttaagagtgccttcacttagctattttaataagacctagtcaactgaaaaacatctttgcacaaatgacaaagaacagtgtctcatatataaaaactgtagtgtcctgagagtcaagctggatgggcttagagccaggacagatctggatattaatccyagattctctcattagctcagtggccttgctagaacaactttctgatctacttcattatctgtaaaatgtggctaaaagttattcttctttgtaagtttataaatatttgcaaatttcctagcccttgatagatacttagtaaagcccaagatagcaactgattaatcaaaatatgtactatgtgcaaggtcaaagaatatatatggcatgacatcgagttgcaggagcttgtaatttgtagattttacgtatttaata

SEQ ID NO: 388888 - DNA, 662 bp, Homo sapiens
gttcttctcataaaataatttcgaatcagaataaaataagcaatttgtgcttttttaataaccgccttgtctatttctttttcagattagcactgtggaggatgtcaggaatagaaagaaaataatagtcattatgacttctagctgaaagaaaacttggttttcttgtgtattttcttaacagttgagttcacctttagtgctgctattattgtctctatccctttgctttgtaatctcttctctcagctcctcagctcaaactatatgataaaactttaaacacaaatgctatttttaagggaggagtgaaataaagaatgtttaggggaaagttgaaaatattctcatttttagtaatgtttgtctataccataaatattttgtttacctggaagattcacgatgggaagactttccaaaaaatgtaattttaaaaacagtctacagattaatttccttttcttattctaacatgctgttgcagcaagaggactccaggttggaactgtgtgagtatgcctgtgaatgtgtatgataaacagctaattacctgtcagtcaccayagcaatgtttataggaagactgagaagctcacatagctctgttagccaatttgagggaggaaaaaccatataatctcttttttcaatccctagtg

SEQ ID NO: 388889 - DNA, 503 bp, Homo sapiens
gaaacataatcttccctgaatcctccagaaaaaaaaatatagtcctgctgacccattttagacttctgacctccataactgtaacataataagtttgtgttgttttttagccactaagtttatagtgatttgatayagcagcagtaaaagacaaatacacagaatattggagatgaagaatttatttaacaggcttagcaataggctcaacacagtcaaagaaataattggtgaatttgaagataggtcagtagagatcactcaaactgaaacacaaagaggaaacatgacagaaaaaatacagtttctaaagagtctgttgacaatgtaaatggatctatcgtacatgtaatttgaaattcaaaaagaaaaaaaaaaagaatggagcctaagaagtatttgaagagagagtggccaagaatgctccaaaaatattcaaaggcatcaaaccataggtccaataaatgcagaaatcttcaagcagagggagaaaaaaaaatcaa

SEQ ID NO: 388890 - DNA, 503 bp, Homo sapiens
gaaacataatcttccctgaatcctccagaaaaaaaaatatagtcctgctgacccattttagacttctgacctccataactgtaacataataagtttgtgttgttttttagccactaagtttatagtgatttgatatagcagcagtaaaagacaaatacacagaatatyggagatgaagaatttatttaacaggcttagcaataggctcaacacagtcaaagaaataattggtgaatttgaagataggtcagtagagatcactcaaactgaaacacaaagaggaaacatgacagaaaaaatacagtttctaaagagtctgttgacaatgtaaatggatctatcgtacatgtaatttgaaattcaaaaagaaaaaaaaaaagaatggagcctaagaagtatttgaagagagagtggccaagaatgctccaaaaatattcaaaggcatcaaaccataggtccaataaatgcagaaatcttcaagcagagggagaaaaaaaaatcaa

SEQ ID NO: 388891 - DNA, 548 bp, Homo sapiens
aaaccttaagacaaccactaaggaaattagaaataatggtataaataataaaccaatagtggaaataaaatagtataataaaaagcacttaattcaaaagaaggcaaaaagaaagaacaaaggcaaatgaaacaaatggtagatttaaatccaacaatataaataattaaaattgttctaatacactaactaatgataggttaacaagttggataaaaatgcaagacccaactatatgctgtctacaagaaacatgatttaaatgtagaaatgtctgtataaacaaaggatagaaaaatacgtaccatgcaaccacgaatcaaaacaaatttggaatgactatgttaatatcagaaaaagtagacttcagaaaaagaaatattaccagaaaaaaagaggatattacttaatgataaaggggtcaattctccaagaagttatgagtttctaaatgtgaacgcagctaacaacagagatttgaaacacatgaagcaaacctaatraaacagaaaggaaaaatggacaaacctcaacaatagttggagtac

SEQ ID NO: 388892 - DNA, 680 bp, Homo sapiens
tgttttagtctagttcattgcrggatgaacttttccctaatctccactacacctgcttcacgttcttatatgacctccctagccttatttgaaagtgtgatcccagacttactctagccctctcagtaattcaatttagtaagtattgtttggaatacttactttgtaccaacggtaatggtcagctttagggatacttaagcaacaagacacagtccctgcccacatgtttcccatcataaaggaaacacgaatttgttgaacttatagttagaggattgaaactgggggagggagttagcagaagattccacaaggccatctaaataaagaacactgagggccagagacagtaacatgggattagaacctgcgctcatctctgaggttagtgttattttcattctgtttgtgggctttgagaggggcaggaacccctttgagaaggaccataaggcaaaggggtgtcagttctcttggcagctcatgctttcgaaggtcttctcaccaccttgcaattaatacagattaattaattaactgtatcttctgggatcttttgaagagtaaaatcttactcttctctttgtactccacatatctgcctcttacttcctccaaaaccatcatcacttgaaacagcagtgtaaagctatacatgttcacttgatttacccact

SEQ ID NO: 388893 - DNA, 589 bp, Homo sapiens
ggcaggaacccctttgagaaggaccataaggcaaaggggtgtcagttctcttggcagctcatgctttcgaaggtcttctcaccaccttgcaattaatacagattaattaattaactgtatcttctgggatcttttgaagagtaaaatcttactcttctctttgtactccacatatctgcctcttacttcctscaaaaccatcatcacttgaaacagcagtgtaaagctatacatgttcacttgatttacccacttgatcagattaattattttgtgtcagaagtagaagatgacataggtccccgatccataaagaatgaattcattaatttgattctttaacaaaggttttgtttactaaggaaacttgaagataggcattcaggtggcttactcattacaatttaaaatttaagaatcaaaacaacaacaactagatagcatcatatcttagagccaacagcgtccacttcataagtatcttttcgttatatattgaaaacaattagtagaaaaagcataggtttgaatccataaacataagtttaaattattgttttacaacttacctagcttcgaacaagccatg

SEQ ID NO: 388894 - DNA, 589 bp, Homo sapiens
ggcaggaacccctttgagaaggaccataaggcaaaggggtgtcagttctcttggcagctcatgctttcgaaggtcttctcaccaccttgcaattaatacagattaattaattaactgtatcttctgggatcttttgaagagtaaaatcttactcttctctttgtactccacatatctgcctcttacttcctccaaaaccatcatcacttgaaacagcagtgtaaagctatacatgttcacttgatttacccacttgatcagattaattattttgtgtcagaagtagaagatgacataggtccccgatccataaagaatgaattcattaatttgattctttaacaaaggttttgtttactaaggaaacktgaagataggcattcaggtggcttactcattacaatttaaaatttaagaatcaaaacaacaacaactagatagcatcatatcttagagccaacagcgtccacttcataagtatcttttcgttatatattgaaaacaattagtagaaaaagcataggtttgaatccataaacataagtttaaattattgttttacaacttacctagcttcgaacaagccatg

SEQ ID NO: 388895 - DNA, 529 bp, Homo sapiens
cctgggaacttgttagaaatgcagattactgagattcattccagatttactcacttaggagtcctgggagtggagaccagacctgttttaacaaggcctccagagtagtctgatatgcattsaagtgtgggaagcactgaaatagactatccctcaccaaaccactacctgagtcaggtttccctggttgattttaagacaggctagaggcaacatggaatattactggattaagataaacatcaacaacccagaattgttaaaatgttctatgacttatttgtcataagattttgggtaattcagttcatttttctgaacttcagtttcctgccctgtcaaatgggaatctatcctgttctgctgctgttctgctgtggtgtagtaggcctccaaaaaagtaaaaattaaaaatagaaagtaccttatgaaaacagatatttcaaaggagaaaaaggaatgataattgctattgaatttaacatctagatttgtaaagtcattttttcttttatataaacagtaaaag

SEQ ID NO: 388896 - DNA, 621 bp, Homo sapiens
agactatccctcaccaaaccactacctgagtcaggtttccctggttgattttaagacaggctagaggcaacatggaatattactggattaagataaacatcaacaacccagaattgttaaaatgttctatgacttatttgtcataagattttgggtaattcagttcatttttctgaacttcagtttcctgccctgtcaaatgggaatctatcctgttctgctgctgttctgctgtggtgtagtaggcctccaaaaaagtaaaaattaaaaatagaaagtaccttatgaaaacagatatttcaaaggagaaaaaggaatgataattgctattgaatttaacatctagatttgtaaagtcattttttcttttatataaacagtaaaagagattaaaattcaataaacttacgggtagtttacgtgcaggctttctccacttttaccctttaaaacacatgtaaaaggtcctgtcaatctcctatwcttttgctcttgaccttgtaattttgctcccaacacatctcacaccttgtgaagtgaaaagaagaacaataaacaagacaaggaaaagaaagggaaatgatgccagtttagcagtcagccactaaaatttagcagcac

SEQ ID NO: 388897 - DNA, 574 bp, Homo sapiens
caaattttaatttgcttaaagaagttttatttgtgatgaagatcaatatgattcaaatgatgaaaaacaaaactgtatgtcctttgagttcccaaaccaaatgtcactgccgtgtcacatcctctaatctgatgcccatgtgtgtgtccttgcgccatttgaagcaagttgacagttccatcagyttgtttttgtttttgtttttggttcaataatttgagttcaaccatcgtcattttaaacataattaatcccaacaaagttgcctatagtttaatttaaatctcacagcatttttaatttattttgcatgggtgtttaaatagttctgttacgaatattgtccctgcacagttctaaattgtccttttataaaaaaaaaaaaagtgatattctagtttcttcacaatgtagtgattatcagccttactaattaccttgtagcctttcttaatatgcacataatgcacattttccgatggctagaaaaatgcaaaacacagtggatatcattgcatctattttcatgtctttctaaaaacaggactattaaaatctctgggatacatgagat

SEQ ID NO: 388898 - DNA, 463 bp, Homo sapiens
ttggagatccccttttttcccctctggcattctcctattctcttcagcagcctcagttccctctgctagaaaaaaaaatgcatttttttttcagttgcactctgccactgcatgtgagccatagcractgcgcttagccctaggctgaaagttgtggtaataagatgttccttgttcaactcctctcttctgctcagaacgtgcactctccacttaagtctgccttctgctcagtctccagtacctcaggtcgctgctctttttattatgtttaggttttataggttttttttttattatttctggggagtcatcaggtagggtcttactctgccattactactagatgctgttttaaaaacacttcctctatatctcaactatgtgtgattttgttactttgttaactttgctccctaaatacctattgaatccggtcacctctttctagattgcctgccac

SEQ ID NO: 388899 - DNA, 640 bp, Homo sapiens
cacagtgaggtagagcacaaagcagtttcctggatcccctgattccaggcattggctcctgcatagcattcctggacccaccctgggccagaggggagcccactatactgaaaggagagactcaggcctagaagcattcaaaaaagctgaataaagagccctggagtcttgagtgaacatttacagtagccaggcagtaatccccatgagcctataggtggtgatgtccatggagaggaattcttcttcatgaggaaagaagtggaaagagcgaagactttgtcttgtggcttggatgtcagctcagctgcagtaggatagagtagcaggtagaktcataatgttcccaacttcaggccctgggtctcagacaatattctggacctgtcctgggccaggagagacctcactactctgaagggtaggacacaagccttgttggattcctcatctgctgattgaagagtcctgggtccttgagtaaaatcagtggtagccaagcagtgactgccatgggcattgggtgagactcagtcctgtgctggatttgggtctgatacagcacagtcccagtgttggtggccacagggttgcttgtgtcttccctcccctagctccatgtaacttagcatggaaagag

SEQ ID NO: 388900 - DNA, 618 bp, Homo sapiens
tgggtgagactcagtcctgtgctggatttgggtctgatacagcacagtcccagtgttggtggccacagggttgcttgtgtcttccctcccctagctccatgtaacttagcatggaaagagagagaacctctgtttattagtgggaaagtagggaggagaataagagtctctgccttccactccagagaattcttccagatcttatccaagaccactgacatggtaactctttgagtttgctagtgtcacagtgttatyaggtttgagatgacccccaatgaagatgtgaccaaagctttagatcacagcagtcaactctcttttgatacctggaaggccttcctaagaatgatgggtgcaaataagcccagactgaagactataaaaaatacctaagtcttcaatgcccagacatcaacagacattcacaagcatcaatattgtccatgaaaccatgaccttatcaaatcaatattgtctatgaaaccatgacctcatcaaatgaactaaggaaccactgacaatcccagagtgacagagatgtgtgacctacagacagagaatttaaaatagctgttttgacaaagctcaacaaaattcaagataacacagagaagg

SEQ ID NO: 388901 - DNA, 618 bp, Homo sapiens
tgggtgagactcagtcctgtgctggatttgggtctgatacagcacagtcccagtgttggtggccacagggttgcttgtgtcttccctcccctagctccatgtaacttagcatggaaagagagagaacctctgtttattagtgggaaagtagggaggagaataagagtctctgccttccactccagagaattcttccagatcttatccaagaccactgacatggtaactctttgagtttgctagtgtcacagtgttatcaggtttgagatgacccccaatgaagatgtgaccaaagctttagatcacagcagtcaactctcttttgatacctggaaggccttcctaagaakgatgggtgcaaataagcccagactgaagactataaaaaatacctaagtcttcaatgcccagacatcaacagacattcacaagcatcaatattgtccatgaaaccatgaccttatcaaatcaatattgtctatgaaaccatgacctcatcaaatgaactaaggaaccactgacaatcccagagtgacagagatgtgtgacctacagacagagaatttaaaatagctgttttgacaaagctcaacaaaattcaagataacacagagaagg

SEQ ID NO: 388902 - DNA, 586 bp, Homo sapiens
ctagagaaaatctaggatatagatcattttcaaatagtttaaattttagttcctgtatttcccacccaaaggggatttttatgtcttgagattttgacgttatagcttattgaacaacttcaagcaccaaaaagcagatggagaagattttcttagatagaaggatctttttacttcccactatatttaaacaaaagttagagactatttacctagttttagttttgttgaaataatgaaagaattttcatattgctgtttaaaacaacacattaccttagagtgacaaggtattttcttctcatttaatacatagctttaaccctaacaaaatggcttttcaatggccttgtaaatacagcttttattcctgaaccmctttggcaaatttctttattcagagttcagggggattgagcggctgaaagggacttactgtgatattagaatacatcaattccaccaaccacaactcattttggtgatacttacaaaatggatatccacaaagtcttgtgttagaaaaaatgaggttgatcatttcattttgataatttttatcatcttcaataatcatgaatgcatc

SEQ ID NO: 388903 - DNA, 586 bp, Homo sapiens
ctagagaaaatctaggatatagatcattttcaaatagtttaaattttagttcctgtatttcccacccaaaggggatttttatgtcttgagattttgacgttatagcttattgaacaacttcaagcaccaaaaagcagatggagaagattttcttagatagaaggatctttttacttcccactatatttaaacaaaagttagagactatttacctagttttagttttgttgaaataatgaaagaattttcatattgctgtttaaaacaacacattaccttagagtgacaaggtattttcttctcatttaatacatagctttaaccctaacaaaatggcttttcaatggccttgtaaatacagcttttattcctgaacccctttggcaaatttctttattcagagttcagggggattgagyggctgaaagggacttactgtgatattagaatacatcaattccaccaaccacaactcattttggtgatacttacaaaatggatatccacaaagtcttgtgttagaaaaaatgaggttgatcatttcattttgataatttttatcatcttcaataatcatgaatgcatc

SEQ ID NO: 388904 - DNA, 564 bp, Homo sapiens
accttcttcacaaggcagcaggagagagagagcgtgtgaaggagaaactgtcaaacacttataaaaccatcagatcttgtgagaactcaatcactatcaggagaacagcatggaggaaactgctttcatgagccaatcacctccttcctttggcacctgagattacaggtccctcccttgacacctggggattataatttgagatgagatttgggtggggacacagagctaaaccatatcagcaagactaaaatttaggtatctttttccatctagaacccacatacatacatacacacacacacacacacacacacacaagtgggcacactagtaaacattgagagagataaacrttataggtactttataaatacatactatgtttttgcttattaccaaagtaaagttatgactctgaggaactccttcaatagcaaaatttcccttccttttttatgtaattggaataaaaataaaatcagttttgaagaactccacaaaatactcaacagtagacgttttcaaaaaggagactgaaactccaggagaccctgaaaagtc

SEQ ID NO: 388905 - DNA, 564 bp, Homo sapiens
accttcttcacaaggcagcaggagagagagagcgtgtgaaggagaaactgtcaaacacttataaaaccatcagatcttgtgagaactcaatcactatcaggagaacagcatggaggaaactgctttcatgagccaatcacctccttcctttggcacctgagattacaggtccctcccttgacacctggggattataatttgagatgagatttgggtggggacacagagctaaaccatatcagcaagactaaaatttaggtatctttttccatctagaacccacatacatacatacacacacacacacacacacacacacaagtgggcacactagtaaacattgagagagataaacattataggtactttataaatacatactatgtttttgcttattaccaaagtaaagttatgactctgaggaactccttcaatagcaaaatttcccttccttttttatgtaattggaataaaaataaaatcagttttgaagaactccacaaaatactcaacagtagaygttttcaaaaaggagactgaaactccaggagaccctgaaaagtc

SEQ ID NO: 388906 - DNA, 561 bp, Homo sapiens
ttatgttgaactgtaatcctcaatgttggagggggatctggttggaggtgatgggatcataggggtgagtatttcatgaattgtttggcactttcctttggtgttgttcttgtgatagagttttaatgatatcttgttgtttaaaggtgtgtggtaccttccccccattccctttctcctgctccagcgaacatgaagtgatggcccccccttgccttctgccatgattgtaaatttcctgaagtttctgcagaagctgagcaaaagtcactatgcttcttgtatagcctacagaacagtgagtcaataaaactcttttctttataaataacccagtcttaggtatttatagcagtgcaaggctggactaatacagatagattgcttacataaatcaaagctcttgagatcctcaataccttttaataaaaaggttctgatgccaaaagtttgagaactactcttgtagaggttgccaccagctttttgaatcttgaagtatagccagtcttctacataccaataaagaayaacttgtaaaactagctctagttagtacca

SEQ ID NO: 388907 - DNA, 587 bp, Homo sapiens
gttctgagtcttatctaaatcaaatatgggtgagagttaaggtatacttcatcctgagatgagttctcctgctgtgagcttatgtaatcaaacaagttatgtaatttgaaaatacaattgtgggataggcataggatagacttctcattacaggaaggcagaaatagacaagagaaaagaggtaacaggtcccaagtaagtccaaaacacaggtcaaacarcatcgaatctttaagcatgagaataatcttccatatctggcttttcatacacactgggttaagggttgggcccctatcgctttgggaggccccactttcacagctttactgtgggtacagctcacacagccactcttcaggagttgcattcgagtgtctgtggctgtcctgggctggtgttacactacacactggtggctctacaggtctagggtcttggaagttgccctgtccccatggcttcactaagtactgtcctagtaggggctctctgaggtggcctgtcctatggcagctctatgcctggacctggaggctatccaggatatcatttggaatctgggtggatatagccatgcttccaca

SEQ ID NO: 388908 - DNA, 563 bp, Homo sapiens
ttcacagctttactgtgggtacagctcacacagccactcttcaggagttgcattcgagtgtctgtggctgtcctgggctggtgttacactacacactggtggctctacaggtctagggtcttggaagttgccctgtccccatggcttcactaagtactgtcctagtaggggctctctgaggtggcctgtcctatggcagctctatgcctggacctggaggctatccaggatatcatttggaatctgggtggatatagccatgcttccacagcttgtacactctgtatccctgcagaattagcaggacataccaaggtttcccrgaatcctctctggagtggaggcctgagccatatctgagcccagctgagccacagctgaggtgaccaaggagcactgcagagagatgcagggagtggaagctcaaggtggcccttccaagaaggtgcattgctgctgcatcctccagagagaaccaataatatgccctcacatgggagaagggaagaaaggggtgaactcatccccttcaaagtcttttataaggtcactaatcctattca

SEQ ID NO: 388909 - DNA, 506 bp, Homo sapiens
ggagacaggtaaatactgggtagaagagagcagttccacrgcaaaggccccaccctcaagcatggatacccacagccctaaatgggaacaggcattcctgttttcacacccagaaagttgctttttggcccaccacgcccacctatcctgtacccatataaaccccaaatccccagctccaggtgaatagaagagcataagagtggcagaaaaggagagaaaagtagaaatctcaggagcagttctgctggggaccattggcaaatcggccgctggatggccaaactccaggggaagatcatcttaccactccatcccctttccagctccccattcatctcactgagagctaactcaccacccaataaaacccctgcattcaccatccttcaagttcgtgtgtgacctgatttttccaggatgctggacaagagctcgggatacagacagctgtcacattggcccctgcccttgcagaaaggcagagggtccactgaggtggttaa

SEQ ID NO: 388910 - DNA, 594 bp, Homo sapiens
agggcccaggaaatctgtgagaatgtgttctaatgctgtcaaggcatggcaaatgtattcctggaatctaaattagagcttgaaattattttcactatagtcccaatattagacacagtattacagggtgattttttttccaacccagacatcttatgattttattatgcatcaatgtatgatgatacacagatccagggtttggcctgacaagcagacgcatttaatgtatgttaaacatattcaaataactcatatccacataaactttttgggaaaaaaatgtgtattaacataaggccatctacttttcatgtttgtcctagaaatgaataatcattgaagtagtagttttgcaatgacaataatgtacttattytgtaaaaattttctttctacacaaatactgtgtagtaactttttctagattattggaagtttcaagaaacaaatatatataataaagacacaaaaatggtttgcttacaagtttattttagtttgtctatgctatcgagttaaccaaagagcatcacaaagcattttttttcaagctaatagaaaaacttagctgccctgcttgtcaactgcaat

SEQ ID NO: 388911 - DNA, 530 bp, Homo sapiens
  misc_feature (1)...(530): n = A,T,C or G
gaagttctactgtgggtaacatgctatcaaatagcatcacatgctacagataattctttcaggaaaggaggagtcagttgataacacaaacttcaatgtcatcttattttaagaaattgccacctccattctaaccatcagcaaccaccacgccaatcagtcagcagccacagacattgaggcaagaccctctaccagctaaaatattatgactcgctgaaggttaagatgatagttagcattttttagcaatattttaaattaaggatggtatattggtatttttagacataatgctattgcccacttactagactacagtatagtgtaaacacaacttttacatgcaccaggaaacaaaaaaaatttatgtgactcactttactgtggtggttttgttccaaccccacaatatctctgaggtatacctgtataagagaatgtaaattagctatgtaaatataayatagtctccctactcanagaaactggggaaatcaacaaatataatttcaccccggcaccctaat

SEQ ID NO: 388912 - DNA, 534 bp, Homo sapiens
attttctttcctttcttcatgttaaaggcaactctgtctcccaaatctttgccacatgcaagcagcaaaggataactgttattttaatagccactgatttcttcattgtttaatctgatctctcttacattcaggtggctaacttaaacctcagaaagttaagaatgtatacattactcagcctcccataaatagaattactgagggaattcaccaaagctgatccaaatcaggaaaaatgtttatcatcatctacccacaagttggtggggtccagatgtcagtctcccagatatcagacatgtcagggataaaactgggagatcatgagctacaytccactagcaacaatttgtaacctacaagatcaatatgaatacctttaacttgtcagtacatataaactagattccaactcaattttccaaacctgctgctgatacagaactgattctgatccattttgctggtacctgacctccagctcttgccaactcctcctcctaggttatctatccactactttcctcccct

SEQ ID NO: 388913 - DNA, 520 bp, Homo sapiens
gggctccacctctgcagcagatttctgcctggacatgcaggcctttgcatacatgctctggaatctagatagaggctcccaaacttcaattcttgcgctgtgcacaccctgcaggcttaacaccctggtggaagcttctaaagcttgggtgttataccctctgaagcagtggcccgagttgtaccttggccccttttagtcatggcttgagctggagaagctgggatgcagggtgtcatgtcttgagtctgcatagagcaacatgtccttggttttggcccattaaaccattcttcccctgaggcctccagtcctgtgatgggaggggcttccgtgaaggcctctgaaatgccttggaggcattttccccattgtcttggattttaacatttagctcccctttrcttatgcaaattcctgcagttgatttgaattcctccccatataatgtttttttatttgtttttgtttttgtttttgttttcctaccatgtggtcaggctgcaaattttccaaacat

SEQ ID NO: 388914 - DNA, 476 bp, Homo sapiens
gtgcccctaaaatgtacatgttgaagttctaaccctaatattttggcgacagggtctttaaggaggtaattagggttaaacgagatcataagagtggggccctawtccaataggattgatgtcctcatgagaagagagagagacacaggagctcatgtgcacagtggaaaggccatgcggggacataacaaaaaggaggccacctgcaagccaaggagagagtccacaggagaactgatatgttttagctctgtgtccgcacccaaatttcacattgaattgtgattcccaatgttgggggaaggacctggtgggaggtgatgggatcatgggggcagacttcccccttgctgttcccatgctagtgagtgcattttcatgagatctggttgtttacaagtgtgtagcacttccccttcactctttctctcctgctcctccacggtaagaggtgactgcttcccctttgccttcca

SEQ ID NO: 388915 - DNA, 562 bp, Homo sapiens
ttttctataaaattacagtaaaacacaatataatcaacgtttaatcacaattcttaaatgtgcataaatacgaacttacctctgcctcagctcattcctgtgtgtgctctccttatgtcactcataaaacagcttccctttgggattccaagaaagcaaacctttagaccaccccataactgagaatgattctacccttagcagcttccaatctttccagtgttatttttctgatggttttgtttttgttcagtgatgtttacagcatacaaaccaaactgcatgtgaaatattgcccacctgcaaaagctctcaaagggcactaaatgaggtaaccatgacatgcaagaatgattgtttctgggataagaggrtggagttacacaaagacaatactctctaggtaaacctgaaatgagtcatttgacatatttcaagggcaaactgaacagcttaaaaaacgcctatttagtaacagaaaacagttgctacagctatacattggtttacttagattggttgaccaaccctcgaatactagctttttctatgcattgggttg

SEQ ID NO: 388916 - DNA, 620 bp, Homo sapiens
ctcaagttatgacaaacaacaaaaaaagtctccaaatatttctagacgctatttccattcggggaccaggaagaaaggggaattaactctggttgagaaccaccaccctagataatccataaaaaatgaactagaaataacatggccaaatttgcattttatctagattgaagagctctgtaacataatagtttaaaaacaaaaactctcaagccagtgtgccgtggsctcaaccctagatgtgacacttactagttgtgcaaacttgtaaaagctatttaacttttgtgcctgggtattttcacctgtacaatgagatttttttattttatgtttattgtgtgtagtggtttgagacagtctgctctgttgcccaggctggagtgcagtggcacagtcttggctcactgcaacctctgcctcctgagttcaagcaattcacatggctcagcctcccaagaagctgggatcacaggcgcacgccaccatgcctggctaatttttgcatttttagtagagacaggatttcaccatgttggccaggctggtctctaactcctggcctcaagcagtctgcccccctacacctcctaaagtactgggattacaggcatgaccca

SEQ ID NO: 388917 - DNA, 486 bp, Homo sapiens
tgtaaagggtttataagagtgcttgatagtaagtgctatgtaaatgtctgttaaattaataaaagaggtttgtgaagagactggaaataaggaggacagaccagaggcaaagatgtatgttaaatttataatagtcaaacattgacgccttcttcaacactcttagcagaatgtagttttactctcccttgaattcacatcgagttctaatgactatgttgttatagtttacctcacactgtaggttattatgcaattgtcacataatctttgcatccgtccaccgtgatttatttatascatatacccaataaatgtatcttaaagaatagagaaaaatagcatgccaaatagcagccttctctactaaaggtaggtttcaatttttcaagatgtatgggtgccccagctcattttaagtacagcaccagagggatgtaatgaggccctggattctaattgttcttttcttcactcctgaagcaa

SEQ ID NO: 388918 - DNA, 570 bp, Homo sapiens
tgtgggaatatgaccatgaatttacttttttacaactctgtattgtggtttgtttatttattaaggtaaatatggaatgttatctttattccatgttatactaattatcctaattgtttattgtggagtccctaatgtatgagttacaaattcagyggctgggagaagatttggctacatgtggcaaggtttaaaataattaagaaatggaggcagtagctttcttggtttgatatggtacccatctgcttaaatctcatatctcagaacccagcaaattaaatgcaaaaaaaaaaaaaaaacaaatgaaataaaaattaacttaaaatggattacagacctaaatgtaaaatgcaaaactacaaaactcctagaagaaaacatagaagaaaatctaatgaccttgggcatggtgataactttttagatacaacactaaaggtatgatttatgaaagaaagaaataattgataagatagcctccagtacaatttataatgtctgctctgttaaagacactgtcaatcaaatgcaaaagctttataccctcccacccatgtagcccctgaa

SEQ ID NO: 388919 - DNA, 570 bp, Homo sapiens
tgtgggaatatgaccatgaatttacttttttacaactctgtattgtggtttgtttatttattaaggtaaatatggaatgttatctttattccatgttatactaattatcctaattgtttattgtggagtccctaatgtatgagttacaaattcagcggctgggagaagatttggctacatgtggcaaggtttaaaataattaagaaatggaggcagtagctttcttggtttgatatggtacccatctgcttaaatctcatatctyagaacccagcaaattaaatgcaaaaaaaaaaaaaaaacaaatgaaataaaaattaacttaaaatggattacagacctaaatgtaaaatgcaaaactacaaaactcctagaagaaaacatagaagaaaatctaatgaccttgggcatggtgataactttttagatacaacactaaaggtatgatttatgaaagaaagaaataattgataagatagcctccagtacaatttataatgtctgctctgttaaagacactgtcaatcaaatgcaaaagctttataccctcccacccatgtagcccctgaa

SEQ ID NO: 388920 - DNA, 588 bp, Homo sapiens
agcaggacaggactatggtctgtcaaaaaaggggtaatcaaatgaagtgcatgcaataacagctcctgctttctgctagggagaaatggaaaataaaagaatcasaaaggaattactagagatgagaaatacagtaactgaaaaaaagtttactagatgagatagttatgagattagacccttaggaaaaaaagatcaatgaacctgaagatagagcaatagaaactatccaccaacaacagggagtataaaagactggaaaaataaaataaatagaaattcagtgacctgtgtgagaacatcaagcaatctaggttctgtgcaatagaagacttcttatatagaaatgagttgaataagatgactatggaatgacatagaaaagacaagttgcatacagatatgctataaatacttttttattggaaaaaatcaagttgcttaattttgatgatgtggtaggaatgtgagaaagactaaatgaaaaagatatattctgcaaattagagtaggaattgaataatattcagtatatattacaacaaaaaatgggcaaagaaaccattaaaatatagaaaattaattcat

SEQ ID NO: 388921 - DNA, 588 bp, Homo sapiens
agcaggacaggactatggtctgtcaaaaaaggggtaatcaaatgaagtgcatgcaataacagctcctgctttctgctagggagaaatggaaaataaaagaatcacaaaggaattactagagatgagaaatacagtaactgaaaaaaagtttactagatgagatagttatgagattagacccttaggaaaaaaagatcaatgaacctgaagatagagcaatagaaactatccaccaacaacagggagtataaaagactggaaaaataaaataaatagaaattcagtgacctgtgtgagaacatcaagcaatctaggttctgtgcaatagaagacttcttatatagaaatgagttgaataagatgactatggaatgacatagaaaagacaarttgcatacagatatgctataaatacttttttattggaaaaaatcaagttgcttaattttgatgatgtggtaggaatgtgagaaagactaaatgaaaaagatatattctgcaaattagagtaggaattgaataatattcagtatatattacaacaaaaaatgggcaaagaaaccattaaaatatagaaaattaattcat

SEQ ID NO: 388922 - DNA, 452 bp, Homo sapiens
ttcttaaaataccaaattttatatcataaaacattctctggctttatcagtaatgttmgtttgagattttagagttcatattttctaaatgaacattgtgggatattgttatcatctgctgtattcaatttttatttctaatttttctcaattaatgtttaaatgtatatatttttttattggttttgaaccaagaactcctggtttactgtattctcaagcaagatttgagttgattatggtttccagtggaactcaacctctgtggaataggtcttaagatggttcaggattttaaccttcaaaaaaatttggtattcagtgattgataatagcgccagttttctggaagcctattttgcttgcccaggatgagttttgtagaaagcattaggtttcatcaactagacaacaccatttggaaggaatgttcttttattcgttgactgtta

SEQ ID NO: 388923 - DNA, 471 bp, Homo sapiens
actatattaacttttgtactatattagtacaaagtcacatcttgtacaacagaaatgcaggttcatttatatctgttaagctttgctgttatttatgttacaaaaaaaatactgacagagcatcatgtttccaaaattctcaatcactaatgcttttctgacagttgcatattattttcccaatgatttctaatagcagcgaaacataagtgacatatagtaagatttaaaagcaaataatggactatattrgtctgttttaatgccgcttgataaagatatacctgagactgggcaatttacaaaagaaagaagtttaatggagaactcatagttccatgtggctgggaagcctcacaatcatggctgaaggcaaggaggagcaagtcatatcttacgtggattgcagcaggcaaagagagggcttgtgcagagaaactcccattttttaaacccatcagatttcgtgac

SEQ ID NO: 388924 - DNA, 471 bp, Homo sapiens
actatattaacttttgtactatattagtacaaagtcacatcttgtacaacagaaatgcaggttcatttatatctgttaagctttgctgttatttatgttacaaaaaaaatactgacagagcatcatgtttccaaaattctcaatcactaatgcttttctgacagttgcatattattttcccaatgatttctaatagcagcgaaacataagtgacatatagtaagatttaaaagcaaataatggactatattagtctgttttaatgcygcttgataaagatatacctgagactgggcaatttacaaaagaaagaagtttaatggagaactcatagttccatgtggctgggaagcctcacaatcatggctgaaggcaaggaggagcaagtcatatcttacgtggattgcagcaggcaaagagagggcttgtgcagagaaactcccattttttaaacccatcagatttcgtgac

SEQ ID NO: 388925 - DNA, 568 bp, Homo sapiens
ttttttcttatggaaagcaatttagaaattttcacatctccagctgaaaccctgtaatttctcatttaaagtaacctgttctgctggatataaggtcatccatcctggaggaaattaaccctcttccttagtggcagaagtaactatagatggttgttgtgctccttgagtgagttaaatacttgtgctatctttcccctctgaaatgttcagacctcatcattacaagggcacttttatttttattccccttctctagcaccctttccaagtatttctctttttyctatttccattagacttcgcttttttttttttgtagaacacagatttcctctcaggggtctcctcactctaccaccaccaatcccaaaggtactgatagcttgaagggattttcagagctggtaccagccaacagaggagaagattttgtacaggacctcttcagggagtgctgctcatattatgcctcatatttacgatatttcactcatgtttaaggcctgccttagagatccaaacacttctgagaataggtagagtatactatatttaaagtttctat

SEQ ID NO: 388926 - DNA, 568 bp, Homo sapiens
ttttttcttatggaaagcaatttagaaattttcacatctccagctgaaaccctgtaatttctcatttaaagtaacctgttctgctggatataaggtcatccatcctggaggaaattaaccctcttccttagtggcagaagtaactatagatggttgttgtgctccttgagtgagttaaatacttgtgctatctttcccctctgaaatgttcagacctcatcattacaagggcacttttatttttattccccttctctagcaccctttccaagtatttctcttttttctatttccattagacttcgcttttttttttttgtagaacacagatttcctctcaggggtctcctcactctaccaccaccaatcccaaaggtactgatagcttgaagggattttcagagctggtaccagccaacagaggagaagattttgtacaggacctcttcagggagtgctgctcatattatgcctcatatttacgatatttcactcatgtttaaggcctgccttagagatccaaacacttctgagaatargtagagtatactatatttaaagtttctat

SEQ ID NO: 388927 - DNA, 629 bp, Homo sapiens
atgctcatgtaggattcacaaggataatggctgagcaagtgataagtgaacaagttactggatttttctaacctgtttatcaatactggacaatgatagttgtcttttttgttgttattccattttacctctcgtttttgtgctacagatgaaagcatgtaggtaacaactcttgacacctttgagtaaagcaagaaaataatagaaatattactattgctgttgcttttctttatagaaaagactcaaggcaaacacagaaataattgctgtgttatgtatgtgtatttaaaagaattgactgttttcaatggcctgattgtctaatgtattttatttttcttagttttgtgttcagaaaaactgtgkatttctgcaatagttccattttgtagtgcattctgaccattatgtattttagtaatccaatcagtaaagcttttaatttctcgctgtgtttggaagctgctttggccaaggatttgacatccagcagggtggcgtccacttgctcttggcatccagtaaagaatgactgaacagcatgctcggggtatatcattagtaccatgtaaaaaccttatgatttacttaatggcatttctatgccccgtattttattattttca

SEQ ID NO: 388928 - DNA, 520 bp, Homo sapiens
tactgcttagtgtttcacagtaggatctaaagtaactatattaattttgtgaggtcatctttcattctggtattcatgctgctatcacctgttttgcccattatgaccacagtgtctggtagaggtaagtactctgaaaaatatcaaaaattttttttgcctaaattgacatgttcttcttgcatatcatctgaagatgaggaggatgctttcacaaaatattataaagataatgatcagcacactaaaatttttatkgccctggcccccacctccaaaaaggctctgcaaaagagttgtcatttcatgtactcatgataaatgtatattttttctgattcacacacacttctcattaaaatgtcatttcttaaaactgaaatctatataaatatagcatcaattacatgaaaactgacactcattaatttttttcttttaggtagtaaaaaattaataacactaatttcaggtttgggtttaaggatttataccatattttcttgctatttccacttat

SEQ ID NO: 388929 - DNA, 577 bp, Homo sapiens
taataaaaatcacacaatcagattatcctacagcaatttgtgggttttaataaataagagaggagttctgggggccctagaggcacaacaggaagatgtgatcagagattcttgtatctatttgcactctaagcattgtctatagactgaatagactgaaaaaaatatgccttacattgtacatactgttttatatatatacgtattatatatayattatatatatatgacttggtgattaataaaccacatttaaaatctctattagcaaatgtcattgtacattttttcagttagcaaatattaaaagcataactattacaccaagaaagggagaaatgttgtttggaaaatgtattcattgagataaaggaccttatttttcagagcataaggaatgagttacaaagctgtttacacattgaaactcaaccatagacatttacaccattcacttaactgcagaagagagtctactaaaaaagagaataaagaaacaaataaatattctgggactgcacgtttaaacttttaaaaattaaaagacattccagcagggtttgtaattgattttaaa

SEQ ID NO: 388930 - DNA, 577 bp, Homo sapiens
taataaaaatcacacaatcagattatcctacagcaatttgtgggttttaataaataagagaggagttctgggggccctagaggcacaacaggaagatgtgatcagagattcttgtatctatttgcactctaagcattgtctatagactgaatagactgaaaaaaatatgccttacattgtacatactgttttatatatatacgtattatatatacattatatatatatgacttggtgattaataaaccacatttaaaatctctattagcaaatgtcattgtacattttttcagttagcaaatattaaaagcataactattacaccaagaaagggagaaatgttgtttggaaaatgtattcattgagataaaggaccttatttttcagagcataaggaatgarttacaaagctgtttacacattgaaactcaaccatagacatttacaccattcacttaactgcagaagagagtctactaaaaaagagaataaagaaacaaataaatattctgggactgcacgtttaaacttttaaaaattaaaagacattccagcagggtttgtaattgattttaaa

SEQ ID NO: 388931 - DNA, 596 bp, Homo sapiens
tctaaagtacctccagaagtcattgtgacagccacttctctcaaatgcaagaaatcagaagaaagacctgtatacataaaaaaaggataaaacaagggtaaagcatttctttgtgttgagaactttccaaatcttaccttctagctattttgcaatagattataaattattgttaactgtagtctccctactgtgctattccatactgkaacttattccttctatctaactgtatttttatacccattaaccaatgcctcttcattctcacctctcccactaccctttccagcctctggtagccatcagagactacttactacctctatgagatcaattttttagcacctgtatatgagtgagaacatgcaatatttgtctttctgagcctggcttatttaccttacatactgtcctccagttccatccaatgttgttgcaaatgtttcttcacaggaaacatggtgtatatatacacaccgagaatattattcagccataaaaaagaatcaaccctgtctttgccaggaactcatatgtttagatatctgtactttcatgttccactgatggacacttaggttgatttcacagct

SEQ ID NO: 388932 - DNA, 596 bp, Homo sapiens
tctaaagtacctccagaagtcattgtgacagccacttctctcaaatgcaagaaatcagaagaaagacctgtatacataaaaaaaggataaaacaagggtaaagcatttctttgtgttgagaactttccaaatcttaccttctagctattttgcaatagattataaattattgttaactgtagtctccctactgtgctattccatactgtaacttattccttctatctaactgtatttttatamccattaaccaatgcctcttcattctcacctctcccactaccctttccagcctctggtagccatcagagactacttactacctctatgagatcaattttttagcacctgtatatgagtgagaacatgcaatatttgtctttctgagcctggcttatttaccttacatactgtcctccagttccatccaatgttgttgcaaatgtttcttcacaggaaacatggtgtatatatacacaccgagaatattattcagccataaaaaagaatcaaccctgtctttgccaggaactcatatgtttagatatctgtactttcatgttccactgatggacacttaggttgatttcacagct

SEQ ID NO: 388933 - DNA, 553 bp, Homo sapiens
caatgtgctgtaggcccatcgattgctctgtggaggctggtttcaaggaaggaaaggccgaaggcagacagactaggtgaaagacgatccaggccttgctgtgagctgaakcgggtactccaaaactcagttgttcaagcttaacaccttgtacctccagcaactgtatttggagatacagtttggaggtgcttaggttaacacgaggctgttaaggccaggtgtggtggctcacgcctataatcacagcactttgagaggccaaggcaggtggatggcttgagctcataaattcgagaccagtctgagcaacatgagaaaccccggctctacgaaaaatacaaaaattagctgggtgtggtggtgcaggaggctgaggtgggaggatggcttgagcctggggggcggagtttgcactgaaccgagatggtgtcactgcattccagcctgggcgacagaaccagagcttgtctttaaaaaaaaaaaaaaatggggccgggcacagtggctcatgcctgtaatcccagcactttcggaggcagagactggtgga

SEQ ID NO: 388934 - DNA, 553 bp, Homo sapiens
caatgtgctgtaggcccatcgattgctctgtggaggctggtttcaaggaaggaaaggccgaaggcagacagactaggtgaaagacgatccaggccttgctgtgagctgaagcgggtactccaaaactcagttgttcaagcttaacaccttgtacctccagcaactgtatttggagatacagtttggaggtgcttaggttaacaygaggctgttaaggccaggtgtggtggctcacgcctataatcacagcactttgagaggccaaggcaggtggatggcttgagctcataaattcgagaccagtctgagcaacatgagaaaccccggctctacgaaaaatacaaaaattagctgggtgtggtggtgcaggaggctgaggtgggaggatggcttgagcctggggggcggagtttgcactgaaccgagatggtgtcactgcattccagcctgggcgacagaaccagagcttgtctttaaaaaaaaaaaaaaatggggccgggcacagtggctcatgcctgtaatcccagcactttcggaggcagagactggtgga

SEQ ID NO: 388935 - DNA, 479 bp, Homo sapiens
tagtcggacaggggatatattatttggagagagatttggcaattaactttgacaattttgtttttttccagcttctgatgacaattccctcacatctgagcccctctgagatgctgcccttgcttcttataactccctgcctaggcatgatgtgcaggcagcccttcgcccaccttgcccacaccctccccgcccagggttcctcaccatgcatctcactgcgatctgggatmcctcccactcctccacctccatcccactgaatcagcgtcgccgatcaggagctgagacctgagaagctgtataagaagcagaccactcccgcgattctgctgcccactgaactggagaatcattgagtcggctgatctctaaccaccgactcagagcctgcgttctagaatcgaaatgttcccagggaaggcagcctcaagggaatcaacggacagcctcccacttgtgcaggggttttaataacc

SEQ ID NO: 388936 - DNA, 544 bp, Homo sapiens
atacctacacataatggagtgccatgcagctttgaaaggaaatgaggcatatttctatgttmtatgttgtgatcaccagaatataacctaatgagtaaaaagccaggtgaagaaaattctgataatatgctatcattggagaggggaatatgaatataccatacatcacataggaggagagaggaaataaagtgagaggattgggatagaagctagacttttctaaatatatcttgttttatagatttatgttggaagtttgtggatatagtactttagaaaagtataaaaccaaattagacttgacaaaatgaaacaagtcaatctgttgagttgatggtgtaactacacagtgagaaactattgcaaatgaccttaacactcaggaattccactgtatattcctaatgggagatcccctaatgaccaaacttaaacccagtccaaccaaaccaaaaaaccttgtaaaatatctgaaaccatttttagtaatgaaatgagaaatgtggtcgtgttggtgatatggtttggctgtgtccccacc

SEQ ID NO: 388937 - DNA, 544 bp, Homo sapiens
atacctacacataatggagtgccatgcagctttgaaaggaaatgaggcatatttctatgttatatgttgtgatcaccagaatataacctaatgagtaaaaagccaggtgaagaaaattctgataatatgctatcattggagaggggaatatgaatataccatacatcacataggaggagagaggaaataaagtgagaggattgggatagaagctagacttttctaaatatatcttgttttatagatttatgttggaagtttgtggatatagtactttagaaaagtataaaaccaaattagacttgacaaaatgaaacaagtcaatctgttgagttgatggtgtaactacacagtgagaaactattgcaaatgaccttaacactcaggaattccactgtatattcctaatgggagatcccctaatgaccaaactyaaacccagtccaaccaaaccaaaaaaccttgtaaaatatctgaaaccatttttagtaatgaaatgagaaatgtggtcgtgttggtgatatggtttggctgtgtccccacc

SEQ ID NO: 388938 - DNA, 584 bp, Homo sapiens
atactgctggttgcaatcaccaaaattattgcagtggctcatgcctataatcccagcactttgggaggctaaggagggcagattgcttgagcccaggagtctgaaaccagtctgaaatatagtgagacccccatttytacaaaaaattgaaaaattaaccaggcatggtaacatgcacctatggtctcagctactctgcagcctgaggcaggaggatcgcttgataccaggagtttgagggtcccttgagccatgattgcaccactgcattccagcctgtgtgacagaacgataccctgtttaaaaaaaagaaaatatcacaaagacttagttgcctatagtcctagctactcaggaggatgaggcaggagcatgaggctggaggatggcttgagcccaggagttccagtccagactgggcaacatagtaaccccctcccttaaaaaaaaaacaaaaacaaaaacaaaaaaacagactcagtcaacttgaagaggcccccactaaccaaagaataagataatctgagcatcaataagaattataactgtgatgaattgaagctcatcaaatgtttaaaaccatg

SEQ ID NO: 388939 - DNA, 449 bp, Homo sapiens
ttttctgattcccaggaaagagatgcttctttacgtttaatcccttatatggtttggctgtgtccccacccaaatctcatcttgaattgtagttccctcatgggaggaatcctggtgggaggtaattaaatcatgggggtggttacctccatcctgttcttgtgatagtgagtgaattctcacgagatctgatatttgtatagggggcttttccctacttgcttagcactcattcctgccaccatatgaagaaggacatgtttgaagtaaggtgctgttataaggatacctaaatacgtgaaagcaactttggaactgggtaacaagcagaggttgcaacagtttggwgagctcagaaaaacacaggaaaatgtgtgaaatttgaaacttcctagagagttgttgaatggctttgaccaaaatgatgatagtgatatggaaatgaagtc

SEQ ID NO: 388940 - DNA, 449 bp, Homo sapiens
ttttctgattcccaggaaagagatgcttctttacgtttaatcccttatatggtttggctgtgtccccacccaaatctcatcttgaattgtagttccctcatgggaggaatcctggtgggaggtaattaaatcatgggggtggttacctccatcctgttcttgtgatagtgagtgaattctcacgagatctgatatttgtatagggggcttttccctacttgcttagcactcattcctgccaccatatgaagaaggacatgtttgaagtaaggtgctgttataaggatacctaaatacgtgaaagcaactttggaactgggtaacaagcagaggttgcaacagtttggtgagctcagaaaaacacaggaaaatgtgtgaratttgaaacttcctagagagttgttgaatggctttgaccaaaatgatgatagtgatatggaaatgaagtc

SEQ ID NO: 388941 - DNA, 587 bp, Homo sapiens
ctttttcccttttgctcagcactgctccttctgctgccacgtgagaaggatgtgtttgcttcctcttctgccatgattttgtttcctgagacctccccagctctgcagaagtgtgagtcatttaaatctctttcctttataaattatccagtctcaggcagttctttatagcagcatgagaatggactaatacaatccccttgtaaagtttgagtgtttgtgtcctgcaaaaatccatatgttgaaatcctaacccccaaggttatggtattaggaggtggggcatttggaggtgattaagtcatgaagactacttatttgcataactcattgtataattgtctatttctttaattttatatatatatrtgtgtacttatttcactatgactgattgtaagtagataagaacacaggctccatcttatctgtctttgtatcagctctcagcccactcacactctctttaaaactaaaggatcctctccatgaggttaaaagttggctcaagttcatgcagctgaaagaaacataagacagcaacattctcatatattagaccactaaccccaaaggtcttgaaatct

SEQ ID NO: 388942 - DNA, 587 bp, Homo sapiens
ctttttcccttttgctcagcactgctccttctgctgccacgtgagaaggatgtgtttgcttcctcttctgccatgattttgtttcctgagacctccccagctctgcagaagtgtgagtcatttaaatctctttcctttataaattatccagtctcaggcagttctttatagcagcatgagaatggactaatacaatccccttgtaaagtttgagtgtttgtgtcctgcaaaaatccatatgttgaaatcctaacccccaaggttatggtattaggaggtggggcatttggaggtgattaagtcatgaagactacttatttgcataactcattgtataattgtctatttctttaattttatatatatatatgtgtacttatttcactatgactgattgtaagtagataagaacacaggctccatcttatctrtctttgtatcagctctcagcccactcacactctctttaaaactaaaggatcctctccatgaggttaaaagttggctcaagttcatgcagctgaaagaaacataagacagcaacattctcatatattagaccactaaccccaaaggtcttgaaatct

SEQ ID NO: 388943 - DNA, 610 bp, Homo sapiens
atttataaataaacatcattaagtagacactatctttaaaaattaaacaattaaattaaaggttagaaaaaataaattatttatgtttgaacttactatttttcaatttttaaaaagttattttcttaaagccatggaagaaatttttcatttaactcagaaaatttctgctgctgacttctggacratctagtcagtttgcaaattaactagtttctaaatgtggttttaagatcacaagatactggcaaggaacagagacaataatataaacacactgctgattatcatttctgtttgtcatattaatgattaattactatacaatcgagtgtatccattaggctggaaatcaaattggcagctaagccatcgataaaagtagtattctatttttagacttttgtaccagaaatatttggagtaagtcatccaaaatgcctatcattcagctcttctgaggttcattttcttcaactattccattgtgatgttcagacggaggtattaatacaacactctatgttccttgctaattactgtacattgtttactatgtgctgaacatattgggtattttttcaatataatactcttaactctaacgtat

SEQ ID NO: 388944 - DNA, 610 bp, Homo sapiens
atttataaataaacatcattaagtagacactatctttaaaaattaaacaattaaattaaaggttagaaaaaataaattatttatgtttgaacttactatttttcaatttttaaaaagttattttcttaaagccatggaagaaatttttcatttaactcagaaaatttctgctgctgacttctggacaatctagtcagtttgcaaattaactagtttctaaatgtggttttaagatcacaagatactggcaaggaacagagacawtaatataaacacactgctgattatcatttctgtttgtcatattaatgattaattactatacaatcgagtgtatccattaggctggaaatcaaattggcagctaagccatcgataaaagtagtattctatttttagacttttgtaccagaaatatttggagtaagtcatccaaaatgcctatcattcagctcttctgaggttcattttcttcaactattccattgtgatgttcagacggaggtattaatacaacactctatgttccttgctaattactgtacattgtttactatgtgctgaacatattgggtattttttcaatataatactcttaactctaacgtat

SEQ ID NO: 388945 - DNA, 558 bp, Homo sapiens
acaatcgagtgtatccattaggctggaaatcaaattggcagctaagccatcgataaaagtagtattctatttttagacttttgtaccagaaatatttggagtaagtcatccaaaatgcctatcattcagctcttctgaggttcattttcttcaactattccattgkgatgttcagacggaggtattaatacaacactctatgttccttgctaattactgtacattgtttactatgtgctgaacatattgggtattttttcaatataatactcttaactctaacgtatgataacataaaatatatgttattatatcaattttaaagtctaggtaaatgaggcgcagataggttaattactttcccaagttcactgagatagaaagagtggcagacatacttcatatccaagtagtctgactgcagactctgtggtcttaaacactgctttgctacttttacattacaagatagccatgcagttttgttgctgactgctcatacaacctcttaagagtttgttttgtatggcataggatacaaagatacaaaagatatag

SEQ ID NO: 388946 - DNA, 610 bp, Homo sapiens
atttataaataaacatcattaagtagacactatctttaaaaattaaacaattaaattaaaggttagaaaaaataaattatttatgtttgaacttactatttttcaatttttaaaaagttattttcttaaagccatggaagaaatttttcatttaactcagaaaatttctgctgctgacttctggacaatctagtcagtttgcaaattaactagtttctaaatgtggttttaagatcacaagatactggcaaggaacagagacaataatataaacacactgctgattatcatttctgtttgtcatattaatgattaattactatacaatcgagtgtatccattaggctggaaatcaaattggcagctaagccatcgataaaagtagtattctatttttagacttttgtaccagaaatatttggagtaagtcatccaaaatgcctatcattcagctcttctgaggttcattttcttcaactattccattgtgatgttcagacggaggtattaatacaacactctatgttccytgctaattactgtacattgtttactatgtgctgaacatattgggtattttttcaatataatactcttaactctaacgtat

SEQ ID NO: 388947 - DNA, 558 bp, Homo sapiens
acaatcgagtgtatccattaggctggaaatcaaattggcagctaagccatcgataaaagtagtattctatttttagacttttgtaccagaaatatttggagtaagtcatccaaaatgcctatcattcagctcttctgaggttcattttcttcaactattccattgtgatgttcagacggaggtattaatacaacactctatgttccttgctaattactgtacattgtttactatgtgctgaacatattgggtattttttcaatataatactcttaactctaacgtatgataacataaaatatatgttattatatcaattttaaagtctaggtaaatgaggcrcagataggttaattactttcccaagttcactgagatagaaagagtggcagacatacttcatatccaagtagtctgactgcagactctgtggtcttaaacactgctttgctacttttacattacaagatagccatgcagttttgttgctgactgctcatacaacctcttaagagtttgttttgtatggcataggatacaaagatacaaaagatatag

SEQ ID NO: 388948 - DNA, 396 bp, Homo sapiens
taattcaaaacgtccttttaaagacaaatttgacaatctttgtcttttaactggaaaaatcagcacattatgttttttattattactgatatgtttaaatttatctcaccaactatttttaagattttaatgtagtccttcttttgtataactttttcacttttattatttttgaaattctagcttattttaagtatattattcctgaaatgttcaaaatatatatctattctaagtcttttcaaakactttattgtaaattttctctttttgtcttaactaacattaaaagtcatcaatataacaggtctccttctgtacaatataaaaaaaccctcttatttaacagatcattccacaacattgtccagtatttctagaatcatctaaaatgtt

SEQ ID NO: 388949 - DNA, 600 bp, Homo sapiens
aactactaactacatttagattgttagtaataaagtccataaatacttatttactgcctacttttattatcattgtggtaagtagtggagaaaattataaatacaaaatactcatgagcataccttgaaagagtttgccctttaaatgtagaaaaaatagatatcacatatttagatattaaattgtgtagaacaggctatagttacatttaaaattcataaagaaaggaggttggtggggctagagtgttcttcaattcctaaaggtggtggtccagctagacacamcgttgaagcatgatttacacaaaagcatggattggctggaagcagaagagttcattctagaggcctctcagttggcagttctggctaataataaactagcctgtgatgagctccactaataacaaaaaaattacttttatactcaatacttcttcaaatttcaaaaatatgtaatgtattagataatttctcatcctcatatcgaatgtcaaagtgcaattaaacatgaaagcagaaagagaatttaggcttaaaagtggagaaatataaatgatttaatatcttttgctgttataaatcttagtctatgat

SEQ ID NO: 388950 - DNA, 600 bp, Homo sapiens
aactactaactacatttagattgttagtaataaagtccataaatacttatttactgcctacttttattatcattgtggtaagtagtggagaaaattataaatacaaaatactcatgagcataccttgaaagagtttgccctttaaatgtagaaaaaatagatatcacatatttagatattaaattgtgtagaacaggctatagttacatttaaaattcataaagaaaggaggttggtggggctagagtgttcttcaattcctaaaggtggtggtccagctagacacaaygttgaagcatgatttacacaaaagcatggattggctggaagcagaagagttcattctagaggcctctcagttggcagttctggctaataataaactagcctgtgatgagctccactaataacaaaaaaattacttttatactcaatacttcttcaaatttcaaaaatatgtaatgtattagataatttctcatcctcatatcgaatgtcaaagtgcaattaaacatgaaagcagaaagagaatttaggcttaaaagtggagaaatataaatgatttaatatcttttgctgttataaatcttagtctatgat

SEQ ID NO: 388951 - DNA, 600 bp, Homo sapiens
aactactaactacatttagattgttagtaataaagtccataaatacttatttactgcctacttttattatcattgtggtaagtagtggagaaaattataaatacaaaatactcatgagcataccttgaaagagtttgccctttaaatgtagaaaaaatagatatcacatatttagatattaaattgtgtagaacaggctatagttacatttaaaattcataaagaaaggaggttggtggggctagagtgttcttcaattcctaaaggtggtggtccagctagacacaacgttgaagcatgatttacacaaaagcatggattggctggaagcagaagagttcattctagaggcctctcagttggcagttctggctaataataaactagcctgtgatgagctccactaataacaaaaaaattacttttatactcaatacttcttcaaatttcaaaaatatgtaatgtattagataatttctcatcctcatatygaatgtcaaagtgcaattaaacatgaaagcagaaagagaatttaggcttaaaagtggagaaatataaatgatttaatatcttttgctgttataaatcttagtctatgat

SEQ ID NO: 388952 - DNA, 498 bp, Homo sapiens
acttagtttccttgttgatttattaacaatgatattcaatacagtatatgctgtgatacagtgcataacaggaaaaaattttggtaattttctgataaatactatattctttatattttcaattttcacacctaaatttatgtgattactgtgtggtaaaaaccttgtgattatattttgagctttcaaatcatctttttactatccttctactgatacctggttttattctgcttctgcctataaaggtgtaataagtctcttctttatctttacttctaaaaaaaagtcaatgacataaggatccttgaatttgtactgtaagcagaagtcattcgtaactactgtcacttgcttgttttgttakagtgcttgtttgtttttgcaactgaccgtatttttcagtaaattgccttaagtgatgatacttaaccctggatatccacgtttaggaataaattaatgatataaaggcattccatggtttaaaaaatttaa

SEQ ID NO: 388953 - DNA, 662 bp, Homo sapiens
tatgggtcaaatttagaacaacaaaatgtcaagattctgatcttgtgtctggtatcaaatgggtgcttttgtttccaccaagcaacagaacagggcgttgtgagctgaattgtgcccctgcccattcatatgttaaagtcttatcctctaagctccttaraatgtagactgtatttgaagacagggtctttaaagagataactaaattaaaatgaagtcagtatggtgagacctaatccagtatgactggtgtgcttacaagaaaaaacagatgtacagagggaagaacatgtgaagatgtagggagaaggcggctatctacaagccaatgagagagaccccagaagaaaccaatcctgcaaacattttgatctcagacttctgtccttcggaactatgagacaaataatttctgttgtttgagccacctagtctatgctattctgttatggtagccctagcaaacaaatacaagtatggctttgagaaatctgtgagggaatgtcaagtaccttcgttggagataagggtggctaaaatgttgagcacactttgtcttaaattacttgcttaatggggctgtaaggattaatgatttctcattcagaaaaaacaaaatcatgtgcacttattctattactattttctcaggtgccatattt

SEQ ID NO: 388954 - DNA, 580 bp, Homo sapiens
tgtgtatgtacctagatagatgacaggcagatagatagacacatagatagatatagtttgattgtttaagaagagctaaacaatgatgcctaaagttcctttttttctttcactaacttatggtaagtgtcctgggatagcttttgaaaagtactcactaaatttctttttcctaagaaaaacaytgcacataatatctcaatattcatttttgagcataaaaggcagaaaaagcagcataataataggatttttcatgagaattgaataatataaatgagaaggaagaaaattgtcacaattatatctggaagcattggaatagaaagcaataaaacaataaaatggcaatttcaggaaagacaaatagtattgcagctttgaacagatactatgagataaaataaaatgtagggtttgcatcagtatattaatatacaaagttgtatctgcaaaaaatgattgagcaaatttgtaattacctgattaatataatctacctatatgctcaaactaacttatttagctcaaaatgacattttcattaatgaaattaactgaacagtttccaaattaatgg

SEQ ID NO: 388955 - DNA, 559 bp, Homo sapiens
gcttttgaaaagtactcactaaatttctttttcctaagaaaaacactgcacataatatctcaatattcatttttgagcataaaaggcagaaaaagcagcataataataggatttttcatgagaattgaataatataaatgagaaggaagaaaattgtcacaattatatctggaagcattggaatagaaagcaataaaacaataaaatggcaatttcaggaaagacaaatagtattgcagctttgaacagatactatgagataaaataaaatgtagggtttgcatcagtatattaatatacaaagttgtatctgcaaaaaatgattgagcaaatttgtaattacctgattaatataatctacctatatgctcaaactaacttatttagctcaaaatgacattttcattaatgaaattaactgaacagtttccaaattaatggtttatgtatgaaccaggctacatttatwtccatatatagatcatgtataaatacatatacataaatttttaagtttgtaacactttgcaaacagtggatgatttcatgggctaaatcc

SEQ ID NO: 388956 - DNA, 559 bp, Homo sapiens
gcttttgaaaagtactcactaaatttctttttcctaagaaaaacactgcacataatatctcaatattcatttttgagcataaaaggcagaaaaagcagcataataataggatttttcatgagaattgaataatataaatgagaaggaagaaaattgtcacaattatatctggaagcattggaatagaaagcaataaaacaataaaatggcaatttcaggaaagacaaatagtattgcagctttgaacagatactatgagataaaataaaatgtagggtttgcatcagtatattaatatacaaagttgtatctgcaaaaaatgattgagcaaatttgtaattacctgattaatataatctacctatatgctcaaactaacttatttagctcaaaatgacattttcattaatgaaattaactgaacagtttccaaattaatggtttatgtatgaaccaggctacatttatatccatatrtagatcatgtataaatacatatacataaatttttaagtttgtaacactttgcaaacagtggatgatttcatgggctaaatcc

SEQ ID NO: 388957 - DNA, 520 bp, Homo sapiens
tttcttacagacctcaatgctacttcacaatggactgtactaattcttcctaaatatacaatattaatactctgcgattggatctacttttaaaagaaaataaagcataggctattttataaaatagtaaggaaaaaggaagagaaaaaggaacacaatgattttgggttaagaaatcagkttactataatagcattttagtatatcttgctctcaaatccaagctaaacgttagaaatgactgtattcactatctcatatttaaaatccaacctaccataatgctattcttttcttattcttatcaaatagtactccattccctaaaccgatttattacatctcaaaacagaactggtaattttttaaaactgcactatggattactatcccatcaaccagaatgacatttttttgtcctcttcttttagattcactacatccattgttcaaaactaataatccattactgattctttaaaagcttcccatagacaatgcagcctgaacagataactta

SEQ ID NO: 388958 - DNA, 544 bp, Homo sapiens
aatttcacttcctttctataggcttcattttcattatatatatatatatatatatatayacatacatatatatgtatatacgtatatacatatatatatgtatatacgtatatacatatatgtatatagatagatagatagatagatagatagatagatatagatgtgagattcaaggaagtggagtcaaaaataattccaaaatattagattgagtgataaagtacaatttattggtaacatgtataatctaaaatgtgttctacaaaaatacgttttcccaaggataaaatatatatgtatcaaaagccaaatcttcaaggtaacttcaggatttaaaattctgatattttagtgagtacttaagaaagatttccaaacaagactatcatgtttgaacaaacattttggaaagattaatctgatggttatttgtaagaagtgtccattgactgattctacagaaatcaattaggaaacttttaacaagagttatatgggtaaggttgtaggtatgaggttattcacaatcaagttaggatgg

SEQ ID NO: 388959 - DNA, 522 bp, Homo sapiens
ctgtgggtttgtcatatgtattactctgttctgatgctgctacaaagaactggttgagactgggtaatttacacaggaacgaagtttaattgacttacagttctgctggacyggggaggcctcaggaaatttacaaccatggtggaaggggaagcaaacacatctttcttcacaaggtggtaggaaggagaagtgctggccaaagcgggaaaagccccttataaaaccatcagatatcatgagaacgaactcactaccacaagaacagaaggggaaactgctcctaagattcaaatacctcccactgggcctctctcatgacacgtggggattatggatactataattcaagatgagatttgggtggagacacagccaaaccatataatcatatatgacctttattattttagtgtatgtttcttctgtgcttagtttgttgatagtttttatcatgaagagatcctgaattttatcaatgcttttcctgtatttgctgacacgatcatatagttttagtcc

SEQ ID NO: 388960 - DNA, 522 bp, Homo sapiens
ctgtgggtttgtcatatgtattactctgttctgatgctgctacaaagaactggttgagactgggtaatttacacaggaacgaagtttaattgacttacagttctgctggaccggggaggcctcaggaaatttacaaccatggtggaaggggaagcaaacacatctttcttcacaaggtggtaggaaggagaagtgctggccaaagcgggaaaagccccttataaaaccatcagatatcatgagaackaactcactaccacaagaacagaaggggaaactgctcctaagattcaaatacctcccactgggcctctctcatgacacgtggggattatggatactataattcaagatgagatttgggtggagacacagccaaaccatataatcatatatgacctttattattttagtgtatgtttcttctgtgcttagtttgttgatagtttttatcatgaagagatcctgaattttatcaatgcttttcctgtatttgctgacacgatcatatagttttagtcc

SEQ ID NO: 388961 - DNA, 522 bp, Homo sapiens
ctgtgggtttgtcatatgtattactctgttctgatgctgctacaaagaactggttgagactgggtaatttacacaggaacgaagtttaattgacttacagttctgctggaccggggaggcctcaggaaatttacaaccatggtggaaggggaagcaaacacatctttcttcacaaggtggtaggaaggagaagtgctggccaaagcgggaaaagccccttataaaaccatcagatatcatgagaacgmactcactaccacaagaacagaaggggaaactgctcctaagattcaaatacctcccactgggcctctctcatgacacgtggggattatggatactataattcaagatgagatttgggtggagacacagccaaaccatataatcatatatgacctttattattttagtgtatgtttcttctgtgcttagtttgttgatagtttttatcatgaagagatcctgaattttatcaatgcttttcctgtatttgctgacacgatcatatagttttagtcc

SEQ ID NO: 388962 - DNA, 522 bp, Homo sapiens
ctgtgggtttgtcatatgtattactctgttctgatgctgctacaaagaactggttgagactgggtaatttacacaggaacgaagtttaattgacttacagttctgctggaccggggaggcctcaggaaatttacaaccatggtggaaggggaagcaaacacatctttcttcacaaggtggtaggaaggagaagtgctggccaaagcgggaaaagccccttataaaaccatcagatatcatgagaacgaactcactaccacaagaacagaaggggaaactgctcctaagattcaaatacctcccactgggcctctctcatgacacgtggggattatggatactataattcaagatgagatttgggtggagacacagccaaaccayataatcatatatgacctttattattttagtgtatgtttcttctgtgcttagtttgttgatagtttttatcatgaagagatcctgaattttatcaatgcttttcctgtatttgctgacacgatcatatagttttagtcc

SEQ ID NO: 388963 - DNA, 636 bp, Homo sapiens
  misc_feature (1)...(636): n = A,T,C or G
gttttggtatcagtgttatgctagtctggtaaaaggacttaggtagaattccctaatttcatgctcttcaattttttggaatagtttgagaaggattggtattagttcttttcacatttgatagaatttggtagtgaatccattcagtcctgggtttttctttgttggaagagtttttgttacttagtaaatctcrcttttttgttattggtctgttcagactttctgttcttcctaatttagtcttggtaggttgtatgtttccagaaatttatccatttcctctaagttttccagtttgtcatcatataagtattcataatagtttttggtgttctgtttatttctgtactattaattatcatgtccatttttcattttttattttatttgggtcttctcttattcttttttgtttagtttacctagcagtatattgattttgtttttttctcaaaaaaccaacttttcattttgttatgatgttctactgttttatgtatctgtttcatttatttctgttacgatcattattatttcttttctttactaattntaggtttggtttgttcttgctttcctagttaactgagatatatcattagattgtttatctgaaatctttctactttttga

SEQ ID NO: 388964 - DNA, 636 bp, Homo sapiens
  misc_feature (1)...(636): n = A,T,C or G
gttttggtatcagtgttatgctagtctggtaaaaggacttaggtagaattccctaatttcatgctcttcaattttttggaatagtttgagaaggattggtattagttcttttcacatttgatagaatttggtagtgaatccattcagtcctgggtttttctttgttggaagagtttttgttacttagtaaatctcacttttttgttattggtctgttcagactttctgttcttcctaatttagtcttggtaggttgtatgtttccagaaatttatccatttcctctaagttttccagtttgtcatcatataagtattcataatagtttttggtgttctgtttatttctgtactattaattatcatgtccatttttcattttttattttatttgggtcttctcttattcttttttgtttagtttacctagcagtatattgattttgtttttttctcaaaaaamcaacttttcattttgttatgatgttctactgttttatgtatctgtttcatttatttctgttacgatcattattatttcttttctttactaattntaggtttggtttgttcttgctttcctagttaactgagatatatcattagattgtttatctgaaatctttctactttttga

SEQ ID NO: 388965 - DNA, 636 bp, Homo sapiens
  misc_feature (1)...(636): n = A,T,C or G
gttttggtatcagtgttatgctagtctggtaaaaggacttaggtagaattccctaatttcatgctcttcaattttttggaatagtttgagaaggattggtattagttcttttcacatttgatagaatttggtagtgaatccattcagtcctgggtttttctttgttggaagagtttttgttacttagtaaatctcacttttttgttattggtctgttcagactttctgttcttcctaatttagtcttggtaggttgtatgtttccagaaatttatccatttcctctaagttttccagtttgtcatcatataagtattcataatagtttttggtgttctgtttatttctgtactattaattatcatgtccatttttcattttttattttatttgggtcttctcttattcttttttgtttagtttacctagcagtatattgattttgtttttttctcaaaaaaccaacttttcattttgttatgatgttctactgttttatgtatctrtttcatttatttctgttacgatcattattatttcttttctttactaattntaggtttggtttgttcttgctttcctagttaactgagatatatcattagattgtttatctgaaatctttctactttttga

SEQ ID NO: 388966 - DNA, 636 bp, Homo sapiens
  misc_feature (1)...(636): n = A,T,C or G
gttttggtatcagtgttatgctagtctggtaaaaggacttaggtagaattccctaatttcatgctcttcaattttttggaatagtttgagaaggattggtattagttcttttcacatttgatagaatttggtagtgaatccattcagtcctgggtttttctttgttggaagagtttttgttacttagtaaatctcacttttttgttattggtctgttcagactttctgttcttcctaatttagtcttggtaggttgtatgtttccagaaatttatccatttcctctaagttttccagtttgtcatcatataagtattcataatagtttttggtgttctgtttatttctgtactattaattatcatgtccatttttcattttttattttatttgggtcttctcttattcttttttgtttagtttacctagcagtatattgattttgtttttttctcaaaaaaccaacttttcattttgttatgatgttctactgttttatgtatctgtttcatttatttctgttaygatcattattatttcttttctttactaattntaggtttggtttgttcttgctttcctagttaactgagatatatcattagattgtttatctgaaatctttctactttttga

SEQ ID NO: 388967 - DNA, 507 bp, Homo sapiens
tcttgctttcctagttaactgagatatatcattagattgtttatctgaaatctttctactttttgatgtaggtgtttattgctataaacttccatattaggactgcttttgctctatcccaaagrtttttatatgttgtgtttttatttcgatttgtttcaagaaatgtttggattttcatctgaatttcttcattgatcaaatctttgttcaagataatgttgcttaattttcatgaatttgtacagttccaaagtttctcatggtattaatttctggctttattccatctagttctgataaaaggcttgatatgatttcaattattttaagtttgttgggacttattttgtggcctaacatagtctgttatagagtatgatccatgtgacaaggacaagaatgtgtattctgcagctcttgggtgaaatattctgtaaatatctcttaggtccattttggtctaaattccagttcaattacaatgtgattttttgtcgttgattt

SEQ ID NO: 388968 - DNA, 507 bp, Homo sapiens
tcttgctttcctagttaactgagatatatcattagattgtttatctgaaatctttctactttttgatgtaggtgtttattgctataaacttccatattaggactgcttttgctctatcccaaagatttttatatgttgtgtttttatttcratttgtttcaagaaatgtttggattttcatctgaatttcttcattgatcaaatctttgttcaagataatgttgcttaattttcatgaatttgtacagttccaaagtttctcatggtattaatttctggctttattccatctagttctgataaaaggcttgatatgatttcaattattttaagtttgttgggacttattttgtggcctaacatagtctgttatagagtatgatccatgtgacaaggacaagaatgtgtattctgcagctcttgggtgaaatattctgtaaatatctcttaggtccattttggtctaaattccagttcaattacaatgtgattttttgtcgttgattt

SEQ ID NO: 388969 - DNA, 615 bp, Homo sapiens
tgtttttgttggccttgtcaaggatcagatcattgtggatgtgtgactttatttctgagttttctattttgttccattagtgcatgtgtctggttttgtaccagtaccatgatgttttgattrccatcatcttttattcaacataggactagaagtcctagccagagcaatcaggcaaaagaaacagataaaaggcgtccaaataggaaaagaagaagtcaaattatctctcctcacagacattatgattcaatacttggaaaacattaaagactccaccaaaaggctactagaactgataaattatttgggtaaggtttcaggatacaaaattgatatccaaaaatcggtaacatctctatacaccaataatgtccaggctgagagtcaaatcaagaacacaattccatttacaagagctacaaagaaaatgaaatacctagaaatacagctaaccagggaagtgaaagatctcgacaagaactacagaacactgcagaaagaaatcagagccaacacaaaccaatggaaatatagtccatgatcatggattgggagaagcaatataattaaaatagcaatactgcccaaagcaatttacagatgcaatgctgt

SEQ ID NO: 388970 - DNA, 615 bp, Homo sapiens
tgtttttgttggccttgtcaaggatcagatcattgtggatgtgtgactttatttctgagttttctattttgttccattagtgcatgtgtctggttttgtaccagtaccatgatgttttgattaccatcatcttttattcaacataggactagaagtcctagccagagcaatcaggcaaaagaaasagataaaaggcgtccaaataggaaaagaagaagtcaaattatctctcctcacagacattatgattcaatacttggaaaacattaaagactccaccaaaaggctactagaactgataaattatttgggtaaggtttcaggatacaaaattgatatccaaaaatcggtaacatctctatacaccaataatgtccaggctgagagtcaaatcaagaacacaattccatttacaagagctacaaagaaaatgaaatacctagaaatacagctaaccagggaagtgaaagatctcgacaagaactacagaacactgcagaaagaaatcagagccaacacaaaccaatggaaatatagtccatgatcatggattgggagaagcaatataattaaaatagcaatactgcccaaagcaatttacagatgcaatgctgt

SEQ ID NO: 388971 - DNA, 615 bp, Homo sapiens
tgtttttgttggccttgtcaaggatcagatcattgtggatgtgtgactttatttctgagttttctattttgttccattagtgcatgtgtctggttttgtaccagtaccatgatgttttgattaccatcatcttttattcaacataggactagaagtcctagccagagcaatcaggcaaaagaaacagataaaaggcgtccaaataggaaaagaagaagtcaaattatctctcctcacagacattatgattcaatacttggaaaacattaaagactccaccaaaaggctactagaactgataaattatttgggtaaggtttcaggatacaaaattgatatccaaaaatcggtaamatctctatacaccaataatgtccaggctgagagtcaaatcaagaacacaattccatttacaagagctacaaagaaaatgaaatacctagaaatacagctaaccagggaagtgaaagatctcgacaagaactacagaacactgcagaaagaaatcagagccaacacaaaccaatggaaatatagtccatgatcatggattgggagaagcaatataattaaaatagcaatactgcccaaagcaatttacagatgcaatgctgt

SEQ ID NO: 388972 - DNA, 532 bp, Homo sapiens
agtgatactcctttatagcgcatattttaaatgaaatgtatcacctcaactaatttgtctgtccaacggatatttgaaagctatcattgacagagtattctttttccgtcttatcatttgyttttcaagctagagggactatcataaaccaagcaaaatgaagatataataatcctactccttgttcatgcatgttattttagtaaactttcacgcttcatggttctctcacatatataattttatttcaccttattgctaaatttaatattttattttattcttataacattcttgtaatatagatagagcaagtaatgtctatttcagcttacagattaagctgccataactaatttttaaaaaacgtttacagcttttatatgaataacctctgtgacataaaatatattttaaaaatgcttaaaacattttagaagagtatagtgagggtgccattccccaactcccaaaaaatgttcattttctaacccctgaaactcgtgaatgtttccttatttgaatagagtct

SEQ ID NO: 388973 - DNA, 567 bp, Homo sapiens
aatgtatgcagtgaatctttctctcatccttccccaaggagacctccggccttttaccagggtaactgtgcattggggaaagggaaatggtcagatattttagggactactgaacactgtctctgagctgatgctgattccaggggacccaaaacgttattgtggtcctccagttaaagtaggggcttatgaaggtcaggtaattaatgsagttttagctgaggtctgacttacagtggattgagtgggtccccggactcatcctgtggtcatttccccagtgccagaatgcaaaattggcacagacatatgtagcagctggcagaacccccacgttggctccctgcctgatagggtgaaggttattgtggtgggaaaggtcaacggaaaccattagagcttgaaaaatagtaaatcaaaaacaatattgcatccctggaggaattgtggagatgagtgccgccatcaaggatttgaaagacattgaggtgtgattcccaccacatccccatttaactctcccatttggcctgtgcagaagacagatggatcttggaaaatgacagt

SEQ ID NO: 388974 - DNA, 567 bp, Homo sapiens
aatgtatgcagtgaatctttctctcatccttccccaaggagacctccggccttttaccagggtaactgtgcattggggaaagggaaatggtcagatattttagggactactgaacactgtctctgagctgatgctgattccaggggacccaaaacgttattgtggtcctccagttaaagtaggggcttatgaaggtcaggtaattaatggagttttagctgaggtctgacttacagtggattsagtgggtccccggactcatcctgtggtcatttccccagtgccagaatgcaaaattggcacagacatatgtagcagctggcagaacccccacgttggctccctgcctgatagggtgaaggttattgtggtgggaaaggtcaacggaaaccattagagcttgaaaaatagtaaatcaaaaacaatattgcatccctggaggaattgtggagatgagtgccgccatcaaggatttgaaagacattgaggtgtgattcccaccacatccccatttaactctcccatttggcctgtgcagaagacagatggatcttggaaaatgacagt

SEQ ID NO: 388975 - DNA, 567 bp, Homo sapiens
aatgtatgcagtgaatctttctctcatccttccccaaggagacctccggccttttaccagggtaactgtgcattggggaaagggaaatggtcagatattttagggactactgaacactgtctctgagctgatgctgattccaggggacccaaaacgttattgtggtcctccagttaaagtaggggcttatgaaggtcaggtaattaatggagttttagctgaggtctgacttacagtggattgagtgggtccccggactcatcctgtggtcatttccccagtgccagaatgcaaaattggcacagacatatgtagcagctggmagaacccccacgttggctccctgcctgatagggtgaaggttattgtggtgggaaaggtcaacggaaaccattagagcttgaaaaatagtaaatcaaaaacaatattgcatccctggaggaattgtggagatgagtgccgccatcaaggatttgaaagacattgaggtgtgattcccaccacatccccatttaactctcccatttggcctgtgcagaagacagatggatcttggaaaatgacagt

SEQ ID NO: 388976 - DNA, 600 bp, Homo sapiens
ttgagtgttcaatatgccagcagcagagaccaacactgagccctccatatgacactgttcctcgggttgatcagcctgctactcggtggcagcttgattatattggacctcttccatcatggaaagagcagaggtttgtcctcactagaatagacacttactgtggatatgggattgcctatcctgcatgcaatgcttctgccaagactaccatctgtggactcacagaatgccttatccaccatcatggtattccacacagcattgtctctgaccaaggcaatcactttatggctaaagaagtgcagtagtgggctaatgctcatgaaattcactgctattaccatgttccccataatcctgaagcagctggattgayagaacagtggaatggccttttgaagtcacaattacaatcccaattggttgacaatactttgcaaggctggggaaaagttctccagaaagctgtggatgctctgaatcagtgtctgatatatggtaccttttctcccatagccagaattcacagatcctggaatcaaggggtggaagtggaagtgtcaccactcaccatcacccctagtgatccactagcaa

SEQ ID NO: 388977 - DNA, 600 bp, Homo sapiens
ttgagtgttcaatatgccagcagcagagaccaacactgagccctccatatgacactgttcctcgggttgatcagcctgctactcggtggcagcttgattatattggacctcttccatcatggaaagagcagaggtttgtcctcactagaatagacacttactgtggatatgggattgcctatcctgcatgcaatgcttctgccaagactaccatctgtggactcacagaatgccttatccaccatcatggtattccacacagcattgtctctgaccaaggcaatcactttatggctaaagaagtgcagtagtgggctaatgctcatgaaattcactgctattaccatgttccccataatcctgaagcagctggattgacagaacagtggaatggccttttgaagtcacaattacaatcccaattggttgrcaatactttgcaaggctggggaaaagttctccagaaagctgtggatgctctgaatcagtgtctgatatatggtaccttttctcccatagccagaattcacagatcctggaatcaaggggtggaagtggaagtgtcaccactcaccatcacccctagtgatccactagcaa

SEQ ID NO: 388978 - DNA, 617 bp, Homo sapiens
tatggtatattctggagaatgttttatgtgctgatgaaaataatgtgtactcagtagcagtctggtraaaggtgctgtaaatgtccggcctatttggttttgtgtgtcatttatctatgatggtcctttgctgattttctgtctacatgatttgtcaattactgagcatgggttgctgaagtcttctagtattatggtatagcagtctatttctcccttatatctgttaatgtttactttatatacttgttccagtgttgggtgcacaaatatttatgattattatatcctaagcctatagtgacccctttatcattatacattgatcttctttgtctcttttcagtctttaattaaagtctattttaactactcctatttttttggtctccatttgcatgaagtacgtattttcaactgttccccttgaaaatatgtgtgtctttataggtgaggtgggtttctgatagccagcacatagttggatcttgttttcttattcatgcagccactttcttttaattagagaattaagtccacttacattcagtgttcttactgataactaagaacttacttactgataactaagaactgccaatttgctacctgtttta

SEQ ID NO: 388979 - DNA, 617 bp, Homo sapiens
tatggtatattctggagaatgttttatgtgctgatgaaaataatgtgtactcagtagcagtctggtgaaaggtgctgtaaatgtccggcctatttggttttgtgtgtcatttatctatgatggtcctttgctgattttctgtctacatgatttgtcaattactgagcatgggttgctgaagtcttctagtattatggtatagcagtctatttctcccttatatctgttaatgtttactttatatacttgttccagtgttgggtgcacaaatatttatgattattatatcctaagcctatagtgacccctttatcattatacaktgatcttctttgtctcttttcagtctttaattaaagtctattttaactactcctatttttttggtctccatttgcatgaagtacgtattttcaactgttccccttgaaaatatgtgtgtctttataggtgaggtgggtttctgatagccagcacatagttggatcttgttttcttattcatgcagccactttcttttaattagagaattaagtccacttacattcagtgttcttactgataactaagaacttacttactgataactaagaactgccaatttgctacctgtttta

SEQ ID NO: 388980 - DNA, 567 bp, Homo sapiens
tgggttgctgaagtcttctagtattatggtatagcagtctatttctcccttatatctgttaatgtttactttatatacttgttccagtgttgggtgcacaaatatttatgattattatatcctaagcctatagtgacccctttatcattatacattgatcttctttgtctcttttcagtctttaattaaagtctattttaactactcctatttttttggtctccatttgcatgaagtacgtattttcaactgttccccttgaaaatatgtgtgtctttataggtgaggtgggtttctgatagccagcacatagttggatcttgttttcttattcatgmagccactttcttttaattagagaattaagtccacttacattcagtgttcttactgataactaagaacttacttactgataactaagaactgccaatttgctacctgttttatgcttgcattgtaactcttctcttcctttctttttttcttgctgtcatcctttgtgattcaatgattttctctagtatgtttttgttttttggggtttttttttgtttgctttttatt

SEQ ID NO: 388981 - DNA, 567 bp, Homo sapiens
tgggttgctgaagtcttctagtattatggtatagcagtctatttctcccttatatctgttaatgtttactttatatacttgttccagtgttgggtgcacaaatatttatgattattatatcctaagcctatagtgacccctttatcattatacattgatcttctttgtctcttttcagtctttaattaaagtctattttaactactcctatttttttggtctccatttgcatgaagtacgtattttcaactgttccccttgaaaatatgtgtgtctttataggtgaggtgggtttctgatagccagcacatagttggatcttgttttcttattcatgcagccactttcttttaattagagaattaagtccacttacattcagtgttcttactgataactaagaacttacttactgataactaagaactgccaatttgctacctgttttwtgcttgcattgtaactcttctcttcctttctttttttcttgctgtcatcctttgtgattcaatgattttctctagtatgtttttgttttttggggtttttttttgtttgctttttatt

SEQ ID NO: 388982 - DNA, 570 bp, Homo sapiens
ggttccctgttttctgttgttgcttgtggatgcatgtctatgactttgcaatgaaagattatttattccagtcttctctctctgacttgatttggtttttattggttatcttygcttagagagtcttcgtaaattatctgttgaatttcttatattttattatgctaggtcacttcctctatttttgtactagatggtgactaaagaccaagtttgtctcagctctcgcaatcaaccagacctttgccaatagggaatggaggaggtcccaaaaagagatcatcagtgtggtagtattggcaaggggcttgtgctcaggagccctgtgtggaatgtacctgctaacatgtgtttctgctgaatagccacgctaatttgccatttcctttggctgagttacagagcagaggtttcaggggttggatatgatagtcctgcctctctcatttgtctctgactattgttagatatatatttatctttaggcccacatgatgcttcctttgggttgactcatcaacagctctcctgtcaaagagcccaaggtggttgggaagctagtcatcctcc

SEQ ID NO: 388983 - DNA, 570 bp, Homo sapiens
ggttccctgttttctgttgttgcttgtggatgcatgtctatgactttgcaatgaaagattatttattccagtcttctctctctgacttgatttggtttttattggttatcttcgcttagagagtcttcgtaaattatctgttgaatttcttatattttattatgctaggtcacttcctctatttttgtactagatggtgactaaagaccaagtttgtctcagctctcgcaatcaaccagacctttgccaatagggaatggaggaggtcccaaaaagaratcatcagtgtggtagtattggcaaggggcttgtgctcaggagccctgtgtggaatgtacctgctaacatgtgtttctgctgaatagccacgctaatttgccatttcctttggctgagttacagagcagaggtttcaggggttggatatgatagtcctgcctctctcatttgtctctgactattgttagatatatatttatctttaggcccacatgatgcttcctttgggttgactcatcaacagctctcctgtcaaagagcccaaggtggttgggaagctagtcatcctcc

SEQ ID NO: 388984 - DNA, 570 bp, Homo sapiens
ggttccctgttttctgttgttgcttgtggatgcatgtctatgactttgcaatgaaagattatttattccagtcttctctctctgacttgatttggtttttattggttatcttcgcttagagagtcttcgtaaattatctgttgaatttcttatattttattatgctaggtcacttcctctatttttgtactagatggtgactaaagaccaagtttgtctcagctctcgcaatcaaccagacctttgccaatagggaatggaggaggtcccaaaaagagatcatcagtgtggtagtattggcaaggggcttgtgctcaggagccctgtgtggaatgtacctgctaacatgtgtttctgctgaatagccacgctaatttgccatttcctttggctgagttacagagcagaggtttcaggggytggatatgatagtcctgcctctctcatttgtctctgactattgttagatatatatttatctttaggcccacatgatgcttcctttgggttgactcatcaacagctctcctgtcaaagagcccaaggtggttgggaagctagtcatcctcc

SEQ ID NO: 388985 - DNA, 570 bp, Homo sapiens
ggttccctgttttctgttgttgcttgtggatgcatgtctatgactttgcaatgaaagattatttattccagtcttctctctctgacttgatttggtttttattggttatcttcgcttagagagtcttcgtaaattatctgttgaatttcttatattttattatgctaggtcacttcctctatttttgtactagatggtgactaaagaccaagtttgtctcagctctcgcaatcaaccagacctttgccaatagggaatggaggaggtcccaaaaagagatcatcagtgtggtagtattggcaaggggcttgtgctcaggagccctgtgtggaatgtacctgctaacatgtgtttctgctgaatagccacgctaatttgccatttcctttggctgagttacagagcagaggtttcaggggttggatatgatagtcctgcctctctcatttgtctctgactattgttagatatatatttatctttaggcccacatgatgcttcctttgggttgactcatcaacagctcycctgtcaaagagcccaaggtggttgggaagctagtcatcctcc

SEQ ID NO: 388986 - DNA, 530 bp, Homo sapiens
aatcctcacatgtcatgggagggaccccagtgggaggcaattaaatcatggagtggttaccttcatgttgttcctatgatagtgagttctcatgagatctgatgtttgtataaggggcttttccccttttgctcaccccttctccttcctgccaccacgtgaagaaggatgtgtttgcttccccttctgccataattgtaagtttcctgaggctctgcagaaatkagtcaataaaacctctttcctttataaataacccactcttgggcagttctttatatatagaatggattgatacagtaaattggtaccacagagagtggcatgctgctgtaacaatacccagaaatgtggaagcaactttcgaacaatgtaacaggcagaagctagggctcaaaagaagacagaacatgtgggaaagcttgaaactttctagagacatggaaggttcagaagacaggaagatgtgggaaggtttggaacttgctggagacttgttgatggctttgaccaaaatgctgatagtgata

SEQ ID NO: 388987 - DNA, 530 bp, Homo sapiens
aatcctcacatgtcatgggagggaccccagtgggaggcaattaaatcatggagtggttaccttcatgttgttcctatgatagtgagttctcatgagatctgatgtttgtataaggggcttttccccttttgctcaccccttctccttcctgccaccacgtgaagaaggatgtgtttgcttccccttctgccataattgtaagtttcctgaggctctgcagaaatgagtcaataaaacctctttcctttataaataacccactcttgggcagttcttkatatatagaatggattgatacagtaaattggtaccacagagagtggcatgctgctgtaacaatacccagaaatgtggaagcaactttcgaacaatgtaacaggcagaagctagggctcaaaagaagacagaacatgtgggaaagcttgaaactttctagagacatggaaggttcagaagacaggaagatgtgggaaggtttggaacttgctggagacttgttgatggctttgaccaaaatgctgatagtgata

SEQ ID NO: 388988 - DNA, 530 bp, Homo sapiens
aatcctcacatgtcatgggagggaccccagtgggaggcaattaaatcatggagtggttaccttcatgttgttcctatgatagtgagttctcatgagatctgatgtttgtataaggggcttttccccttttgctcaccccttctccttcctgccaccacgtgaagaaggatgtgtttgcttccccttctgccataattgtaagtttcctgaggctctgcagaaatgagtcaataaaacctctttcctttataaataacccactcttgggcagttctttatatatagaatggattgatacagtaaattggtaccacagagagtggcatgctgctgtaacaatacccagaaatgtggaagcaactttsgaacaatgtaacaggcagaagctagggctcaaaagaagacagaacatgtgggaaagcttgaaactttctagagacatggaaggttcagaagacaggaagatgtgggaaggtttggaacttgctggagacttgttgatggctttgaccaaaatgctgatagtgata

SEQ ID NO: 388989 - DNA, 530 bp, Homo sapiens
aatcctcacatgtcatgggagggaccccagtgggaggcaattaaatcatggagtggttaccttcatgttgttcctatgatagtgagttctcatgagatctgatgtttgtataaggggcttttccccttttgctcaccccttctccttcctgccaccacgtgaagaaggatgtgtttgcttccccttctgccataattgtaagtttcctgaggctctgcagaaatgagtcaataaaacctctttcctttataaataacccactcttgggcagttctttatatatagaatggattgatacagtaaattggtaccacagagagtggcatgctgctgtaacaatacccagaaatgtggaagcaactttcgaacwatgtaacaggcagaagctagggctcaaaagaagacagaacatgtgggaaagcttgaaactttctagagacatggaaggttcagaagacaggaagatgtgggaaggtttggaacttgctggagacttgttgatggctttgaccaaaatgctgatagtgata

SEQ ID NO: 388990 - DNA, 611 bp, Homo sapiens
gatgttggaattgtcagacaagatattttaaaataactatgattaagatgctaaggactctgacraataaagtagattgaaagcaaaaacagacaggcaatgtaagcagagagatggaagttctaagaaagaatgaaaaaaaaatgttagagacacacatacacaaaaagccactgaaacagaaatgaagtctgcctttagagcttattagcagactggacagagctaaggaaagaatctctaagcttgaggatatttaaatagaaacctttgaaaccgcaaaacagatcaaaaaaagaaaaaaaaagagcaatatccaagaactgtggaaaaactgcaaaaggtataacatacacataataggaataccagaagggaaagaaagggaaaaaataacagaagaaatatttgaaacaataatgagtaaaaatttcccaccaatgtatgtcagacactaatccagaaagctcagagaataccaaacagaataaatggcaaaaaaagtacacttagtatatcatatccaaactacagaaaatcaaagttagtgaaagaagtcagaggaaaaataaccttacctatagaagagtactaccttactattacaaggc

SEQ ID NO: 388991 - DNA, 611 bp, Homo sapiens
gatgttggaattgtcagacaagatattttaaaataactatgattaagatgctaaggactctgacaaataaagtagattgaaagcaaaaacagacaggcaatgtaagcagagagatggaagttctaagaaagaatgaaaaaaaaatgttagagacacacatacacaaaaagccactgaaacagaaatgaagtctgcctttagagcttattagcagactggacagagctaaggaaagaatctctaagcttgaggatatttaaatagaaacctttgaaaccgcaaarcagatcaaaaaaagaaaaaaaaagagcaatatccaagaactgtggaaaaactgcaaaaggtataacatacacataataggaataccagaagggaaagaaagggaaaaaataacagaagaaatatttgaaacaataatgagtaaaaatttcccaccaatgtatgtcagacactaatccagaaagctcagagaataccaaacagaataaatggcaaaaaaagtacacttagtatatcatatccaaactacagaaaatcaaagttagtgaaagaagtcagaggaaaaataaccttacctatagaagagtactaccttactattacaaggc

SEQ ID NO: 388992 - DNA, 396 bp, Homo sapiens
gtgattttagtttcatatcacatttttttacttttcatttttcttcaggtaaaaaataatcaaatcaaattgtagtttccattttacccagttattttggccccaaagagatgatagtgaataatttaaattatattatatattaatcatttttattacgtttttgttaggcaggaatagtaccattattcctctatcccttcccttwaaaaaattcagaaatgggcaatggctgtgaatatggaaggagttgtgcatagtgtttaaaagtgttaaatctgagctgagagaaaattagttcttttgcaaacaatggaaaaccagggaattatttcattgtcacgacccagtagccaccagatgcttagaattccatgtattttaaaaacaaaccat

SEQ ID NO: 388993 - DNA, 454 bp, Homo sapiens
caaaaacatttaattttggattgggtgtttacggcaattcagttagctcaaccaaacaatggttaggcaccaattattgtagaagaggttcatttgattataagtaagaataatctacttgagcagccttaagcaaacatgagaaatttactattagtatatttaactgactcttakaactcgagggcagaaagtgctctcaagtcttaggagagacgggactggaaactatagattgtcagcatctaaggcatttactgtttcagtcttttccgctgagaccacagcgtcgcttgcctgtgtttttctctgtaaaattagctctttctccagtctctttctgcagaatggctttctgtgcttttttgtatgtccatagcccaccgcatccagttttacatctctgcagctcattaaaacattatttccacatgttgaaaattattatgtgtgg

SEQ ID NO: 388994 - DNA, 597 bp, Homo sapiens
ttttataaaataacaatgaatggcccaaaataaagcaatagttgttaacttctatgccatagactcactgcagaccgagggactcatttatgagtcccaaatatgggagttacaattatggcccaacataaagcaatagttgttaacttctatgccatagactcattgcggactgagggactcatttatactttgaactcagccttacacatttttttttctcaaatacaagctgaaaataraagcatccatcaaaacatgtttagccacatttcacaattcatgcaactgaagaagagagttttaaacccactggcaagtttatgatgaacgacaatgtagaacatagattgtgagtgagtaatttaagttttcttaagaagacatttctctggattcaagcagacgtacctggaacaaattctacttattgcatgcacaagcaagctttcccttcttgaataacccagaggagtttttagagcatttagtgaagctgttaaactcatcagtcaaattaaaggcaggcctaggcatctttgtttttttctcaaagcaaagtgactgtcgttaatgttttctcagaaagacttctct

SEQ ID NO: 388995 - DNA, 559 bp, Homo sapiens
tctggttaatccactgcttcctgaatgatggctcttggaacactgatcccaaaacattaacccaaatgagtctattatttgggaaagcagtaattaaacaaacgaaacaagtttctatactccagatatcagttcttaatgtataccaaagatcattataaattttcaagagaaaaacgtgataggaactatttcccacattcctttggctctaggaccctgatattcatgaactgttctcagttctaatgttctgtgaaatacacaatgggactttgggacgccaaggtgggcakagtgcctgaagtcaagagttcgagaccagccaggccaacatggtgaaagcccgtctctactaaaaatacaaaaaaaattagccaaaattagccgggagtggagacccgcacctgtaatcccagctactcaggagggtgaggcaggagaatcacttgaacccaaaaggcagaagttgcagtgagccaagatcacgtgccactgcactccagccttggcaacagaatgagactctgtctcagaaaaaaaataaataaccccccag

SEQ ID NO: 388996 - DNA, 596 bp, Homo sapiens
tttttaaaattttttttcttttakttactctttttaattactaaataaaaagcattggcattaacactcctgttaatgtacctgatgagacagagcagcttagctcagcaagggcaacccaaataggtctcccactctggagtgagattgtctcagcaccataaagacagtcctatggagaaacttgatgacctgatcccaaatcactgctactgaaaattcaggaggacttcaggctaaaaaatctagattgcattatggcttggcagagctagtgaaattatgattccatatcttcctctatagggaaaaatataggcaactagacaattaacccataatatggaatgagaaggaaatagaatatatcacaataggaaccctgaatataatcacctccactgttttaatgataagaaaagtaagcgttctgaaatatttcacaataatttttgatgaaagagtttaccacttacttaagaaagatactaaaataccccttataatgaactgccttttagaaaaagcaaacaaaagtattaactaatggtcaacactctactggtttagatttccaagggattagccatgtatat

SEQ ID NO: 388997 - DNA, 596 bp, Homo sapiens
tttttaaaattttttttcttttatttactctttttaattactarataaaaagcattggcattaacactcctgttaatgtacctgatgagacagagcagcttagctcagcaagggcaacccaaataggtctcccactctggagtgagattgtctcagcaccataaagacagtcctatggagaaacttgatgacctgatcccaaatcactgctactgaaaattcaggaggacttcaggctaaaaaatctagattgcattatggcttggcagagctagtgaaattatgattccatatcttcctctatagggaaaaatataggcaactagacaattaacccataatatggaatgagaaggaaatagaatatatcacaataggaaccctgaatataatcacctccactgttttaatgataagaaaagtaagcgttctgaaatatttcacaataatttttgatgaaagagtttaccacttacttaagaaagatactaaaataccccttataatgaactgccttttagaaaaagcaaacaaaagtattaactaatggtcaacactctactggtttagatttccaagggattagccatgtatat

SEQ ID NO: 388998 - DNA, 560 bp, Homo sapiens
tcttttgttcacaaaatgagcattgattgccttcaacctgacctatgtaagcatgtcttctgatgatctatggcacaacaaagaaaatcccatatatataatgtgtatgygttactagatgtatttggctctttgagtcttagaaactatgcaggtagcatttggaaactaataaaaatcattgagaggcagataatggggcaaactctattctccaaagagagccaatagtctgtgctggtatagattagagataatgctctataaagcagcatttggtaaaatatgctgcaggcagaagatggtcaataaatgtggttggctattaagctgtgaaagggtcctcctacggaatatacataaactctattctgcaaagtcttcaaagatgttttctgatagcacaaaacgtcctctttttttacaaaagggcaataactagatggattttgcctgttttcaggaaactcagggtccagagatcactgcatttctcagggaatttacctggtggaactactggtgggcgaaataataaagctaggtcataggacaagtat

SEQ ID NO: 388999 - DNA, 596 bp, Homo sapiens
tttttaaaattttttttcttttatttactctttttaattactaaataaaaagcattggcattaacactcctgttaatgtacctgatgagacagagcagcttagctcagcaagggcaacccaaataggtctcccactctggagtgagattgtctcagcaccataaagacagtcctatggagaaacttgatgacctgatcccaaatcactgctactgaaaattcaggaggacttcaggctaaaaaatctagattgcattatggcttggcagagctagtgaaattatgattycatatcttcctctatagggaaaaatataggcaactagacaattaacccataatatggaatgagaaggaaatagaatatatcacaataggaaccctgaatataatcacctccactgttttaatgataagaaaagtaagcgttctgaaatatttcacaataatttttgatgaaagagtttaccacttacttaagaaagatactaaaataccccttataatgaactgccttttagaaaaagcaaacaaaagtattaactaatggtcaacactctactggtttagatttccaagggattagccatgtatat

SEQ ID NO: 389000 - DNA, 560 bp, Homo sapiens
tcttttgttcacaaaatgagcattgattgccttcaacctgacctatgtaagcatgtcttctgatgatctatggcacaacaaagaaaatcccatatatataatgtgtatgtgttactagatgtatttggctctttgagtcttagaaactatgcaggtagcatttggaaactaataaaaatcattgagaggcagataatggggcaaactctattctccaaagagagccaatagtctgtgctggtatagattagagataatgctctataaagcagcatttggtaaaatatgctgcaggcagaagatggtcaataaatgtggttggctattaagctgtgaaagggtcctcctacggaatatacataaactctattctgcaaagtcttcaaagatgttttctgatagcacaaaacgtcctctttttttacaaaagggcaataactagatggattttgcctgttttcaggaractcagggtccagagatcactgcatttctcagggaatttacctggtggaactactggtgggcgaaataataaagctaggtcataggacaagtat

SEQ ID NO: 389001 - DNA, 290 bp, Homo sapiens
aagagtttgactacatcaatgccaccttttttacattattaactgaagaaaactaagtaccctttaaagtttttttaatttttataatatgcatttcctatgaatgctttgaagaccctcagtgttcaattgtctatccttaaaatcaatagaggctgttgtgtttcagaacacacattatcttcacattaaattcatgttgtaaatttgaatttggttttatagatttaattayatttaacatatgattttagttgtataattacttaagaattctatgacaaggagtt

SEQ ID NO: 389002 - DNA, 606 bp, Homo sapiens
atcacaataggaaccctgaatataatcacctccactgttttaatgataagaaaagtaagcgttctgaaatatttcacaataatttttgatgaaagagtttaccacttacttaagaaagatactaaaataccccttataatgaactgccttttagaaaaagcaaacaaaagtattaactaatggtcaacactctactggtttagatttccaagggattagccatgtatatggttattcttcttttttcctatcaataaaaaccaaggtgaaaccaataaagtgaggattatcttcactgtctttagaactaatgtggttacaatacactcaacatgrgtagcttttttaaagagacagagtctcaaatcttatagccacatctaccatttcattattgtaatcccctgacaggttcatcctgccttctgcacagatgaaaccaattcactgagaccatggtatttttaccacagtaaaaaaaagagtttaattaacacccggctaaccatttagtagacaaagttattaaatcagcatccctgaaggctcagaggttagagtttttcaaagatagtttgatgcagctgattggttggggatgcactc

SEQ ID NO: 389003 - DNA, 606 bp, Homo sapiens
atcacaataggaaccctgaatataatcacctccactgttttaatgataagaaaagtaagcgttctgaaatatttcacaataatttttgatgaaagagtttaccacttacttaagaaagatactaaaataccccttataatgaactgccttttagaaaaagcaaacaaaagtattaactaatggtcaacactctactggtttagatttccaagggattagccatgtatatggttattcttcttttttcctatcaataaaaaccaaggtgaaaccaataaagtgaggattatcttcactgtctttagaactaatgtggttacaatacactcaacatgggtagcttttttaaagagacagagtctcaaatcttatagccacatctaccatttcattattgtaatcccctgacaggttcatcctgccttctgcacagatgaaaccaattcactgagaccatggtatttttaccayagtaaaaaaaagagtttaattaacacccggctaaccatttagtagacaaagttattaaatcagcatccctgaaggctcagaggttagagtttttcaaagatagtttgatgcagctgattggttggggatgcactc

SEQ ID NO: 389004 - DNA, 618 bp, Homo sapiens
ggactgttgtggggtgggggtaggggggagggatagctttaagagatatacctaatgctaaatgacgagttaatgggtgcagcacaccagcatggcacatgtatacatatgtaactaacctgcacattctgcacatgtaccctaaaacttaaagtaaaataataatataagaaaagaaaagaaaagaaaaaaaaaaagaatttaactgagcaaagaatgatgtgatgatttgcaagtcagacagcccccaaaccagaataagttcagagaggctccagcacagccatttggtggaagatttatgcacagaaaaagggaagtaatgtatagaaaacagaaatgaggtacagaaacagctgtactggttacagctcagcatttgcattattttgaatggagtttgacagttgaccacttttgattggccaaactcagtgattggtatgagagtaggttacagtctatttatatatcctgttaggtacagttcactatgtatgaagaaacctatgagtcaaactyaaaatatgtaaggaggcagctttggactaaatttaatttaacaagccacaccagaaagtgttatgtgagctcacagtaatcctagtaaagtaagaa

SEQ ID NO: 389005 - DNA, 574 bp, Homo sapiens
taattaacacccggctaaccatttagtagacaaagttattaaatcagcatccctgaaggctcagaggttagagtttttcaaagatagtttgatgcagctgattggttggggatgcactcataggagtatagaaaactgtcctcatgagtccacctctgggtagggaatcacagaacacactgggttatgagtcagaatgtgtctgaaaaacatctcaaaagactaatcttagtttctaccatggtgatgttatctacaggaacaattggggaagtcaaaaatcttgcgacctctgaccacatgactcccgaacagtaagggattatagaaactacgcctacatattagcagaattcagacccctcccataatcataatcttgtggttttttataatattagtcttacaaaggtggtttcagccccyaaacaaggaggggaaaagttttagggagggactattatcatccttgcttccaagtaaaactataaactaaattcctcccaaggttagcttagcctgtgcccaggaaagactgaagacagccagcctgtgaggctagaaggaagatgga

SEQ ID NO: 389006 - DNA, 317 bp, Homo sapiens
gtaactgaaggtcatactaaggccttaagcttttggtcacaactttacctaagtgataatctgccaaaaagtgggggggaggggacgggggtggattttttaaataaaattatggaagattattgtttttgatggaagtcatgcactaggctccaacagamcaaaccagatgaaaccaaaatggagtcactcacgccaaatgtaacataatcaaactaaaactttaaggaaacagataggtcagaaatagaaactaaaatagaccaagttttggatttctcctgtaaacggtatattctaatacaaggaggtctgct

SEQ ID NO: 389007 - DNA, 538 bp, Homo sapiens
agatgcatgtcaccttagagtttttaaagtccatwgaatgtgcaacataatgagttaaccataatgtaaattataaactttagttaacaataatgtatcaatattagttcatcaattgtgacaaatgtaccacactaatgcaagatgttaataacagaagaaactatctgcagaggagagggggtcatatggtaattccacatacttttcactcaattttctgttaacctaaaattgcactaaaaacagtctattaagttaaataaataaacatccattgtgttaatttaccccttctcatatgatggttttggtttctattattattgaattacctttaaacacttttttccactactacattacgtatttataatgatggaatacaaaactgtctaagtcctggacctagtttcttattttataatttctgtatgtattattaaaacaagttttcttcctaattgacttatttttattgctaatattactttgataggccgttttgagaaatgctttcattaatgtaggtttgcct

SEQ ID NO: 389008 - DNA, 538 bp, Homo sapiens
agatgcatgtcaccttagagtttttaaagtccatagaatgtgcaacataatgagttaaccataatgtaaattataaactttagttaacaataatgtatcaatattagttcatcaattgtgacaaatgtaccacactaatgcaagatgttaataacagaagaaactatctgcagaggagagggggtcatatggtaattccacatacttttcactcaattttctgttaacctaaaattgcactaaaaacagtctattaagttaaataaataaacatccattgtgttaatttaccccttctcatatgatggttttggtttctattattattgaattacctttaaacacttttttccactactacattacgtatttataatgatggaatacaaaactgtctaagtcctggacctagtttcttattttataatttctgtatgtattattaaaacaagttttcttcctaattgacttatttttattgctaatattactttgataggccrttttgagaaatgctttcattaatgtaggtttgcct

SEQ ID NO: 389009 - DNA, 628 bp, Homo sapiens
aactgggaactgggatgatggcaggcatttgcccaacagaagttgtgagtacagagagaaggtcagccagagagagatggaattatggaggagaatcagcctatgttagaaatgcagcccaaagatgagagagaaggcacagaaataacctggcttcctcttctagtcctccaacttcccggttttgcttcccattatccatatctaagcagaaagcaattggtagayggatgatagaaaataaagtttgcaaatgtcagggccccaagacactaagcagaagaataggaaatagatcttttctcaaagtgagggagtcatgatttgaggcacttggcaggacatccagaagcttggactaggaaagatgtaagacatgtcagcttggaaagttctgtgatgtttctaacagcaacataataacagacagaagtatccacattattagtgtttaatgtaggttttatagcaaaaaaaaatctcaggaatgttttaaaaatatctgagttcttggatcagtgggaaattttgcttatgaaatcattgccaaatttcttgtaataaaaaccaattattgaacacttaacaatgtgccattctcagtgctattaatgtgtttttaaattta

SEQ ID NO: 389010 - DNA, 568 bp, Homo sapiens
tggcatttgaaagctataaaaccgaagcttaaaacacttatttcttcacagttctgcaattttagctgcattaagctggatagtctttctgctaagctcacctgggggcctctcttacagcttgctggcattgagatttctactaagaatgaatggcccaaaatggttcatgtttctggtggttttccagaacagccacccagggcacctcagttatattctatacagcaagagagcccaagtttcctacacagtgaaagtagatgccttaaggtctgttgaggcccaggcttacaaatcacacaaggtcacttctaccattctactgatcaagacacagcacaagcctacttgatccaagaggtaggaaaatagattctacccttgacttgggctaacaatccaacattctagaaataaaactattcttgcagaaaaaaataattacaacagctaatatgtattgaaacatttacatgtagcaaagcaactgttctaaatacttaacatatrttaattttcaaatagctctctgagataggtaccactattttcatacttttataaa

SEQ ID NO: 389011 - DNA, 590 bp, Homo sapiens
gggcaatgaaacaggtaactggaagattgatagatcaaatggggaaaagaaaaactaaaagctgacaaatgaatatcctttatgaaagctacaacatctgcttccctgtgtttgcatgtcaatctgcattatgtgtctgtgataatatttggtaaagttagtttttaaattgttaggaaaacagaaatggctttgaaattatcagttaaatataattaggtacttgcttgatttgactgtgagcttatgcctttggtttagagtctggattcaggtggccatcatgaggtctggtgacatgttcttaatgcctagaccagcagctacaagccagaatcaagcccagttatggccctttcttcctctgctttccctgttttgcctcctggctatttagggaggggttggaccctccaggtatagtccttcargtatagccctgtcttctgtcctgatgggctcagacaggccctgaacttcatagtcctccttggtgccatgtggctacttgggacctagaatgactggcagaagacattggggaggctgtgtcatactttcaaaatgcttttcagtaatttaaaatcttg

SEQ ID NO: 389012 - DNA, 606 bp, Homo sapiens
gtcatactttcaaaatgcttttcagtaatttaaaatcttggagtcacgttatgtcacattaagtaattgatcatcataaaatgtctaagtcttctgtaggtgaaaatactgaaatatcaattgttcctcaygagtttaagcctatatgtattgacatgttatttttatatggtatagaaaaggtaaatatattcacatctgctaataaacaataatttgaagaagtgtctttctaaaaaattataaaatgatttttatctacaaatactgatataaaagagttcaaaattactttctatggttttcactagaaattagggttaccaaaattaaaaactactagatatgaaaaaagcaattctgtatacaaagtgtataaacaaaagtaagatatgcatttaatgagaaaaattataaagacataaatatgcttgttaaaaattttgtctggtttaaatttacataaaggcttcaaactgaaggggtaaaagaaaaatagataaaacaagatgaatattacaagttggggaaaatgtgaaatgaaaggtttatggaaatcttgtgtggttaaaagatgagaggatgaccaaaacgcagaaattattc

SEQ ID NO: 389013 - DNA, 580 bp, Homo sapiens
cacactgcagtgcagtgcccagggctcagtgctcttcttggttctacttacattcayttccatggtggtcctaaacagggccctattattattagtatgtcatctacatgctgcattttctatttttatttctacctcagatatcttcctttcttttatttctttaagtttgctgccttcagttgatgtttccaactcaatatatctaaaacagtattctttaatcaccccgacctctcctttgtaacttttgagcttcttgttcttcccataatcttagttaaacataggccacccatccttccatttcttcaggccaaaaatattggagtcatccttggtttttcattgcctttgtgttctattgtcttctgatataaataaaagtcttaggccaatctgattgtcatttcttcataacttaactggattttcctcactaaaatttctaagatattttatctttctccttggtgttctacaacttcacactaatgtgtccaggtgtgtgtctgtttctttttatcatggtcagtggtacacaggtcatttcaacctttaaaacatgcttcttttcact

SEQ ID NO: 389014 - DNA, 489 bp, Homo sapiens
aaagaaagaaaactatgggccaatatctgttatgaatatagacgtaaacatcctcaataaaatactgccaaacagagtctggcaacatatataaaaggactatataccattaacaagtggaatttatttcagaaatataaagtttatgaaaatattcacagagttgagtagtggtcaccacaatcaattttagaatattttcatcactccctaaaaaaatccctgtactcatggacagcctctcccattcccctctaaacctcctactgccccagacccaaaatcaattagtataacacatcacagtaataggcttaaaaacaaaaattacattatcatctcaatagatrcagaacaggcattcgataaaacttcatacactttctgacaacaacattcaacaaattaggaacagaagggaacctcctcaatctaattaagggcatctatgaagatccacagctaacatcatatttaacagtgaaagag

SEQ ID NO: 389015 - DNA, 589 bp, Homo sapiens
accaatcctgcacaaactcagaaagtaaaggaggaagaaacactttctgatttattctatgaagttagcattactctgataccaaagccagacaaagacatcaaatgagaaacaactgtagaccaattcatttaggattaatgaatacaaatacaaaaatccttaacaaaatattagcaataccaaatcttgttaacaggtcagaaggattatacatcatggcaagtaggatttacccacttggatgtgaagatacaaagtttgtttaacatccaaaaatcaaacagtataatacataatatcaatagaatagacggcaaaaaccacatggccacctcaatagactcagaaaagcatttgaggaaattccagcatccacttatgattttaaaaaatactttaaacaaacagtgaatagaagacaacttcaactttataaaggaactctttaaaaactctaggactaacaacctatttaatagtgaaagactgaatgytttcacaattagaccagaaacaaagccaagatgtttgctctcattgcttctattcaattctgtgccaggggtttcagacaatgctatcaggc

SEQ ID NO: 389016 - DNA, 579 bp, Homo sapiens
tttggttgttgttgttgttgttattgttgtttgtttttaccttgacagttttgaggcttacgggccagacattttgtacaatgtccctcacatggggtttttctacatgtttttctcatggttacactgtggtcgtgcattttgtgaaggaagatcacaaagataaactgtccttatcataacatcatatcaaagatacattctatcaacatgacatcacagaggatattcaccttgatagcccaattgcggtcgtgttcgtcagatctctctagggtaaagttgctcttcctgacttccccacccsaatccatattgtactctttggaaggaagtcacgatgcacagccctcacttaaggggtccaggagctgcgttcttctcccagaaggagttatatttatatataattatttgaaattcttcgatatgggacatttgtctcttcctcatttatttatttatttgtttgattatgtatttctattcctatgaattcatgggtattcattttatatgttgggttataatccaatactacattatttattttgttgctcaaattgtcccagccttgcc

SEQ ID NO: 389017 - DNA, 579 bp, Homo sapiens
tttggttgttgttgttgttgttattgttgtttgtttttaccttgacagttttgaggcttacgggccagacattttgtacaatgtccctcacatggggtttttctacatgtttttctcatggttacactgtggtcgtgcattttgtgaaggaagatcacaaagataaactgtccttatcataacatcatatcaaagatacattctatcaacatgacatcacagaggatattcaccttgatagcccaattgcggtcgtgttcgtcagatctctctagggtaaagttgctcttcctgacttccccaccccaatccatattgtactctttggaaggaagtcacgatgcacagccctcacttaaggggtccaggagctgcrttcttctcccagaaggagttatatttatatataattatttgaaattcttcgatatgggacatttgtctcttcctcatttatttatttatttgtttgattatgtatttctattcctatgaattcatgggtattcattttatatgttgggttataatccaatactacattatttattttgttgctcaaattgtcccagccttgcc

SEQ ID NO: 389018 - DNA, 588 bp, Homo sapiens
caggttaccacattacatttagtcaccatgtcttcttaggctcctctagactgtgacagtttgtcaatctttccttgttctttggttgttgttgttgttgttattgttgtttgtttttaccttgacagttttgaggcttacgggccagacattttgtacaatgtccctcacatggggtttttctacatgtttttctcatggttacactgtggtcgtgcattttgtgaaggaagatcacaaagataaactgtccttatcataacatcatatcaaagatacattctatcaacatgacatcacagaggatattcaccttgatagcccaattgcggtcgtgttcgtcagatctctctagggtaaagttgctcttcctgacttccccaccccaatccatattgtactctttggaaggaagtcacgatgcacagccctcacttaaggggtccaggagctgcgttctkctcccagaaggagttatatttatatataattatttgaaattcttcgatatgggacatttgtctcttcctcatttatttatttatttgtttgattatgtatttctattcctatgaattcatgggtatt

SEQ ID NO: 389019 - DNA, 579 bp, Homo sapiens
tttggttgttgttgttgttgttattgttgtttgtttttaccttgacagttttgaggcttacgggccagacattttgtacaatgtccctcacatggggtttttctacatgtttttctcatggttacactgtggtcgtgcattttgtgaaggaagatcacaaagataaactgtccttatcataacatcatatcaaagatacattctatcaacatgacatcacagaggatattcaccttgatagcccaattgcggtcgtgttcgtcagatctctctagggtaaagttgctcttcctgacttccccaccccaatccatattgtactctttggaaggaagtcacgatgcacagccctcacttaaggggtccaggagctgcgttcttctcccagaaggagttatatttatatataattatttgaaattcttcgatatgggacatttgtctcttcctcatttatttatttatttgtttgattatgtatttctattcctatgaattcatsggtattcattttatatgttgggttataatccaatactacattatttattttgttgctcaaattgtcccagccttgcc

SEQ ID NO: 389020 - DNA, 603 bp, Homo sapiens
aaagttgcagttttgctttcctaataaaacatttgagatggaaaaatggaaggcttcttatcaaaatagatctatacattcacactatggtttaatattttgttgttgttgttctgatagtaattatagatatagtaaaactaggctcaaaatatcttcaatgtccataaaagaacaaaagcctaaaatgataagctgaagagaaggcagaatccagttaggcccctcaaccaagagtagcgagttgggcctaggtgttggctcctgagagatagaaaagagcaaaagtgattgagtgggtgggagattggggaactagaaaaccagagtcaaagtttttctctttaaacccaagaccaagagtgtcacttgaaagaattttcagtggtttgtagaaggatgcagtcccaaagaaataagaaagcacagattcaagaactgaggcaagttgctcatttgtttgaaaatattattgtcatgatcccactataatggtgcaggatctcagatgctcttatagaacctaattctggacaagaggtctggcaaactccagggatgcaacagaaaactcacagccrgagaagtgtctgcagagagtaa

SEQ ID NO: 389021 - DNA, 621 bp, Homo sapiens
gttttcttttgcaaaactgaaactctatacccatgaaacacctccctagtttgtcctcctttcagcccccggcaatgacctttatgtttctgtgagtttgaatattttacaaatgtcatataagtgaaattatacaatacttgtctttttttactgtcttattttacttatacaatgtccttaaggttcatctatgttgtagcatgtaacaggattttctcctttttaaggcagaataatattccattttatgtatagaccacattttctttatctgttcacctgtcaatgaacatttgtgttgctttcacttgttagctattgttaatctgcaataaaaatgggtgtgcaaatatttccttgaaaacctgttttcatttcttttggaaaatatgataattcgatttttaattttttgagcagcttttatgctgtttttatagggaytgcacaattttgccttcccaccaacagtgtacaagttccaatttgccacatcctagccaacacttattttgttttttttttaattagccatcctgatgagtgcgaagtgacatctcaatgtgcattttcctagtgttttttgatgttgagtatcttttcatatgtttgcaagca

SEQ ID NO: 389022 - DNA, 580 bp, Homo sapiens
atttttgtgttttcagtacagatgtggttttaccatattggccagggtggtctcgaactcctgacctcaatgatccactcacctcggcctcccaaagtgttgggattacaggcgtgagccactgcacctggtttgtgctcccattcttataatgatattcagtccttgttccctgaaagcagtcatgtttcagtgttcatactgaattaggttcacttagatgagagaggtataaatttgctctgtcttcttgactataaattgacttgatctggccatttctgattctctaagctctatatcagagtattggtttgctataaacatcttgcaagtctgaacatacatagagcatatcatctctctgccatcttgtagttattagctcaacataattaccccagtgatctctctacctcactgtgtttttctttgagggctgttaggtatctttcctcagaggtagatgcttttggagcattcaattcaattaattccaaatactatatcttgcarccatacagttaatctctgacacttctcagtctccgagtcctgccatctctataatattacatgg

SEQ ID NO: 389023 - DNA, 612 bp, Homo sapiens
tctgaacatacatagagcatatcatctctctgccatcttgtagttattagctcaacataattaccccagtgatctctctacctcactgtgtttttctttgagggctgttaggtatctttcctcagaggtagatgcttttggagcattcaattcaattaattccaaatactatatcttgcaaccatacagttaatctctgacacttctcagtctccgagtcctgccatctctataatattacatgggctttattaaaccttgaatgtcttcttttattaaaccatgcatgtctcaaaggctgatactttcctccctaaggatgtcttcaattcttggcaaaatgtgaccgaaaccagtmattttgaaagtctgttataaaattttaattcggcctacagatgacgtggattttgttggtaatgttactccaaaatacaccaaagcttactgggacacagctatatccattaatttacgtattttctatgctgcttttgtgctacagttaaagagttgagtcatcatgacagagaccatatggcccacaaagcctaaaaagtttgccaaaccctgtctcatatggctgttacacttatttgtgtgtgtttttca

SEQ ID NO: 389024 - DNA, 585 bp, Homo sapiens
aacaggcagtgttcaggagaagcttttccatctagatgctatttctttaatttttcagagcaagtctgtgaagttgttattattatttcaattttgtagatgaggagacagaatcttgaaggagttctggtctctgtttaaagtttcagagccagaaaggaacagaggccacctggttctacacatactcatttttcttttttctgtgtctgttcaacacttgaaagcttgcttgatattatgctgagactgtagagtttaaaactctggagctaaaagagacaacagaattcatcyaatctgaccttaaagatgcagaaactgaggactggaaagctttgcttaacacatatcttgaccagaataggaactataacttaaagtttccgtaagacactgagtaattacatcaatatttaacatgaatggcatctgtcttcttgttctctactcagtcattgaggatctcagtggggaatgggatgaagagctcaggtggaagggatttgccttgaagaggaggatgcctgtcgtgcatgttctactctatttttttatgaagtacggatctatgctatccacagg

SEQ ID NO: 389025 - DNA, 585 bp, Homo sapiens
aacaggcagtgttcaggagaagcttttccatctagatgctatttctttaatttttcagagcaagtctgtgaagttgttattattatttcaattttgtagatgaggagacagaatcttgaaggagttctggtctctgtttaaagtttcagagccagaaaggaacagaggccacctggttctacacatactcatttttcttttttctgtgtctgttcaacacttgaaagcttgcttgatattatgctgagactgtagagtttaaaactctggagctaaaagagacaacagaattcatctaatctgacyttaaagatgcagaaactgaggactggaaagctttgcttaacacatatcttgaccagaataggaactataacttaaagtttccgtaagacactgagtaattacatcaatatttaacatgaatggcatctgtcttcttgttctctactcagtcattgaggatctcagtggggaatgggatgaagagctcaggtggaagggatttgccttgaagaggaggatgcctgtcgtgcatgttctactctatttttttatgaagtacggatctatgctatccacagg

SEQ ID NO: 389026 - DNA, 573 bp, Homo sapiens
tttctttgttctgttcacagcttcatcctcaaaacctctgacagtgactgccacataatagttgcttaataattattggttaactatctattgaaatacaatttcaattcagaaattgtaaaatgtctactctcatttaataatcagaatttaaaattatttaaattgttttctctcccttagctagtgtcttctgtaggtagaagatcagggagtgagggagtccttctctcttcccctatcttccccacttctaccrcatttagctcaccaagtttcctcaccccttttgggttggagcaaagtttagaaaagagtctgggcctgtgtggagagaggagcaggccatcacttagttgactattcttatattaagatggcttcaagcaccctgagccaagaagatgtgtgaagccgactatgtgtatgttttgtggattctttagaaattcccaggagcatttaatgtatttcctatggtataggtgatgcattttcctctgggtacatgttcatccctcatcactttttgcattgaaggcttattctaaacagactctctatcattctttc

SEQ ID NO: 389027 - DNA, 524 bp, Homo sapiens
gtactttagtaaattattgtttctattcccagccaataccttaaggaacaggaaatgtatattcattttctaaggtgttttatttatacctcccaagccatatctagggattcctggatttattgagttctctttacaatattgagttctatactatttgagagggcttggagtaagaatgaatattaattctagagatacacacaygtaccttcctcaatatgtttcccccgccttattttatcttctgtgcttctcagggctcaacccttggatttcttctcttctctacctgcatctacttccttagagttatattccagtcatatgactttaaatggcaacactatgctaataactctcaaatttatgtcctggctggatttttcttctgaactctaaacttgtatgtctaactccacctcatcccttgaaagtctgatgtgtctcaaactcagcataagaaaacaacccctcctgacggtcccctccaaacctgctgcacctttagcttcccccatttc

SEQ ID NO: 389028 - DNA, 524 bp, Homo sapiens
gtactttagtaaattattgtttctattcccagccaataccttaaggaacaggaaatgtatattcattttctaaggtgttttatttatacctcccaagccatatctagggattcctggatttattgagttctctttacaatattgagttctatactatttgagagggcttggagtaagaatgaatattaattctagagatacacacatgtaccttcctcaatatgtttcccccgccttattttatcttctgtgcttctcagggctcaaccyttggatttcttctcttctctacctgcatctacttccttagagttatattccagtcatatgactttaaatggcaacactatgctaataactctcaaatttatgtcctggctggatttttcttctgaactctaaacttgtatgtctaactccacctcatcccttgaaagtctgatgtgtctcaaactcagcataagaaaacaacccctcctgacggtcccctccaaacctgctgcacctttagcttcccccatttc

SEQ ID NO: 389029 - DNA, 524 bp, Homo sapiens
gtactttagtaaattattgtttctattcccagccaataccttaaggaacaggaaatgtatattcattttctaaggtgttttatttatacctcccaagccatatctagggattcctggatttattgagttctctttacaatattgagttctatactatttgagagggcttggagtaagaatgaatattaattctagagatacacacatgtaccttcctcaatatgtttcccccgccttattttatcttctgtgcttctcagggctcaacccttggatttcttctcttctctacctgcatctacttccttagagttatattccagtcatatgactttaaatggcaacactatgctaataactctcaaatttatgtcctggctggatttttcttctgaactcyaaacttgtatgtctaactccacctcatcccttgaaagtctgatgtgtctcaaactcagcataagaaaacaacccctcctgacggtcccctccaaacctgctgcacctttagcttcccccatttc

SEQ ID NO: 389030 - DNA, 605 bp, Homo sapiens
gttagtaaaccttcatttgtgtgtgtgtgtggctgaagakaattggctgcaaaagagaaattcaattctcttatttctgaaagcagtaaagaagtttccaaatgacttcctttaatgcatttggtaagttgccctcaaagactattgtttgagcatctcaaaatacaggcttagaaaatcccccttaataactgtcattacaaataacctgtttaatatttgcaaaggatgagtttattaacaaatttcactacatccaatatttggtaataatatagtacccctgagaaatcctggggagaagaggatgaagaatgaggagtttcaatgggagtggatataaactatccaaatgaaagctattttaaaaaatgtccttgaccactccaccagcaacattagagaccttgatggggttcactttgctttcccaggaagaaaagaatcaaatatagctagagtaactactggtagtaagatattcacaaacatctaactcattccataactctgtatattctcttcccttcacctagaatacctttcccttcttactctagtccctgtttttgttttttccttaaactcttactcatccctcaaaa

SEQ ID NO: 389031 - DNA, 436 bp, Homo sapiens
tgcaactaccacaaggaagcagaattctagccctgctgcagagctgttgctctcaacagccatggagggcctactgggaggatgagtagacaggttgtggatgtgaacttgcaatttcctaaacctcccctctgctcctgcatttctgttttaacataaatatttaggtggtagaaaattaattaggaaatctttaggttagttggagacatgctgtggtactacaaaaatagcttaggaaccatagatctcaatttacctatcaggctgagtttttgcctcagctttttattctttaaacattaccaaagggaaaaragagaattttacaaataactagaaacttttacctgtgatgcattttattttcctttccttggtaaaataattctgatttttttctttagatctgaaaactcccctaaatgaccactgt

SEQ ID NO: 389032 - DNA, 436 bp, Homo sapiens
tgcaactaccacaaggaagcagaattctagccctgctgcagagctgttgctctcaacagccatggagggcctactgggaggatgagtagacaggttgtggatgtgaacttgcaatttcctaaacctcccctctgctcctgcatttctgttttaacataaatatttaggtggtagaaaattaattaggaaatctttaggttagttggagacatgctgtggtactacaaaaatagcttaggaaccatagatctcaatttacctatcaggctgagtttttgcctcagctttttattctttaaacattaccaaagggaaaagaragaattttacaaataactagaaacttttacctgtgatgcattttattttcctttccttggtaaaataattctgatttttttctttagatctgaaaactcccctaaatgaccactgt

SEQ ID NO: 389033 - DNA, 561 bp, Homo sapiens
ggtgatgatgataacttaaaagcaattggccgtagtccttagaggttatcaggctttaacaaagtaaaataaatacaatattcacctctatgtaacctgtattcttaatattacttggttcctcacttcctgaaagaaacctaagcttcattccacaaattattaaccatgtgagcttgaacaagtcacttaggcgatctgaacagcaatttactcagctaattttaatgcctttaaattttctctgggagattctaaatttcttcaggttaggraaaaatgtttaggctttattatctccttctcagtgcccagattagtgccttcccttcaataagtattgaggatcaacttctggttttgtggcccggcaatgtgccagctttcggtagatagtgcctgtggtccccttgttgtgtgtccacctgggcagggctgtggacaaagccatgaatttggtctgcttttctgaaagagaatggccattactcagaagcagtcttggagaactgggccttaagcccctgcattctttcgggcttgactcttgcttcccatgga

SEQ ID NO: 389034 - DNA, 454 bp, Homo sapiens
tttcctgctcctctccctcctcccaccctccacactccaggaggccccaatgtctgttgtttccctctttgcatccatgtgttctcaccatttagctcccacttctatgtgagaacatgtggtatttggttttctgtgcctgtgttagtttcctaargataatggcctccagctcatctatgtcctccgaaggataagatctcattcttttttatagctgcatcgtattcacaatagcaaagacaggaaatcagcctaaatgtccatcagcggtagactggataaagaaaatgtggcacatatacaccgtggaaagtaggctttctgtggtgccacagatcactggaatctgtatatgcccctggaacagaagcacagcaggccatggcagtgtcataggatccttaaggtatcgtttttctagccagaaacctctgaggccagtgacaccttt

SEQ ID NO: 389035 - DNA, 454 bp, Homo sapiens
tttcctgctcctctccctcctcccaccctccacactccaggaggccccaatgtctgttgtttccctctttgcatccatgtgttctcaccatttagctcccacttctatgtgagaacatgtggtatttggttttctgtgcctgtgttagtttcctaaagataatggcctccagctcatctatgtcctccgaaggataagatctcattcttttttatagctgcatcgtattcacaatagcaaagacaggaaatcagcctaaatgtccatcagcggtagactggataaagaaaatgtggcacatatacaccgtggaaagtaggctttctgtggtgccacagatcactggaatctgtatatgcccctggaacagaagcacagcaggccatggcagtgtcataggatccttaaggtatygtttttctagccagaaacctctgaggccagtgacaccttt

SEQ ID NO: 389036 - DNA, 503 bp, Homo sapiens
tggctttttgttctggaggtctcagaagggatgggccaaagacaattccagggttctccgcattcataagattctcgttttcatggagcgtcattctctttagacgcgccatcagggatcagagggtttcacagcgagcaggtgccagtagtttcaatgcttcatgaagggtttccaattactcactaggatccgtagttttggcagattctataaacttacggtagatatcctgcgcaattagtgaaactggcaaatccctgaagtgcagtttcggagttccagtgataatgttggtatcttcatatgtgttcacagaaatagctgctttctcaccatctgtcaaaagctgtcttgacatcagttaagtcactaaatcctgatacatggtatagtccttcagaactggractttcagactcaatctccctgttgcacatgtctgccacccttggctgcttagcagtgtgtgcttttgacaagcattgtaaggtcacagctgg

SEQ ID NO: 389037 - DNA, 434 bp, Homo sapiens
acccagccagtttgaggaagccatctttccaccttcaccaccttgatcattcactcttcagccaagaagatgtactgtccaagccatcccttctcccatgggctctgatttctacagatgatagaggtagacatcttcctgattccaagtctgcaactagctggttcagggtcagagtaagtaataaggccagagcctggtccaaagtcaatatcaggctctggttcagagtcaagattaagggcagagccagaggacaaaggacagaacctcctccttctcatgtgaaaggccagatccacacgcttgcgtatgcatgtgaatccctctgtgcgtgagcatataaatgtgtgtgtgtgtgtgcgtatgtgtgtgtgtttgtgggtgagagccctcttactakaggctatggccaagttgctctgtttttcagg

SEQ ID NO: 389038 - DNA, 576 bp, Homo sapiens
atcacaaacttaaatagtcactgctttaaaatctaggctggctctgactataacactattttatactcctctttcccagccaattaaaattccagcaattacatggcattccagttggctatttttgctatctgcgtaaaggcatgcaatcatcttagaattataggatgtggaaggaaagtgagaatagtgcaaacgcctcttagttaaaaaatacatatattttcttgagctttataaggaaaagaaaaccccatctcatggcactaccaagatgccacagtcwattccaaaacatttgtgaacattagtatgttcacttaaaaaaatcttttgtttttgctgcatttatgcaaaatgcctgtgaagaatctatgagacctttgataagttacttatcttttctgtgcttcagctttctcatctgaaaaatggggacaataataggggtttcattttatccaacaacatggatgtttttgagtagtaaattagcacctctctctttctctacacacacacacacacacacacacacacacacaatgcttagaatagtgattaacacataaaatg

SEQ ID NO: 389039 - DNA, 576 bp, Homo sapiens
atcacaaacttaaatagtcactgctttaaaatctaggctggctctgactataacactattttatactcctctttcccagccaattaaaattccagcaattacatggcattccagttggctatttttgctatctgcgtaaaggcatgcaatcatcttagaattataggatgtggaaggaaagtgagaatagtgcaaacgcctcttagttaaaaaatacatatattttcttgagctttataaggaaaagaaaaccccatctcatggcactaccaagatgccacagtctattccaaaacatttgtgaacattagtatgttcacttaaaaaaatcttttgtttttgctgcatttatgcaaaatgcctgtgargaatctatgagacctttgataagttacttatcttttctgtgcttcagctttctcatctgaaaaatggggacaataataggggtttcattttatccaacaacatggatgtttttgagtagtaaattagcacctctctctttctctacacacacacacacacacacacacacacacacaatgcttagaatagtgattaacacataaaatg

SEQ ID NO: 389040 - DNA, 622 bp, Homo sapiens
catagttctcagcagtagtactacaaacaaaagtaattgatataaaactggaatattttatattttaaaaatgtgagtcaaattaatttaaaaatatatgtccaaccagctcatgtcaaacagatctctcaaatatttaccaagttccttcttggctgcccatcattcttcttgtccttattctaaatgaaattccattttagtggggagataaaaataaaattagatacattataaaaataatamaagattacactttatgacagtgtttgctcaacataagataaaccttcataaaacaagtagagttcaacttagaccttgaaaagcaaagggcatctagatgaaagggagtaaatcagaattggtgaagctatgctgtgttctccacttaaaggcaacattgccctgcttagtgcctttgtaattaagcattgtttcactcctactacttccttattcaattagctggctcacttggtaggaacttgagttttctcttgtcttagaagatttttctttcagttctgccctgcttgtagatagaattttaaaaatgtttggtagtcatttgatctactgatgttaagatgtggagtattttgcaggtaatatccttaaa

SEQ ID NO: 389041 - DNA, 575 bp, Homo sapiens
atctattttataaactttttacagtgtcagttttaaactgataatctataatgtcagttttgaataggagccagaaattttggtatgaatgttcagtygactaacttcaagctaaaagtcccatgatattgtcagtcctggtaggacatgtagctatggaaataaaacttcctgacataaattagaccatagcaaaaagtgcatacagagccaagcagtacgcctgaatgaaggagattaagggaataaatgctctgatgtctatttcttctcttcctctcatctcctgctggtgctttttcttttctttctcttttctttttcttttttgactagaaccaataataagcaagagaactggtaagcccaggagatataatccattgagaattttaaagcagagtctagaagaacagagagggaaaaatcagcacatcaaagtactttttctttttttacttggcccacacctgcctttaagcattcaatgcagtgtttgattgtgaacttataattgagggctaacatctagtatttgccaaaattaatgttcctgtcagcataatctaaccctc

SEQ ID NO: 389042 - DNA, 575 bp, Homo sapiens
atctattttataaactttttacagtgtcagttttaaactgataatctataatgtcagttttgaataggagccagaaattttggtatgaatgttcagttgactaacttcaagctaaaagtcccatgatattgtcagtcctggtaggacatgtagctatggaaataaaacttcctgacataaattagaccatagcaaaaagtgcatmcagagccaagcagtacgcctgaatgaaggagattaagggaataaatgctctgatgtctatttcttctcttcctctcatctcctgctggtgctttttcttttctttctcttttctttttcttttttgactagaaccaataataagcaagagaactggtaagcccaggagatataatccattgagaattttaaagcagagtctagaagaacagagagggaaaaatcagcacatcaaagtactttttctttttttacttggcccacacctgcctttaagcattcaatgcagtgtttgattgtgaacttataattgagggctaacatctagtatttgccaaaattaatgttcctgtcagcataatctaaccctc

SEQ ID NO: 389043 - DNA, 533 bp, Homo sapiens
ataagtaatttcctcaaattaattttaattaattaattacaatttagaggccattaatagacacatgtaccatgtgtcaggaactgtgatagggactgagratatgaggatgaaaaatcatggtcattgccttaaagagccaccataaaatagacaaaaaagccaggtagatgattatgcacaggacaataggtgaagtgaagtctacgggtgaaataggtggcatagaaataagttagagagactgtgattaactgtgtgagaggcttattggtctcatagaggagatgcaacctaaattgtgttttagagtaggcttaccagcttccttcaagatgtgtatttatataaattggtggtgggttggggagcacaagggaagaggaaagtgtcctttggttgagcatttctctcaaggaagaatataaataagtcattgactatcatttgcactctgatctcttaattttaaaattctttatagagtagtttgtaactccaaatccaaatattagaatcagccatgtaacagc

SEQ ID NO: 389044 - DNA, 533 bp, Homo sapiens
ataagtaatttcctcaaattaattttaattaattaattacaatttagaggccattaatagacacatgtaccatgtgtcaggaactgtgatagggactgagaatatgaggatgaaaaatcatggtcattgccttaaagagccaccataaaatagacaaaaaagccaggtagatgattatgcacaggacaataggtgaagtgaagtctacgggtgaaataggtggcatagaaataagttagagagactgtgattaactgtgtgagaggcttattggtctcatagaggagatgcaacctaaattgtgttttagagtaggcttaccagcttccttcaagatgtgtatttatataaattggtggtgggttggggagcacaagggaagaggaaagtgtcctttggttgagcatttctctcaaggaagaatataaataagtcaytgactatcatttgcactctgatctcttaattttaaaattctttatagagtagtttgtaactccaaatccaaatattagaatcagccatgtaacagc

SEQ ID NO: 389045 - DNA, 630 bp, Homo sapiens
ataatatgcaaaggttaatgtaataatatactttctccactactgcaactagtcctaaagtaaatgatygctaatcccataaaacaaataatttatttccttcttcctcttcactgattctttacttttctcatcattggccagaactttggtctagtggcttgcttcctgagggtttggagccctcagttgctttaatgttgccagtttggattttctgcagttgcctataacatttatcaataggcatgaaaacaccaagatgctccagtgaacttggatctcgacatattcctctctgcccacattgtgttacaacaacccctccttatggtattccagatcatgtccaacaatattgtaactcctttctttacctgctgttccactggtataagagaatcctgaccagtctctactttaatggaacccttgctgtgtacacagttaaatgtttccccttgttgcttcccttccccagtcccactcaggagctgggtcttctaatccaacagaaactcaatttatagggtgaggaagtagaaattctgcaaaagggttactgggagcaaaggcgcaggggccaatcctgcttccataatttgtttcttgcactcaagtagtctagct

SEQ ID NO: 389046 - DNA, 630 bp, Homo sapiens
ataatatgcaaaggttaatgtaataatatactttctccactactgcaactagtcctaaagtaaatgattgctaatcccataaaayaaataatttatttccttcttcctcttcactgattctttacttttctcatcattggccagaactttggtctagtggcttgcttcctgagggtttggagccctcagttgctttaatgttgccagtttggattttctgcagttgcctataacatttatcaataggcatgaaaacaccaagatgctccagtgaacttggatctcgacatattcctctctgcccacattgtgttacaacaacccctccttatggtattccagatcatgtccaacaatattgtaactcctttctttacctgctgttccactggtataagagaatcctgaccagtctctactttaatggaacccttgctgtgtacacagttaaatgtttccccttgttgcttcccttccccagtcccactcaggagctgggtcttctaatccaacagaaactcaatttatagggtgaggaagtagaaattctgcaaaagggttactgggagcaaaggcgcaggggccaatcctgcttccataatttgtttcttgcactcaagtagtctagct

SEQ ID NO: 389047 - DNA, 551 bp, Homo sapiens
gtactgttattaccctcattgtatagaagtggaatcaaaggctcagaaagattaagcaaaatttgtcaaggtcttacagtgagtaagtgtgagattacaaccatatttgcctgaatccctagttctaccacacatggttgactacttgctttgattctatcagatggcagtttgaaaaactaatgaaatcatttatttgcatttctgatttcctctgtttaaagtttagggcaatggaatgtgagcatttttttttctactgctaagggtgaaaataaataagcaatgtgtcaaatawaataggcatgaatagagacataataagcccaagtaaataaaataagcatacccagtttatttctagtttctttaaaacgcctgaggaaatacatcatggaggcataaagctgtgcattttcaccttgggtaggcaggaaagagatgctattttattttttgtttctgagactggtctctgctcaggttggtcttgaacttctgacctgggcaagagacactattatgaacaaggtgagcagggctggacagag

SEQ ID NO: 389048 - DNA, 551 bp, Homo sapiens
gtactgttattaccctcattgtatagaagtggaatcaaaggctcagaaagattaagcaaaatttgtcaaggtcttacagtgagtaagtgtgagattacaaccatatttgcctgaatccctagttctaccacacatggttgactacttgctttgattctatcagatggcagtttgaaaaactaatgaaatcatttatttgcatttctgatttcctctgtttaaagtttagggcaatggaatgtgagcatttttttttctactgctaagggtgaaaataaataagcaatgtgtcaaatataataggcatgaatagagacataataagcccaagtaaataaaataagcatacccagyttatttctagtttctttaaaacgcctgaggaaatacatcatggaggcataaagctgtgcattttcaccttgggtaggcaggaaagagatgctattttattttttgtttctgagactggtctctgctcaggttggtcttgaacttctgacctgggcaagagacactattatgaacaaggtgagcagggctggacagag

SEQ ID NO: 389049 - DNA, 585 bp, Homo sapiens
tgtaacagaaataaccaaatttccttctcaaattaattcctttttttcttttcttttcttttttttttttttttgtgagatgaagtctcrctttgttgccaaggctggagtgcagtggcgtgatctcagctcactgcagcatttaccacccatgctcaagcaatcctcccactcagcctcccgagtagctgggattacaggcgtccaccaccatgcctggctaatttttgtattttttgtagagatggggttttgccatgttggccaagctggtctccaattcctgagctcaagcaatacccacctcctcagtctcccaaagtgctgggattacaggcctgagccactgcacccagttgtcaaattaattcctataaaatctttaatcatggtcatataaaatatttctcatccgtatagtttttgtttcactctgattcttctctgaaagcatttgtaaccagctattgcccagaatgattcctgatgtcattgcttaaacaactttgagaccatttcactggactgagtaaggatttgccaaacattagtggagaaattgataggttttaatgaaactgcaaa

SEQ ID NO: 389050 - DNA, 623 bp, Homo sapiens
gtgtattgcaacacaattgcaaagatatggaacccacctaagttcccatcgaccaaagagtcgataaagaaaatgtggtatacatataccatagaaagctactcattaaaaaaatgaaataatgtcttatgcagcaacttggatggagctggaggcccttattccaagtgaagaaactcaggaatggaaaaccaaatatcatatgttctcacttacaagtgggagctaagctatgggcatataaaggattacagagtggtataatggactatggagactcagaaggtggagggtgggaggtgggtgtgggataaaaagctacatattgggtataatgtacactactttggtgaagggggcactcaaatctcagacttccctgctataatattcatctatgtaatcaaaagccacttgttcctcaaaaactattgatatttaaaaaatcaaatttattgaatcacagtattttacacatagaaagtaatagatrgtttaattaagttctttcactttattaatgagaacattggggaataaaagagtgactttctgaaagaccaacagctgatttcctgtattttaaatctgaatgaagagtagttttggttcctaatatagtg

SEQ ID NO: 389051 - DNA, 568 bp, Homo sapiens
tatttgttttacaggtagggagactgaggcatagaaatgttaagtgccttgatcaaggccataaagctaaaaaagagaggccaagattctattcaatcccaggcagtagagatcctaatttctactgtaattgcagattcgttgatgatactcctgactttggtggaggaatcagggcacaggaatagaggaaaccctgagaatggggacctctaattagggactgggaggaagacagtctctagctttcacagggacctaaagcgacagggtagtgaaacaaaagagagacaggcaattccttctgtcttctctggctaaaaawcaaggggagcagaaagccaaggggacaatgctagaaggccaaataaggaacaagtcacaaattcctcattccaaggagaagatgccaactcctaggcaggtccatgtggctagtcaattagggtctcaaggagacacatgcaaagagctttaccattgatctactttctctgagcaggaaagagccagattgaccctaaggcagttggacagactgtcagcagttaaatggaaggatgtgggc

SEQ ID NO: 389052 - DNA, 572 bp, Homo sapiens
tctcttcctactttatgcaaaatatttccagctgtgttcattagattatataatcttgaatattgagaataagatacaatttcttaaattcagcaatgcacaacgaattcttcattaaaagaaatttggtatgcttttagagatgggagacacagccataagaaaatatgctactataaaagaaaatgctcttaattaatactgacatagtgaggactcctctggcattgagaacatttawtattaatgcaaaatgttgttgtctaccatttccttttttctttagatcattagcataggattacaaaattttaaattggatttcaaacccataccaaacagctgtgtcttctattacaaaagacaatgcactcatacatatgtattatgcacttaattaaaactgttggattttcatttttaaaagttctgatgatgtcctgaatttttatagtgatttggatctctggcctgtcatcagtttgcatattttgggtggaaaagtagggtttgggtgaaataagcattccaaagtttatataacgggaggaacatggcctaaaattagcctt

SEQ ID NO: 389053 - DNA, 599 bp, Homo sapiens
taaattggatttcaaacccataccaaacagctgtgtcttctattacaaaagacaatgcactcatacatatgtattatgcacttaattaaaactgttggattttcatttttaaaagttctgatgatgtcctgaatttttatagtgatttggatctctggcctgtcatcagtttgcatattttgggtggaaaagtagggtttgggtgaaataagcattccaaagtttatataacgggaggaacatggcctaaaattagccttaccrtgggcttaaaattcattataggtattaattcctcgtacttctcaaggggttattttctcccttaatttttaaaattctaagtgacatgtatttgttttagaaatatgtagaaaaatataaacaggaaaattaaaattatctataatcttattctgctgagttgaacattacaactcatatatttcttttctataattttattgcataaaatctatatattttatagaatttgaatcacaccatattgataaatatgcatttttaaacttgcactttattttaagtggtcaacattttaccgtgttattaacttgtcttcacaaatatgagtttac

SEQ ID NO: 389054 - DNA, 562 bp, Homo sapiens
ggaacagtggcctgtgcctttagtcccagctattctggaggctgaaatgggaggattgctttagcccaggaagtcgaggctgcagtgagcaatgatcatgacactgaactccagcatgggtaacagagtgagaccctgtctcaaaaaaaaaaaaaaaaaagaaagaaagaaaaaaggtaaaattatttttcattgttaaaaattcattrgaatccaatatatccagtcctgggtgtccaagtgaatttgcttagaactgagatggtatatttactttcttctttggttgagctttttcagtagagatttctcttatctctctttgtctccttttctcctctaggtaaacagtatttccacaattgtcccccttatctctctttgtttcttctgtctccctcactccctttcctaatagtttctctactcattatttctccttttcattcctatttggataccttttcttcctcttctctccacactgctttaccaaaactaccagtcattaaaaggttttaaaattacatacagttgaattcagctttagaagatacatgtt

SEQ ID NO: 389055 - DNA, 567 bp, Homo sapiens
cccacccagattgagggtgggtctgcctctcctcgttcactgactcaaatgttaatctcctttggcaacaccctcacagacacacccaggatcaatactttgtatccttcaatccaatcaggttgacacacagtattaaccatcacacacatccttgggattcagccacttcttaacttttccataggtccattttgagacagaaaataattactttgcaaaacatattcctagactataggtaatggataggatacacaatcacaattactctcagagatttctttttatatttatattatgtacttattttggttgaatgtctaaaatttggataaygtttgagatgtctgttttgttttttctcttcttccatgcatatacttgaaggggtctatacactctctaacccaggtgtactgttttaatgaacctggatgttggcattccaggacaataacagaagccatatttgctcaggcctgaatcagccaaaacagtggataacacagcttttgaaccatctgggtatttgagcttttcctaaacacttggataagaataata

SEQ ID NO: 389056 - DNA, 567 bp, Homo sapiens
cccacccagattgagggtgggtctgcctctcctcgttcactgactcaaatgttaatctcctttggcaacaccctcacagacacacccaggatcaatactttgtatccttcaatccaatcaggttgacacacagtattaaccatcacacacatccttgggattcagccacttcttaacttttccataggtccattttgagacagaaaataattactttgcaaaacatattcctagactataggtaatggataggatacacaatcacaattactctcagagatttctttttatatttatattatgtacttattttggttgaatgtctaaaatttggataacgtttgagatgtctgttttgttttttctcttcttccatgcatatacttgaaggggtctrtacactctctaacccaggtgtactgttttaatgaacctggatgttggcattccaggacaataacagaagccatatttgctcaggcctgaatcagccaaaacagtggataacacagcttttgaaccatctgggtatttgagcttttcctaaacacttggataagaataata

SEQ ID NO: 389057 - DNA, 542 bp, Homo sapiens
cttgacctgtgtaaatgttgtaaaatagtgactaagtgtaataggataaatccaaatttgctgtatatttttccttttatgtgtttaaaaatatttactatttccctgctcttacatggtttccatgtgtggaatacaattccttattctcagtcaaaaataaataacatgtctaaagaaaagataaaataattgtatcaaaagataattgaaaaaatagtgggtagacgcagaatagtcaatgattcagttagtgcaaatattagaaatataataaatgaatttataaaataattttttgttcaagtaattgaagtcaacaatgagctttctggcaaagaatttgataccattaaaaaagaaccaaatggaaattctagatttaaaaaaatacaaaatgactgaaattaagaaatcagtgactagcctgggcaagaaagtgagacccagtcttgaaaaaaaactaaaawattagctgggtatggtggtgcacacctgtagtcccagatcatgtcatccaattttcaaaactgtgtttttct

SEQ ID NO: 389058 - DNA, 584 bp, Homo sapiens
gccactgaagctccatattatccttagtacaatcatgctaacaagaaagaaagcagagagagttggtggagcacaattcagcaggggttctagaagggagtttccagtcaactgagaagctcccatgttcttaagtaatggtacctctacacttatgaatagagaagactgcaactctgatctggcttctgttcttgatcacaggagttttaaccagttccatttctgaacttggccagttcacctctccttaggcaacctggtagtccctggctcctgagaggtcaccatattgatgccaaacttagtgcggcacccgatgagcacagctcactacagcccagaactcctgggctcmagccctcctcccactttagcctcctgaatagctgggattccaggcatgccccaccacacacagcccaggttctgtttcttgcagagacaagtctaggattctaactcaacttcactttgcccaggactctaatacagcttcttacaaacagaaaaatcaagggctctacccacagcttctgaagtatactcacgatgttaagaatagaaatctgtcctaactgtgt

SEQ ID NO: 389059 - DNA, 584 bp, Homo sapiens
gccactgaagctccatattatccttagtacaatcatgctaacaagaaagaaagcagagagagttggtggagcacaattcagcaggggttctagaagggagtttccagtcaactgagaagctcccatgttcttaagtaatggtacctctacacttatgaatagagaagactgcaactctgatctggcttctgttcttgatcacaggagttttaaccagttccatttctgaacttggccagttcacctctccttaggcaacctggtagtccctggctcctgagaggtcaccatattgatgccaaacttagtgcggcacccgatgagcacagctcactacagcccagaactcctgggctccagccctcctcccactttagcctcctgaatagctgggattccaggcatgccccaccacacacagcccaggttctgtttcttgcagagacaagtctaggattctaaytcaacttcactttgcccaggactctaatacagcttcttacaaacagaaaaatcaagggctctacccacagcttctgaagtatactcacgatgttaagaatagaaatctgtcctaactgtgt

SEQ ID NO: 389060 - DNA, 454 bp, Homo sapiens
ttgaactcgggaggcagaggttgcaatgaactgagatcgggctgttgcactctggcctgggcgacaagagcaaaactcggtctcaaaaaaaaaaaaaaaaaagaagaagagagagaaagaaattgtcattaaaagcatgaggtaaatttccaccgagaaaatgttactatttcagttaaacaattgtacacagaacgatggctaaaactgacatttatttctgtattggtcaaattttaatctgtcctttaataaactcctctgctaagaagttgattcttttcttattattgaatcttattaygtctctttgataatcagacaatgtggtataaatcctggttttaggctatcctttaacttaccattaatttgctatggattgtactttggtaagtcttataaaactttcttctatgtaactctgagaactatcttcagatgatcaactatt

SEQ ID NO: 389061 - DNA, 484 bp, Homo sapiens
ggacacagatccaaaccatattaagcatttcaaaaaagtatcaatcttatgttttaaaacaattttaataaatattgtattatgattcttcaaatagtatatgcttatggaaaaacaaaaatgaaaagaattaatacagagaaaattaaaaggcttcacctaaccaattcctttctctccaattgtatttactgctaaatcttccatatgtaccttcaagaaaaattcaattcctttctctccaattatatctactgctaactcttccatatgtacccttcaagaaaatttcaattcttttctttcccgttatatctactgctaactcttccatatgcacccttcaagaaagtwtctgtgaacatacaagcacatacatatgagtacatatgcatactttattttcatcatggtcaccacataaatatctatttcattagctggcttttacaaaaagtagtttacttaaccattctcctacaaa

SEQ ID NO: 389062 - DNA, 565 bp, Homo sapiens
aatactgcagtaaatatccttgtatcttttaatacttgtgtaaattcatccatgagataaattcctagtggtggattttctgggccaaattttatgtgcatgttgaaatttggtagatattgctaaattagtatctaaaaaggttgaaaaatttacatttctgccatgactgtattaaaatgtcagtttatccacactctcatcagtattgtataaaaaaggattctgcactggtttgacattctttttcctccatatatgcctctacatttcttcagcaaaggttaaataactaaaatcaatgttcacatgtttgataagtaaatgaaagtaacccygatgctttcctttaatgttaatcttttagagagaaaaagtaaggggaggcaggaaaaacaccctattgcatttactatgcataggtcagaaaatattcatggcacacagaatgtgaaaacaaaatctaaaaacataagcttgtcttttgttccataaatgtactgtaatatgcactagttaaaataaaatctgtcttgcagagcactgaatttttcagcagcaataa

SEQ ID NO: 389063 - DNA, 632 bp, Homo sapiens
ttattattaattgttgttgttaatctcttactgtgcctaatttataaactaaactttattataggtgtgtataagaaagaacatagcatatatagggttctgtactacctgcagtttcaggcatccactggaggtcttggaacacatccctcctggataagactggactactgtagagtggactgatagcaacctctcctttaacaaaacatatattttgctatacttatttttcagggaaattatacctctttatagccataaaactttctttatacatataacttttaaatttcctaatattctrttaaaataaaacaaaattcactgtttagctacattgtattttgtcactaagttcagtgaaccaaaataaatactaaagattccattacagtatggcttgtaattatagattcagatgtcttattttgaatttatgattgcaaaaacatatgcagtaatgtatactcatctatatatagactaccatgtggtttttatatctctctttggcataataattagatttgatgtgtttcctcttttataaattcctaagaggtcattaggtggaatacagttggccttttgctagaaaggaagtagcttcagcaaataagttttggaga

SEQ ID NO: 389064 - DNA, 598 bp, Homo sapiens
ttcatccttgtctgagaaggaaagatttttcttctttattttgggagggtaggaggaggcagctatgtctttctccagtacataagcagagaaaatcaatttttctccttttttctcttattagaagtttgcctttctagggcattgtaattaggtttcatcacattggccaggggtaacaatcagagtaaagagaattacagaatcattatttgcttcttaagtcaatagcaataatctgtattctatccagaacacctcatgcacacatttaagataaaattaataaagattaacatttaaagttcaaagcctatcctcaccctcttgactgaacttcagtcctcacaacagcttccgaggtcaaaaatccaaactctcaaatgctatttatttatttacttattttgagacagtgtcacattctgtcacccaggctggagggcagtggcatgaacatgwctcagtgtagcctcaacttcctgagctcaagtgatcctttaacttcagcctccagagcagctgggactacaggcatgtaccaccatgcctggctaattttaaaactttttttatagagacaaggtctcactatgtt

SEQ ID NO: 389065 - DNA, 577 bp, Homo sapiens
ttaacctcataacattgtttttcatagatttactttcagtgatacatatgctacagttactatatcaggttaaaaaggagagcacattgaaagaatgaaaaatagtagaaccactttaagaaacaagtttggcagattcctataaagatataatatatatatatatttaccatacaacctagcaattctactccaaaatatttacccaaaagaaatatatccacagaaagaccagcgtgtaaatgtttttaacaattttgttcctaacarccaaaaacatgaaaccacccaaatgtccatctccaagtgaatgaataaacaaattgtgaggtgcccatacaatggaatacggctcagcaaaaagtagaaatgaactactaacacctgcaataaaaccgatgaatttcaaaagcattatactaagtgaaagaagccaaacacaaaaggctatgtactgtatgcttccatttatatgacattctgataaaagcaaaactacagggacagaaatccgagtagctgttgccaaggggcttaaggtgggcaaaaaagactgactactaaatggcttgagaga

SEQ ID NO: 389066 - DNA, 577 bp, Homo sapiens
ttaacctcataacattgtttttcatagatttactttcagtgatacatatgctacagttactatatcaggttaaaaaggagagcacattgaaagaatgaaaaatagtagaaccactttaagaaacaagtttggcagattcctataaagatataatatatatatatatttaccatacaacctagcaattctactccaaaatatttacccaaaagaaatatatccacagaaagaccagcgtgtaaatgtttttaacaattttgttcctaacagccaaaaacatgaaaccacccaaatgtccatctccaagtgaatgaataaacaaattgtgaggtgcccatacaatggaatacggctcagcaaaaagtagaaatgaactactaacacctgcaataaaaccgatgaatttcaaaagcattatactaagtgaaagaagccaaacacaaaaggctatgtactgtatgcttcyatttatatgacattctgataaaagcaaaactacagggacagaaatccgagtagctgttgccaaggggcttaaggtgggcaaaaaagactgactactaaatggcttgagaga

SEQ ID NO: 389067 - DNA, 545 bp, Homo sapiens
gtatgcagcacatagtgatctgctataagagggttcaagatgtgacacactacacaaatcacttaaatcctcagggtggggtctggaatagtctctagagcctcaagtctttcttcctcagtgcgtcagacagtggcacttttgagtgccacttgacagtgtgtccaaagtctctgcaagcagtgaactggagaaacatccagcacttactgctctactataaggaaagaaatactcttatcaactggacatccatatagtagccactgtggatgttccatgtgcccaaagagtatggtgtgcagatcaaagtcaagggcaaaactgtctgcasgtatatctgagggttctgtccattttacaattcaggtgcattttagagtcatccaagctagtagctgcgtcatagccctagcaatgttatgtgtgttctacaaatgaaagatttaccattatttgaaattcttcatttcaaaaagtttaaatggatttgaaatctattataactatcacaagaaatgctatcattagattattaatgaaag

SEQ ID NO: 389068 - DNA, 629 bp, Homo sapiens
attggtttcagggatttaagaaaatgtcttttcagtcattagctgcccaataaactgagcatagattttggtggccacacatgataaagaattcagacttcataaacttaatttaagaaagtcatgaaacaaacaatagaagcagcaacaacagcaagaatgaatagaagaaacaacaataaaccctgaagagtcaggaattatcagatttctagagttaccagtgacatcattttaaatgtccacctttaacaagaaattataaggcatgcaaaaaaacccaagaaagtatggtccatacacaggggagaaaaagcagtcaatagaaagtgtccctgaagaaggccagatgttatattcactaaacaaaggccttaaatcagcaattttaactatatccaaaaaacacacaaaaaagccatgtcttgaagactaaagaaaagtatgagaacaatgtttaactaaacagaatatatcattaaagagatagatttttttttaagtrgaaattatggagttggaaagtaacaataagtgaaataacatactcactagaggggttcaacaacagatttgagcaggcaaaaaaaatgaatctgtgaaattgaagatagattaattgagattat

SEQ ID NO: 389069 - DNA, 576 bp, Homo sapiens
ggcatatgtaaattctactttaccagtattacattaatttaaatggattaaacactccaatcaaaaggcagagaatggattttttttttaatgtgatccaactgtatgttgtctacaagagatatacttagatcaaagatacaaatagggctgggcatggtgactcaaacctgtaatcccagcactttgggaggccaagatgggtggatcacttgaactcaggagttcaagaccagcctgggtaacatrgtgaaactccacctctaccaaaaatgcacatgtgcctgtagtcccagctactcagggaagctgagatgggaggatcacttgagcccaggaggtggaggtagcagtgagccaagatcacaccactgcacagcagcctgggcaacagtgagatcctgtctaaaaaaaaaaaaaagatacgaatgactgaaagtaaaagtaaaaggatggaaaaagcctgtttaaccaaacacaatatatttcaaatatgttgaaagtaaaaagatggaaaaatatataccatacaaacagtaaccagaaaaaagcaggagtggctatactaataccaga

SEQ ID NO: 389070 - DNA, 576 bp, Homo sapiens
ggcatatgtaaattctactttaccagtattacattaatttaaatggattaaacactccaatcaaaaggcagagaatggattttttttttaatgtgatccaactgtatgttgtctacaagagatatacttagatcaaagatacaaatagggctgggcatggtgactcaaacctgtaatcccagcactttgggaggccaagatgggtggatcacttgaactcaggagttcaagaccagcctgggtaacatagtgaaactccacctctaccaaaaatgcacatgtgcctgtagtcccagctactcagggaagctgagatgggaggatcacttgagcccaggaggtggaggtagcagtgagccaagatcacaccactgcacagcagcctgggcaacagtgagatcctgtctaaaaaaaaaaaaaagatacgaatgactgaaagtaaaagtaaaaggatggaaaaagcctgtttaaccaaacacaatatatttcaaatatgttgaaagtaaaaagatggaaaaatatatamcatacaaacagtaaccagaaaaaagcaggagtggctatactaataccaga

SEQ ID NO: 389071 - DNA, 554 bp, Homo sapiens
gataaacacatatattattcatacacataatgatttgggttactttgcttgattcacatgtgtagtcttcaaactaaggattattcttcaaactaaggattagtcttcatatacaaggacatttgtgattggtaatcagtgcagagacttattgaattgctttgatcccagtgggaatggatttgtgcagayccaggtacactcttccttaataattattgtgtccagtggtatacacttacaatttggtgagacaaatgaaactgggcaagtaagagagggaacagagttgagagaaatgcctctcaaatccaatgaggtggtaccattaagcttgtctataaaagctgagtatacctgagagtgatttcctgagtctagaactctcagcaatggatccaataagtgtgtggtggggaaaagcaactaatcctgagaaactgccatgtgaagacactgaatccactgacattgatgtatctcccaattatagttgaagaaatggaggtcgataaatgttaagtaaacttttcaagatcacagagctaggattc

SEQ ID NO: 389072 - DNA, 555 bp, Homo sapiens
atccaatttatggtatttttgctgttacaaccatgaatatgaatgaacagggaatcatctatgttttatatttttatccactagttcttaaaaaaaaacccaaactaaagaataaaactattccccaaaactattcttcccatttgtttctatttcagtgtatatataaaggtcatgcattaatcagacagcttattacytaatttgaacctcagttcatttttataaaatacagactggggacacgtgacagagaaatgcttcttaagttaaagattagtggcaagaactgaaaagcattttttacaacttaaggttttgtttgctttttaaagcttctctggcctttgggagaaataaacacgtcagagttcctggccattctgattgcacacctggacttcatggccaccgccttcttgtgtaaggtcactgacatgtgcagactacatggacttaattcctccaagctgttcctccttgtgctacaaaaatgcactgaccctggaagaaagttcaccatattctatccaaagtccctcaccagctaccagt

SEQ ID NO: 389073 - DNA, 621 bp, Homo sapiens
ctgcagtcctgtgcattgcatgwattctaacatattgcacatttaacgttagttcaaaaacacttttgcctgtcttcttctataccaagaactgtacaattcctggtcctttgcctttaaagagcttaggctcttattggtatgtccatgcttgaactggattttgggacaaaatagtatgcactgtcatcagctagctatgctgaaagtcccatgacttcagtcatctgaatggaggctgtaggacagtagaaccggtgtattgtttacaccaattcaaatgaaccacagtcctaaagtgccccacccaagtcgactatatccagtaaaaatgtgatatcaaatggttacttcttattataggcttagtcctccactcaaaaattatactgcatgctatatttgacttcatcagaaagttatttgcccaagtattttggggattttctctgagataagcttgggcttccagtatgcaaaaatattcatttgtcatactttctgactcagatacgttacatcattttgcctgattgctgagtatacctagaatgttttctcagtgattatcttcaaagttgggcctcatggctggaagtaaaaactgcatttagctacaca

SEQ ID NO: 389074 - DNA, 593 bp, Homo sapiens
catgcatttttctcttcagtgaaacacagggatatgagttctttaaaagaagtagcaagaagggcacaaaaaacagaaatcgtgcttggggggataagaagagagggtggaggaagaagtgcagcgtcttttgggatggcagctgttttattcgcaccctctaagagttcctgaaataattaacatgcactgccattcttgtttttccagtggtgatttcatctagtccctacagaaactgagaattaaatgtcatggttttgtgttttggaaagcaaaactctcccccaaacaagggagttytgaatactgctgagagcatgtgagatctgaaaagtctgcagagtgctaatcattaacatgctacttttggaggcaggactgcccctttctttgctatcacatttccttctatttgatcctgccctgtactggtttactttctgtttctcccactcattaccacgcattcttccataacacatgtgaagtccagaatagcctctccctttcggttggccaactcaacacttcccttacaaactctccttaaaaaaaaaaaaatcatctctgacttattttccaaggacttt

SEQ ID NO: 389075 - DNA, 518 bp, Homo sapiens
ctgtatgattattacgttccgtatctgcagaatgggatgataataatctataatttcatagagttgctgtgaggtttaaatgaaaaaatgtatacaagacaaccagcatcgttcttcgctcaataaattttgcctataaaaaagtggaagaaaagggaggaaggaagggaaggggaaggaaaaaagaaggaaggggggtgaggaagaaaaaggagggaggtacagrggaggaaatatggctgagggaaggaaatatctgtggaatgcctgggtgaacctgggcagtgccagagggagagcaaatctataagccctgcttgtggtttcttgaccagagaatgagaaaaaggcattagatcatttcatgatttcaagcctgggtgaccagaggaatgaactcatatgaaggggccaaggaggctggtactgtagctaccaaagggcaaagacctggaggttctctaaagggaaggaatggatgaaggaagaagggcacagggtgaaagatcaatattgtt

SEQ ID NO: 389076 - DNA, 561 bp, Homo sapiens
aacaaatattaaataccagttatgttttggagtgggcactggattttaaaaagatacaagaagcctaaataagcctaaaaacccacatttctagcagatgtagaaaaagtcacttgtgaaaagatacaagaagcctaaacaaggcctaaaaccccacawttctagcagatgtgggaaaagagagtcatttgcaaggtgaagggctcatggagctatgtattcataatatatgcagaaacttggagctttttgttgctattagtgggttttccctaccctttcttctgattgtatgtagtcatgactaggatgaaagacagatggcaggggagccataagggggacggtttgagaaatagcacaagaaaattcctgtggacaaaagcaaggctaggccttgcctccataagcatttttgctttctttggtctatgcctacaagattgttggagttaattatcaagtgactgttctaactaaaaatgattgttctactgaagacttttcttttgcttttcttctctgccatctattccatctgatagaatttaagcagacccc

SEQ ID NO: 389077 - DNA, 574 bp, Homo sapiens
acaagaatgaagctgagtcttaactatgactggtgagtcacattgtacaatatattagttacatacagttaacctttgctaagtcctgactaagtgccaggcactgggccatggacttcacagacactacctcattcagtccctctaacaactccttgaggcggatatttgacagataagaaaactgtggctcagagaagttaggcaacttgcccagggtcacgcaggtaagtaagtaaagtagtaggaacctgtattcaacctcaagcctgacatctatctgtgagctcttgtattgtcccggatgagtggttttcagcaaaacttttgcgactgaagcaggaaagggacttgggtcctatccatccttcctcctcgcgagtccctgagctagaaaaccaaaaagcagagtttgaaagccactgacragcatgatcttatgggtcctgtacaacactctgattttatgatgctatcatctgtgggcgggaaggtggagagaggtggacccaccacagcagacacaggcgacaggaaaaactcagaatttgtatccagtgttccaggagaggca

SEQ ID NO: 389078 - DNA, 575 bp, Homo sapiens
ttgcatttaactattatgatgatttctaaaaacctttaaagccttggaaaaaactagccccattcctcagcctgtttttttttaatcaaataggaatttgggaaaaaatctaaatatgtgcaatgatctgcttttaaaaaataactatcttgtgaaactcactagttctttatagtatcaaaagtgatttttggctgctgaggcagcatggcacagggactaacaataaggctcaacctgcccagcctcaaatctatacaaaatacctttgtaaccttggacaagtcgcttacctcttaaagcctcaatttctgcatcaataaaatagggataatactgcatagggttattgaggtgattaagtgaaatagtctatatgaaatgtttagactatgtgtggttcacaggatgcaaataatggtggctgttattttcccagcacattccgttttacaaataagaatttgcagaagaccaagcacagtggcatgtgcctatagtcccagctcattggtaggctgaagccaaggattcccttgagccyaagaattcgagtccagcctccgcaacgtagc

SEQ ID NO: 389079 - DNA, 596 bp, Homo sapiens
tgaaatgcgagccaacttcgccccctagaggaggaccagagaattgtttaaaatgagccctcaagggcatttttattgttctgattgataatttgccaaagattgtcagcctgtaattaggtgggactttgaaaggggcttgtctatgagggcattgtttaggggkgtgtgtgtgtgtgtgtgtgtgtgtgtgtgtgtgtgtgtgtgtgtgtgtgtgtgtgtgtgcgtgtgtgccttgttttgtttgagcccccgccctgagatattattgtaaacttagggttgaatactcttatagctataaagaataaaatggtttaaatgccaccaggcttaaggctcacagctgttacatttatagtggacttttttttggccagattttcaccactacgtctagttacaacaaatcattgttagtcttgagtttcctttcactccttggggttgtggcagacgtaaagcccactagaaagcaggaattttcaaccaaaaactggatatgtattagagatcctaaattatagactttagctatgtcacccacattgaaatctttttgatttagtcctgctagtttattcgcatcgtttcat

SEQ ID NO: 389080 - DNA, 596 bp, Homo sapiens
tgaaatgcgagccaacttcgccccctagaggaggaccagagaattgtttaaaatgagccctcaagggcatttttattgttctgattgataatttgccaaagattgtcagcctgtaattaggtgggactttgaaaggggcttgtctatgagggcattgtttaggggtgtgtgtgtgtgtgtgtgtgtgtgtgtgtgtgtgtgtgtgtgtgtgtgtgtgtgtgtgtgygtgtgtgccttgttttgtttgagcccccgccctgagatattattgtaaacttagggttgaatactcttatagctataaagaataaaatggtttaaatgccaccaggcttaaggctcacagctgttacatttatagtggacttttttttggccagattttcaccactacgtctagttacaacaaatcattgttagtcttgagtttcctttcactccttggggttgtggcagacgtaaagcccactagaaagcaggaattttcaaccaaaaactggatatgtattagagatcctaaattatagactttagctatgtcacccacattgaaatctttttgatttagtcctgctagtttattcgcatcgtttcat

SEQ ID NO: 389081 - DNA, 596 bp, Homo sapiens
tgaaatgcgagccaacttcgccccctagaggaggaccagagaattgtttaaaatgagccctcaagggcatttttattgttctgattgataatttgccaaagattgtcagcctgtaattaggtgggactttgaaaggggcttgtctatgagggcattgtttaggggtgtgtgtgtgtgtgtgtgtgtgtgtgtgtgtgtgtgtgtgtgtgtgtgtgtgtgtgtgtgcgtgtgtgccttgttttgtttgagcccccgccctgagatattattgtaaacttagggttgaatactcttatagctataaagaataaaatggtttaaatgccaccaggcttaaggctcacagctgttacatttatagtggacttttttttggccagattttcaccactacgtctagttacaacaaatcattgttagtcttgagtttcctttcactccttggggttgtggcagacgtaaagcccactagaaagcaggaattttcaaccamaaactggatatgtattagagatcctaaattatagactttagctatgtcacccacattgaaatctttttgatttagtcctgctagtttattcgcatcgtttcat

SEQ ID NO: 389082 - DNA, 479 bp, Homo sapiens
tataacaaaaactctccttgtgccctactccctcatccctgaagtaatgctactctgcatttagtatacatgcttccagacttttcctcatttacctacatacatatttacataaagcaaaatagatttgttttgtggttttaaaattttttcttcgcataaagggtaacatcttgcaacttgattctttcacttcatgatatgccttagatttctttscttcccagtactgagagggtcaccccattcatttaaactcctgcataatccatagtatggatgcatcatggtttatttaataattcccccattgatgaatgtttagattatgcttagttttcttgttacatgcattgctgcaatgaaatccctgtacatgcttctttgtgaacatgtgcaagtattcctgtagcatagatatctggaaatggaattcttggggtgaagactatgtagatataaaattttaattgccttca

SEQ ID NO: 389083 - DNA, 567 bp, Homo sapiens
aagggcagagtgaatttggggcagcaaaaacatttattgcttatcgactatcactgcaaggattactcagagggtgatgcagaatcagcacccctctatttctaagatgaccttgaatgtcagagcaaggcacaaacaggttgcagagacatgtggagtatctggagcactgtctcaggatccttcctctcctgctggatgctaaggaccttaaggacaagagctatctttgcttgcaatttatttggcaggccctgcagggctgtgcaaatgattctatttaatttttactacttgtgagaaggcacagagggctttgagagggcacagagggcctcttataatgggtagatatgcacattagctgatacactggaaactttccagcaggcatatccttccaagatgataaatattcytccttgttggagaaattgaagacatttgtacttgcaatctagcttatctagtaaaacaagacaaactaaccagtgatagggagaaacatgtttgcattattttccaaccttgaaaataatgtcagattattggactgagaaccaatgt

SEQ ID NO: 389084 - DNA, 494 bp, Homo sapiens
tttgcgagtggtgtttcctttytttgtaacgttcttccccccaaccatttacctcctactcagacatcacttagctactcaagggaggcctactctgaccccacattataagtcaggatcctttgttatatactcttgaagaactgtattcctctccttagagatttatctttttgttactttgagtgtgtgttattatttgcttctaccacttcacctcagtgaaaagcagagaacatacaagttatttagtcattatcaactgcgctttgtgtaccttgtgggacttaggtactcaatacatttttgttgaaaatgaatcagtctctgaacactctggtgatagatggtatattaccctaaagcttgcctgtaatgtcatacagctatgttaggtctttgttatctggagttccatgtaacttttatacgtagttactatttctgctgtttcaagccatacggaactaaacacaattctttttccatgtaat

SEQ ID NO: 389085 - DNA, 529 bp, Homo sapiens
actggacccaaaggaatactactagtcacttgtgattgttcctttataggtttgaaagatgtctcaggccaacttattggatgcagttttaatctaaaactctatacattgtacccccaactcacagacttcttgtatccatgaaaccctcttctgttttcatagtcttaatatggccccaataaagccatccttttggaggactcagaaaaggccccccacaacctctgcaacacaataattatagttaactcttattgagcactsactgtgcaccaggcatttttcaggtattgattcatttgatcctcaaaattcattagaggtaggtactattataatgacaaggccaaggaacagagattaaacaatttgcccaaattcacattattagcagagctgagattgaagcatagtctggctatggaatctgtattcttaatgaccatgctatactgcctaagattaaccttttacttcagttacagggattgtttttatctctctgaaagtgcccccaataagccac

SEQ ID NO: 389086 - DNA, 412 bp, Homo sapiens
gtgggtgtatatgcatacatacatattcatagagatttatcataaggaaaacacacacacacacacacacacayacacgaacattctattggttctgtttgtctgttctgattaattatcctaatactaacatatttttttcattgacagtttaagaacaatgccatgagatttctggttctagcaatacagtagactaggtaaccagaaaaccttccttctataaacaccttcaaatgctaggtatacactgtaccccttaaatatgcacagttatgtgccaattaaacacaaaataaaacttttaaaagttctgggtaaaacataactgaaatcattttaaatgcataattgagctcttcagaaagaaaactggatctccaggaaattagagtcgtaagatacgggctgc

SEQ ID NO: 389087 - DNA, 412 bp, Homo sapiens
gtgggtgtatatgcatacatacatattcatagagatttatcataaggaaaacacacacacacacacacacacacacacgaacattctattggttctgtttgtctgttctgattaattatcctaatactaacatatttttttcattgacagtttaagaacaatgccatgagatttctggttctagcaatrcagtagactaggtaaccagaaaaccttccttctataaacaccttcaaatgctaggtatacactgtaccccttaaatatgcacagttatgtgccaattaaacacaaaataaaacttttaaaagttctgggtaaaacataactgaaatcattttaaatgcataattgagctcttcagaaagaaaactggatctccaggaaattagagtcgtaagatacgggctgc

SEQ ID NO: 389088 - DNA, 584 bp, Homo sapiens
aattagggatagttgtagtaatagtggtattggtatggtagttagagtttaaatgtcacacagaatacccagaccaccttcccccaagtgccactaaacttattcttctaatcaaacctctgctcaagggatgtcttcttcctctcttggaaagctgtgttccttacctcagaaacagccctccataaacctgcccttaagagaatccttggccaggcacagtgattcacgcttgtaatcccagcactttgggaggccaaggcgggtggatctcttgaggtcaggagttcgagagctgtctggccatcatggtgaaaccctgtctctaccaaaaaataaacattaaaaataaaaaaattagccaggtatggtggtgcgtgcstgtaaatctcaactacttgagaggctgaagcaggagaattgcttgaacctgggaggcagaggttgcagtgagctgagatcgttccactgcactccagcctgggcaacagagcaagactccatctcgaaaaaaaaaaaaaaagagagagagagagaatccttaagacatgccttcttggatgccctctggagaaatgtcaaga

SEQ ID NO: 389089 - DNA, 587 bp, Homo sapiens
ttgtctatacaacttaaaaactgaaaatgcacaggaggtagctagtgctagagatgggctgagaccctatacaaacttacagaattgcagaattttattgctcaaagaaatctgagagattatctaatttgaaccccttattcattttacagataatatgactaaaaactcataaatataattaactaacttacaaatactggagggatagcaggccttcaaatgaatccttgtgtaattcagtcaagttattttctctgagaattctggaaaatgaagaagttatttctagattaaaatgcaaactacaactatttgctacacagaaccatctcctgcatgtggaggaaagctgggtcatggtcacttcaagatggtgggatctgctctgctttcattcaaaccttttcttatattttcctttttgtgtccatctctctccaccaccaccacaaacacacacacacacactcaagcacaccccttgaagagtgggtttcttcccaccaaattctrttatttcatgcctcctctctagatcacaaaatcccttttagaatccaactctgggtggcaccaagatcagc

SEQ ID NO: 389090 - DNA, 567 bp, Homo sapiens
gggactcagcattggcttctgctgttggcaggttagacattcagcagttgcagcagctagatcacccttggtaagtgaaaattcattctgttgagctcacacatagcctccatccctgccatcatggtcactcttcatgtgtccatagtgtctgccatgggtggctattgacagaggctggctgagtcattctgtctatttggttatttagtgcctcctctgcggtgaattacctctgatgggcatagamatgtgatgtaaagaccttcatactttgtcctatcctatatatccatccacatgtctctacctagacctcccgatcttccattatttcttcttccgggctccggaccaatcagacaagccattcactattgcccatgagtccatgcatagtctatccttgggacacttctcttcttacaaagtagctgaccatgtccaccacccaaagctctgcttgtggaaggatcttcccttgccactgtgttttaaggcaattcccgagcaagttgtagtgcagccatcatccagttttgtctttcagccatatattgaactcac

SEQ ID NO: 389091 - DNA, 622 bp, Homo sapiens
ttttaaaatcataaatagacgttgaattctgtcaaatgatttttctgcaactactgagatgatagcatggttttcatccttcattttgttaacgtagtatattgtatttattgattgtgtatgtkgaaccatccttgcatcccaggaataactccaacttggtcatggtgtataatctttttacgcaatgctgttgagtcctatttgctaataattcttttgaggatttttgcatctgtgttcctcagcaatatttccctgtagttttattttcatatagtgcccttatctggctttagtgtgcatgtgatgctaacctcataaatttggaagtgttcctctctttgtaattttttggaagagtttgagaaggattagtcttggttctttaaatgcttggtggaattcatctgtgaatccatctggtcctgtacttttctttattgggaggtttttgattactaattcaatctgcttactcattggtctactcagattttctatttttttcatgattcagtctcggtaggttgtatgtatctagaaatttgcccatttttttccaggtggtccaatttgttggcatagaattgttcatagtagtctcttataatcttttgta

SEQ ID NO: 389092 - DNA, 460 bp, Homo sapiens
tgttatgtgaagacatctcttcagcatttcttgtaaggcatatctagtggtgatgaactctcttagcttttgtttgtttgggaatgtctttatctctctttcatttctgatgaacacttttgctggtagtattctggttggatttttattctctttcagaactttgaatatatcatctcattccttcctggcccacaaggtttttgctgagaagtctcctgacatccttatggtgagtttcttgtatatgatgagtgtcttttctcttactaccttcaagagtctcactttgtctttgacttttgacaatctaattatgtgttttggtgtatttttctgtgggttgatcttacttgagatcttttgagtttcgttaatcagaatgttcwtatcgctcctgagatttcagaagttctaagccattatttctttaaataagttttctgctccgttttctgtc

SEQ ID NO: 389093 - DNA, 590 bp, Homo sapiens
cacaactgcttgcagaccacagctaagaggagctggagccaagttacaaggcaatttcatggtctgctgctgggatcatgggcctatcatttgagactcatgtgggtgtgacccctctcaggtcccttggcagatggttctagtggcagaaccaaggcaaatgaagttgtatctgatacataaggagatgaggctgtttttcacatctgtagcctgcattatggttagtgacactgccatcygagtgcaagcctgttctcaagacagccttcttaggtcttgggctccaccagggttctcagtctccaaccaaggctcacaatagcactttgtctacagatggctgtcaaattcttgttattgtagggggatggggatacaagcagaggacattctatcccatcatttggctgacatccctattaatctgtttaatatgtacccttcttgacatagagtaatactaacttttcataaaattgaaaaaaccactatattttaacgatttatacacctaaattattatttctataatagtaaatttttgcataatgtgtttaagtagatgtatacaactgctttgtcaatca

SEQ ID NO: 389094 - DNA, 553 bp, Homo sapiens
tcgttggattaagtttgctcaattttaagagtgtttacatgtatgtctcagaggaatactgacagataattttgttttcttgtaatgtctttcgttcttctagcaggataatgctggttttacagaatgarttgggaaatatttcctggccttcaattttctggaagagtttgggtagaattgataatgtttctttttaaaatgctcataagaattcattagtgaagtcacctgggcctggagttttctttgtgaggggttttttaattaaaaatttaattgctttaatagatatagggctattcaacttaactgtatctatttctttttatgagatattaggcaatttgtgtcttttgaggaattcatatattttatctaagctgttgaatttataggcataaagttgtagataatattttcttaattccttatctgtggattgtagtgatgtcacctctctcatgcttaatattggtattttggctcttctctttttttcctgatcagttgggctaaatgtttatcaatgtagttttatctttttatccat

SEQ ID NO: 389095 - DNA, 553 bp, Homo sapiens
tcgttggattaagtttgctcaattttaagagtgtttacatgtatgtctcagaggaatactgacagataattttgttttcttgtaatgtctttcgttcttctagcaggataatgctggttttacagaatgagttgggaaatatttcctggccttcaattttctggaagagtttgggtagaattgataatgtttctttttaaaatgctcataagaattcattagtgaagtcacctgggcctggagttttctttgtgaggggttttttaattaaaaatttaattgctttaatagatatagggctattcaacttaactgtatctatttctttttatgagatattaggcaatttgtgtcttttgaggaattcrtatattttatctaagctgttgaatttataggcataaagttgtagataatattttcttaattccttatctgtggattgtagtgatgtcacctctctcatgcttaatattggtattttggctcttctctttttttcctgatcagttgggctaaatgtttatcaatgtagttttatctttttatccat

SEQ ID NO: 389096 - DNA, 557 bp, Homo sapiens
cagcgcatccattccaaaatctatttttttattttttattatggccattcttgcaagagtaaggtggtattgctttgtggtattgatttgcatttccctgatcattagtgatgttgagcattttttcatatgtttgttggccatttgtatatcttctttcgagaattgtctattcatgcccttagcccactttttgatgggatcgtttctttttttcttgttgatttgtttgagttcattgtagattctggatattagtcctttgtcggatgtagagattgcaaagatttttcccactctgtgggttgtctgtttactgtgctgactgttcyttttgccatgcaaaagctttttaatttaattaggtcccagctatgtatctttgcttttattgaatttgcttttggattcttggtcaatgtctagaagggtttttccaatattatcttctagaatttttatagtttcaggtattagatttaagtccttaatccaccttgagttaatttttgtaaaaggtgagagatgaggatccaatttcattctcctacatgtgg

SEQ ID NO: 389097 - DNA, 589 bp, Homo sapiens
gtgtctttccccactttatgtttttgttgctttgtcaaagaccagttggcttaagtattagggtttatttctgggttctctgctctgttccatttgtctatgttcctatttttatactagtaccatgctgttttkgtgactatggccttatagtttgaaatcaggtaatgtgatgcctctagatttgttctttttgttcagtcttgctttggctatgagagctcttttggggttccatatgaattttaggattttttttccaatcctgtgaagagtgatggtggtattttgatagagattacattgaatttatagattgcttttggcaatgtggtcattttcacaatatcgattctacccatctatgagcatgggatgtgtttccatttgtttgtgtcatctatggtttttttcagcagtgttttgtagttttccttctagaggccttccaccttggttaggtatattcctaagtttgttttgttttgttttgttttttgcagctattgtaaaaaaggttgatttctttatttgattctcagcataatcgctgttggcatatagcagagctactgatttgtgtacatta

SEQ ID NO: 389098 - DNA, 589 bp, Homo sapiens
gtgtctttccccactttatgtttttgttgctttgtcaaagaccagttggcttaagtattagggtttatttctgggttctctgctctgttccatttgtctatgttcctatttttatactagtaccatgctgttttggtgactatggccttatagtttgaaatcaggtaatgtgatgcctctagatttgttctttttgttcagtcttgctttggctatgagagctcttttggggttccatatgaattttaggattttttttccaatcctgtgaagagtgatggtggtattttgatagagattacattgaatttatagmttgcttttggcaatgtggtcattttcacaatatcgattctacccatctatgagcatgggatgtgtttccatttgtttgtgtcatctatggtttttttcagcagtgttttgtagttttccttctagaggccttccaccttggttaggtatattcctaagtttgttttgttttgttttgttttttgcagctattgtaaaaaaggttgatttctttatttgattctcagcataatcgctgttggcatatagcagagctactgatttgtgtacatta

SEQ ID NO: 389099 - DNA, 542 bp, Homo sapiens
ggtccttccctactcaccctggtcactgaagacaaagggcatatactcttgggagttctagggccctgcccaccgcctgttcctccccgtactaccatagctgatgctctctggaaagcaccacctcctggcaggaggcccaccagcacaaaaacagaacattaaaccaccaaagctaagaaccctcacagagtccatttcactaccctgccacgtctgctggaacaggtgctggtttccatggctgagagacccacagacagttcacatcataggatgcygtgcagacaacccccagtaccagcttagatcctggtagacttgctgggtggctagatccagaagagagataacaatcactacagctcagctctcaggaagccacatccataggaaaagggggagagtattacttcaaaggaacaccccacgggacaaaagaatctgaagaacagccttcagccctagaccttccatctgacagaggctacccaaatgagaaggaaccagaagaccaactctggtaatatgacaaaacaagg

SEQ ID NO: 389100 - DNA, 557 bp, Homo sapiens
tccttttctttctgcttctgtctctacctctttctgtatctgtttctctgtttctrtcttcttttctctttctttgcttctgtatctctctcctagaagagatgaaagctcaggacatacatttctttccaagttctcaggtgatacatggcagagatttgagaggagaatatctgaaacccatttgaaggagcaaagttgttcttgtctgtagatttttaaaaaaatttttaatggaatttgcaggtccaggccatgattttctgaagctgaatttatcaacttacaggttttcacatttcttaatagatttgaccaaagtcctggtaggtaaagcaggcatttgcttaataaaaatgtatgatgtggtgtaggctgtgtaagcagacttttgttttattattgcatttaaccactccaacgcccactgaattcctgattatttctgttgtggggatgccaggtatttattatattagaaggatatgagattaggcacgacagaactcctttaggagtaagaggcttaattaggttccagaattgtcctggtttag

SEQ ID NO: 389101 - DNA, 616 bp, Homo sapiens
gtctggcagtacacaatgtctctgtgaatgtgaacatagaaccattttgggacgtaataacctttgcttggatttttctctttagtaatagtgaggtttaaaatgtgaaccacccatctatattgtgaattaaccaagtacctatgctggaatatccagatttcactggaactcctcactaaagctttcctttgtgtatttgtcaaaaatatcctgattaactcagaaataaaagcaatgactggagcccttaagtcatcattattttatcttttagagtaaagcacctaattgctgtctgaccattcaggccgtggamtaaagcagctaatgatatggctcctggaaacagtacaggcctatgtctttctagagtaatatcacattctcaatagagccatcaataaaacaatcatttctcagcactgaagactgaaaaacctgttgtattacactttccaatctcttcaaaatcacatttaaaaaatccattttgttgcaagatgaccaatctcatctgatttataagctgtggcctcagaggaaatatggaatacttggagttggagccaaggaacaaatgtgcctggttggaagcagacacttcctgaatttc

SEQ ID NO: 389102 - DNA, 616 bp, Homo sapiens
gtctggcagtacacaatgtctctgtgaatgtgaacatagaaccattttgggacgtaataacctttgcttggatttttctctttagtaatagtgaggtttaaaatgtgaaccacccatctatattgtgaattaaccaagtacctatgctggaatatccagatttcactggaactcctcactaaagctttcctttgtgtatttgtcaaaaatatcctgattaactcagaaataaaagcaatgactggagcccttaagtcatcattattttatcttttagagtaaagcacctaattgctgtctgaccattcaggccgtggactaaarcagctaatgatatggctcctggaaacagtacaggcctatgtctttctagagtaatatcacattctcaatagagccatcaataaaacaatcatttctcagcactgaagactgaaaaacctgttgtattacactttccaatctcttcaaaatcacatttaaaaaatccattttgttgcaagatgaccaatctcatctgatttataagctgtggcctcagaggaaatatggaatacttggagttggagccaaggaacaaatgtgcctggttggaagcagacacttcctgaatttc

SEQ ID NO: 389103 - DNA, 422 bp, Homo sapiens
acatctgaatactaatgttgaatgtaaattggcagaaatgctccactaaaaagacacagaatggcagaatggataagaattcaccaactaagtctctgctgtcttcaagagactaacctaacacataagggctcacacaaacttaaggtaaagggatagaaaaagatattccatgcaaatggacaccaaaagtgagcagaagtagctattcttatatcagacaaaacaaactttaaagcaatagcagttaaaaaaaaracaaagagggacattatttaatgaaaaaaggccttgtccaacaggaaaatatcacaatcctaaatatacatgcaactaacactgcagctcccaaatgtataaaacaattacttttagatctaagaaatgagatagacagaaacaaaataatagtgggggacttc

SEQ ID NO: 389104 - DNA, 602 bp, Homo sapiens
tctttcctctgttggaacctgctggattgagccactactgctgatgtgaatgtggtatattctctgaatgtactgtgacagaaaggagagaattgctagattagatgttatgtgtaattcatcccgcagttttagtaacatgactactctgtacataagtctatkattctaagtttattattctaagacattattgccctgaaaccacagccttccttcacagccacatactcacaaacccatggtattgatcacaacaaagatgaaactacaaaaacagacggaataataaaaatctgtcttttctcctggaaaaacagtttaaagtgtctactctttcctgagtggatgagttggcccttcttcgcaaatatatatgcaaaaaaaaaaaatcacaaaggaaagtaacataatgatccacagcacagaagatttagatgtacaatatacagtggaaattgaagaagcctatgaaattgcagtaaaggtttaaatagagaaaaaaaaaatgtttgggaagaagaaacaggttagaataataagctacatcctaagaaaagccagaattgtactcaggacagagactgggcaaaaagctgttc

SEQ ID NO: 389105 - DNA, 602 bp, Homo sapiens
tctttcctctgttggaacctgctggattgagccactactgctgatgtgaatgtggtatattctctgaatgtactgtgacagaaaggagagaattgctagattagatgttatgtgtaattcatcccgcagttttagtaacatgactactctgtacataagtctatgattctaagtttattattctaagacattaytgccctgaaaccacagccttccttcacagccacatactcacaaacccatggtattgatcacaacaaagatgaaactacaaaaacagacggaataataaaaatctgtcttttctcctggaaaaacagtttaaagtgtctactctttcctgagtggatgagttggcccttcttcgcaaatatatatgcaaaaaaaaaaaatcacaaaggaaagtaacataatgatccacagcacagaagatttagatgtacaatatacagtggaaattgaagaagcctatgaaattgcagtaaaggtttaaatagagaaaaaaaaaatgtttgggaagaagaaacaggttagaataataagctacatcctaagaaaagccagaattgtactcaggacagagactgggcaaaaagctgttc

SEQ ID NO: 389106 - DNA, 646 bp, Homo sapiens
agagcacagatgactgttgttaagagagagatgtgttactgaggaagataagcagcagccccttgccaatccttagcagcagcttgaagcgaaggggttgagttgcaggatgggcactaaacgcagatgtgagagaaagagcaatggacttggaatcatgactttggggaattcatgtcacttttttgggacttagtttcttggtttataaaatgaaraggctgggctctaaagttcatcccagggatatgtaggttttggtaagagactgggaatggcaagttctgggagctggaattgcttagaaggagtggtctgtgtaagcaccctagtaagaagcttgggtcagcaggagaaaatgtgagggtactggacatctctaagggaaagtaaggggagcatagcaagggcgtggagagtccttgaagccttacctcatagctgtgctaagggtcatccttgaattgaagattgagcagaagcaagggctatttacagttattattcaacaaacatttatggagtgctttttacattaaagatactgtagtaagcacagtaaggcaataaggacaagtgatccagagattcactacttaaaagcagacaaacacaaatgctctaagagcagagtgtgatgagtacc

SEQ ID NO: 389107 - DNA, 588 bp, Homo sapiens
ggtaccagaaaatttaactttgaattggtaggccatacaatgaactcgacaatactttttaagctcaggaagggactggatcacaaaatatcagctaagccaaacagaggtgttcactcaaccccttccatcatctctgtgtccttccataggaaaaggtctataaagtgcatttctctgagacatggagaagcataacaaaggaaagtactcttcgctttcctctggctgtaagaaggtagaayatctttttgtgaatggtttaaagttaaggaaaatagatgttgtagattcaggattctcctttgctccatgcaaataaaggaatgacgtgaatagattcttggatattttacatccattgatggacacagatttggggtacacagatttagatacaaatatctgctattcccctttctcagtgtgtgctttaggaaaaaagttgcttaatctctctgaatcccagtttcctaatctgtgaaatggagataataatagtaagggaggagaccacccctcatattgtcttatgcccaatttctgcctccaaagaaagaagaagtaaaaactaaaaggcagaaatga

SEQ ID NO: 389108 - DNA, 604 bp, Homo sapiens
cgagggtagaatttcagtgactttaccaccttagtaaaacaagctctccattcttgacagttctgtcaagggaataatataatgagaatgtttgtctaaaccttttctgggttctctgtgcctcatcactaaagtctacaacaggaaaaacaaagtcgtttatgaggttcctgcctatccttctattgtcactttttctttaagcttcttactggaccgcaaactctttgggggaaggatgtatgtctgattcatgtaacccaaatctttgaccattcaaaggccctcatctgtgtaatgataggacttcrgatagaatctttttatgttgccgtattagagaaattaatgttagttgcagtaacaaacaacctcaaaatctcagtggtttaacacaataaatgtttattctttgctcccatcacaactcaaaacagttctggcagctcccctctaagtgatgactcagggattcaggcttcttctatcaatggagcttgctgtcttctacagcctttttggagtcctctgcatatcatctgaattgagctgaccagcaaacaaagagagattaagcagaggatgcatgcagattttagggtcc

SEQ ID NO: 389109 - DNA, 563 bp, Homo sapiens
gaatttctatacatcagtaacattcaaactgagagccaaatcaagaacacaatcccatttataaaagccacayacaatataaaatactgaggaatacatctaaccaaggaggtgaaagatcttcataagaagagctgcaaaacgctgctgaaagaaagcataggcaacacagggcctggtgcagtggctcacacctgtaatcccagcactttgggaggccgaggcgggcagatcacctgaggtcaggaatttgaggccagcctggccaatgtggtgaaacaccgtctctactaaaaatacaaaaattagccaggtgtggtgcaggcacctgtgatcccagctacttgggaggctgacgcaggagaatcgtttgaacccaggaagtggaggttgcagtgagccaagattgtaccactgcactccagcttgggtgacaaggatgaaactccatctaaaaaaataaaaaagaaaaagaaagaaagaagaaagaaatcatagacaacacaaacaaatggaaaaacattctatgatcgtggattggaaggatcaacatcattaaaatg

SEQ ID NO: 389110 - DNA, 614 bp, Homo sapiens
tagtagatatgaataatctatagatcttacgcacaatatgaagactttggtaaattgcattgtatttgggattcatgctaaatgagtagattttagctgctctttcaccaaaacaaagagagaatggatagctatgtgagatgatgaatatgtgagttcacttgactatagtaacctttctgctatttatatgtaatcccataacaccatgttgtaaaccttaaatatgcacaataaaaacatattttaaaaataagattaaaaatataggcaataaaatatattttaaaaatgatatttaaaaaatgatctgttcattcattcatacatactagaatgtaatgagaatgtaacakaatataaaatattccataatatagtctgagattctaaattgcaaaaaacctttaagaaatttctactagttaagttttggttagtgtcaaagaggatatttgataattatctttaaaagatattaaaatatgtctccttttccaactacatatctatgtgaagccagcttatcctcatatatttcaaccaaaaaacacattaccacatattgccatgcagacacagatatgagaaaccaactaccttccattaagcca

SEQ ID NO: 389111 - DNA, 589 bp, Homo sapiens
atgaataggtcatacccaggttataaaaacatttctgaatttaatcctcttgctaactacagtatatacccacggccatcaggcacttcacttaaagatatgtgtgttttctaaattcaaaaaaatgtgatttcaggtgtttataaagctcatattaatatattttaataaattaactcattcggtagacttgaaaaagaatartcttattttggtttgaccttaatctacatattatgttttagattcaccctaacttaacatggaaatatcataatttggtctttatctaacttatataagattggttgttggctaaatatttttgactcatatcattgtaaatatagaacatttttctttcactctgtactttctgagattttttctcttaatccttaattaaaggaagtatctttattgccagaaaatcttcttgtccctagttttctttattccaaaaaaagtcaaaagagggtttatgatttaaaggcatttggtagaaaagagatgaaaggggaagaagtaaatatcctgtgtttatcgcatatttttaaggtaacaaaacaacaatatattttgtgtatta

SEQ ID NO: 389112 - DNA, 589 bp, Homo sapiens
atgaataggtcatacccaggttataaaaacatttctgaatttaatcctcttgctaactacagtatatacccacggccatcaggcacttcacttaaagatatgtgtgttttctaaattcaaaaaaatgtgatttcaggtgtttataaagctcatattaatatattttaataaattaactcattcggtagacttgaaaaagaatagtcttattttggtttgaccttaatctacatattatgttttagattcaccctaacttaacatggaaatatcataatttggtctttatctaacttayataagattggttgttggctaaatatttttgactcatatcattgtaaatatagaacatttttctttcactctgtactttctgagattttttctcttaatccttaattaaaggaagtatctttattgccagaaaatcttcttgtccctagttttctttattccaaaaaaagtcaaaagagggtttatgatttaaaggcatttggtagaaaagagatgaaaggggaagaagtaaatatcctgtgtttatcgcatatttttaaggtaacaaaacaacaatatattttgtgtatta

SEQ ID NO: 389113 - DNA, 585 bp, Homo sapiens
ttgctgtgagggttaagtttgcctatcatatttctgccttctagaagtgctcaatatatattagttatctgtcttcatgatgagtaatgtgtttgcctctatgcccactagaaagagatctcctttgttagaaaaacccccgattgttgcccaaggaaccaccaccaaaatcttgtgcaaaaatatatgcttttattactcaaaatgtgaagacttattagaaaagggagcagccccctmtataaagtccccttactattctcagaagacttcttaaaaatgtgtattagtctaggcattgatgcaggaatacaaaagaaataaaataggctgtgctttcagggcacttctctaattagacaagcagatacagtatttacacagataataccagggcacgaaaggagaagaaataagattttgagataggtttgtccaaagagctttacagtaatgcaaaatttcacgttaatgaccttgcttttaaatatctgagcaattgcaagatcagtgacagttgttttcagtctgataaaagaacagaaccacaaaaggattttttttcggaaatcacaccataacggc

SEQ ID NO: 389114 - DNA, 585 bp, Homo sapiens
ttgctgtgagggttaagtttgcctatcatatttctgccttctagaagtgctcaatatatattagttatctgtcttcatgatgagtaatgtgtttgcctctatgcccactagaaagagatctcctttgttagaaaaacccccgattgttgcccaaggaaccaccaccaaaatcttgtgcaaaaatatatgcttttattactcaaaatgtgaagacttattagaaaagggagcagccccctctataaagtccccttactattctcagaagacttcttaaaaatgtgtattagtctaggcattgatgcaggaatacaaaagaaataaaataggctgtgctttcagggcacttctctaattagacaagcagatacagtatttacacagataataccagggcacgaaaggagaagaaataagattttgagataggtttgtccaaagagctttacagtaatgcaaaatttcacgttaatgaccttgcttttaaatatctgagcaattgcaagatcagtgacagtygttttcagtctgataaaagaacagaaccacaaaaggattttttttcggaaatcacaccataacggc

SEQ ID NO: 389115 - DNA, 574 bp, Homo sapiens
aggattattatattttataaattttatctttttttgtcatcttcacattacaaacaaggttttagctaatgtaatgttattttaatcatatcatgcaacattgtcagtaatgtagrtgtgattatagttcattttttcttctccaattatggatgatatcaacaataataattctctggagagaaaaatgaagccttctcaaagtatgaagtggtagttgtcatttaacttttcgactaagtagtggggtggaatataatgtttaataaccagttatatagatttaaatttttctcaaatgatgatgcaattgagtgacagccctgactttcatcagagtcaatttttgccccatccttgtttcagagatagctctttctgtatgcaatgctaatttcctaattaaatattatgaggacaaaattgtggtgaagtaaaaattgcacagtatttagaactccaatatctgaaatacaactcagttttgtgatttttctaacaaatccaaatatttctaagccatagcttcttgctttgtaatattggggatgctggggcttactttacctgtttg

SEQ ID NO: 389116 - DNA, 608 bp, Homo sapiens
cacagtatttagaactccaatatctgaaatacaactcagttttgtgatttttctaacaaatccaaatatttctaagccatagcttcttgctttktaatattggggatgctggggcttactttacctgtttgctttggttctcaagtaaaatattatcaatttatcaattcataatttttttctttattttaaattagcttattcaatctatgtttactgaatacctatattgtaacaagcaccatatgaagttctaggaaaactaatatgagacatctactgaataacctaatactaattaatattataaattcataatcttagaggttatatattaaaaggcctaattttttcccacttagggcaatggagagcataccactatcattaaatggattatcctatggttgatataatgtaacccaaaaatttaaactaattgtatttctctggctgtaaaaaaaaaaatagaaaataaaatcacctgagaattccacgaaatactttctgctctcttataatgtgtcaaagagtttagtgaaagatttttaatgcacttgagattttgttaaacaaatttgtaacaattgggcagccatcccacaaaa

SEQ ID NO: 389117 - DNA, 608 bp, Homo sapiens
cacagtatttagaactccaatatctgaaatacaactcagttttgtgatttttctaacaaatccaaatatttctaagccatagcttcttgctttgtaatattggggatgctggggcttactttacctgtttgctttggttctcaagtaaaatattatcaatttatcaattcataatttttttctttattttaaattagcttattcaatctatgtttactgaatacctatattgtaacaagcaccatatgaagttctaggaaaactaatatgagacatctactgaataacctaatacyaattaatattataaattcataatcttagaggttatatattaaaaggcctaattttttcccacttagggcaatggagagcataccactatcattaaatggattatcctatggttgatataatgtaacccaaaaatttaaactaattgtatttctctggctgtaaaaaaaaaaatagaaaataaaatcacctgagaattccacgaaatactttctgctctcttataatgtgtcaaagagtttagtgaaagatttttaatgcacttgagattttgttaaacaaatttgtaacaattgggcagccatcccacaaaa

SEQ ID NO: 389118 - DNA, 592 bp, Homo sapiens
catttgtataattttatcatttcaagaatgttatataaatggaactatgcaatatgtaaccttttggattgcattttttttcccactcagcatgattctatggagattcactgaggttgttgtgtacatcagttgcttattccttttctgtttttgagtggtgttccctggtattgatatactgctgtttgtttaaccgtccaccattaaagacatctgggttgtttccagtttgaagctgttataaataatgctgctataaacattcatgaacaggtttttgtgtatctttgtttctctatagyagaagcacaggagtgcagttgctgggttccatggtagatgcatgtttagtctttttgcttgtttattgttatttttgtctttgtttaaataaactctcaaggctggtctgaaggtggtgagttatttcaagtgattgttcacagtcagttacagattgaactccttgttctactctctccccttgtcttactactgcacttgactagtcataataaataaataaataaactaccaaactatttttttccgtagtagctgtatcattttacattcctaccagcaaagt

SEQ ID NO: 389119 - DNA, 568 bp, Homo sapiens
cttgtcccaagtggtaaggatattttatgtttttacgtgtcactggattcaatttctaatattttgtttagaatgtttgcayccaagttcatgaaagaaactgatctttttaatttttttcttacattgtccttgtgaaagttagtgtcaagattatattggtaacagtcaaatatattttctttttctgttctctgaaagtcttttttaaatttggtgttataaattttttaatgattggcagaaagcaccactgagccaacttggtcatttgttttctttatagaaagacttaaaattatatagcaaccagtagatttagaaacatttatattttctgtttttttcttattattttgctaggggtgatatggcatttaagcgttaatttcataatcgctgtgttctttactctgtattgtatatatcttagaagaatcatatggccatttaaaacatattgctgacaatcatgtatatttaaccattggaaaatttcatctatttaacatttaatgttattattgacaaattatttggattatatctaccctgttattatttattt

SEQ ID NO: 389120 - DNA, 562 bp, Homo sapiens
aggctggtctcgaacttctgacctcaggtgatctactggcctcggcctcccaaagtgctgggattacagcatgagccactgtgcctggcccctttttcatttactcacatgttcctgagaatgactcttcctttaaacatgttgattttcataatgcacaatgtctgtatattaactttccctctctttatacttgtaacaaatatatctctttggaagaagtcatatacttccatgccctattttagttacatcccccacacacgctctctatgacagaggtcccccaacccccggggccagagactggtaccaggctgcctagcaggaagtgagtggcgggcggtcaagtgaagcttcatttgtactgacagtgctcccgactctggcatccacttcctgtcagatcagcagcagcactggattctcacaggcgctcgaaccctaattcgatytgtgcatgggagacatctaggttgtatgctctttataagaattcagtgcctgatgatctgtcactctttcctaccactcccaaatgggactggctagttgcaggaaa

SEQ ID NO: 389121 - DNA, 608 bp, Homo sapiens
ttcctatgtgcatatataaacaaatatttcaacagaaatatgaccatatcaacatactgtttgaaacagttaatatgccagtgaaactatsctgctgtgtcccagtagaaaggacacttttcagattctagcagtgcttattttttattactcgctctactgaccttcctctttgctagtgtaccatatctcctttgtgaattctatacaacttcaggctactctgggacttcccgagataatcccattcacaatcatggttatagttaccattttaaggtgattactcactgaatggttctctgatcctgccaccctgcatctgtgtgtgtgtgtgtgtgtgtgtgtgtgtgtgtgtgtgtatctcattgttgtaactcccaaatgtctaacagatgaggcaactgggattcaatataataaaaataagacttatcctcttacttataaaaatgctttcctgtgaatatcaggcctaactcagattactcccaacttactacacggtatgtgagtgaggttgattctatttcaaaaacctacatatatttagtccctctttttcacaggcattgcttataactcagctcagctacgatctcacctgg

SEQ ID NO: 389122 - DNA, 608 bp, Homo sapiens
ttcctatgtgcatatataaacaaatatttcaacagaaatatgaccatatcaacatactgtttgaaacagttaatatgccagtgaaactatcctgctgtgtcccagtagaaaggacacttttcagattctagcagtgcttattttttattactcgctctactgaccttcctctttgctagtgtaccatatctcctttgtgaattctatacaacttcaggctactctgggacttcccgagataatcccattcacaatcatggttatagttaccattttaaggtgattactcactgaatggttctctgatcctgccaccctgcatctgtgtgtgtgtgtgtgtgtgtgtgtgtgtgtgtgtgtgtatctcattgttgtaactcccaaatgtctaacagatgaggcaactgggattcaatataataaaaayaagacttatcctcttacttataaaaatgctttcctgtgaatatcaggcctaactcagattactcccaacttactacacggtatgtgagtgaggttgattctatttcaaaaacctacatatatttagtccctctttttcacaggcattgcttataactcagctcagctacgatctcacctgg

SEQ ID NO: 389123 - DNA, 418 bp, Homo sapiens
aaggaatctttacacacaagctttccaaatcaactgctaatgacaagttcatgatttttaaattgagggtttttaaaaatgtttctgcttgtttgggtgagagggtataggacaaaatggcacagaaaaaaaaaccagttatttttctactacctgaagtaggttaaaaacatataaaatctaatataaaatactaaaattagtgtactgattattcaggtaaattaatttatttcaaaacaatgagggctctattttattatttactttgygggttgtgtttcaggaccaaaaagaaacttgcatttgttagatgacccctaatataaaatatttgtacagatatagaccatgattgtatacaaactctagataattagcatttttgtcatagccatggtgtacctcatgcctgaac

SEQ ID NO: 389124 - DNA, 562 bp, Homo sapiens
gcaaaatagcctcaaatgtaacagctcttgattagaataaatttgttactagcctctatttctgcctaaaagaggaaagtatgaactttctttagataaagatcacttactctgaggcttctacataatttataccaatgkctgcctttaaataaaaatgactaggtaaggcaagtaacagaattacgttaccgaacaccaaggggtaaaaaagatagtggatactaatacacaggtggttcagatattggaattaggtgacaaggactgtatgtgactatgatacatttgttctagataataaaaagaaaaaagttcaaaattgctgcaaatatataaatttaaaagactgatgttatacctttaacagcagagtagacacagtagaagagagcattaatgccctggaagatgtttccctgagaaaacatgcaaactgaatacagagacagaacattactgtagtttaataaagttcaagaaatgtggaagtcagtgaacaggtctagcttgcatgttattaaatatgtctgtattaaaattgtctggaatacatactgtg

SEQ ID NO: 389125 - DNA, 614 bp, Homo sapiens
tcttttaatttttatcaagaagaaagtttttacttcaacttggttaaatttattattatttatgtttttatgaaaaatgtaaattacatttttaaatgtaatatttctattgtttaccgtcaacatagtaaaatacaatttatttctggataatgatcttgcatgctacaatgttgctaatgtattgattatagtagcttaatattcatgttactattctagataagcaattttgcactctgaataaataaactttatttaatttataaactttataacttgcatgatggactaattgccatttttatgctgactaggactttgaggatcaagttgaatataaatgaagaatggacatcttgcctgggctaaatttsaagagaaataagtttaatatttcacctttgtgtattacattagctatatgcatgatgatacctaaagagttgttgtcagattgtttaaatcatattaaagaaattcaatttctagtttcctgcgagttttaactatggttagacattgaattttgtcatctatttttctgtattttctgaaataatgtccttcatttttttacaagaatgaacatttggaaaccaatattatactat

SEQ ID NO: 389126 - DNA, 605 bp, Homo sapiens
tctctgcttttgatcttgccctcttacagtgtatttcagtacagcagcaagagtattcttttaaaaatagttaatgtcacttctccgttttaaattttccaatggctcccagtttcacttggagtawatcctaaatcttttcaatggcctacatggatctacatgatctcccagtccttattgtctttttgacctagtattttacaactgtccttctccctggcagctttccagctccagttgccttagtgtcccatgtgcactgcggtaggctctttataactgctattactccgcctggattctttttcccccgatatatccatgaagatctcttgcattgctttcagaattttcctcaaatgtcacctctcctaaccatccaacaaatattataaaaatcaagtgtccactacctttgttatatattcattcctattctgctcctttgttttgttttccctttatcttagtatcacttaccagcctgaatcagaaactccatacatggtagatggtattcctcccctcttatttggtgccactcactggggaacagagctagtggagaaatgctctagcattctgtctttcttagtagacaa

SEQ ID NO: 389127 - DNA, 605 bp, Homo sapiens
tctctgcttttgatcttgccctcttacagtgtatttcagtacagcagcaagagtattcttttaaaaatagttaatgtcacttctccgttttaaattttccaatggctcccagtttcacttggagtatatcctaaatcttttcaatggcctacatggatctacatgatctcccagtccttattgtctttttgacctagtattttacaactgtccttctycctggcagctttccagctccagttgccttagtgtcccatgtgcactgcggtaggctctttataactgctattactccgcctggattctttttcccccgatatatccatgaagatctcttgcattgctttcagaattttcctcaaatgtcacctctcctaaccatccaacaaatattataaaaatcaagtgtccactacctttgttatatattcattcctattctgctcctttgttttgttttccctttatcttagtatcacttaccagcctgaatcagaaactccatacatggtagatggtattcctcccctcttatttggtgccactcactggggaacagagctagtggagaaatgctctagcattctgtctttcttagtagacaa

SEQ ID NO: 389128 - DNA, 657 bp, Homo sapiens
taccaaaacagagttatgacatataatataaatggtgtagaagaacttactaactttatcacattttaaaaaarggaggcaatttaacaatatttccaaattttgaaatttatatgaatacattagtaaatactatttatgtatcattattttcacctcccaaaaaataactttaaattatgcatatattgggatatgacatatttaccacagctaattctactcttgtatattgattcatggttttacttattaatgtacttggatcaatttgattttcttagaaatagtgatcatacatattttactctaatatttttatgacaatcttttgaaaataatttatgatatttaaaaatgtatgtatatagcaatatttaaaaataattatttttggtattctgtgaagaattcaaataatatttttaatttaatattataataattgtaatatatattaagaaaaaagtcattaaaactttcatgtttactcagttatttaagaattctaatttaggagatattttcagtggccagctaatatgtttatgcacctaccttcataaacacaaagagcctattgaagaaattcattctctgtctcatagagctaacttgttttagaaataaacaaacaaaaatcagacaaaaatacgc

SEQ ID NO: 389129 - DNA, 657 bp, Homo sapiens
taccaaaacagagttatgacatataatataaatggtgtagaagaacttactaactttatcacattttaaaaaaaggagrcaatttaacaatatttccaaattttgaaatttatatgaatacattagtaaatactatttatgtatcattattttcacctcccaaaaaataactttaaattatgcatatattgggatatgacatatttaccacagctaattctactcttgtatattgattcatggttttacttattaatgtacttggatcaatttgattttcttagaaatagtgatcatacatattttactctaatatttttatgacaatcttttgaaaataatttatgatatttaaaaatgtatgtatatagcaatatttaaaaataattatttttggtattctgtgaagaattcaaataatatttttaatttaatattataataattgtaatatatattaagaaaaaagtcattaaaactttcatgtttactcagttatttaagaattctaatttaggagatattttcagtggccagctaatatgtttatgcacctaccttcataaacacaaagagcctattgaagaaattcattctctgtctcatagagctaacttgttttagaaataaacaaacaaaaatcagacaaaaatacgc

SEQ ID NO: 389130 - DNA, 657 bp, Homo sapiens
taccaaaacagagttatgacatataatataaatggtgtagaagaacttactaactttatcacattttaaaaaaaggaggcaatttaacaatatttccaaattttgaaatttatatgaatacattagtaaatactatttatgtatcattattttcacctcccaaaaaataactttaaattatgcatatattgggatatgacatatttaccacagctaattctactcttgtatattgattcatggttttacttattaatgtacttggatcaatttgattttcttagaaatagtgatcatacatattttactctaatatttttatgacaatcttttgaaaataatttatgatatttaaaaatgtatgtatatagcaatatttaaaaataattatttttggtattctgtgaagaattcaaataatattttwaatttaatattataataattgtaatatatattaagaaaaaagtcattaaaactttcatgtttactcagttatttaagaattctaatttaggagatattttcagtggccagctaatatgtttatgcacctaccttcataaacacaaagagcctattgaagaaattcattctctgtctcatagagctaacttgttttagaaataaacaaacaaaaatcagacaaaaatacgc

SEQ ID NO: 389131 - DNA, 555 bp, Homo sapiens
taggaaaatgaaatataagacttaatttggctaaatatagacatagtgtaacttaggtgactacagaaaagagtcccaacaaacattcagtcaggttgttcatagatttctgataatatacatgtcttcccaatcctacccttccccataatagattcatgtagttaccactggaaaactcaataggcctagaagaataaaagctccaaacactgtccttaagtttccaagatgaatagcatggcaaaccatcaccagattatctattagtgtcractggctaattaggctcctccattcacaaagggcatggtaccagctatttaaaattctcactgttaattattaagtattttacatagatcatcaagcctcaactcatttatacagaaagtggaaattaaaacaaatgaacaatcaaacacttgtctatttgtgaagatataagtgtcctgagtggaaggacacactgggagcccagtacaataagataaatgattcaaaacaggacacaccattgtggaattttagaaagccaggtaaaaataagatttt

SEQ ID NO: 389132 - DNA, 704 bp, Homo sapiens
atcaagctgcctcagcagtttctctattttcaggcactcatcatgcttcctgtaagttgaagtagggacatttttcctctgaaagaacccaaaatggtgagaaagttgaccatttcaatctttttccagtgtagaaaccatgattccaagaggtattttttacatggtacctggtggcttgggaaaggagcatcatagacatagaagtccatttcttttaaaatcctctcagagtttttcacttctcagtggctctggggattacatgatcctcagcttttagacatcgatatcgctggtgataaagtgggcactgtatatttggttctggtttcctttgaggaagagtgaagccagattgtttctactttgtcattttggtgaacataatttttatatacttcatgtgtacatgagaagaatgtgtgtcctccttttgtaaggtacggaaaagttaattgatttgaaaagaattattcaacagttttattgagtgyattataggattctgatagcaaatggcagaaccaagatttaaaccctggcctttctgacaattaagtaaaagtatattatgctagactaaatattaagttgcagttttcaaagataaatatagcaaataatattaaaatttactttattaagaaataatatgtatctatacaggcacatacacatagttaaataggtcgatttattta

SEQ ID NO: 389133 - DNA, 704 bp, Homo sapiens
atcaagctgcctcagcagtttctctattttcaggcactcatcatgcttcctgtaagttgaagtagggacatttttcctctgaaagaacccaaaatggtgagaaagttgaccatttcaatctttttccagtgtagaaaccatgattccaagaggtattttttacatggtacctggtggcttgggaaaggagcatcatagacatagaagtccatttcttttaaaatcctctcagagtttttcacttctcagtggctctggggattacatgatcctcagcttttagacatcgatatcgctggtgataaagtgggcactgtatatttggttctggtttcctttgaggaagagtgaagccagattgtttctactttgtcattttggtgaacataatttttatatacttcatgtgtacatgagaagaatgtgtgtcctccttttgtaaggtacggaaaagttaattgatttgaaaagaattattcaacagttttattgagtgcattataggattctgatagcaaatggcagaaccaagatttaaaccctggcctttctgacaattaagtaaaagtatattatgctagactaaatattaagttgcagttttmaaagataaatatagcaaataatattaaaatttactttattaagaaataatatgtatctatacaggcacatacacatagttaaataggtcgatttattta

SEQ ID NO: 389134 - DNA, 597 bp, Homo sapiens
accataccaaaggcacatagatatcatattcactagatcaaatagtgatcaaagtcaatgcagaagaaaaaatcttaaaggtagctacagagaaggagcaggtcacttgcactgggaaccccatcaggctaataacagacctcttagcggaaatattacaagccagaagacatagaagagattgagaacctattttcagaatccctaaagaaaagaaattacaacaaaaaattttatcctgccaaactatgcttcacaaataaatgagaaataacatccttttcagacaagcaaatgctaaaggaatagatttcaactagaccagccttataagtccttaagggagtgctaaacatagaatcaaaaggatgacacctgctacaacaaaaacacccttaagcacatagcccacaagcactataaagcaactacatratcaagtctacataatgaccagataacacaacatgatgacaggatcaaaatcacatataccaatactaaccttgaatgtaaataggctaaatgtcccacttaaagacacaaagtagcaggctgaataaaaagataagttactgttatcttcaatagatccat

SEQ ID NO: 389135 - DNA, 544 bp, Homo sapiens
tacatataaaccacattttatttcatccattgatgaacatgagttacttctaattcttggctattgtgaataatgctactatgaacacaagtgtacaaayatctctgagaccccacattcagttatttggggtatatacccagaagcagcattgctgcatcatatggcaattctatgtctaattttttgaggaactaccatatgattttccatcatagctgtagcattttacactcccaccaacaaagcacaggattccaatttctccacatccttggcaccacttattattttctgatttttgttgttgtgttcttttttaacatgacatgatttcatcatgatttctcattttttatagtagccatcctaagcaactttctttttattattgttattattattttacagacaggctgtcgctctgtcacccaggatggagtgtggtggtgtaatcattgctcactgcagcctcaatctcctgggctcaagcaatcctcctgcctcagtctcctgagtagttgagactataggattacatcac

SEQ ID NO: 389136 - DNA, 590 bp, Homo sapiens
ggctcacacctgtaatcccagcattttgtgaggacgagacgggcagatcacttggggtcaggagttcaagaccagcctggccaacatgatgaaaccccatttctacaggaaatacaaaaattagctgggtgtggtggcacatgcttgtaagtaatcccaactactcagaaggctgaggcagggaggattgcttgaacccaggaggcggagattgcagtgagctgagattgcaccactgcactccaggctgggcsacagagtgagccttcatctcagaaaagaagaacaaacaaaacaacaacaacaaaaatctcaaaaggtccaagtctttaaactgacaaaatttctaatccctccattggcagatttccataccattctctacacatgggtatctcccccgaaagggaacttattcaaaataaattttagaaatgataatggagtgaacttaaagtttcacaatttaagtatcaggaaaccagacagctgtaagaaatctttcagtatttctgactggaaaaaaaaaacccaacaacttcctcttccatgttcttctcttcattatcagccttaaaagatgggaggca

SEQ ID NO: 389137 - DNA, 657 bp, Homo sapiens
ttaaagtgggacataaatacactattatatgtatttctgaatatgggtggctggattgttgatcataaaaatctgaatctggaaacaaagttgatgtttaataactctccttggttggctggatatacataattcagactctgctttgaatgtccccttctggtcctttaaatggtctatttccctaccttacgtaagtttccatgagctcatcttgttttcatagtgttcccttttattgttaagagaaacaaaaccaaaaaaccccacttgtttcagcaatgccctgttgtcttcctctgtgtgaaattgctcaactaagagttatgcaaatggggatgcggcacgtggtggaggcttcttgcagcatgttgatgggggaccaagacctggtcttgcctcttcctcctccccctgctggcttcattccggtcataccagctcctgctgtggccatcagctcatcccargaccttggcagggcctgtttcttttacctcacactgaagccccaaactcttaagctccattaatcactcccagcttggacctccagtgcactgggattagagatgtgagcccccatgcatggctactctctaagtacttactcccacggacaattaaagtttgaaggaccttacgccatgggttcag

SEQ ID NO: 389138 - DNA, 605 bp, Homo sapiens
cctgtctcaaaaaaaaaaaaaaagtttataaggatatttatgaaaggacatatggttatatacttttataaatcaacttgtaagtcaatttaaaaataagtaaaaattatagacaaygaaagtgtttccttatgaatgaagtgtgatttcagtagtaatgaaactcctcaccattttggtgtttgttgaacaataatttcagaaattgttcactggttttacaaaatgtcacacataactgtagttataaagctatcccttaagaattgggtagatttaaaacattacagcgttgtcatgactttcagtgccatgggtaggtgggttgaggtcccagagatttataatggaatgaggtgtggagtgtgcctcactacaggtgtgcacacattccactgactgctcaggcagattcctgacccagggttatgttattaaattttcagggaaaaaaagtccccctcaggaatctcttcaatgttgaaattaaattgtgcaatgatctaaatgtgctctaataaatgttataccaatcctgaatccctgggtttaataaaaacatagaaagatagattgtgctgtgagtgaattctgggggctgagaa

SEQ ID NO: 389139 - DNA, 593 bp, Homo sapiens
atcagaactaaatggtaattcagtggttacgttgccagaacctgtgctgtaacaagcactctaaattattctcatacatgcttaagttttagaaccacagttttagatggttcagacctccggatcagtataggtctaagaattcatcttcttgaatgtggaataaataaygaagggataaattattacatatccctggcctcatatgtctttgattagcactttagctgtttaagtactggcaagagcagcctttaggttttgttattaattagctgtgttaataggttcactctacttgcactgaagatgagttactatgatgtcttttgtacagttttaggtgatagaatatctctggttatgtccattatgtgttgatttagagctgtcttccctatgtccaatggctaatatgagcatgttatcagggacctcgttattacaactttatttttttgtctctctgtttctgtctctatttttctccctttctcacattttacagttttgggctgttaagaaataatctggagatctatagttaatgcactttattgcattaaaatatattaatagacaagatattcata

SEQ ID NO: 389140 - DNA, 593 bp, Homo sapiens
atcagaactaaatggtaattcagtggttacgttgccagaacctgtgctgtaacaagcactctaaattattctcatacatgcttaagttttagaaccacagttttagatggttcagacctccggatcagtataggtctaagaattcatcttcttgaatgtggaataaataacgaagggataaattattacatatccctggcctcatatgtctttgattagcactttagctgtttaagtactggcaagagcagcctttaggttttgttattaattagctgtgttaataggttcactctacttgcactgaagatgagttactatgatgtcttttgtacagttttaggtgatagaatatctctggttatgtccattatgtgttgatttagagctgtcttccctatgtccaatggctaatatgagcrtgttatcagggacctcgttattacaactttatttttttgtctctctgtttctgtctctatttttctccctttctcacattttacagttttgggctgttaagaaataatctggagatctatagttaatgcactttattgcattaaaatatattaatagacaagatattcata

SEQ ID NO: 389141 - DNA, 611 bp, Homo sapiens
tttatgtagtgggcttttaagtgtgctattccccaaaataggaaaatagaaagaaggatattttagatagagatgattaatactgttatgaaaatgctgttttaaatggctactgaagatttattggagttaggcagtaaatagtaatacataagagcctgaaagtcagaaaaaaacttggattttacataaatgtcaacttgggataataattgaaatactattaaataatttaactacatgtaaagatattgacaatgaataaatattaccaaataaaatattagcaaaccaaatacagtcttatcttaagaaagagatagctttagraaagtgtatagaaaaggcatgaaaaagacaccagaactgatcaatgaggtttgtcatcttcctggagtagggcttaggtggagtgaatgaatgaataaatgaatggatattctgtacaagctgatggcatccaactgtcctacctggttgacaagcatgacttaattattgactgaggttctcacactgaaagatccttggaattctttaagccaatattcctgttaagattcttggggatttgagacacagactaagcccatctgtgtgcaaagatggag

SEQ ID NO: 389142 - DNA, 611 bp, Homo sapiens
tttatgtagtgggcttttaagtgtgctattccccaaaataggaaaatagaaagaaggatattttagatagagatgattaatactgttatgaaaatgctgttttaaatggctactgaagatttattggagttaggcagtaaatagtaatacataagagcctgaaagtcagaaaaaaacttggattttacataaatgtcaacttgggataataattgaaatactattaaataatttaactacatgtaaagatattgacaatgaataaatattaccaaataaaatattagcaaaccaaatacagtcttatcttaagaaagagatagctttaggraagtgtatagaaaaggcatgaaaaagacaccagaactgatcaatgaggtttgtcatcttcctggagtagggcttaggtggagtgaatgaatgaataaatgaatggatattctgtacaagctgatggcatccaactgtcctacctggttgacaagcatgacttaattattgactgaggttctcacactgaaagatccttggaattctttaagccaatattcctgttaagattcttggggatttgagacacagactaagcccatctgtgtgcaaagatggag

SEQ ID NO: 389143 - DNA, 557 bp, Homo sapiens
ttacgaatctccatgggagtgatttgggagcagaacttacrtcactctgcctgatacagatagctttctggctttcctgttctctgatgtggtagcactgctgtttcgtgtaaaacagggggctccattttaagcctatgtggttgggtgttggttgtggttgtgctggatggttgagttggcctgacctcaggccctgtgggaagtggtcaggtaccatcacagttaaaatggggtagttttccagttcacaggctactagatggcactctggagagcatgtatgtgtcctgatagggcatgaccaggttgggataacccagggtttaggtgctggttgtgattgggaggggcaggctgcttcccaggtcactggctgaaccctcagtaggtggcaggcagcatggttaggggatgggagcccaggagaagatcacgggtctatacgtgtgtgtttttcagaagggctctaatggtggtgctcaggtgggtggctgcaaagctttattcttctctgctcttcctgggccatgttgcttccttggtgaataccagca

SEQ ID NO: 389144 - DNA, 557 bp, Homo sapiens
ttacgaatctccatgggagtgatttgggagcagaacttacatcactctgcctgatacagatagctttctggctttcctgttctctgatgtggtagcactgctgtttcgtgtaaaacagggggctccattttaagcctatgtggttgggtgttggttgtggttgtgctggatggttgagttggcctgacctcaggccctgtgggaagtgrtcaggtaccatcacagttaaaatggggtagttttccagttcacaggctactagatggcactctggagagcatgtatgtgtcctgatagggcatgaccaggttgggataacccagggtttaggtgctggttgtgattgggaggggcaggctgcttcccaggtcactggctgaaccctcagtaggtggcaggcagcatggttaggggatgggagcccaggagaagatcacgggtctatacgtgtgtgtttttcagaagggctctaatggtggtgctcaggtgggtggctgcaaagctttattcttctctgctcttcctgggccatgttgcttccttggtgaataccagca

SEQ ID NO: 389145 - DNA, 538 bp, Homo sapiens
ctattgcttttatataattattgcaccaatttatgaacattttaataagattctattgtatgttaacacttcagaaatactacagaatctgctttatacttaagtggactagtaaagcattttagtgttttgaataggaaaaccaaaagtattgaaagtttaggctgacttatatctcatttaaatgttaagtcagaaactacaaggcatctgagctgttagcttacatgcacagttacatattcatatatatgatacagacaattacagatatagattcagataaggaggtagatgtatacaatgtagatgtagatagatactagcagaaatgccaaatctttgggtcagagttaaaactttatttactcatagaaataaaggaggacagagaatcatggcagcattgatcttgctatgcctggcacccttcaggcaatacgatgagagacacgtgaatgaacaggttttttttttktgtgtgtgtgtgtgtgtgtaggagacggatgcagaaatataaatatctctacttacatta

SEQ ID NO: 389146 - DNA, 537 bp, Homo sapiens
gaagcaaacaatcttagccattcctcattaaactttatcctcttacctcactttctaggcacaattttagaattgtgttttctatttccataaagaatgccattggtatttttatatggactgcattgaatctgcatattgttttggatagtatggacattttaacaatattatgtgttccarttcataagcatgagctatctttacacttatttgtgtcttattcaattttttttatcaatgctatatacttttcattgtacaggtctttctcaactaagtttatttttaagtgttttatttatttattttggaatatattatgaatgggattgttttcttaacttttgcagatagttcattattagtgtataggaatgctactgatttttgtatattgattttctatcctgcaactttactgaattcatttattagttctaatagttttttgatggtgtcttagggttttctatacacaaaacaatgttgtcttccaacaggaacaatttaacttcttcctttccaatttggatg

SEQ ID NO: 389147 - DNA, 630 bp, Homo sapiens
ttccatttcattggtcaaatcaattttcataaaataccacgttacatgcagcaataaagtatatttatgcttgaacagagattgtctataaataatttaaaacaataatagaatctatcaaatgtcccccaatatgcaaatattcacatttacttgccaaatacacttactccctagcacgtataccactgtaagaatcaaagactgcaaataattctttttgaaaataagtaaagtaagaatgcacaatattgactcatccatagtaattttaaaattcttctaargcccttgttgacattgaaaagtttcctgcttcgaagattaagatggccttgaggaggccatcttctgctccctgagagcagctccccaatcttctttcttccatggctctcatgctgccatcttggtggtgcatcttttatcattaatttcggtggccttatctgaaaatgtcattggaagagagaaagatttctcattttgcttcatgctcatggtagatgggtgtccatatttcattttaagccttaaagaatcacagtatttttattaaatttagtaagacttctggtggtgcagtgctgaaatatatctgattttaaatatttcagtcaagcaatcttt

SEQ ID NO: 389148 - DNA, 486 bp, Homo sapiens
atattgcactggctggggtgtctccattattattattttagttgtgcatctcctttcaccaatgtattaattatgtctttttttattccatatttttgatatcttagggccttgctgaacctggaggaactgcccctctcagggctaattcctagacaaggcatagaactcacctctgaacacacctgtcatgtgcaaccaaccaaccttcatacccccaaaccacctccttcattgggctctctcacactttaggcaagtatccacctgcccttatcacctcagggccaggtaccaaamaacttggggcagtccctatgtcccagggcccactagaattactcaaattagcccatcctaaacctgcttaccttgtcttgcctgtccctttctacagaaaccacaataaactctcttgcccacattttcccactccacctgcatcctgaccattctggtgcttccccatgtggcctccccatggca

SEQ ID NO: 389149 - DNA, 622 bp, Homo sapiens
tgatttgcatttctctaatgattagtgacactgggaattatttcatatgctcgtcggccagatgtatgtcttctgtcaaaaagtgtctgttcatatcctttgcccactttttaatggggttgtttttggcctcttaatttgtttaagttccttatagattctggctgtgctattcaaagtagcaaagacatggaatcaacctaaatgcctatgaatggtagactggttaaagaaaatatagtacatataycccatgaacacacagccatagaaatattattattatgtcctttgcagcaacatggctggaagccattatcctaagagaactaacacaggatcagaaagctaaataacacatgtctcacttataagtggaaactaaacattgagaacacgtggacacaaaggaaggaataacagacaccagggcctacttgagcatggatcatgggaggaggaagacgataaaaaaaactgcctatcagatacaatatttattatctgggtgataaaataatctatacaccaaacccccgtgacatacaatttacctatataaccaacctgcacatgtaacccagaatctaaaacaaaaattaaaaaaaagaatggaagaaat

SEQ ID NO: 389150 - DNA, 622 bp, Homo sapiens
tgatttgcatttctctaatgattagtgacactgggaattatttcatatgctcgtcggccagatgtatgtcttctgtcaaaaagtgtctgttcatatcctttgcccactttttaatggggttgtttttggcctcttaatttgtttaagttccttatagattctggctgtgctattcaaagtagcaaagacatggaatcaacctaaatgcctatgaatggtagactggttaaagaaaatatagtacatataccccatgaacacacagccatagaaatattattattatgtcctttgcagcaacatggctggaagccattatcctaagagaactaacacaggatcagaaagctaaataacacatgtctcacttataagtggaaactaaacattgagaacacrtggacacaaaggaaggaataacagacaccagggcctacttgagcatggatcatgggaggaggaagacgataaaaaaaactgcctatcagatacaatatttattatctgggtgataaaataatctatacaccaaacccccgtgacatacaatttacctatataaccaacctgcacatgtaacccagaatctaaaacaaaaattaaaaaaaagaatggaagaaat

SEQ ID NO: 389151 - DNA, 532 bp, Homo sapiens
cggaaggggttgggggtcgaaaggttttgtcccttagattgtatttgtagttaaaattgttatttaacattcttgcttccttattctcaagttactaatttacaaaaataatgaaataaatattactattctctggaaaaaagatttgataacacaagagatcaagggaaactccatcctgggactttgcctagcatttctgttacgccttagcagtaagtcagatactaactaaatcacaaacatattaacgattacaatgctcacttctagggagccttgtatcagttaaattgcgacaatgttgagtgacagagtcttgcatggattaaattataatttcgttgtatttgaggaaagtggaatactctgtggatcaatctggcctgacacaggcccatcatttggtttattgaacaagcgaaatgaagtacartgggatatgtgatttcacattagaaacttaactttcctgtggaaaaaaggaatttcagaaattgaaaatatgtgtgagtatgtttaccatggttca

SEQ ID NO: 389152 - DNA, 532 bp, Homo sapiens
cggaaggggttgggggtcgaaaggttttgtcccttagattgtatttgtagttaaaattgttatttaacattcttgcttccttattctcaagttactaatttacaaaaataatgaaataaatattactattctctggaaaaaagatttgataacacaagagatcaagggaaactccatcctgggactttgcctagcatttctgttacgccttagcagtaagtcagatactaactaaatcacaaacatattaacgattacaatgctcacttctagggagccttgtatcagttaaattgcgacaatgttgagtgacagagtcttgcatggattaaattataatttcgttgtatttgaggaaagtggaatactctgtggatcaatctggcctgacacaggcccatcatttggtttattgaacaagcgaaatgaagtacagtgggatatgtgatttcacattagaaacttaactttcytgtggaaaaaaggaatttcagaaattgaaaatatgtgtgagtatgtttaccatggttca

SEQ ID NO: 389153 - DNA, 532 bp, Homo sapiens
cggaaggggttgggggtcgaaaggttttgtcccttagattgtatttgtagttaaaattgttatttaacattcttgcttccttattctcaagttactaatttacaaaaataatgaaataaatattactattctctggaaaaaagatttgataacacaagagatcaagggaaactccatcctgggactttgcctagcatttctgttacgccttagcagtaagtcagatactaactaaatcacaaacatattaacgattacaatgctcacttctagggagccttgtatcagttaaattgcgacaatgttgagtgacagagtcttgcatggattaaattataatttcgttgtatttgaggaaagtggaatactctgtggatcaatctggcctgacacaggcccatcatttggtttattgaacaagcgaaatgaagtacagtgggatatgtgatttcacattagaaacttaactttcctgtggaaaaawggaatttcagaaattgaaaatatgtgtgagtatgtttaccatggttca

SEQ ID NO: 389154 - DNA, 551 bp, Homo sapiens
taatgctctttccctggagtaatactagtcccttatcaggcaggaaatgaggattgtttcatgaactaacccttacaatgcaaggctgactttctacaaaatgtctaagatttactttagagaagcattttatattttctctcctatccccttatctttttttattcccttttcctrcgtttttttccttctgtgttcaacacacatatctttgtctctttctttataagaaggaagattcatttcttaggggaaaacaaaataattacgtctactttataagttttcttcttatttctttcaacttcttagttctaaatgatactgaagaaaaaataaacttagagtttatttaaaaaaaatacggcatctagaaaaaaaaaacagtgactccccatccaaatttaaccacccttcacaccttgtcattttagatcactttatcttttgtattcactctctcatttccatagggattgcacacactcattataaagaatcaaacaatacaggatgtacaaaggcaaacactaagaactcaccccaaaaca

SEQ ID NO: 389155 - DNA, 540 bp, Homo sapiens
aacaatgtcagacatatgtgggtgcttgaatagtatttgcttcaaaaatatttattactagaaagctgctgtgtttggggtgagaggttagtagggaagggggttcataaagggaatgcaaaagccacgtcctctggaagttaaaaggatcattttaaatgattctactgcaaacatttttcaaaagataaacatgacccatttctccaatttgtgtcatgtaatagtaataataatgatatttaaatactcccactgatatrtcctttacaaagatatattatatgtcttatttaatcaaaaaaccttaaaacagtccctgtacctaattttattccaggactcaaactgtgtcagcatgtcattcagtgcaaatcagacatttagatgcataggctatgctgtcagtagttctgaactttcatagacatttccaattagctcggagagacaactggatattgtgtttaagcactgtgtttaggaaaacaggcactggatggaccaatgccaaatttcctgctctgctgcttaactaag

SEQ ID NO: 389156 - DNA, 540 bp, Homo sapiens
aacaatgtcagacatatgtgggtgcttgaatagtatttgcttcaaaaatatttattactagaaagctgctgtgtttggggtgagaggttagtagggaagggggttcataaagggaatgcaaaagccacgtcctctggaagttaaaaggatcattttaaatgattctactgcaaacatttttcaaaagataaacatgacccatttctccaatttgtgtcatgtaatagtaataataatgatatttaaatactcccactgatatatcctttacaaagatatattatatgtcttatttaatcaaaaaaccttaaaasagtccctgtacctaattttattccaggactcaaactgtgtcagcatgtcattcagtgcaaatcagacatttagatgcataggctatgctgtcagtagttctgaactttcatagacatttccaattagctcggagagacaactggatattgtgtttaagcactgtgtttaggaaaacaggcactggatggaccaatgccaaatttcctgctctgctgcttaactaag

SEQ ID NO: 389157 - DNA, 578 bp, Homo sapiens
gacaaattccctaccagtcagcaagccatccccagtatggatccccactgggacctagactcacatcattgggactggagtcacaaacatctgttgatctgtgttctagaaggactaaggagaattagaaaaaagcccatgaattattcaatgaagtccaccataactcagggaaaggaagaaaatcctgctttccttgagtggctacaggagaccctaagaaaatatactcccctgtcacctgactccctcgagggtcaattgaccctaaaagataagtttattacccaatcagccgcagatatcaggagaaagctccaaaagcgagctctgagccctgaacaaaatctggaggcattattaaacctggcaaccttagtgttctataatagggaccaagaggaacaggctgaaaaggaaaagtgagatcrgagaaaggccacagccttagtcatggccctcagacaaaccttggtggttcagacaggacagaaaatggagcaggccaatcacctgttagggcttgttatcagtgtggtttgcaaggacactttaaaaaagattgtccaatgagaaac

SEQ ID NO: 389158 - DNA, 364 bp, Homo sapiens
gctgtgtgtttttaacctccttgtcaaatttgtttcctccaggatccatgccatcaagacatagaggtcttacaaatggaaccctaaatgagctcaactaacaacttctactgaggacccctggatcaactcactggccctttggctggcctagagagttcccctctggaggacactaccactgcagggccccttctttccctctatccagcaggaagtagctaaagtggtcatagcacaattcccacagcagttagggtgtcctatttagaggggggatagacagatgaagccagctgggtttctgggtcaggtggggacttggagaactcttytgtctagctagaggattgtaaatgcacca

SEQ ID NO: 389159 - DNA, 641 bp, Homo sapiens
gcagcagcaacctgcttgggtccccttccatgctgtggaagctttattctttcgttcttcataataaatcttgctgctgstcactctttgtgtccacactacctttatgagctgtaacaccacaagggtctgtggtttcattccagaagtcagcgagaccacgaacccaccagaaggaacaaactctggatatgccacctttaagggctgtaacgctcactgcgaggtctgcggcttcattcttgaagtcagcgagaccacgaatccaccagaaggaataaatcccagacacaaactcagaatactctgatactataattgtagtgtgcaatccacttataactctaatatgaagcctcaaaaagcaaatctatcaaaaacaataatagctacagaaacctgttaagagataggtaatataaaaatatgtaaagtcaattaaaattcaaaatgagagagaaatgaagttaaaatgtggaagtttcattttttgtttgtctctattctttgtgatctaagataaattgtcatctctttaaaataacttgttatatctacaagatttttttgtaaacctcatagtaaccataaggcaaaaacctataatagattcacaaaaattaaaaaacagcaaattaaaa

SEQ ID NO: 389160 - DNA, 641 bp, Homo sapiens
gcagcagcaacctgcttgggtccccttccatgctgtggaagctttattctttcgttcttcataataaatcttgctgctggtcactctttgkgtccacactacctttatgagctgtaacaccacaagggtctgtggtttcattccagaagtcagcgagaccacgaacccaccagaaggaacaaactctggatatgccacctttaagggctgtaacgctcactgcgaggtctgcggcttcattcttgaagtcagcgagaccacgaatccaccagaaggaataaatcccagacacaaactcagaatactctgatactataattgtagtgtgcaatccacttataactctaatatgaagcctcaaaaagcaaatctatcaaaaacaataatagctacagaaacctgttaagagataggtaatataaaaatatgtaaagtcaattaaaattcaaaatgagagagaaatgaagttaaaatgtggaagtttcattttttgtttgtctctattctttgtgatctaagataaattgtcatctctttaaaataacttgttatatctacaagatttttttgtaaacctcatagtaaccataaggcaaaaacctataatagattcacaaaaattaaaaaacagcaaattaaaa

SEQ ID NO: 389161 - DNA, 641 bp, Homo sapiens
gcagcagcaacctgcttgggtccccttccatgctgtggaagctttattctttcgttcttcataataaatcttgctgctggtcactctttgtgtccacactacctttatgagctgtaacaccacaagggtctgtggtttcattccagaagtcagcgagaccacgaacccaccagaaggaacaaactctggatatgccacctttaagggctgtaacrctcactgcgaggtctgcggcttcattcttgaagtcagcgagaccacgaatccaccagaaggaataaatcccagacacaaactcagaatactctgatactataattgtagtgtgcaatccacttataactctaatatgaagcctcaaaaagcaaatctatcaaaaacaataatagctacagaaacctgttaagagataggtaatataaaaatatgtaaagtcaattaaaattcaaaatgagagagaaatgaagttaaaatgtggaagtttcattttttgtttgtctctattctttgtgatctaagataaattgtcatctctttaaaataacttgttatatctacaagatttttttgtaaacctcatagtaaccataaggcaaaaacctataatagattcacaaaaattaaaaaacagcaaattaaaa

SEQ ID NO: 389162 - DNA, 641 bp, Homo sapiens
gcagcagcaacctgcttgggtccccttccatgctgtggaagctttattctttcgttcttcataataaatcttgctgctggtcactctttgtgtccacactacctttatgagctgtaacaccacaagggtctgtggtttcattccagaagtcagcgagaccacgaacccaccagaaggaacaaactctggatatgccacctttaagggctgtaacgctcactgcgaggtctgcggcttcattcttgaagtcagcgagaccacgaatccaccagaaggaataaatcccrgacacaaactcagaatactctgatactataattgtagtgtgcaatccacttataactctaatatgaagcctcaaaaagcaaatctatcaaaaacaataatagctacagaaacctgttaagagataggtaatataaaaatatgtaaagtcaattaaaattcaaaatgagagagaaatgaagttaaaatgtggaagtttcattttttgtttgtctctattctttgtgatctaagataaattgtcatctctttaaaataacttgttatatctacaagatttttttgtaaacctcatagtaaccataaggcaaaaacctataatagattcacaaaaattaaaaaacagcaaattaaaa

SEQ ID NO: 389163 - DNA, 553 bp, Homo sapiens
tgggagtaactatacttatattagaggaaatagactacaaatgaaagattgtaaaaagagataaagaaggttactacataatgataaaaaggtcaattcagcaagaaaatgtaaccattatatacatctgtgcaccaacactgatagatttatacaaatataactataaaaaactgattaaagtaattgaacaaaacattaataaggatattctatgtcatggattgkaagaattaatattgctaaaatgacaatactatccaaagcaatttacagatttaatgcaacccttattaaaagaccaatgccattcttcacagaaataggacaaatgctaaaatttatatgaaaccagaaagaccctgaagacccaaagcaattccaagcaaaataagaaaaaaacaaaaaaagctggaggcatcacattacctgacttcaaaatttactgcaaagatataataaccaacgattcacaatattaaagacatggaatctatcaaaatgcccatcaatggtagaatggataaagaaaatgttgtacatatacaccatg

SEQ ID NO: 389164 - DNA, 543 bp, Homo sapiens
tcctacaggtttattatgtaaagctgtagttttgtacttgaaactggcttataaacatagtctgcagatcacattttatgggaagaaaaaaatatacccatgtagcaaggaattatctgaactagcagcatagctcttacttaaattcacttacactcgagcatgagctgggtctacataatcaaagtgaagtggagaattagagtaatttgagataattcagaccagaaaagtctaccccagaacctttcacctaattgcatcaattatctaattgaaggaaaccttggggaattggggcttgaatcattctgataattgatttaattttcatttagtttgcgtatgaaaatacacccacacacattttaccttgaagctttctrtttagtaacaggcaaaagcagcctccatctctggaaatgatataatttgtcacttgtggtttcctcatgttggcatatcccaaccatgagatttcattggcgtggtcataatacatccctggaggaaagtttccattttctacaacttgagttatgt

SEQ ID NO: 389165 - DNA, 603 bp, Homo sapiens
cagattgttggaaggagaaccatgctcatagttacttggcaaatgtggagccagtgtaggcggtgtgacaaagtattgaagcagatctttagcaagcgcacgagggcctgtgttgtacccaatgcatgctggtcctctcaaagttgttayccagagaagctgtatacagattccaaggatactgctggcgttcacatttccagagctgttccctgggaactatcttcatagacagttatgagccacatgagaaatatcactcatgactgtgtagtcacacctcacttctggcccccaaccataggacccagtctgatcatccaattagtacatcatcattaccttctcaggacatttgactgattcccaaaattcaatccactctcaaaggacaaagatatctctcaaccaagcagagtcaagagaacatgctacagctgtcaaatgtactaaccaatacagcaacatgcaaatgttgaatatgttgaagaaatcagcacccttttccattatgtcagttctgctatgtttgttaaaaataaatccattgcattcctttattcactatagtgctttgacatcattttccctttgattagaaat

SEQ ID NO: 389166 - DNA, 583 bp, Homo sapiens
aaaatgtaagaaacaattatgaaaattacaaaagtacagtactgcattagtccattctcatgctgctaataaagacatacccaagactgggtaatttataaaggaaagaggttcaattgactcacagttcagcatgactggggaggcctcaggaaacttacaagcatggtggaaggggaagcaaacacatccttctttgcatggtggmagcaaggagaagtgctgagcaaaagggggaaaagccccttatgaaaccatcagacctcctgagaactcaccccctatcatgagaacagcatggggttaaccacccccatgattaaattacctcccaccaggtcccttccacaacaagtggggattatggaaactacaattcaagatgagatttgggtggggacacagccaaaccatatcaagtactcattaaagtaatctagtttgaagagacagtgatgcaaatctgaagcttaaaggcccttggtcctcttagctagcagaataaatttcagcaagtcacagaattcttagatctaagctctagctaatacaggtgctcagtgaagaggcagaaggcagaaaa

SEQ ID NO: 389167 - DNA, 512 bp, Homo sapiens
cggcaggtccgagtgtcacacccaggtttgtctacctccaaagcctttgctttgctggtgttttctttgctaaaactggagctttcttctatagcaaaaacttcttccaggacagcactggggaatggagggccttgagctcctgawactgccaagctaggaaaccattcctggcttcattaataattaacagtgggttcttttccaatgaggaatattcacaaagcaactgccttctttcaggttctttggacattggttctttccctgctcagtacttggccctggacctgaagatagccagttcacattttttgggagggaattgcctggtaccttatccttggagaggcagcttgggagcccctggtccttgaacacagtgttactacacccacaaatattcttcaagtgttcgtaaatgaaagcggacaagcttggcccttggtgtcagggtttttgaccaataattctgtgttttgctttccacaggcctaattcctggtccaact

SEQ ID NO: 389168 - DNA, 512 bp, Homo sapiens
cggcaggtccgagtgtcacacccaggtttgtctacctccaaagcctttgctttgctggtgttttctttgctaaaactggagctttcttctatagcaaaaacttcttccaggacagcactggggaatggagggccttgagctcctgaaactgccaagctaggaaaccattcctggcttcattaataattaacagtgggttcttttccaatgaggaatattcacaaagcaactgccttctttcaggttctttggacattggttctttccctgctcagtacttggccctggacctgaagatagccagttcacattttttgggagggaattgcctggtaccttatccttggagaggcagcttgggagcccctggtccttgaacacagtgttactacacccacaaatattcttcaagtgttcgtaaatgaaagcrgacaagcttggcccttggtgtcagggtttttgaccaataattctgtgttttgctttccacaggcctaattcctggtccaact

SEQ ID NO: 389169 - DNA, 559 bp, Homo sapiens
aaatcatttaggtcaaacccttcactttaaaggtggggatactgaggcccagagagagacaggcaaggacttgtccccaaatcacaccttgccagtagcccttgagaatcaatctacctgagagaactatttctgggccgaagtcctgttattttagcagaccctctttgtgtctgctagttacctaggatggcacactcaaccaggcctgaaagaactcactaacccccatgaagggtaaacatttggctgctyaaagaggacactttcttacaccaactacatagccaggagctgggggtgctctgtgcctgacacttatacgttaactcccaacaatcctgtgaatcatatattattattcccttttccagaatgaagaaactgagactcagagatgatgtgactctgggtcacgcctcaagttaagtaggtgtgttcaggcttcaatccaggtctctctcactctagaaatggtattctttccatcctggtgctagggcacaagcccaggacttctaattctatgagttaactaaaaaatggttcctaaagtgtg

SEQ ID NO: 389170 - DNA, 601 bp, Homo sapiens
gtaaagtatgaaggatgtgcatcaattgaacaacattacatctaagagatatcatcagggaacaagaaagtaagcaacaatctgcaaaaaaaaaaaaaaaaaaaaaagcawtaagtgaaacctagtaaccaacttctctctaacagcaatggcacagagatgagaagaagctgctaacaaactgaatccctgttccgtgccagattctatacccacctaactacactgactccttacaacaccctgccaagttttattatgcccattttgcagattcaaaaatacagattgtctaacatgccctgagaacaccaaactaggaagtggtcaagttataatctgaaactaagtttgatgtcaaagtctggattctatttcctgcaccagcccacctgttcaaagtgtgataagccaatattcaccaaacagcctcaaagttatgtgtgctttctcagtaaaataattgttctggaaatttcaccactccccaaggaccccctatagtatatgtaagggttgggagagagataaactggggaaaatgaggatcagtgaagcacaaaagtaaaagcatcaaggacacagtaaggtcagttgacaa

SEQ ID NO: 389171 - DNA, 618 bp, Homo sapiens
tggtatttatatacagtggaatattattcagactttaaaagggaggaaatcctgtcacatgctactacrtggatgaaccttgaggacattatgctaggtgaaataagccaattacaaaaagccaaatgctgtatgattccacttatacgactatttaaagtagtcaaattcatagaaacagaaagttaaatggtggttatcaggaggtgggggaaggagaaaaaggggaattgttgttttaataagtacagtttcagatttgcaagatgaaaaatttctggaggtttgtttcacaacaatgggaatatgtttaaaactactgaatacacctaaaaatagttgagatggtaaattttatgttacgtatattttattataatcaaaaaaaacttggcagtctcttacaaaccatcaagccatataggactttctttttcaagcatgtgataattttgagcggttgcatacatttgtactgggcttccaataagttgttttaaaacagttttcagaaatcctgtaaattattgaaaatataaactttttagcttttctatgtccacagtttttccatggccctcctttccaaatattgagtgcacaatagatttatttctt

SEQ ID NO: 389172 - DNA, 593 bp, Homo sapiens
taactaaaaattttattaattattcaaaaaatgttctaaagaagaaaactatgttagaaattggttaaacattatttaatcaaacacacacactgactgcaaaaatatctgtaaaaaatgaaatttattatgtaaacattagaaatatgtcttaaattcaggtataatttttatctgacggacttgagaatttayattttatggttcattacaatggttgccattcacagatgcaaaaacacaacttatcccctctaagaggaaaactcacatattaagaatcttctcattgtttgatttccaaatacccatgtacatgagtatttttttaaatggcaagcttctctatttctacagaaactcaatcaacaggtacctctgagcccaggctaccatctgtagtcacacatggatttttacatgttcataaagctgaaaagcatttaacgaaacctcttttattaaggcagtgaggaggccacagataagttgtgttttatggccttcattgttactgattcctttgcaaaagttgttaatgacttatttttgaacatacatatctttggctgggtgtggtggctcatgtctgt

SEQ ID NO: 389173 - DNA, 593 bp, Homo sapiens
taactaaaaattttattaattattcaaaaaatgttctaaagaagaaaactatgttagaaattggttaaacattatttaatcaaacacacacactgactgcaaaaatatctgtaaaaaatgaaatttattatgtaaacattagaaatatgtcttaaattcaggtataatttttatctgacggacttgagaatttatattttatggttcattacaatggttgccattcacagatgcaaaaacacaacttaycccctctaagaggaaaactcacatattaagaatcttctcattgtttgatttccaaatacccatgtacatgagtatttttttaaatggcaagcttctctatttctacagaaactcaatcaacaggtacctctgagcccaggctaccatctgtagtcacacatggatttttacatgttcataaagctgaaaagcatttaacgaaacctcttttattaaggcagtgaggaggccacagataagttgtgttttatggccttcattgttactgattcctttgcaaaagttgttaatgacttatttttgaacatacatatctttggctgggtgtggtggctcatgtctgt

SEQ ID NO: 389174 - DNA, 537 bp, Homo sapiens
cagtagataatttcattcattttctggcagctaccaacgttgtagtgtctaaaagtgaatcactaggtcaacgtacatattacttttattccttcaaacaaatacttactgagcaactactgtgtgactggcattgtgctagatgctgaagatacagcagtaaataagtaagacaaatgccttgttcttaaggagtttctactctagttgaggagataatttcaattaaacaaatgcataaatatgtaattccagatggtagtatgtgctttttyagttttgcaaagatgatgctgccctaacgaaaacaccttaaaatagtgtagcttctataacatacacttacttcattctcatctaaaaatcttacagggagaagttcagttttgtaggatagctctgcttatgagggacatcatttagagaaacacatttcttccatattgttattctaccatctcccaagacattactcttatcagcatggttgaagctaggtcactgacatttgcattctggctcccaggaagaggagaa

SEQ ID NO: 389175 - DNA, 483 bp, Homo sapiens
aaaatgaggaaaggtgctttgccatgatcaaaccagattacctaaagtgaaactatctcacatttccacttcacaaaaaatacacactcaaatttaaaacttaaatgaatgtacaggcacagaaacactcttcaaatagcctcctattttgatacacagaaaataatgaaatgagacaaaatgcatcctgtcattgggatcaagattctatcagaccacaaacacacacagggtccaacctccctacagacttgacmcatgttacctgaagatagaatcagtagctgcaagtcaagtgatttggttacatttttcattttcattagaaatcttcccttctgagaaccttctaagactcactcacattacttcgactggctagtttataaaattgcagattcagaatactctagatgaaaaatttgctgttctctgagcaaaaatcttgaaaaatctgagggatctttccctttcaaatgactg

SEQ ID NO: 389176 - DNA, 483 bp, Homo sapiens
aaaatgaggaaaggtgctttgccatgatcaaaccagattacctaaagtgaaactatctcacatttccacttcacaaaaaatacacactcaaatttaaaacttaaatgaatgtacaggcacagaaacactcttcaaatagcctcctattttgatacacagaaaataatgaaatgagacaaaatgcatcctgtcattgggatcaagattctatcagaccacaaacacacacagggtccaacctccctacagacttgacccatgttacctgaagayagaatcagtagctgcaagtcaagtgatttggttacatttttcattttcattagaaatcttcccttctgagaaccttctaagactcactcacattacttcgactggctagtttataaaattgcagattcagaatactctagatgaaaaatttgctgttctctgagcaaaaatcttgaaaaatctgagggatctttccctttcaaatgactg

SEQ ID NO: 389177 - DNA, 617 bp, Homo sapiens
ttttgtttttgccactttattccatctcttggtcaatgtattatgctacaaaattatcttttgccttgagatttaaaacttcataaaaaatgtatgcacagattattttcacttaaaatttaattgatattactaaatttgtatttatatctaattttcagtgttttayatttttatttcttcctttcttatataatccattttgcctgggaatttttaattactcctttttaataaaactaacttttataaaatttttcatttatttgttgtctgttctttcattaattttaacttttatttttatgctttcactatacttttggatttttttcttgtttctctgattgaatagtaatgaaataatcagattatatgtattatgatctgggcattgactgaactataccttgcaagttttgatgaagtacttttccttagtttttagattatttatttctgcttttgtttccttgttgatgtagaggttatttcaaagtaattttctaatttcgaaatactttggatgtttgcttgttttttattttttattttgttcctagagacttctttggattgttgtaaaaagaatgtaactattaagttaaaattttata

SEQ ID NO: 389178 - DNA, 617 bp, Homo sapiens
ttttgtttttgccactttattccatctcttggtcaatgtattatgctacaaaattatcttttgccttgagatttaaaacttcataaaaaatgtatgcacagattattttcacttaaaatttaattgatattactaaatttgtatttatatctaattttcagtgttttatatttttatttcttcctttcttatataatccattttgcctgggaatttttaattactcctttttaataaaactaacttttataaaatttttcatttatttgttgtctgttctttcattaattttaacttttatttttatgctttcactatacttttggatttttttcttgtttctctgattgaatagtaatgaaataatcagattatatgtattatgatctgggcattgactgaactataccttgcaagttttgatgaagtacttttccttagtttttagattatttatttctgcttttgtttccttgttgatgtagaggttatttcaaagtaattttctaatttcgaaatactttggatgtttgcttgttttttattttttattttgttcctagagacttctttggattgttgtaaaaagaatrtaactattaagttaaaattttata

SEQ ID NO: 389179 - DNA, 482 bp, Homo sapiens
gtggctgagctttgcttaagcacttgataaaaaaagatgcaaatttcagcttgctatataatgagggataatagtrtagtgtaagaatatatggtctttgtgggatatgaaattgagtacaggtcctagaacctattgtagtgctaccataaaaactaactcttgaattttcataaacattgtcagtgtgtcatttcctacctcccaaatctttgttttctatattaatcaaataatactttattgaacacatgtacagaagagttaaataattgttaagaccagcagtgtgtaactgaaactctactcagttattctcctcctcacttaactttttttttttcttataaggagatgttttttatttgaccttgcagagggctagggacagtggaaagcggctgagtgagatgtgacttggagtttaccatctagttgtgggaatagacatagagccacttagcagaatgcatcagtagtaa

SEQ ID NO: 389180 - DNA, 482 bp, Homo sapiens
gtggctgagctttgcttaagcacttgataaaaaaagatgcaaatttcagcttgctatataatgagggataatagtgtagtgtaagaatatatggtctttgtgggatatgaaattgagtacaggtcctagaacctattgtagtgctaccataaaaactaactcttgaattttcataaacattgtcagtgtgtcatttcctacctcccaaatctttgttttctatattaatcaaataatactttattgaacacatgtacagaagagttaaataattgttaagaccagcagtgtgtaactgaaactctactcagttattctcctcctcacttaactttttttttttcttataaggagatgttttttatttgaccttgcagagggctagggacagtggaaagcggctgagtgagatgtgacttggagtttaccatctagttgtgggaatagacatagagccacwtagcagaatgcatcagtagtaa

SEQ ID NO: 389181 - DNA, 494 bp, Homo sapiens
gcgggttgaattggccaatcggacggccagtgctgtagagaaatgatggaaatgtctgctcctgtatctaccaaacctttaaatttctttccctgaatagttatttcacaagtaggacgtttatcagcaatttgatttacccaataagctgctttgccttgtttgtttgtgcttccaaatcctcctgttcatttaatttcactttttcccattcccacatatggcacaatcaggagctgtgctttgtgcttycctggctctgctttccagggaacaaaagtagataaaacaacttgaatttccccattgtaatctgaatcaatgactcctgtatgtatttgtacctgttttaaacttaaactagactttcctaaaagtaatcctattgtacccgctggcaagggtccacaggctcctgttgggaccttttgtgggggttccccaggcagaaggctcgcagcttttctgcagcataaatctactgcggcactacc

SEQ ID NO: 389182 - DNA, 604 bp, Homo sapiens
aggtacttactgatataatgtttaaaaaacaaatgtgattgcaaaatacatatattcaaattatttgtaaaggattctttatgcaaaaaacactattatttaatgatgactataaatataaggttctacaataaaaagtagctgttgcttttaaggaagccataatgatcttccttttccacctatgaagtatccctatctcccagacagcccttcagactaagcgagagacggcgtgcagtgactcacctgraggatggacacagtctgggagaagtggtgctgctccatggtggaagtggagtagagagcggccagagggtggtcgaacttctgcaggtagctgttactgaagcccctgtggtccaggtcatgacacagacacgcaatcagcagtcctttgcgctttaaaaaataatatgatgcagagatgctcaaaacacagaaacacacatgagcagacttaccgcttacattcatgtcacattactttctggcattaatatagcacaaatacagcattctggcataaagaatcctatacaaatagagcaaacccttaggaatcttggaaattccagataatctaactcatttgtaggcc

SEQ ID NO: 389183 - DNA, 581 bp, Homo sapiens
gttttaaatatttacatgtcattttggggattatttttcagccaaaacgatctgatgttttgggaaaatgtaatgatataattccaaaaatgaattaggaacttaaatgagagtcaatatgtatcaacaaagtttttctyacttattgttaaattttcaattttttttaatataaattacaatgcaacttgaaagtataatttctacagttcttaaactcacaaggtatggcaaaatggcaaaacaagacaatgaaattgctttcttaaaaggaacagaatggagaaaatgctgaaagtctcaacagtatggggttcaatagaaaaggactttgttaagacaaacaaatgaaaaaaggagagatttcatgtggatctttcgcggggaggtgataaataataaattactgatcaggctaaactccacttgaactaaagattgttttaaaaaaagcaacaaaaactagaggataattttttattctttcttaaaatgctactatttttttcctagaatgcatcttttgagttttccactcagattgtgaatttggtccaataggatggaaaaggataggatgg

SEQ ID NO: 389184 - DNA, 573 bp, Homo sapiens
accatgtagacaaaaattccaggccacatgttttcaaaaggaccaatgtcaaagtggaatctgaaattttaaaagggcagtttatcactaaacgtgattagaataaacacagtaagtaaagaaaagcatttaacttgtttgtaccaaggagctaaaaagacactgggagctcagccatcccttttcctgccttcttagccacatagctgttactgaaagatttccaggaagaaactaaacatattgccttagaaatctagtccaatatttgagttattgattttctattaatctgtttgaaaatgatgcttcatttgttgtcagagaaataaaaagtacaaaaaggtatattacaaatattagataaatatacaatcatagaaaaggggggaaaagccttttcagaagtatttttggagttgaaactgttctatctcctattttaactgagataacaatttcaytaatataaacaccagagttattacctatttttcatttgctaatttagttaccaacattagacttgaataaacagtatggtataatatatactataatttcaattgtaag

SEQ ID NO: 389185 - DNA, 600 bp, Homo sapiens
gagtggcgaattctatgatacatctagaaggcaaatccaaaaaaaaaacccccaaaattaaaagaatatttaaactgttttgtcacggaagttcagaatttggtattaaagaatcagaactagaattaaaaccaaagtggatttattattatccgtatttccatatgcactgggatgtgcagacatgactttgcagattcaaaagaaatgmtttttttaaaaaatggtatctctgctttacaaatttttatcagacattatctctgggtgatgagattacttggcatttgtcttccttaaaatgctctgtatttccgcatttttaaataaaaattaaacacattttattatcagaaaatgaatatttgtacttttaaagatcatcgtaagatctaaggtatttctcaatctgttacaacaaaacctttaattattgcatttcacctgcacatcaaattcatcttccttgggaaggttttatcatcattaccttctctggtttttagtcttgactgtatattgttactgttcttaacaggactgaatttggggtgttattggtgttccagcaatgaactcaaatgagtaacacaggtttgc

SEQ ID NO: 389186 - DNA, 436 bp, Homo sapiens
aattgattctctaagcaagtcctaaaatcaaatacatactccacatacatacggggaacactgaataagagacctgtaaccacccttctactctacactgtcatgagatctactttttagctcccataagtgagtcagacgtgtgatatttgcctttttgtgcctggataattttatttaacctaacgaccttcagtttcatccatgctgctgcaagttacgygatttcattcctttttacggctgaataatgttccattgtgtataatgttggttaaggggtacaaaaatacagttggataaaaggaatacgttctattgtttgatagtacactaggaaaattacacttaataatttattgtgtatttcaaaatagctagaagattcataatggtctcaaaacaaagaaaatataaatatctgaggtgacagata

SEQ ID NO: 389187 - DNA, 436 bp, Homo sapiens
aattgattctctaagcaagtcctaaaatcaaatacatactccacatacatacggggaacactgaataagagacctgtaaccacccttctactctacactgtcatgagatctactttttagctcccataagtgagtcagacgtgtgatatttgcctttttgtgcctggataattttatttaacctaacgaccttcagtttcatccatgctgctgcaagttacgcgatttcattcctttttacggctgaataatgttccattgtgtataatgttggttaaggggtacaaaaatacagttggataaaaggaataygttctattgtttgatagtacactaggaaaattacacttaataatttattgtgtatttcaaaatagctagaagattcataatggtctcaaaacaaagaaaatataaatatctgaggtgacagata

SEQ ID NO: 389188 - DNA, 619 bp, Homo sapiens
gtgtggcttgaggctcccggatgtgaagggaaggtccatgcaggatgagacttccctgtggctgcatgaggagaggagctgaactgagaactccataagcaaaaaagaagccttgtctctacttggggctatgggtagaaaataaatagtctccatccattgagaatatggaaatcaagcctgaaccatatgtagttgtagtttccaaatttatcctaacatattgcaggaatttcaagctaaaaacttaacagaaacaaaaacctggacccagatcactgaaagcctggggcacatggaaaacattacatatatctgagcatgagggtctctcacaagggagataatttgagagaaatttgagtaggtaaacaagtaaacgatgacmtgaaaaaaaatctaagaatggaaagatgaatagatattagtaccctctacaaattgagctaatgaaaaacacttactgagagatttaaaatacactgttgcaaaaatacagcatttggtatgtgacttaccatgcttgcacaactattctagtttatggaaaccacagtaccaaaatgcaaaaacaaaacaaaacaaaacaaaaaccacaaggatttctttctgtttcttt

SEQ ID NO: 389189 - DNA, 559 bp, Homo sapiens
gcttgcacaactattctagtttatggaaaccacagtaccaaaatgcaaaaacaaaacaaaacaaaacaaaaaccacaaggatttctttctgtttctttctcrgtagagttgtatctttgacctaatcgtgggtggaagtatttaaaacactttcttaaagacaggcccaagcacctactgtctatggcaccatagagagttctttcatgctgaggactgcaaaggtgacaatagtttcctctaatgtgtttcagtggatttgaaagcactgggaacaaattaaaaaaaaaatgtgtgtgtattatgttcctgtgaaataagagacagctgaattcaggagaaagtaggggcattggaaaaatgactctctagctgtgtgccccaaatgcacctcagcgtatagaagacaactggtgtcctaaggtaggaatactgacttctctcttcctctgtaagctcagaagttccatcttagggcagacataaaaggtacctctataggctcttccttgctattttccagtaaataaatgaagcaaatcaaattttaatgaaaagc

SEQ ID NO: 389190 - DNA, 559 bp, Homo sapiens
gcttgcacaactattctagtttatggaaaccacagtaccaaaatgcaaaaacaaaacaaaacaaaacaaaaaccacaaggatttctttctgtttctttctcagtagagttgtatctttgacctaatcgtgggtggaagtatttaaaacactttcttaaagacaggcccaagcacctactgtctatggcaccatagagagttctttcatgctgaggactgcaaaggtgacaatagtttcctctartgtgtttcagtggatttgaaagcactgggaacaaattaaaaaaaaaatgtgtgtgtattatgttcctgtgaaataagagacagctgaattcaggagaaagtaggggcattggaaaaatgactctctagctgtgtgccccaaatgcacctcagcgtatagaagacaactggtgtcctaaggtaggaatactgacttctctcttcctctgtaagctcagaagttccatcttagggcagacataaaaggtacctctataggctcttccttgctattttccagtaaataaatgaagcaaatcaaattttaatgaaaagc

SEQ ID NO: 389191 - DNA, 590 bp, Homo sapiens
tacttggtggttgaattctggaacgaataaaggttcaaccacttattcaatttgtccctaaccaactaatttcattttaatagcaaattttgttcatgcccctttcatgttaaatgtctttctatccaaaatgtacagagctaatctgttttaaaagatttatttttctaagcaaaagatgtaactgatactactgtcctattagcttttctaaggcatattaaatggtttctttaaaatcacagtataaatgagtaaattaattgacttggatttaaaagatgtttyctgttgatagtacttcccagtatgttagctcaataaatgaaagagagatgttgccaatcagagacgttcccctttaattaaataaaaggaatgtattcaagtatttctaaagatgaaataaaggaaaataaaaacataataagcattaacatggcctatgtgccctgcttcttagataggctcttaatcaaacaagaccacaataaaatatgccattacattatcatgttcagtattagaaacaagaattttcatgtacaaaacatgcttctattagggacacaataatttgttcaacagca

SEQ ID NO: 389192 - DNA, 607 bp, Homo sapiens
tttatatccaccatctggtataaaaaagataggcaatacttggtggttgaattctggaacgaataaaggttcaaccacttattcaatttgtccctaaccaactaatttcattttaatagcaaattttgttcatgcccctttcatgttaaatgtctttctatccaaaatgtacagagctaatctgttttaaaagatttatttttctaagcaaaagatgtaactgatactactgtcctattagcttttctaaggcatattaaatggtttctttaaaatcacagtataaatgagtaaattaattgacttggatttaaaagatgtttcctgttgatagtacttcccagtatgttagctcaataaatgaaagagagatgytgccaatcagagacgttcccctttaattaaataaaaggaatgtattcaagtatttctaaagatgaaataaaggaaaataaaaacataataagcattaacatggcctatgtgccctgcttcttagataggctcttaatcaaacaagaccacaataaaatatgccattacattatcatgttcagtattagaaacaagaattttcatgtacaaaacatgcttctattagggacac

SEQ ID NO: 389193 - DNA, 561 bp, Homo sapiens
atgggcatgcacaggatgttccgcgtggtgtagcctgtgtacaagtctacttctctgtggggtgacagaaccgaaaataacaacaacaacaaaagggcagaagaaataaaggacacagtcagtcataaatctcccctcaatctttgcaatttacatatgcttctattgcatatgactaatggcacttttagcttctacattcagggacagtaacattccacagagttttattaaaacctttccaaaaatattctaatctgttggttcttttgtctccaagtgagttttctaggatagtctctaagaggctttcagcttatcatttgaagtatccagcattactaagtaaacagaccaaaaaaaaacgtggattcagaggagaaatacaattaaatttggtaaaataacataatcctttgaagttgatcgtgtttatgagagatataacttgctaaaccaacttatagtgtttccactttaaaaacttagagcagtggtcagcaaaccgcacccaggggccaratcagccctctcctgtttataagtaaagttgtattggaa

SEQ ID NO: 389194 - DNA, 591 bp, Homo sapiens
atacaataacaaatgtatcaaagttaagaaattaaaaaggaaatgtgaaaatcccttgagatgtatgaaaataaagacacaatatatcaaagctcatgggatgcagttaaacagtagttagaggaaaatttagagctatgaatgtctatattaagaaagaagaaataattcaaattaataacctaaactgccttaagactgaaaaaggaggagctaactaaaactaaagcaaacagaagtaagcaaataaagattacaaaagaaatacatgaaatttggatgagaaaaacattagaaaaaaatcaatgataccaaaagctggttatttgaaaagatcaacaaaactgayaaacttttaagctagactgaccaagaaaagacagagagggagagggagaaaaagaaagacgattcaacttaataaggaacagaaatgaaaaagggaactttactaccaatcttacagaaataaaaaggatcataaagaactaccatgaacaactgtatgccaataaagtagacaagttagttgaaaatggacaaatttctagaaagacacaagtgactaaatatgacataagaagaaatagt

SEQ ID NO: 389195 - DNA, 591 bp, Homo sapiens
atacaataacaaatgtatcaaagttaagaaattaaaaaggaaatgtgaaaatcccttgagatgtatgaaaataaagacacaatatatcaaagctcatgggatgcagttaaacagtagttagaggaaaatttagagctatgaatgtctatattaagaaagaagaaataattcaaattaataacctaaactgccttaagactgaaaaaggaggagctaactaaaactaaagcaaacagaagtaagcaaataaagattacaaaagaaatacatgaaatttggatgagaaaaacattagaaaaaaatcaatgataccaaaagctggttatttgaaaagatcaacaaaactgataaacttttaagctagactgaccaagaaaagacagagagggagagggagaaaaagaaagacgattcaacttaataaggaacagaaaygaaaaagggaactttactaccaatcttacagaaataaaaaggatcataaagaactaccatgaacaactgtatgccaataaagtagacaagttagttgaaaatggacaaatttctagaaagacacaagtgactaaatatgacataagaagaaatagt

SEQ ID NO: 389196 - DNA, 548 bp, Homo sapiens
ttccttaactggcatctgttcttacaatactgcttaagaacctcctggctgcagaagacctagggtgggatgctttgttgcctcagctctttcaaatgtatcccctctcagaaagtaagagagaactctataaaagacattcccccaaaaaggaggattaacataatcaactgtatcctgtgacttcaaatgaaactttggcaacrtctgactagttgtgatcataattatgctctacaactaatcagtcactgaatatagaatttagaattttcagagtttctgtatgaatctgttcattaccttaattgagtgaatgacttgaaaattaagagtacctgagccttgtggaaattgttaaaccactgaccagataattattatacaagcacatattattctgtgaatagaattttcttaaagtagattgcagtaatgttagagaagacactcccagtatatggttgtaaaagccatcatttctttagtgattatttagttattttatttttttctattaaatatgagctttcttggctgtttggcca

SEQ ID NO: 389197 - DNA, 548 bp, Homo sapiens
ttccttaactggcatctgttcttacaatactgcttaagaacctcctggctgcagaagacctagggtgggatgctttgttgcctcagctctttcaaatgtatcccctctcagaaagtaagagagaactctataaaagacattcccccaaaaaggaggattaacataatcaactgtatcctgtgacttcaaatgaaactttggcaacatctgactagttgtgatcataattatgctctacaactaatcagtcactgaatatagaatttagaattttcagagtttctgtatgaatctgttcattaccttaattgagtgaatgacttgaaaattaagagtacctgagccttgtggaaattgttaaaccactgaccagataattattatacaagcacatattattctgtgaatagaattttcttaaagtagattgcagtaatgttagagaagacactcccagtrtatggttgtaaaagccatcatttctttagtgattatttagttattttatttttttctattaaatatgagctttcttggctgtttggcca

SEQ ID NO: 389198 - DNA, 543 bp, Homo sapiens
ggcctgtgccaccatgcccagctaattttttttttaaatagagatgggatttttccatgttgcccaagctagtgttgaactcctgggctcaagtgatcttcctacctcagcctcccaaggtgctgggattacaggtttgagccactgagcccagcctaggcagttctaattatgatgaagtactttctcatktagaaccaagcagcctcccaaaatggccattctccagtatttgttttgacttttatttcgtatccaaaccctttgagtatagggattatgttatgtcttttctagtaaaacatcttagtttctaaactttattttccatatgcctccttaagatgtgggttgacagtctttggacaaactatatattattaatatatctttaaaacattgcagccttaacactacagactaattgcgtcttgaccctggtaaaatgaggtgggacagatacctgtcttagtttgaaacctatgtatctgtcagtacggttttaatggagaattagttttttaaagaagctacattccattt

SEQ ID NO: 389199 - DNA, 543 bp, Homo sapiens
ggcctgtgccaccatgcccagctaattttttttttaaatagagatgggatttttccatgttgcccaagctagtgttgaactcctgggctcaagtgatcttcctacctcagcctcccaaggtgctgggattacaggtttgagccactgagcccagcctaggcagttctaattatgatgaagtactttctcatttagaaccaagcagcctcccaaaatggccattctccagtatttgttttgacttttatttcgtatccaaaccctttgagtatagggattatgttatgtcttttctagtaaaacatcttagtttctaaactttattttccatatgcctccttaagatgtgggttgacagtcttyggacaaactatatattattaatatatctttaaaacattgcagccttaacactacagactaattgcgtcttgaccctggtaaaatgaggtgggacagatacctgtcttagtttgaaacctatgtatctgtcagtacggttttaatggagaattagttttttaaagaagctacattccattt

SEQ ID NO: 389200 - DNA, 505 bp, Homo sapiens
gttgggctacagcttggttttatacattttagggagacataagatatcattcagtacatgtcccttggtttggtctggaaaggtaggacagctggaagcatgggggccaggtagcatccaggtcatagtcggattcaaaaattttctgatgggcaattagttgaaagagttattatcaragacctggaatcaatagaaaggaatgtctggcttaaggtaagggttttggagcccaagcttttatcatgcaaatgaagcccccaagtagcaggtttcagagctcttatcagaccagacagctaccagaatcttagactctcctggatcagagaaaagacctggaaagggaaagggtttctctacagaatgtagattttccccaggagacagctttgcagggccatttcaacatatgtcaaagaaatatatttggggtaaaatacttcaatttctttcagggcctgccgtcatgtgatgctgctatactagagtcaggctggagttt

SEQ ID NO: 389201 - DNA, 572 bp, Homo sapiens
cattttctggctagtcatttagtatgccaatgagcaagtatttattgagtatccactatgaatgtataattggagaacaagaaatatagtccacctctacgaaggaaggtggtcccataagactgtaatgccatatcttttctgtgccttttctgtgtttagacacacagatacttaccattgtattatagctacctacagtattmagtacagtcacatgctgtacaggtttggagcctgggagagatagactataccaccttatagcctaggtgaagtaggctataccatctaggtttgtgcaagtcactctatgatgttctcacaacagtgaattacaacaatgcgtttctcagactgtatctcaccattaagtgacatattactgtataaacttgcttctctcaagaacatcactttcatttaggggaagtcagataaacacaccatcaaagaataaggttattttaatatattttgtgactatatatttgaaaaaatccagtataatgtacttgctaagcaagtatgaattttaaaataaattaaatttgcttgagattgaagaatcc

SEQ ID NO: 389202 - DNA, 593 bp, Homo sapiens
gtccatattcacccatctatactcttatgtttccatgccccaatttaatggatacatcaacaaccaaatatagataagatttatccccttcataaatgacagcttggtttactcccaaataaggaattctaacaaattatggtaatggttcagggtaagaaaaacatggaatagggagtgagagatgtaagttgtaatggctgcatatctagttacagttacatacaawtttctcttgtttgttaagtatatattaaatgttttttcttctcccttctcactgttttatgtaagaggcacagattatgcttatttttaaaatttagtctttaggtgacagaataatttgggattgtgacttaactaccaataaaataatatcatctgaagatagaaacaatttccgagacattgtgtcatctttgggaaaagaagttgagagtatcatttgcataaaagatggttgaatctcatatggggtaaacacgtcgttgttattgtcactgtttagaagcctaaataagtgtagaaaggcatgagtagacaaaagggtagactgtgctggtttttaattcattgtttctcggtccata

SEQ ID NO: 389203 - DNA, 522 bp, Homo sapiens
tactgtagccctgatagttattgggggtcctgattaaaagcctcctccccgattttggcttaaaatgaaatcatgtcagctagtattgactggccacataggatgctcaaagctcattgaatttaagataatttgtcttcactgattactatgaacagcatgaagaaataatcacaattttaatgatggtacctgaagacaaataatttaaatagtagattgtgtatttaataaaaaagattcccatatatcaacttagttgagtctcatggaaactttgtaaagtatatatgaaagatactactagtccactttccagacaagaatctgccacttagagagcttgaaagacttaaaaaatcatacrgttgataaggggtaaaactgagatcagaattcagtatcatttgtcaagcgctttttttttctgaaatcttcacttatttgaggtatgaatcagtaccaatttcccccctgcacccatcctaaaatataaaatttagacactaagtacaaagaaag

SEQ ID NO: 389204 - DNA, 553 bp, Homo sapiens
atcctatttgcacctctgctgagatacatgttgtattttctggcactggtgtgtactgttaaggcttgaagagtaatacagaaatgaatttagtgataaaggaaatactaaattkgaattcaccaactctctagattattgtaaactctggggacttgcatgaatccaataaataagtgaaataaagaacatttgacaaaaagaatgaggaactaacatgatgggagattcctgttctcaattacttcaggaaggaagggaactagcacaagaagccaagaaggagagaaaaggtgaatgaatgtgagagaaattcataaaaccatcaagaagacttttgctggcaacgtgaatggacagaatgatacctgattattattttgtgcttgtgatagaaagcgttataaacactttaattgtatatacacttgaactaggccaatgttttaggcagagataagattaaaatgtggatagcctgaggatgctaagaaggtattcagtcagactaccggaaaaataaatattttggattaaaatatgacaagaagaa

SEQ ID NO: 389205 - DNA, 538 bp, Homo sapiens
gctcccaggttcaagtgattctcctgcctcagcctcctaagtagctggaattacaggagtgcaccaccacacccagctaatttttgtattttcagtagagacrgggtttcaccatgttggccaggctggtcttgaactcctgacctcaggtgatccaccctcctctttggtcccccaaagtgctgagattacaggcatgagctaccatgcctggccatccttaaaatttttaaatgatgtatacattatctcaactaaaacctaactcttgtaatagctattgtaacacattttatttggaaagatgttttcaatcagaatggcaagatactataattgtcctctaatgattcagcggttattaacaaaaagaaattgactttatatcactatgtatatacagatgaagtgagataaaaatatatgtaagaaaacatctgtttattggaatgttccttgtgttcatactttattaaaatgaatgtgttaaattactctgaaggaaaatacgtatgcagtctacacgtatataatgacc

SEQ ID NO: 389206 - DNA, 647 bp, Homo sapiens
tgaacaagaattttgttattgttgctgtaatgttagcccaagccaactccataatttgttcccttttgatgcaatattgacccactttggatactttcattctccctttttgatttgatattagacaaaaagtagacaccatttatcaaagtcaattttgggacccaaaaatatacattttatatttggtactaaaaggcacgcttgctttattttatttattatttttgtggtttttgtttgaggggagtggatagtaggggtgggagaaacctgttaaatttaaactatcatgggtttcagaacaacctgttatatcaattataccattcagattagtagcttgatcacattaaacaaacttctgaactaatttgcatgtgtagacaccgctttttctgtggtatttctactgtacgtccctttccttttatgaaaaataaaatgtaattaaatagtgtgatagataaattcctgtcagaactgttctttaaaaacaaagaattattcaagacacttataaaaatgaytgataagtacaaaatagaaaaggatacctgggaccaatatttaggcatggatggggctttggtaggtatagaagagaggtcagcaaattcattcattagccttatgagtcaaaaggc

SEQ ID NO: 389207 - DNA, 364 bp, Homo sapiens
tatcacagtttagtgcatgcaaacatcatttacaaggtttcctgctgaacgttacaggatacaaataaaccccataaattaaaccaaccctcaaaataaccttctcctgactgcctgccccctgcctcaccttgtcaatgcttgaaatgcttgaaaagggtttctcaaacgggctccctcactagaaakttgggtagatgagtgtttcttttagctggtgtcagtttctgtgtgtgtgcatatgcacgctctattggatcagcgaaggttcacattttatcaaggcttcatgtggcttgcccctctcagtcctagctggtacaggtatgttcatcactaataagtaagcattttaggcatttaa

SEQ ID NO: 389208 - DNA, 510 bp, Homo sapiens
aagccacaggctattttcaatcaagtcaactaggatgaggcatcaatgaccaggtggatggaaggaggtgaatttttgaagagaggctgctcctggggaaatctgcatataaagctagctgtcccatggagttgggcagaasagggttcagagaaatgtcaggagtattcagcagacaatcctaccccactgaatttcctactcaatatgattttccaacttaatcttttcctagttccagatgaatattgaataatttttagagattcatattcaaggggactgtgacagtgtgactgactttcttgaaataacaaaggggagaaggaaaaaatgaatatttattaagcacttacacaagatctggcaattttacatatacattcttatgcaaatcttcacaaaaaaaccttaatgaggttttgagaaatgttcttgttttatggatgaggaggctgagacttaggaaagataactaacttaccacaggttacccaggaagctggaccc

SEQ ID NO: 389209 - DNA, 555 bp, Homo sapiens
aggtgttaacagtgttacttttttcaatatttttattggtgttagtccctaaactatttcctttatataggtttcaaattctcagttaggctacaaacagcttaaagycaatgacacatctttaatttcctcatcagctcttcccatgccctttaccacataagaattcataccatgcctaaaatattgtttcggcttaagtaaatgttgttgtttattattatgtggtgattagtctttctgagatagcatcacacttttaccctatgccatacataaaggcctacaccctatcctaattgtcatactaggagaaggaatcaggtcgcagtgttgtcattgctgaagtccgtccatgttcctttcagttgtagacaaactcttgtacagcttcttcttcctccctactgtggctttcatgaaattctcagtgggagataatagggatcattctctcccaatggataggtatagctcttaaggcaagagcaagggaaatgctggaggccactgagcctccaatgtaagagttgctgccagtcgcactcacattag

SEQ ID NO: 389210 - DNA, 620 bp, Homo sapiens
gagtttctatgactcccttttattaatgactgacttctcatctcatggtttgtatattgagcatcatgggtattgttaactgtccctggaacctgatcttcacacggagtcagaatatgtgctctctgagaaggttaatcacacaaacgctctttgacttctttctcatgaatgccacatcctcctcrgaaccaagcccacgactgactgacaagcccaatggagaaagagcagaaaacaggaaaacatgtattacacattgccctgcattcatcagactgcccttcagaaaggggaaataacaaagagtgaatggtgggaagtcattttatctgctagaaaaatatgccctgttccctactcaaaaaacaagtggttgtgaagcaaccgcattatttaaagctacaaggcaaacaggaagaggcaaaccaaacaggcagaccctgagaacttcccgcaagtgctcccctcagctgggctggtttgcagtctgatgggcatgctgacaggctccagtggttgctgtgaacccagagcattcttgacgagaaaggaaagaggaaaagaaagtgccagttcttctttagcaagctatttggaaaacatttgctaattcaaag

SEQ ID NO: 389211 - DNA, 539 bp, Homo sapiens
  misc_feature (1)...(539): n = A,T,C or G
agtctcccagcataatggtgtgtccggaattggtgggttcttggtctcactgacttcaagaatgaagccgcggaccctcgcggtgagtgttacagctcttaaggtggcgcgtctggagtctgtcccttctgatgttcagatgtgttcggagtttcttccttcttgtgggttcctggtctcgctggctcaggagtgaagctgcagatcttcgcggtgagtgttacagctcataaaagcagcgtggacccaaagagtgagcagtagcaagatttattgcaaagagtgaaagaacaaagcttccmcagtgtggaaggggacccgagcgggttgccaatgctggctcgggcagcctgcttttattgtcttatctggccccacccacatcctgctgattggtacagcccantggcctgttttgacagggcgctgattggtgcgtttacaatccctgacctacatacanacgttctccatgtccccatcacattaattaaatacagagtttggacacacaggttctccaacgccccaccacagca

SEQ ID NO: 389212 - DNA, 539 bp, Homo sapiens
  misc_feature (1)...(539): n = A,T,C or G
agtctcccagcataatggtgtgtccggaattggtgggttcttggtctcactgacttcaagaatgaagccgcggaccctcgcggtgagtgttacagctcttaaggtggcgcgtctggagtctgtcccttctgatgttcagatgtgttcggagtttcttccttcttgtgggttcctggtctcgctggctcaggagtgaagctgcagatcttcgcggtgagtgttacagctcataaaagcagcgtggacccaaagagtgagcagtagcaagatttattgcaaagagtgaaagaacaaagcttccccagtgtggaaggggacccgagcgggttgccaatgctggctcgggcagcctgcttttattgtcttatctggccccacmcacatcctgctgattggtacagcccantggcctgttttgacagggcgctgattggtgcgtttacaatccctgacctacatacanacgttctccatgtccccatcacattaattaaatacagagtttggacacacaggttctccaacgccccaccacagca

SEQ ID NO: 389213 - DNA, 632 bp, Homo sapiens
gttccagatgaatattgaataatttttagagattcatattcaaggggactgtgacagtgtgactgactttcttgaaataacaaaggggagaaggaaaaaatgaatatttattaagcacttacacaagatctggcaattttacatatacattcttatgcaaatcttcacaaaaaaaccttaatgaggttttgagaaatgttcttgttttatggatgaggaggctgagacttaggaaagataactaacttaccacaggttacccaggaagctggacccagattccaagtttagcttatctgacttagagaaggtgattaatataaagaccttgactgacattttgtagaacgaattcttagattttaattttctgtttgtgttgatttcaacaagactcttgcctcttacctatacstcttttcccttgtcttaaaaccaggcattaattcggctttactttctcacggagatgttgaaaaatcaaatgagacaatgcatttgacagtattttaaaacttatggagtactatgcaaatataaatttcatgacaatgtaaatattaactagatttttaaaaacctaaggagtggacaaatttctcatcgtttttttcaagtcttttggaaactaa

SEQ ID NO: 389214 - DNA, 520 bp, Homo sapiens
ttacattttaattttttagtaattcataataaaaaagtagcactgatgtgtccactattcaatttggcaaatatggattgactattatagactcctccacaagcaaaaggctaagtatgatgtgttaaatttgttttaaatgtggcagaatagcagtgtactttgcagaagcagaaarttcagactttctaaaggtacagtttttctgaagaatttaatgataagcttggctaaatatgccgaggctatgttatgaaggtcttcaaaaaatattggccttcatcctgcaggcaatgcagagagcttttctgaataggcaaatcacctgagcaaagtgttaacttggaggaagcgttcagggttcactgactatggaagactttgaaaccagatagggcggaaagaaactatttcaaaataatcatctgcatataaggaagaattaaaggtaactgatatttttaatgcctacatatgcttatgaaagtgtcaggtattgctgaagactttatagacataa

SEQ ID NO: 389215 - DNA, 618 bp, Homo sapiens
tgtgtctcttggccaccagggatgtggcactatcatcagcaatagcaccactccaccaatgaatgtccagagcctgtggtggggaaatcaagcctccaggrcagtggcctctgaattatgtcattgtctatccctattggaaaaagaaacaaacaaaacaaaaaacacctgtataaatatttatttatacattataaagactctacagtacagataatgaacaatagaaacataaccaaaatataatttttaaatgatgcaagatacaatatacaatattataaaatgtctccctacgtattgatggcttcataactaccaatagctataatctaatgcttcacctatgctaagatgaggttaaaagtctatcccgcaataggtctcattacagaatccattgtttttgccatataatgttctcataactatttcagttgtaccattttctggctattcatttgtgtttacattattatttttaactttaactcatgtgttattcaatgagggaatattttaagctggtttaccttattgtggaggtaatgtagtcaacaatagacaacatgacccacaaatattcttaataagacagaaatgaactgcaatacacag

SEQ ID NO: 389216 - DNA, 622 bp, Homo sapiens
gagtttaaagtttatgtaggatgttggatattgaaatggaacataaataagaaaactcagagatagtgtgaagtcagaaacaactggtttctatgtcaagattcatattaaaatgtgaaaacctggtggtaatactattgactgaaaggaaactttgagagtattctttgagctacgagttaccataaaagtgttagttattattatgttgcctactaaattatgatcttctggaaataaggaagggcttgattctggaatgtgtcacccatttccaagtaagagtacataccagaaaattattgatgggtctcatttcatgcacagttctgctctgaggaactragaagcaattctgtcttctttgtcaaggtctggaggctatagagacgggtcacaattccttgatactcctgaatgaaagtctttgattacatcttcaagttctggttctttcttttggccaagatttacactatccaaatggaataaagactggagatattgtttatgtaatttttgcttcaaatctgatttattcctaatgtggctttgtcattaaaaaaagactgaaggaattttatttgcattacctgaaagcttttagattaaaagatattat

SEQ ID NO: 389217 - DNA, 539 bp, Homo sapiens
tttggtctactttagtaattctaagaggtactcatctaaattatgtaatcacctcagtgaagtgatagttcaagtatcacatactttttttcctctactaaagaattattattataatccattgactgaatgaatgaataagaaagtctgtgataagccacagtgcaactgagattggcagctccagatcattacaatgtaaaatatatctrtatagtaatgataaacagacactgattgttttttaatcattttgatgcctagccacaaaccagtgacttgtgcctgaaagtggctaattttgaataaggcattaatacactcatatttatggcttccatgggttatcacgtagcagtaggtagtctctcagatttctagctcctgaggctctttttgcttttggggaaggcttcagataacttgtgcatgaaagacatgtactcttggaattactgttctatggaatgatctgttgttcaggcaggtgattctacctcactttgctctttgctctaaatgtcccaagacatttagaa

SEQ ID NO: 389218 - DNA, 541 bp, Homo sapiens
gaagagcaagctcaggagctgagggctaacttatgaaatgyggggccactgagtgtctgatcaagccatgtgtcggcaggctatgctgtcacccctttgcatgcaaatcaagggctcatcacacagaaaacagtgaatgaatgttccagggaaaacaatcattaacacttcctgagtggttgctgtgtgcccagcaagcctccccacactccacatatacaatttcacctaatctcaccatcctaggaggaaactactagtactacatccatgtgcaaataagaaaactgaggaaaagaagggtgaagtaatttaaaattacagtttataaagaacagaggctggattagacccaggctggatgactgcagagcccacattcataactattaatagcccttggatggataaatgatgaatggattaatgaatgagtagatggatattagaaaagagccttctggtggccttcaaattgcccttcatcgaagattaaaaaaatatttcgccaagctcatttccctggaatattttgtgaaat

SEQ ID NO: 389219 - DNA, 541 bp, Homo sapiens
gaagagcaagctcaggagctgagggctaacttatgaaatgcggggccactgagwgtctgatcaagccatgtgtcggcaggctatgctgtcacccctttgcatgcaaatcaagggctcatcacacagaaaacagtgaatgaatgttccagggaaaacaatcattaacacttcctgagtggttgctgtgtgcccagcaagcctccccacactccacatatacaatttcacctaatctcaccatcctaggaggaaactactagtactacatccatgtgcaaataagaaaactgaggaaaagaagggtgaagtaatttaaaattacagtttataaagaacagaggctggattagacccaggctggatgactgcagagcccacattcataactattaatagcccttggatggataaatgatgaatggattaatgaatgagtagatggatattagaaaagagccttctggtggccttcaaattgcccttcatcgaagattaaaaaaatatttcgccaagctcatttccctggaatattttgtgaaat

SEQ ID NO: 389220 - DNA, 541 bp, Homo sapiens
gaagagcaagctcaggagctgagggctaacttatgaaatgcggggccactgagtgtctgatcaagccatgtgtcggcaggctatgctgtcacccctttgcatgcaaatcaagggctcatcacacagaaaacagtgaatgaatgttccagggaaaacaatcattaacacttcctgagtggttgctgtgtgcccagcaagcctccccacactccacatatacaatttcacctaatctcaccatcctaggaggaaactactagtactacatccatgtgcaaataagaaaactgaggaaaagaagggtgaagtaatttaaaattacagtttataaagaacagaggctggattagacccaggctggatgactgcagagcccacattcataactattaatagcccttggatggataaatgatgaatggattaatgaatgagtagatggatattagaaaagagccttctggtggccttcaaattgyccttcatcgaagattaaaaaaatatttcgccaagctcatttccctggaatattttgtgaaat

SEQ ID NO: 389221 - DNA, 657 bp, Homo sapiens
tgatgggagtccctgttggtgctgtgcctctccagggtgacttcagctgcctgcttacctagagactcccaggcagttccatttcaatagatacagatgtctactgcttaaatgcttaatgacataagagaaggccatatgaagatggaggcagagattggagtagcatagctytaagccaaggaacttttgatgctaccagaagttataagaggcaagaaagaatttacccccggagatttcagaaggagagctgccctgctaacaacaagattttggacttttggtttccaggactatgtaaggaaaggtatatgagtgagaagcagctagcatatcccatctgaaacatcttgtcaaaattcgtttccaatatggcttggcatggcactgctactgatccttccaacatccccaggaggaatggtctagacttgaaaacactcagttgtgttccacacagaatgtccagcaaaagatttaaaactagacttctgccaccatggcacattttatagagacagaaacaaacaaaccaaaattattggcaaaaataaagcttccaagaatacccatcacaaaacagagcttcttttagaagccaaagcaggcattcaacaggagctaaagtttttccgtttttaatctaagcccaag

SEQ ID NO: 389222 - DNA, 475 bp, Homo sapiens
aatatgactttctagcttgaatgtgagactgtttcattcttcctattctttcacagaaggtaaaaatatttgctattgttaattattcaaaagtctcagaaagaagggctttctgcttatgagcttccaaaaattttccaatcagtgctgaggacaggtacagaattgctgatcttaggcgcatatatgctccatcagacataagtctgttccctgagatcagagccgttttgaacatctaatcagaggctttcagagtctcaggctggctcttaagaatcattcctaagacacagcattggcccagaaacatcagataagagaagtaatgagttatcattgcctgactstgttcctctagacatattttacattttatactcactcaataatcattccagggacagagaatcacagggtttgggactctatcctctaccctggagtcttctatcactcccaggtaaattgattt

SEQ ID NO: 389223 - DNA, 634 bp, Homo sapiens
accttctgaaacctgttgtattaccatgattcaaaataagaagagaagaggatctagtaagaaagaataggaatgtttatttctgtgtaacaaataagtaaggctaatactgaaggatttttccctgaagttaatcctccagcaagtatctgctttggaggataaaacaaagtcaaattccttttgcccatgttccctcccttccattttctcccctgagtgaccctttcctctttctcctctcccatcctttacatctccgtttgcctggcatwattaaaatccagaaatccatgtgctaattagtgtggttatgatttgcaacctgtccaatgatgccaggaagtgagacgcaaccttttcaagtttagcagcaaccatctaactcgagtcaaaacagagagatgtgttcagttaatttggaaggagacggtgattgggatttgtatattcaaagttcaatgatgacaggtcacattcaagggggacagactgtgtgttaaaatgcaccaataaagtcagaaactttctaggccaagcagaagcaagattgtttctgtggaatgagctgttaaatgtggaagcccaagagaatcaggaaacctgttttcaatcagacacaaagattatttct

SEQ ID NO: 389224 - DNA, 634 bp, Homo sapiens
accttctgaaacctgttgtattaccatgattcaaaataagaagagaagaggatctagtaagaaagaataggaatgtttatttctgtgtaacaaataagtaaggctaatactgaaggatttttccctgaagttaatcctccagcaagtatctgctttggaggataaaacaaagtcaaattccttttgcccatgttccctcccttccattttctcccctgagtgaccctttcctctttctcctctcccatcctttacatctccgtttgcctggcattmttaaaatccagaaatccatgtgctaattagtgtggttatgatttgcaacctgtccaatgatgccaggaagtgagacgcaaccttttcaagtttagcagcaaccatctaactcgagtcaaaacagagagatgtgttcagttaatttggaaggagacggtgattgggatttgtatattcaaagttcaatgatgacaggtcacattcaagggggacagactgtgtgttaaaatgcaccaataaagtcagaaactttctaggccaagcagaagcaagattgtttctgtggaatgagctgttaaatgtggaagcccaagagaatcaggaaacctgttttcaatcagacacaaagattatttct

SEQ ID NO: 389225 - DNA, 591 bp, Homo sapiens
caagtgattaaaaattgcaatttctttcacataacaagggtgctgtcaaactgcagcccctcaccatggttttacaagactatgtggaaagcacaaagttccatgtgctgagttttgtactccacaactagcctgagattatcaaatcaatgctggaataaaagtttgcaggaataatttccctacacagtcttttgttgatctactgacattgcctaagagatttaattcactcttcttcgtcctttttttttttaatttataagacctgtcattgaaaggctcacccarttttttgctcctcctaatatggatttctgacaaaacatgtcgccatcctggtgtcatttcccaaatattttaccaattaaaaagcaccatctcagaaaactattctcaaaactcacctcctgcaagactcctctcctacattttcacttagaccctatcctaatacctttgtcaataaggctccttactgggtgtctttacttgatcctgcttgcatggcatctttacaaggatatctaatgaagatattgaacatagtatttcaaaaagccacttaccttctcctgagtaagcggagtc

SEQ ID NO: 389226 - DNA, 550 bp, Homo sapiens
gcttggtttctttcccataccatccaccccattcaggaagattctttgctctcacaacaagcagagtcaaaagagggaggaaatggagacaccgaagtccatgaggatagaaaaaatgaggctattcttgtccaaagcatagaggttgagcatggagggagagtcaactaaagtggattcttattggtctgccctttgagatcagacccttcagcacaatctgtcctctttcttttttctccaatcytggagaattatcatttatcatccctgccatgatgtagattgtacagagtttgggactactatagtgcccctttcataaacctgaagtagagtttctcagtgacagagaacacctacccctttctttttctgatgctcatagggatgatattgttatgggctgtgctgtacccgcgtaccattaaagatattgtctttcaccatgctatggcaatttagttacacattaaacagttgacattgtgcaaaggagacctcagaaactttcaaaaacagtgagaagtcctcttgatgggtacttcat

SEQ ID NO: 389227 - DNA, 606 bp, Homo sapiens
tgatttgggatataaattaaaaattttaattgttaaatgatatgcttgaagtgctggcagtgtatccaaatgaaaatattcatgaagaagttgaaatgtgaactataaccttagaacccatggarataggtgagattttaagagggagaatactgagaatgacattagcaaaatttttttcacaccagtcctttgcataaaagacaaaatcatcaacttaaaacttaaagcctttcaaaatctggcaacggacatttcaattccattcaggccaacgattgagtgcttattatgtcaataaaagagaacaagaaaaaaagacacatttttttagtcagggtccttggtcgcaaacaacagagacaaagcctgaataaattaagcagaaaaggaatttattggaagaatactggataactccaagaataattgggaagagtaaagaactggcctcagaaaatgagcagaagctgaagtaggctagtgtgtgtgcctgaattacatctaagaagatgctacaaaaagaatctgacctacaatactaggtctgggtattagaagtcaccactgacatggttgctgggagatgcatgccgtcaccacagt

SEQ ID NO: 389228 - DNA, 606 bp, Homo sapiens
tgatttgggatataaattaaaaattttaattgttaaatgatatgcttgaagtgctggcagtgtatccaaatgaaaatattcatgaagaagttgaaatgtgaactataaccttagaacccatggagataggtgagattttaagagggagaatactgagaatgacattagcaaaatttttttcacaccagtcctttgcataaaagacaaaatcrtcaacttaaaacttaaagcctttcaaaatctggcaacggacatttcaattccattcaggccaacgattgagtgcttattatgtcaataaaagagaacaagaaaaaaagacacatttttttagtcagggtccttggtcgcaaacaacagagacaaagcctgaataaattaagcagaaaaggaatttattggaagaatactggataactccaagaataattgggaagagtaaagaactggcctcagaaaatgagcagaagctgaagtaggctagtgtgtgtgcctgaattacatctaagaagatgctacaaaaagaatctgacctacaatactaggtctgggtattagaagtcaccactgacatggttgctgggagatgcatgccgtcaccacagt

SEQ ID NO: 389229 - DNA, 508 bp, Homo sapiens
agcctacctcaaatgtgctcaraacacttacattagcttacagtttggcacaatcacctaacacaaggcctattttataataaaatgttgaatatgttatgtaatttattgaatattgtactgaaagtgaaaaacaaatggttgtgtaggtacttgaagtatggtttctactgaatgtgtatagcatttgtatcatcgcaatgtgtaaaaagtttaaatcaaaccattgtatgtcagggaccatctgtaggtaagcactgctacaatatggtgtctatttctaaggaaagcatgatcaattagtaatctccagtgatccatctgaattctgtgtgccatactctggatgccactctatttttcttgcctgttatgattgtgcctaccttgtctgctgctatgtggagcttgcctctctgggatcccatcattccaactgaaattggggagcacatatcaaaggcaacaccttctaccatcacacctggcctacaaaggacaaagatca

SEQ ID NO: 389230 - DNA, 460 bp, Homo sapiens
gtcagggaccatctgtaggtaagcactgctacaatatggtgtctatttctaaggaaagcatgatcaattagtaatctccagtgatccatctgaattctgtgtgccatactctggatgccactctatttttcttgcctgttatgattgtgcctaccttgtctgctgctatgtggagcttgcctctctgggatcccatcattccaactgaaattrgggagcacatatcaaaggcaacaccttctaccatcacacctggcctacaaaggacaaagatcacatagctttcaacagtcagcgtctctctccctgatacattcctctatgcctcctctgaacccttctcagcacatcattagtgagggattgatatttaggtagcatatgatgcaaaacttttactgtctggccccttaccttttggctctactgattagaaggtcttggttctcactagaggcat

SEQ ID NO: 389231 - DNA, 552 bp, Homo sapiens
ttaaaaaaaaaatcttcctctaaaatgcaactccctttgacatgcatatgatgaaaataccctttgctcttttcacaactgtttggctgttcttggctcctgactgtgtgttccataaatgtatgttcattttagatggcaaatacttcaaaggcagaaggtgggtctgtggatcccacttcctgcagagctctgaggaataccatagacaatgaacaatgayggcaatgatggaaagcttgggtctgtgtcttagtcatgggaagaaggaacaaaatgaagaagggccagatgagcccttaatatgagtcagagaatagactgatacttacaatacaccattatccttgactgtctccacaactctggctgttgctatatccatttacgcagtgaatactgaggcttagaaaaacaaaattatggacctatgtggtggaggtgggatatggtagtgtggcttcaaatctgcggtttcccctcttcccactcctagtacacagaaaggttaatgggttaggcaatttgggttatcagcgccaccatctaaat

SEQ ID NO: 389232 - DNA, 568 bp, Homo sapiens
taagcaaagctgcatttggctaaagattctacagggtactactgtctccccagckctctctcttttgcaggtttgtctgcaaaaactgaaggacttttgcttttttgaagttcaacataaggatgggtgatatttggcccactgctttgacacagggtcattttgatgtgacctagaaatgaagttagtaaattatcagtatctgttgtgatgcctagcaagatgggatgcctttgcatgctacagggagacagggaggggatgcagtatgtacagtagcatcagggatggggaagctcagaactgagacaaagattgaggaggatgtcggagatggtgaagcatcagggatgatgagggttagactcaatactggtgatttttttaaagagtgttttgcatgttgatacaattttggcactggaatgattatagcaagatggccacatcaaaatgactcactttgcattggagatactaaggaagggttcacttgacagaaatgtccattgagttccctcatctctcctcccctttcatgcctttggtacagaccctcatcacaagc

SEQ ID NO: 389233 - DNA, 577 bp, Homo sapiens
ggactgtgtcgcttcattcagaaaggtgtaccttaggcaattcagtacaccccatgaactgagtcactgccagcatgatttcaggttcactgtcgataatttaattagcacttgcctgacatctacaatacatgaatcacagtctccaccctcacctgcaactccagctcctgggcttccaaattctcccactgaataaatagaagtatctccaactctcccctctcctcattttaccctggayctctgaagagaataaagcaaaattcaacacatttcttccttttcccacaaaatcataaacccccagacccagggttcctagactggcagcgctaggaagtgggaaaaaggcaggagctgcttcaaccagcaaggtgatgaggttgccgtgttcggtccaaaccgttgccttctgagaccactgacagtctcgtgtgaataaacctatctcaaaccccacctcagggaatttccctgaagtaagttcagacccacaatccatggaagcatcgcctccctccttgcaaggcaacgatggactaccacacatcactagtcctcactggtcatgcaa

SEQ ID NO: 389234 - DNA, 577 bp, Homo sapiens
ggactgtgtcgcttcattcagaaaggtgtaccttaggcaattcagtacaccccatgaactgagtcactgccagcatgatttcaggttcactgtcgataatttaattagcacttgcctgacatctacaatacatgaatcacagtctccaccctcacctgcaactccagctcctgggcttccaaattctcccactgaataaatagaagtatctccaactctcccctctcctcattttaccctggacctctgaagagaataaagcaaaattcaacacatttcttccttttcccacaaaatcataaacccccagacccagggttcctagactggcagcgctaggaagtgggaaaaaggcaggagctgcttcaaccagcaaggtgatgaggttgccrtgttcggtccaaaccgttgccttctgagaccactgacagtctcgtgtgaataaacctatctcaaaccccacctcagggaatttccctgaagtaagttcagacccacaatccatggaagcatcgcctccctccttgcaaggcaacgatggactaccacacatcactagtcctcactggtcatgcaa

SEQ ID NO: 389235 - DNA, 577 bp, Homo sapiens
ggactgtgtcgcttcattcagaaaggtgtaccttaggcaattcagtacaccccatgaactgagtcactgccagcatgatttcaggttcactgtcgataatttaattagcacttgcctgacatctacaatacatgaatcacagtctccaccctcacctgcaactccagctcctgggcttccaaattctcccactgaataaatagaagtatctccaactctcccctctcctcattttaccctggacctctgaagagaataaagcaaaattcaacacatttcttccttttcccacaaaatcataaacccccagacccagggttcctagactggcagcgctaggaagtgggaaaaaggcaggagctgcttcaaccagcaaggtgatgaggttgccgtgttcggtccaaaccgttgccttctgagaccactgacagtctcgtgtgaataaacctatctcaaaccccacctcagggaatttmcctgaagtaagttcagacccacaatccatggaagcatcgcctccctccttgcaaggcaacgatggactaccacacatcactagtcctcactggtcatgcaa

SEQ ID NO: 389236 - DNA, 502 bp, Homo sapiens
attctccttattctgagagctggagagaatatttgaattttaatgtactgcatggccttaggatttaatctccctatgccttggtttcttcatgtgaaaatgggcataatgatacctactaggatatccattcaaatgtgtagtgccatgagaagatttttgtctgttttgttcactgccacttgagcctggcaactagtaggtgctcaataaatacttgttggttagttggttggttcatcggttggttggttcattggttggttgaatgactaaatgagtgaatatctactccacttatctaacagaattactgaggaacagatgagccaaagggggcaaactttgtgaagaactgaaagtgctataagttgygtgctgctgcccaagccccctgtgctggctatttcacttcagctgttaaaactagagtatttcattaggcaccttccagagtatcgcaaccaggttactgaacagtcacaatcacagtagcacaaat

SEQ ID NO: 389237 - DNA, 575 bp, Homo sapiens
aaaaaactgcaccaaaatcaacttatactagcttgttatgacatgtctgaacaggatctagtttgaggtactaagaaaggtaagacttcagtttgtaaagaatctctatcagagcaacatgaactctgctaaaattgaaacaggaacaaacatcaaatttataacaaagcttgagtagaagaatggtgaaatcattgatgctttatgaaaagttgatggggacaaagcccacctcccagtcagtagtttacacatgggtaactcatttcaagaaggaatgagatgatgttgaatatgaagcccacaataaaccagctagatcaattttccaaaaaaaaaaattcaacttgtttgtgctctaattgaaaaggactgataattaaaagcgcaaaccatagccaatgccacagacatctcaactggttcagctcacacaattctgactgcaaaaataaagytgaacgaggcctttacttgataggtgccaaaactgttgtacccaaacaggctgcagacaagagcagagatttcagtggaaatcttaaacaaatgagatctagatcctgaaggatttc

SEQ ID NO: 389238 - DNA, 529 bp, Homo sapiens
acttggtatcattcagagtcctaccaagagaatcaaaaccacttcaggtatttcctacagaaagaatttaatgcaggtgamttgtgtatgcaggtgacaagagaactgagagcccaacccagaatgctgagacatcccatagataagcaacagcagggagctgttcccacctgtacgctagagggataaagggaacgggtgatgttacagagcccaggggcctgtctggcaggagatgaaaataccaaggtgacacagccatttccagagaggctgtcaaaccaaagaagagggtgaaggggaggagggaggaaaagagagcagagaaggaggagaaataatagtaataataatgatactctgcttctccctcccagtgcctccaccaccagtctctcatgaatgactctccttgtcagggcccagatggaagccagctgacatgcaagcctgggaactgcagcctgcagagatcaacaaccccacggagtcacagagcagagcaggtgaaggaagaagaatgggtttg

SEQ ID NO: 389239 - DNA, 633 bp, Homo sapiens
tgcatgtcaattatacatcaataaagctattaaaaactttttaaagtatcaaaattttgcatcccgttctctgatactgacatctgtatttttttgaaaaaaagaaaagcatctagaaaaatgaagatactggattcaggaaaaagggcttccaaaataggagagacacaaagggaatccccagaatgatggcaaagaaagttgtcagggcaaagcaacagcttgaaatcatgcctaaaaagccaaaatttcagatcacagaagaacagaaggctccagaggaaagtactatgaaaaacaaaataaaattaatagattttctgatgtattygagtgtggagagaaaatataacttctagcaagatgagggatgaatttcagggaagatcatagaaaattaagcaaaaagcaaaaagacagctagtagcaaaaagttagcatagcaggtgacttaatattcgtgtagccaaattattatacaatcttatttggagaacagaagaaagagatggatgggcaagggaggagttcaggaagaatcagaaagacaactaaatttccacagtaacaagtcaataaacagcatccaattaaataaatagtgataatacaaccaagattatcaaattttta

SEQ ID NO: 389240 - DNA, 611 bp, Homo sapiens
agtgagttcaattacaggcaagctatttgtggttacaatgacattccagggtcagctgtccagcagacaatatgagacatattattgaactgcagaagagcagtcacagttgggcgtgtatartttttcaataattagtgaactatacatagcctgacactaaacaacggcatgtgtgcattttttaacacaatgtattagcacaaggtactaaagatattaaacactgaaaatctattcaaggtcaggaaggacatagagattttggaattattctcaaggaggtagcagtgatgcctggaaagtgaattaaatcactacaaaagatcttgtgtaggagaaaagatatatatgatctctagaaatggatacagcctgagaaccagggtcttctatgtaggcaaaacaatgacccctgagagaagcagcaattgcctgtgaacttgccctctcagacatgcatagaaggagcagtctcagccacaaccacaaaaaagaaagaagctcctaagccttcttccttttctgttcctggcttctggtccccacatgcacactctattctgtttgcctccttcatcacagcctttttcagagaaagtatctctacc

SEQ ID NO: 389241 - DNA, 601 bp, Homo sapiens
ttcccatgctttagataggaagagaaaggagagaaaagaatctaaagaatgtatttgaaaagccaaatgtctatagttttttatcatattcccttgaatgctgacacaaagcatgactaggttacattcctgtacttcacattgttagaccaatatagcatgggttgtgtcaccaaaaccatagactggcaaagtcccacctctaccaggaactcaaatgtcatggtttggttattgcttcccttcaaatccacttcctcatttcaactacttccatttctatcagtgagtccactaatttcctggattttccatttttgatcttattccttccatattggatgtgtccagtctccaacaaagtactgwcatttctttctccagatactagtttctgatctgtgctttttttctcaatcccagtgttccattctagtccttctctacactttccatctccaccacatccactttttagcccactacctgttttgttaagtacttttctaatgggataaaatcaacagaaatcaattcaaatgagcttaaacaagaaaggggtatgttaaccacacgaacagtaaaacaaagtatacagatg

SEQ ID NO: 389242 - DNA, 601 bp, Homo sapiens
ttcccatgctttagataggaagagaaaggagagaaaagaatctaaagaatgtatttgaaaagccaaatgtctatagttttttatcatattcccttgaatgctgacacaaagcatgactaggttacattcctgtacttcacattgttagaccaatatagcatgggttgtgtcaccaaaaccatagactggcaaagtcccacctctaccaggaactcaaatgtcatggtttggttattgcttcccttcaaatccacttcctcatttcaactacttccatttctatcagtgagtccactaatttcctggattttccatttttgatcttattccttccatattggatgtgtccagtctccaacaaagtactgacatttctttctccagatactagtttctgatctgtgctttttttctcaatcccagtgttccattcyagtccttctctacactttccatctccaccacatccactttttagcccactacctgttttgttaagtacttttctaatgggataaaatcaacagaaatcaattcaaatgagcttaaacaagaaaggggtatgttaaccacacgaacagtaaaacaaagtatacagatg

SEQ ID NO: 389243 - DNA, 599 bp, Homo sapiens
tcagtaaatattcagatataccctatggtactgtgctttacagagtaagcatttctccaacaaagagaagtaaaatgtttataacaccacattgtatattataaatgtttagtattattttatacagcattttagctcagtaatttgtattttgaatggataaaaatgaattaagacactgacgcacacacacaccttataaaaaataattttaaaaaattgtagaaatggcatkttatcttttctttatatattttaaagatatgccttgttcttagcagttttttttttctgattgttttcagtttgggagctaatctttccagggatgaaatgatagtattatcaataatactgattatcttgactggcaaattatcttacatgactgaaaccaattggattgataaattactttctaatttagctaaacagtcacttcaatttttagaaatagcatgtattctgaaggccaattatttaacaagttgtgcctttagatagaaacaaagaaaaacagacatttccttgcttaaaaaaaaattaaagtagatttgaatatcaaccaggaattttctaatctcagaaaatttcaagca

SEQ ID NO: 389244 - DNA, 599 bp, Homo sapiens
tcagtaaatattcagatataccctatggtactgtgctttacagagtaagcatttctccaacaaagagaagtaaaatgtttataacaccacattgtatattataaatgtttagtattattttatacagcattttagctcagtaatttgtattttgaatggataaaaatgaattaagacactgacgcacacacacaccttataaaaaataattttaaaaaattgtagaaatggcatgttatcttttctttatatattttaaagatatgccttgttcttagcagttttttttttctgattgttttcagtttgggagctaatctttccagggatgaaatgayagtattatcaataatactgattatcttgactggcaaattatcttacatgactgaaaccaattggattgataaattactttctaatttagctaaacagtcacttcaatttttagaaatagcatgtattctgaaggccaattatttaacaagttgtgcctttagatagaaacaaagaaaaacagacatttccttgcttaaaaaaaaattaaagtagatttgaatatcaaccaggaattttctaatctcagaaaatttcaagca

SEQ ID NO: 389245 - DNA, 604 bp, Homo sapiens
ccccaaagtgggcctgagtaggcaactgcaatgcatcttgacataggtcatttttgagaactaagttgttataacaacccgtggggctgaaattgcccatgatgactacttgagacagttttagagacacagtgatgacaggatatggcagatgtgttattgcagaaaaacagtggctgcattcactgcaaactgtcactgtgtcatgtgcaggcttacagatattccagctgaacagtactttttcctttacatgcaacatccatctcatacaaccactgatgtcactgtggagcatgttattacagaccgagatgagtcacaacgatacggttagttacasctcataacagccccatgctccagctggagattaatgtatatgctaccacagacatttttccctgattagctccactggtgatggagggaggcacttttctactgacgtctcaactcctcttctagagactagaaaacaaaatcaatccatctttccttctcagtgaaatttaggattttgacacattattgtgtaggacagagtcacataatataataggctttgggagagactggtagcagtggttattttgttatgttt

SEQ ID NO: 389246 - DNA, 565 bp, Homo sapiens
aactatatgtcattggtatatttgattatcctctgtctagaaaaatacaaaaagttaaagtgagtaaacaattgtgttagtaaacaatgaaacacaaaagactgataaagtttaatttctagaatatgcaaactgcttttgtctattcacaagagaggcaacagtaaggaatcaaatagaaaacaaatgagcaagagatagaaacagaaattcacaaaaaaaggaattacatattgtcaataaatatatggcaagatgctcaaaatcacgagcagtcagaaaaatgtaaattaaagtagcaacaagacatcactttttactcatcatgctgaaaaaatttaagagtgatagcttctgttgctgatggcaataggaagaatgaatactctcaaaaatgctagtagaaatgtgattttcttctgcaatatcattgaaaaaacatctggcaacatatattgaaattaaaaatatcacttcatgcagtamtttcacccttgggaatctctcccagagaaatacaagcactagtatataaaaatatgtgaatgaggacacttaatataca

SEQ ID NO: 389247 - DNA, 590 bp, Homo sapiens
gtggcaagttttttgttctcatgtgaacatagtcatataaaacagaatttygggaaaaaataaacctgcccatataccatcctttataaaggttcaacaagtgttacactaaaagcttatgccaacctgactttatatattgctttaaaaaaagtaatcaccttttcatacaagcaattgaagtaaaatcatcaccttctgcattttagcaatcattgaatgcccttattttccatcctttcattactataaagatgtgtgaattcagtcctcaaggctttttccatggtgctttgacaatttagccaatgatcattttactatattatttttcttttcacccaaattagaatccgtttgaaacattttcagtacaagagtgtgtaaacttaaaaaaaaagtctttggttctcctcctaggaattacaattactaacttgttcagaatggcaactcatttatcagtagagagtcttttataagtgtgtagagcaaggacatgcttttgaataatattttttagggagaaaagggagctcttctttagatatttttgatattatttcctagccaatacaattgtttggact

SEQ ID NO: 389248 - DNA, 581 bp, Homo sapiens
tatgaacaaagattcctcactccctctggcaaaatggctcctggtggacacacccactaatctgtactccagaacttccaggcaggtctgtgttttagactaaacaagcttaggttaaaaacaagattctgactgcttctaaaaatttattttgtttgcatgtgttttcagtctcatgataaggctcttaataatataagcccaatgaatatgatgaccgagtctttttattacagtgtaaacactcactccatgccagaatgtaagactagaagtattttctctctatatatatacagacttgcacacatgaataaaaatatttatatcaaagaacagagctagctctcacattcatccacatttgggggttcgaataaaaaaagagtataatcctgtatggaaagtgttacctaaggaaatatgacctcaaracaacctcaaataagaaaagactattgacacatacagaactactctagtccatattttcatcaaaattagagtgtgttgcatcagtttcccttactgactgccaattttatcaatttgtctaataaggcattcgattttaaaactta

SEQ ID NO: 389249 - DNA, 591 bp, Homo sapiens
tattacatgatgatgcatgttgaaaagtaaaacagaggaaggatgggaagcgtttcaatggaatagaattaatacaataaacggcaagagtaaatgaagctgtagggtgagaacaaggggaaactacatatagaccactataaaaatcttagcttttagcraggtgggaaggaactggatagtttaagcataagagcaaaatggcctaattttagcaaaacaactaacttttataaggctcccttacgctgccttaaagtgggctatgaaaaaaatagaaagaccaattatgagaacagcgttacaatttagtctagagaagatgatgcttgatcaaggtggtagaattagaaattattagaagaaatcatattctggtaaaatttagaaaaaaagagctaacaggattttctgacagactggatgactggtgtgagagctgactccagttgaccccaatattttagcctgagcaactgccataagggaggtgacttcaatttaaatgggaaaaactgtggatgggagctcaggagtcaattctgaacagtttaagaagcctattaggcatatatatgaatttcaagaaga

SEQ ID NO: 389250 - DNA, 591 bp, Homo sapiens
tattacatgatgatgcatgttgaaaagtaaaacagaggaaggatgggaagcgtttcaatggaatagaattaatacaataaacggcaagagtaaatgaagctgtagggtgagaacaaggggaaactacatatagaccactataaaaatcttagcttttagcgaggtgggaaggaactggatagtttaagcataagagcaaaatggcctaattttagcaaaacaactaacttttataaggctcccttacgctgycttaaagtgggctatgaaaaaaatagaaagaccaattatgagaacagcgttacaatttagtctagagaagatgatgcttgatcaaggtggtagaattagaaattattagaagaaatcatattctggtaaaatttagaaaaaaagagctaacaggattttctgacagactggatgactggtgtgagagctgactccagttgaccccaatattttagcctgagcaactgccataagggaggtgacttcaatttaaatgggaaaaactgtggatgggagctcaggagtcaattctgaacagtttaagaagcctattaggcatatatatgaatttcaagaaga

SEQ ID NO: 389251 - DNA, 577 bp, Homo sapiens
aaataaactaaaactagcttctcatgaaagaaaatggaaagtaaactgtatacaattttaaaaatactcaaggtattcttaaaatatttttgtcataaaacattatagaacgtaaacaatttggaaatattatatttttactcttggaaagctgcactcttctatttayactaacaatgcaataaatgcaaaacaatatcattattacaatgttatgatgttattaatgcttgcttctaaaatagtcttgctactaaaaggattaagtatagcatacataggaaaaaattttcatgattttctcaagataactactttttaaaaaatacttcggaaattatacatgtgctgcatttacttttagtcacaaaaaaactttaaaagttaaaaaaataagtttgcatcatatagtctttcctgaaatactatggattttaaaaaaaggtttcttttagcgaggtttgatgagaagcatcatttaaaaatacagatgtttataattttgaaggaatgaaaagttataatgataaaatgtttgaactaagaaacaatttttactttggtcaatttcacatgt

SEQ ID NO: 389252 - DNA, 577 bp, Homo sapiens
aaataaactaaaactagcttctcatgaaagaaaatggaaagtaaactgtatacaattttaaaaatactcaaggtattcttaaaatatttttgtcataaaacattatagaacgtaaacaatttggaaatattatatttttactcttggaaagctgcactcttctatttacactaacaatgcaataaatgcaaaacaatatcattattacaatgttatgatgttattaatgcttgcttctaaaatagtcttgctactaaaaggattaagtatagcatacataggaaaaaattttcatgattttctcaagataactactttttaaaaaatacttcggaaattatacatgtgctgcatttacttttagtcacaaaaaaactttaaaagttaaaaaaataagtttgcatcatatagtctttcctgaaatactatggattttaaaaaaaggtttcttttagcgaggtttgatgagaagcatcatttaaaaatacagatgtttataattttgaaggaatgaaaagttataatgataaaaygtttgaactaagaaacaatttttactttggtcaatttcacatgt

SEQ ID NO: 389253 - DNA, 592 bp, Homo sapiens
atgacataaaatgcccctgccaacattaatattctgtaaacaccaaattgcactttggaggatattgacaaaaatgaaagcttttctcagtagtttcacagaggaggtggatttatggggtatataactcttatgcctcgaagtcactgatctcgatggagtgagctgaatattaacaggaggtgacaaattgttcctaagctgaaactccaattttctgaataaactgccatcatcagatttatacatcagtataagaaagtttgagtatcatctctgtgttaacctctgtggaggcaataaaggagcctaagaaatgagccctgccttccagaagcatgcartcttcttaggcaggttaagaccctttatcccaacaaagctacagaaaatacagatgagttgaacgtcttagatctttctctgccactctccattataccttcccaggggatgaggcaagctatacagtcctttcttaactctccaacttccatgcatttgggttggtggccctcaatccagatagaaaaggagaagaatcactacaataattagtttaggccacagtaaagttaatcatttagacgat

SEQ ID NO: 389254 - DNA, 626 bp, Homo sapiens
gtttttccatgttatgttccttggcctccacattatgtgtttggtattcattcaggcttctgtttgtaactgtttgttttactttggattccctgaaaatagattctgaggtgaagaattgcatgcagaaatttcacctaagaatgctctaaagcagtgctggccaatagaactttgtgcagtrgtagaagcattctatacctgcattgcctaatagagtagctgtagccactagccataggtgacaatcgagttagtcaatttaaaaatttaaaaataaatttcaacatccacatatagcttatgaactatggtactggatagcagagctctagagagacatacctgtaagaaagtaggaagcagaattggacagaggtagaagctgactcagccagtcctctgggcacgtctagaactgggataggctgtcaaaggtgtccccagttgaagcaaagcaactgaactttagtatgacagcatgagacagtcattggtgctgcctcctagaagaaggagcaaccttgggtgagtcagctcttcactggaaattaagggcaatttccagtgaagagcatatctgtgagcctttagcagccaatattaccagaagcaagtattacagg

SEQ ID NO: 389255 - DNA, 575 bp, Homo sapiens
cacacagagaggagaagcccttgtgaaggcagaggcagagatcagtgttatgcagctacaaattgaagaatatcacagcctagcagccgtcaggtgctaggagagaatcatgaaatggattttccttcagagcctccagaaagaaccaaccaccgccccacagggctgcttgggcttcytcacagcataatggctgtattttaagagcacatgttcaagcatcaagagcagagacaagcattgagaattgcatttcttaagactacagcctggaaatagatcaattctgccatattctattggtcaaagtcacccatgttcaaggggagaaaaacagacatactttttgaaggaagaattgacaaataatttgaaactatccttaaccctccacacttgttaggtgtgtacccaagaaaaaggaggaacagattaggtgaacagctattcagcctctgtcatgattggagctttttaagctgtttatccttttaagcagtaactgtatattttgatcaacatcctatgaagtacttaaaacttgtcttaatccattcagactgttataagaaaag

SEQ ID NO: 389256 - DNA, 501 bp, Homo sapiens
actagttgctcagtttttttgttttcagttattaatagcaacagtcttattatgttayttgagaaaactagtaatcccttagtaactattaattttaaaagtaatgttttatatagggtctagtatgaaagtctatcaacagctagaaaggatactacataaatacctagtaaactattccacttcctcttaaaattagggaattgtgtgtagttggaaattcatcaggtctgaaggtgaaagatacatctttcattatcatgacagaatacaaaaatctagcaaactcatgactgatactggcacccaaaagtaagtgtattactcttgtttctaaaaagcaagtcctgtttttaatctgactttattataagttatcttttatagcctttattataccttttttaatacctttattataagttaccttttacagtgaacttttcctacgaacatgagacttcataagagcagtgctatgtatgtaaggccaaatttgca

SEQ ID NO: 389257 - DNA, 501 bp, Homo sapiens
actagttgctcagtttttttgttttcagttattaatagcaacagtcttattatgttatttgagaaaactagtaatcccttagtaactattaattttaaaagtaatgttttatatagggtctagtatgaaagtctatcaacagctagaaaggatactacataaatacctagtaaactattccacttcctcttaaaattagggaattgtgtgtagttggaaattcatcaggtctgaaggtgaaagatacatctttcattatcatgacagaatacaaaaatctagcaaactcatgactgatactggcacccaaaagtaagtgtattactcttgtttctaaaaagcaagtcctgtttttaatctgactttattataagttatcttttatagcctttattataccttttttaatacctttattataagttaccttttacagtgaacttttcctaygaacatgagacttcataagagcagtgctatgtatgtaaggccaaatttgca

SEQ ID NO: 389258 - DNA, 603 bp, Homo sapiens
ctccaaaggattttaagaagtatgtatatatgatccccgagaacaacttgaaagttcttggcaagcttcttctttcaattcctgggttatattagtgaatctttaggaagtaatggacagtaatgcaggcttacaaatgtcaagctttgctgccttttaagttagaaattttattaaaatttatttttattttgtaaacagaattttgttatcactactataatgtaattatttgtgcattatattaagctcaatagatttctaaaggatttagaaatccagataacctggtgagttgtgaaggtgataaataaaactacttctaatagccacagtggggagatatttgtattagaacactatcattaattatcrtcatatgtacatagccaaaatatatgtcttacatattttaagtaatgtgattaaatgaaagaaaattattacacatgatatgtgtaacatcacagccacttatcatttttgcaaagagtgacatggaaaggaggagagacagaagtagttgaaatatgcattcattcccaagtcccttacctgtcgcaaattgtacttccatcactcttttttatgacaccagaagat

SEQ ID NO: 389259 - DNA, 581 bp, Homo sapiens
tgttctgatagcttctgagaaactatattaatgtgaatacaattttaatactaatagatttaaattaataaataagtgtcatgtcattaatctgcctgatcttatgcataattaaattacatgcatcataaggtcactgtatcccctgaggttcaatgacagccayccagttttcctgtgagaagacagttgtgtgagagctcaacaattcctggtctaactggctcttaaggaatagtatcctgctgtgctgtaacagggatgttagggccttgtagccaccagaggactgagtgtattccatgcatatagtcaagagttgtccaaatctgctttaagataggttagccatttttcagaaaaatgaagaaaaacgctgcattaacaaaacaccattcattgccaagatgatgcttaataaaaaaaatcactgagagctcttttttatttccagcaataggtcagatttgtttcttccagccaaccctgattttctcaattactgttaatatcctgggtcaaagagttaattattttctaaaaatatgatttaatagataatatttaccattttagcacac

SEQ ID NO: 389260 - DNA, 365 bp, Homo sapiens
tgttaagcaaaaagctcattttctgatgtttctgttctccagcaatatgtaaaggtcaagctggagtttccaatcagcactaaatcactagagtgcctgtactgaattgatgtaattcgccccaaattaaaaagaaaaccatgaatttttaatttgcatttacgcaaatgtatgacacttgttgggctttttaatatactgaaaattgcttgttagttccccttactttttaacaaatatctataattrctcaggacctttaaaatggaaatccttatttaagacattagactttaatttttctgtatgtattatttttattcaacatacatcaaaaagctagggcatatttttgtaaatgaatt

SEQ ID NO: 389261 - DNA, 476 bp, Homo sapiens
aaaacctcatgattaggactgggtgaggtggctcacacctgtagtcccagcactttgggaggctgaggtgggcagatcacctgaggtcaggagttcaagaccagcctggccaacatggcaaaaccccgtgtctamtaaaaatacaaaaattggctgggtgggctggcatgtgtctataatcccagctacttgggaggctgaggcaagagaatcacttgaacccaggaggcagaggttgcagtgagccgagatcgtgccattgcactccagcctcagcaacaagagtgaaactctgtctcaaaaacaagcaaacaaaacaaaccttgtgattagctcagcactgtgattggttatggttgcttcagttttcagctctgaaaggcatcaaccttctcctatctctgagatcttgcacttgtggggcttttctttatttgcaatattctctctggccttttgtccatcaccatgcccca

SEQ ID NO: 389262 - DNA, 563 bp, Homo sapiens
atcaccatgccccatccttcttttccctaacacatccttcccacttaacttacctattctttatatgccttcttctcatcctagaagcctttcatgatctgtctatccccaatggattatgtgagcctcctatgtactcgtagaacacctttttttctctcagagcattttccacattttaactttccctttatttgtctgagtcatgcagtagatgagtgattttcgatcattagagtgtacctggaggacttgtttaaatgcagaatgttggaccccatcctcaagagtttctgattcagtagctcttgagtgggtcctaaggatgtatatatctgaaagtgatgttatggttctataactccgtttttgtgaaccctgcaatggaaaaaaactgagaraagttatgtcagcatgatggtggaatataagattcccttgtatcactactcccacaaaaatataattagaaagtattcaaagacaggaacaccaccctgaattcaggggagtaatgaagaaatctcttgggcctacagtatcgagagaaggcatgaccagta

SEQ ID NO: 389263 - DNA, 493 bp, Homo sapiens
ttggtagaagaaaagaaataacagagaacagaacaaaaataaataaaatagagattttaaaaatatgaaaaacaaaacyaagacttggttttcaaaaaataaacaacaattataaacctttagttagtgtaagtacaaaagagagaagactcaaataagcataattagagatgataaaaggagacatcataacagatgccacagaaatacaaatgattcaatacaaatacaaaagataatattgtgaacaattatatgccaacaagtggaaaaatctataagaaatgtataaattcctgaacacatacagcctaccaagactgaatcatgaagaaatagagaacctgaacagactaataataaggaagaagactgaggcaataatagactctcccatcaaagaagagtccaggacctgatggcttcacggctaataaatatttgccaataatattgaattatcaaatatttaaggaagaacacatattaactt

SEQ ID NO: 389264 - DNA, 613 bp, Homo sapiens
tgagtaaatgcagaaactcctagatattttttaaataaaaagagttaatagatatctttgtgcactatgattagtacaggcaagtctcactggcttttgggcttttgatartaataaagattaatgtatatacatacatacaaacacatataaaataatggtttacataaatacacacacacatatatgtgtgtgttttttctcatatatatgtgaaaaatgtgttttgtaagtcctactccaagagcaagggaaatttatatggaaaccaaagaacagtttactgaaaggttgaaggaatgtgtttgtatttttcccctggatttctcagtaattatctccccagattactttctcctaaaacgtttatacctcctaatatgtctaattttatgctaactttagaggcttaaagttattttttaatatacgcatatgctgaaacctcttcaatttctgctttatcttttaagaatatttatcagtgtacaaaaagtatgtttaaatgtataatgctaaaaatttaagaatttcaaataatattagaataaaaaattattttttcctaaagctgagcttaacaaatattttcaaatttaatatttcatgaaaa

SEQ ID NO: 389265 - DNA, 613 bp, Homo sapiens
tgagtaaatgcagaaactcctagatattttttaaataaaaagagttaatagatatctttgtgcactatgattagtacaggcaagtctcactggcttttgggcttttgataataataaagattaatgtatatacatacatacamacacatataaaataatggtttacataaatacacacacacatatatgtgtgtgttttttctcatatatatgtgaaaaatgtgttttgtaagtcctactccaagagcaagggaaatttatatggaaaccaaagaacagtttactgaaaggttgaaggaatgtgtttgtatttttcccctggatttctcagtaattatctccccagattactttctcctaaaacgtttatacctcctaatatgtctaattttatgctaactttagaggcttaaagttattttttaatatacgcatatgctgaaacctcttcaatttctgctttatcttttaagaatatttatcagtgtacaaaaagtatgtttaaatgtataatgctaaaaatttaagaatttcaaataatattagaataaaaaattattttttcctaaagctgagcttaacaaatattttcaaatttaatatttcatgaaaa

SEQ ID NO: 389266 - DNA, 613 bp, Homo sapiens
tgagtaaatgcagaaactcctagatattttttaaataaaaagagttaatagatatctttgtgcactatgattagtacaggcaagtctcactggcttttgggcttttgataataataaagattaatgtatatacatacatacaaacacayataaaataatggtttacataaatacacacacacatatatgtgtgtgttttttctcatatatatgtgaaaaatgtgttttgtaagtcctactccaagagcaagggaaatttatatggaaaccaaagaacagtttactgaaaggttgaaggaatgtgtttgtatttttcccctggatttctcagtaattatctccccagattactttctcctaaaacgtttatacctcctaatatgtctaattttatgctaactttagaggcttaaagttattttttaatatacgcatatgctgaaacctcttcaatttctgctttatcttttaagaatatttatcagtgtacaaaaagtatgtttaaatgtataatgctaaaaatttaagaatttcaaataatattagaataaaaaattattttttcctaaagctgagcttaacaaatattttcaaatttaatatttcatgaaaa

SEQ ID NO: 389267 - DNA, 535 bp, Homo sapiens
gtcatacacatttaacctaaaaatactctaaaaattctagacggaaagatcggatgagatttttaaaaataatctcaaagtggggactgtagtttacaacataacataaaacctataagctgtaaactgatacaattaacactgtaaacttcaaaaaaaactaaagaaatttaaacaaaatctaaagaaattatgtttgaatcctttatcaagacaaagtgcaatttccttaaaatagaacaaggtcytatagatcagaatacataaatcaataaaaaatgaagaaaactttgattaaacattgaagtgcctttttaatatacaaatatgtttaaacttatcaatatttagataaatgtaaattgaaattcctcagcaataattttttatatctatcaaatttgtaaaaactattaagacaatgactacggtctgaatgttgggtatcccacaaaaaatcatatgttttattgctaaagtattcctaatactcaatgtgataggattaatagttgggaatttttggggaattatc

SEQ ID NO: 389268 - DNA, 433 bp, Homo sapiens
actaccttggaagcagagagcatatcccaccagacgctatatctatgggcatcttgatcttgaacttcccagctttgagaactgtgagcgataaatctctgttgtttattaattacccagtctaaggtatttttgttatagcagcccagaaggactaagacatctttggtagaacagtatatggacaaggtatggaaaaaaaaaacacttttagagattgcyggagggactgaaaattaataaaacccctttggaggttaatttgttggtatctactaaaattcccaatctatatgacatttgttccatcaatcaaatacacattttgaattttatttgatacatacttttatgagttacaaaaagatatatatcatgtctttctagcatcatttgtgaaaacataaccttagaaacaacttgaatttccacc

SEQ ID NO: 389269 - DNA, 645 bp, Homo sapiens
aggagaatagcttgcacccgggaggcagaggttgcagtgagccgagatcgygccatggcactccaccctgggtgataaagtgagactctgtatcaaaaaaaaagcaaagtgagattaaaaatcaagattaattcagagataatgaaatgaaacatgacatgtgtagactgcatgatcatagaaataattctaattcttgcttgtctttgatacttgataattacataagtaaagttttaagtttgtttctgctgatcgtaacaaaataactggaactgggaaatttataaagaaaatacatttatttcttataattgcagaggctgagaagtccaaggttgaggggcaacatctggtgaaggccttcttggtggggactctctgtagagtctggagggggcacagggcatcacgtggcaaggaggctgaacatgatagttcaggcctttcttcctgttccaataaagccatcaactctactcctatgatcgcccactaacacaataattcataaatgaaataatttattcatgtgggcagagcccttgtggcccaatcacctcttaagggcctcatctgtcaatactgccacatcggggattatatctcaacatgaattttagaggggacaaacattcaaaccat

SEQ ID NO: 389270 - DNA, 645 bp, Homo sapiens
aggagaatagcttgcacccgggaggcagaggttgcagtgagccgagatcgcgccatggcactccaccctgggtgataaagtgagactctgtatcaaaaaaaaagcaaagtgagattaaaaatcaagattaattcagagataatgaaatgaaacatgacatgtgtagactgcatgatcatagaaataattctaattcttgcttgtctttgatacttgataattacataagtaaagttttaagtttgtttctgctgatcgtaacaaaataactggaactgggaaatttataaagaaaatacatttatttcttataattgcagaggctgagaagtccaaggttgaggggcaacatctggtgaaggccttcttggtggggactctctgtagagtctggagggggcacagggcatcacgtggcaaggaggctgaacatgatagttcaggcctttcttcctgttccaataaagccatcaactctactcctatgatcgmccactaacacaataattcataaatgaaataatttattcatgtgggcagagcccttgtggcccaatcacctcttaagggcctcatctgtcaatactgccacatcggggattatatctcaacatgaattttagaggggacaaacattcaaaccat

SEQ ID NO: 389271 - DNA, 638 bp, Homo sapiens
accatatagagagaattttagatggattagagttcctgacctcttgctttaaaatttcatatttaactttcaccccaagatttcaatgaaatcactgagtaaatgatattttaactttaattctatctctgtatatttctctcttttaattacttatgtttctacactactttctaattcactagatgcttccctaagtgtaaacacctcctgattttagaatcagagttctactacctctgaagtagagacaaaagataytgcattattttagagatgagaaaacagtggctactgagtgatttgttaatttgttataattagttgagttgtaaaactaaaattaaaattaaaatcttatggttttgattcacatgtattataaataaaaatggcaactattatatccactatttatggaatgcctagtatatgtgaagcgttaggttggatataaaaaatgcattggtgagcaagagagataaaattcctacactggagggttttataatatactccaccatactgcctccgtgttgatcttaattgctgtattgttttaccaaggattcagtaatacaagtaacatctaccattttcttctctttaaaaggaattatataaagaactgtgtaact

SEQ ID NO: 389272 - DNA, 478 bp, Homo sapiens
aagtccatccttttctgaccaaggatacacctctttggggagtggatgacctagaaacaaagtggccacccactaccaagtttctcattgtctgtgtgagtgtgtagccccttctttcacacattagaaaattttagctatctagttaagatggcaaatttttagaatagaattttgtttagcaatttcagctactgtcactgctttgtacaaaaagtggtttttttttttttaagaaagtgattgtcacataaatatttgctgcttaactattctatgctggctrtcaaggaccgtgaagggtctgggatttcattttactctgctgaaaagccagcacattagtttgtcacaattttgtggatgcttagaggaaacataagaatcctagaccagagatgaaagactttcttacttgctgcaaaagcagcagccacagtatcagaattcatgtctgtttcctggaccccacttccca

SEQ ID NO: 389273 - DNA, 578 bp, Homo sapiens
ggttgtgaaactcaagatcaatcagcaatagaacctctggagcagctgctgggtgatgagaagaagcaggcagaagaaatggacagaatcctggaggaacctgagtcccacatggcaggtgatgctgaggctcactgcatgtctgccctgctcactcttcagtgggtccaccctacttgggaacccaagagccagtatattgccgtttgcttaaaaggactgtctttcatttatgaccaaaagcgagttagtgtgtgtcaggtcagcygaaggatgaaggaagggcccccattctctggatatgatcttaggtcttcaccctattttctttgtgctgttcaataattctctgtattggatcatcagcatatatgcccaccagtcctttaaatgcaataccatttaagaaaatgcagagttttctcttttctagatagtaggaaagttaaagttacactgcattgttttagaagacagctaggcttaacctaacacatcagtctagttttttggttctgccatgatgactttctggactaattagtcatttttctcctctaattaaaccaggttcattt

SEQ ID NO: 389274 - DNA, 635 bp, Homo sapiens
ctcttattcagttatttctgtagaatacawtttttgaaataaaaatactagattcaaaggtgtgaatatttttgaaggttttgtggtgtggtatcatgaaattaggtttcagaaagtttactccatagttgactttttctaccagctaataagagtgctcatttaccccacttaggccaactctaacaggcttctgttgctttgcatcctgacatatttatctttctggaaacagtgtcctaatttatttctgcagagctactgcctctcagttttggtccatgtggttctggtgaccctgattcttctgctgaaccagaaagtgcacacatcctcctggctgtggtgacccaatcagagccaacgtcttgcaatgaagcttttctttagacatctagaaataagactcttatgttttttttttccaatttgacttgaaacttaagacaatacacaggcctgagttgttggtactattttgctactacgtggagcttgagagtaatggtaacaccaagactggagcaagtggaaggagacatattgtccactgatgctatcagttgagcacaatgtgcagttactttttaagccagattcaccatgggctttttggctcctgaaccaatagattt

SEQ ID NO: 389275 - DNA, 635 bp, Homo sapiens
ctcttattcagttatttctgtagaatacaatttttgaaataaaaatactagattcaaaggtgtgaatatttttgaaggttttgtggtgtggtatcatgaaattaggtttcagaaagtttactccayagttgactttttctaccagctaataagagtgctcatttaccccacttaggccaactctaacaggcttctgttgctttgcatcctgacatatttatctttctggaaacagtgtcctaatttatttctgcagagctactgcctctcagttttggtccatgtggttctggtgaccctgattcttctgctgaaccagaaagtgcacacatcctcctggctgtggtgacccaatcagagccaacgtcttgcaatgaagcttttctttagacatctagaaataagactcttatgttttttttttccaatttgacttgaaacttaagacaatacacaggcctgagttgttggtactattttgctactacgtggagcttgagagtaatggtaacaccaagactggagcaagtggaaggagacatattgtccactgatgctatcagttgagcacaatgtgcagttactttttaagccagattcaccatgggctttttggctcctgaaccaatagattt

SEQ ID NO: 389276 - DNA, 597 bp, Homo sapiens
cctctttttcttcttcattctcgtgttatttatttatatctttttcatcgcacttagccttttcactcttggtcagctttctgttcagtgttcagggaatacatgaagattctctgaacccgcgacaaggaatgctgtagcttggaatagtctttctaagtccagaggctgctttcttcaactgtgtgtgcctttcacaagtttccaacttctattcggagccagccagtgctgtgtctactggtacaaaacatagtgttgtaaggctacacgtggaaatgcgcttaaactagaagcaataacagacataggttagtgtaagttatattttttctgtgagttttgaattttgttttcacttttatatttctgcaaatggaagatggcaaaagggctgtaaagaagtgaagatcagwaactgcctcaaatttcaaggcaagaaaaggcagattgttagaaatatccatctgattgaggaaaagtgacatgtttgcttgaggtatgtgtgtaatagattccactgaccactgcacggaatatgtgcagacacagctgatgctgcaaccttatcttaaaaactcatcctttaaaaaataa

SEQ ID NO: 389277 - DNA, 547 bp, Homo sapiens
aaataggaattatgatgtagttttgataaacagtaaaatattgctaatgtgcagaaatttattatacaataaaagtggcatttcaaatcagtagaggaggtgatttattttataagatagattgtaataaataaattaccatctggaaaagaaataaagtgagatacatacctcacactttaccctaaaataaattacagatgttaaatacaggatataaggctaaaataaattgggaaaaaagaattttaaagtttggaattggagaaggattttgtaatatgacaaaatgctccaatatataaaataaacatgtttaattgcataaaaattaaaatctatrtataaaataattccataaacaatacaaaaaaaacttggaaaaaattacaaccattttaatagctaaggggttcatattcttaacatgtccagttttcatgaatcatctgggaaaagactaatagtctggtgaacaaacgggaagaccatatgaaagtgggggaaacctcaatctcacttataaaggaaaagttacaaattaaaa

SEQ ID NO: 389278 - DNA, 590 bp, Homo sapiens
tctcagttccttcatttcccagcgtcaatcttacatcagtcattgtcaccacccccttctatttactctcgattaccttgccctttttcctgtgccacatctgcctagtaaaaccaccacaatgattacatatggcctgtgcctgtttgtgctcacacccaaggacttggaaatgaatacagaaaaacattaaaccwgctggttggcctcacgttaaatatacaggaatgaactcaagcaggcactcaggactgcccaacagtgtcacaagagtcattaagttcatttactctccctccaccaaagtgactttcacaccaccccttctcaactctccaccatgcccgccccgcacctctttgcctaactgtgacttgatccttatttcactgagaagtttgaaagcaatcagaagagaatgtctacaaatttccactagcgaggaaaccacttcagctgcactggacctgtgcgctttgcctctcctcctggtaaaacaggtgacctacttatgctgtctctaaagcaaaactgatttcacatggagtagatcccatcccctcttattgattcctctaagaattttccca

SEQ ID NO: 389279 - DNA, 590 bp, Homo sapiens
tctcagttccttcatttcccagcgtcaatcttacatcagtcattgtcaccacccccttctatttactctcgattaccttgccctttttcctgtgccacatctgcctagtaaaaccaccacaatgattacatatggcctgtgcctgtttgtgctcacacccaaggacttggaaatgaatacagaaaaacattaaacctgctggttggcctcacgttaaatatacaggaatgaactcaagcaggcactcaggactgcccaacagtgtcacaagagtcattaagttcatttactctccctccaccaaagtgactttcacaccaccccttctcaactctccaccatgcccgccccgcacctctttgcctaactgtgacttgatccttatttcactgagaagtttgaaagcaatcagaagagaatgtctacaaatttccactagcgaggaaaccacttcagctgcactggacctgkgcgctttgcctctcctcctggtaaaacaggtgacctacttatgctgtctctaaagcaaaactgatttcacatggagtagatcccatcccctcttattgattcctctaagaattttccca

SEQ ID NO: 389280 - DNA, 590 bp, Homo sapiens
tctcagttccttcatttcccagcgtcaatcttacatcagtcattgtcaccacccccttctatttactctcgattaccttgccctttttcctgtgccacatctgcctagtaaaaccaccacaatgattacatatggcctgtgcctgtttgtgctcacacccaaggacttggaaatgaatacagaaaaacattaaacctgctggttggcctcacgttaaatatacaggaatgaactcaagcaggcactcaggactgcccaacagtgtcacaagagtcattaagttcatttactctccctccaccaaagtgactttcacaccaccccttctcaactctccaccatgcccgccccgcacctctttgcctaactgtgacttgatccttatttcactgagaagtttgaaagcaatcagaagagaatgtctacaaatttccactagcgaggaaaccacttcagctgcactggacctgtgcgctttgcctctcctcctggtaaaacaggtgacctacttatgytgtctctaaagcaaaactgatttcacatggagtagatcccatcccctcttattgattcctctaagaattttccca

SEQ ID NO: 389281 - DNA, 607 bp, Homo sapiens
aaatctaattatatatgaatacaatacctgaacccatgaaacttctgtagaatacatgaatctgtaaagttatgtattctaaacatttgtagccagaataactttcttcatattttccacattcttggtacacttacgtgtcacacatgttccctgtttttcaaacaaggtcaatgttttcattatatacatttacattgttattgtaactattttccaggtctgtcagtaaaatttagtctcacacattgataccacattcttgcaattatattgtaattctcacatagtaattcaagcctttttgaatatacaaatcatctgaatttattatatcactgctatgacacctcatacacatgttgagaccatttatgccagaaaagattagatttagtattcaaagagccaaatgtaaataattctggattgcttatccaaatggggaactcagagaacttctatagtttaaatatgcaaataytcaaaagtaatttttttgtgaccataccctcctgctactgaatgtttccttgagctggtgtcagaagcagggtttacaatgttgtgctctatttcctgtttaacctattgccaagatgttaat

SEQ ID NO: 389282 - DNA, 510 bp, Homo sapiens
agcgactagttatcactgctggttacacgggttggtcccaacctgaattctgtactaccctttcaatgagagacgcaggtatgggagaagggacttgacaggagacggaggtttacttttctcctaggaccttttgtttgttttcagaaattaaaaaaaaaaaaaacacaataaccacaatcatataagatgtttaaatccaatatatgagcatgccattattttcattgatctttgaaacggattcagtacattcctatgaagcaatgsaacacaatttgggatgagaatttctccaagtgagattcacattatcattatggctgtcaaggatttagaaattaggttgtttgctgattactcttcaatcattcaatcaacaagaaggtatgctgggaatataatgagttttcttaacctcaaattgaagatgaacatcagtttgttttttatttttttggttttgtacaacatcataattgaagagatcatcacaatcaaagtatgttt

SEQ ID NO: 389283 - DNA, 510 bp, Homo sapiens
agcgactagttatcactgctggttacacgggttggtcccaacctgaattctgtactaccctttcaatgagagacgcaggtatgggagaagggacttgacaggagacggaggtttacttttctcctaggaccttttgtttgttttcagaaattaaaaaaaaaaaaaacacaataaccacaatcatataagatgtttaaatccaatatatgagcatgccattattttcattgatctttgaaacggattcagtacattcctatgaagcaatggaacacaatttgggatgagaatttctccaagtgagattcacattatcattatggctgtcaaggatttagaaattaggttgtttgctgattactcttcaatcattcamtcaacaagaaggtatgctgggaatataatgagttttcttaacctcaaattgaagatgaacatcagtttgttttttatttttttggttttgtacaacatcataattgaagagatcatcacaatcaaagtatgttt

SEQ ID NO: 389284 - DNA, 510 bp, Homo sapiens
agcgactagttatcactgctggttacacgggttggtcccaacctgaattctgtactaccctttcaatgagagacgcaggtatgggagaagggacttgacaggagacggaggtttacttttctcctaggaccttttgtttgttttcagaaattaaaaaaaaaaaaaacacaataaccacaatcatataagatgtttaaatccaatatatgagcatgccattattttcattgatctttgaaacggattcagtacattcctatgaagcaatggaacacaatttgggatgagaatttctccaagtgagattcacattatcattatggctgtcaaggatttagaaattaggttgtttgctgattactcttcaatcattcaatcaacaaraaggtatgctgggaatataatgagttttcttaacctcaaattgaagatgaacatcagtttgttttttatttttttggttttgtacaacatcataattgaagagatcatcacaatcaaagtatgttt

SEQ ID NO: 389285 - DNA, 591 bp, Homo sapiens
ctgattccttcatatttttcactaaatcatcattgccgtagtaacttcctgttattttcaactttgaaaatccagagtgtgattgaacaggtcttcatgaatacacgtatttcaagggtcaacatgaagaaaagatttaagtctggggacagacaaagagggtgagtgaaagcttaaggctgcaggttggtgaccataaggaaagtccacggccacgccgcaaacggccttggtgggcccacagtggcatctgaggcatgagaaaggacagctttgtccacatggaaagtttgtgtaagtccacggccacgccgccaatggccttggtgtgccctcagtggcgtctgaggcatgagaaaggacagctttgtccacatggaaagtttgttttagaggatggagacagacggtatggaagttggcaagtgggccaggtgagaggtgttgatgacttgaactcagattaaaggagtagatataasgaggagagaatcctttcaggacacatttatgtgacaagaagaatctccctcctgtttccccagagaggaactggaagagagatgagccttgagtaagataaaaggagaa

SEQ ID NO: 389286 - DNA, 564 bp, Homo sapiens
gttctagtttatgatgttacctctaaaatgttcgcacatctgctgacttagctcctgactggtagttaatttattatcttatcacagtcagtctggcttggctcagtcattaccaagtctgcaactgtactctgagcgaaggaaagcctggtttatctcggtatccttgcattcagcgcaatgtgaggccgggagacacactttcttctgaatgaggtggagccgggctgaggagcgttggctctcgcctgatgggaggcctagtgcagagcccgccaggctggtctggggtagcctgtgtgggactacacaggggtgtagtcttcagcactaatctctggatttatctttatgaaatgtcattccatgttccacgtgccactttcgctgggcaaaaatcttgtaagggttgtctaagagtaaatgaaaaaatatatatgttatcttcatcagtcttaggagacgaatttttgatttatcattcttttctctgctcctagttctcccaacgaagcttcartgatcatgaaagtcaatttattccaattcttatgcgtttaccaa

SEQ ID NO: 389287 - DNA, 605 bp, Homo sapiens
cggtgcattttaccttttctatgtttagctatgatcagatacacaaatacttactgttgcattacagttgcctagagcaggggtgtacaatcttttggcttccctgggacacattggaagaagaattgtcttgggccacacataagatacgccagcactaacaacagctgatgagctaaaaaaaaaattgcaaaaaattctaataacattataagaaagtttatgaatttgtgttgggctgcattcaaagtcatcttaggctgggtcacgggttggacaagcttggcctagggtagtcagtggagtagcatgctttctaggtgttgcctaggaatagtaggctgtaccatttagcccaggtgtgtagtaggttatgccatctaggtttgtgtcagtgcactctgtgatgtttgcacaacaatacatgtgcctgatgatgcatctcacagratatgttcccactgttaagccaaacaccactgtatttgaaagttttgttgttaggtgtatacaagtttagaatttttctttctgaagaattgactctttcagtaggaaatgtctctttctagctctgatgattcttcttgccttaaaatctgtct

SEQ ID NO: 389288 - DNA, 605 bp, Homo sapiens
cggtgcattttaccttttctatgtttagctatgatcagatacacaaatacttactgttgcattacagttgcctagagcaggggtgtacaatcttttggcttccctgggacacattggaagaagaattgtcttgggccacacataagatacgccagcactaacaacagctgatgagctaaaaaaaaaattgcaaaaaattctaataacattataagaaagtttatgaatttgtgttgggctgcattcaaagtcatcttaggctgggtcacgggttggacaagcttggcctagggtagtcagtggagtagcatgctttctaggtgttgcctaggaatagtaggctgtaccatttagcccaggtgtgtagtaggttatgccatctaggtttgtgtcagtgcactctgtgatgtttgcacaacaatacatgtgcctgatgatgcatctcacaggatatgttcccactgttaagccaaacaccactgtatttgaaagttttgttgttaggtgtatacaagtttagaatttttctttctgragaattgactctttcagtaggaaatgtctctttctagctctgatgattcttcttgccttaaaatctgtct

SEQ ID NO: 389289 - DNA, 563 bp, Homo sapiens
ggatttaaaatatgcaaaaaagatagaacacaagaatgctaccttgggggtaaattcaattttttttctcatttaaaaaaattatttagaataaaattaacagtttaaaacaagaagaaaatgtaatgtgaaatttataacatatgcagaaataaaatgcatggtaattctccaaaaaagagaaaaatggacacatactgttttaagtttcttatattattttcaaaatggataatatgatttgaaggtacattgtgataaattaaaaatggacaggagacagaaagtacactgtttaacrgtcttatatgcaaagtggtaaaatattatttgaaagtatattgttatgagttaaagattgtaaacccataaacaacatctataaaataaaataaagagctgtagctaataaggccatagtgtgcaaacattaaataatattcaattaacatggaaaaaggtggaaacccaaaagaaataagaaaaatatggaacaaatagaaaatgaatagcaagatggtagatttaaaccctactatgcccataattacattaaaggtaaa

SEQ ID NO: 389290 - DNA, 576 bp, Homo sapiens
aataaaattttattttcatcaggacaaagtatacatagaaataacacataatctctgacatcttacaggctggggaagcaaaatgtacctgctttcaaagcatttcacttccgtgtgtctttttaatacatttcatctagaatgyacatgtcttgaaatagagatttcaggaagtgaccaagaagaatgattaattagctcagattattaaggggtggacttcaggcaacttggttaatattgtttgaagatgacttttatttaaacatagatttacaatagcaaggtgaactggaataagaggagaacttaatttagcatatttaaaaaatctaacatatctatcctttacataaaagactttttccagtattgcaaattaaatttttatttgtggggtgtagtgaaacagactagagcacaatagctaaaacttcagaggctttgccaactcaaattccccagattttatttttttattttttcttttcatagtttttattttaggtttgggggtacatatgaaggtttgttacatagataaacatgtgacatgggggtttgttgtacatatta

SEQ ID NO: 389291 - DNA, 576 bp, Homo sapiens
aataaaattttattttcatcaggacaaagtatacatagaaataacacataatctctgacatcttacaggctggggaagcaaaatgtacctgctttcaaagcatttcacttccgtgtgtctttttaatacatttcatctagaatgtacatgtcttgaaatagagatttcaggaagtgaccaagaagaatgattaattagctcagattattaaggggtggacttcaggcaactwggttaatattgtttgaagatgacttttatttaaacatagatttacaatagcaaggtgaactggaataagaggagaacttaatttagcatatttaaaaaatctaacatatctatcctttacataaaagactttttccagtattgcaaattaaatttttatttgtggggtgtagtgaaacagactagagcacaatagctaaaacttcagaggctttgccaactcaaattccccagattttatttttttattttttcttttcatagtttttattttaggtttgggggtacatatgaaggtttgttacatagataaacatgtgacatgggggtttgttgtacatatta

SEQ ID NO: 389292 - DNA, 594 bp, Homo sapiens
aattgcttgagccctagaggcggaggttgcagtgagccgagatcaagacactgcactccaggcccagagacagagagagaccccgtctcaaaaaaaaaaaaaagttatttttcacatggtagttcattaaaattttttaagtattaagctttatttatcaactgattaatattttttcctaatgaaacaaaattttactttttttaaaaagtctctttgtactattcaaatactgaatatacaaacattagctagtgaaggaatgaatactgagctgatagccaggcttacttgctagctgggtgactatctcacggaagtctagcaggatttgagatttcaatgagaaatattctgcaaaactttagagttgctgacaaaaggtaaaaaaaaaatgtgcttattaataaaataaggccaagtaatgaaaaatgtatttattaaatgaaggccagggaacactgtgtgaggctkcgtgggtgtgagtacttgctactggactgtcatttctcagttatacagagtgaaccagaggtagatagggaatagttattgtcagcaggatctatagaaatagcaacagtggtgaggagt

SEQ ID NO: 389293 - DNA, 585 bp, Homo sapiens
tcaatgtaatcacgtttattctgttctcagctctgtgatgtgttctgtctaccaaaaggaagctctattgcagccattcaatggtaatcctgcttgtactcacagagtactactattctaagagcttggtaatatactgcacatttttctcttctcttttctcttctcttctcttcttctcttctctttctttttcttttgacggagtcttgctctgtcgcccaggctggagtgcagtggcaccatcttggctcattgcaacctccacctgccaggttcaagcaattctcctgcctcagccacctgagtagctgggattataggcacatgccaccatgcccagctaacttttgtatttttttttttttagtagagatggggtttcaccacattggccaggctggtcttgaactcccaaccttgtgatctgcccaccttggcctcccaaagtgctgggattacaagcrtgagccactgtgcctagcctgtactgcagattttctaaaatagtatagcctatgttaaaacttgtcctaatagacattataagattacttagacattgttttactttaaagactgtgt

SEQ ID NO: 389294 - DNA, 585 bp, Homo sapiens
tcaatgtaatcacgtttattctgttctcagctctgtgatgtgttctgtctaccaaaaggaagctctattgcagccattcaatggtaatcctgcttgtactcacagagtactactattctaagagcttggtaatatactgcacatttttctcttctcttttctcttctcttctcttcttctcttctctttctttttcttttgacggagtcttgctctgtcgcccaggctggagtgcagtggcaccatcttggctcattgcaacctccacctgccaggttcaagcaattctcctgcctcagccacctgagtagctgggattataggcacatgccaccatgcccagctaacttttgtatttttttttttttagtagagatggggtttcaccacattggccaggctggtcttgaactcccaaccttgtgatctgcccaccttggcctcccaaagtgctgggattacaagcgtgagccactgtgcctagcctgtactgcagattttctaaaatagtatagcctatgttaaracttgtcctaatagacattataagattacttagacattgttttactttaaagactgtgt

SEQ ID NO: 389295 - DNA, 551 bp, Homo sapiens
atcattctctttttttcttgaataaggtagtttacatattaaattcttcgctaaagatacagctcttaaattaaaaaatactactactactaccattttgctttagtcagtaagttctgccttaattttctgtctattttatatattttgtctatattttgttgatatattaaagttttttcttgtttttattaatatgatgatttaaggctctagaatttcttctgagtgcagatctacctgggtcatacagatgttgtcatatgtggtcagttcttttacaaatattcttcaacgtttttctctttggcccttaatgatataagaaaacttccaaaaactgtatgttttttagtgttttggagttttattgtttatttaatttcactgcatcttaatcaaataattaaaaatgctttttagaaattactgaagttttgtggtctgaaatatagtcttttttatgatctgtggaatcaaaaaaaaragcattctatatttttaaggtgccaagtttgttatctgtcaattagagaaaactatgtgattta

SEQ ID NO: 389296 - DNA, 521 bp, Homo sapiens
ctccaaatttatatcttttgatataatacaaccttcacatttagaagcaattaacctagggaatagctttatattaaaaattttgaaacaaagggaatgatatcagcaagatggcagaataggacatctcagctcttcccttccaaaaraaaggtcaactagcaactatttctatacaagaccatcttggcaaaaattccaaaattgtaaataaacctgagacagaaccacataaaaactacatcagacaggtaacaacagtgtcactctgactgtgctaccccttccccctccccaatgggcacagtgccacatagagaggattcccctggtccacagtttctaaagtggaaaaataaaacataaggtggccatccagcttaactagcactccaagatgcctctcaggaagcccaatctgttctcacctcatgggaaacatgggatcatggcatgactaggtcacctggggtcaaatacaagcaaagaaaggagatgttactcacagtagacagggcttg

SEQ ID NO: 389297 - DNA, 594 bp, Homo sapiens
tgagtgatgcaattctgagtgaagcagaccatgacattcatttattttcctccccatcacataccccaaacttacctttcatctcagtcacaactgtagtgaagagctccagaaaacctcagattcatcctgcactgatagcagtccactgtaagagcaagcatatttttgcattctgcttcaaagccttccccaaggtagtgggagtctgcttgactagtatggaaaaagagtcccaagtagaggaagagagtttatgtccctgggagtaatcctcaaccactaggcaaggagaactgatggttacctgcaccagactccaggccttcaaggcaagcaattccagaaagcattctatgtgctccccacaaattccagaggaatggaggccctgtttctcatagcagcaactcagtgaggcatacatttatactggcttcccactcctccaggtttcactcctcttaccycttatgtttgtgtcttggataccctcgcaaatcaactacaaggacccaagtccttgtctgaggttctgattttaggagagtaaaaattatggcaattccaaaagaataaaaaataaaaataaaa

SEQ ID NO: 389298 - DNA, 532 bp, Homo sapiens
ggaacaggtggtgtttggttatacggataaatttctttagtgatgatttctgagattttggtgcatccatcacctaagcagtgtgccctgtacccagtgtgtattcttttatgttatccccctcccacccttttcccctgagtccctagaatccgttgtatcattcttaagggcctagtaatctttaaattctgatggtggctgacaaagaaacagagatactagtagaatagaatagagagttcggaatcaaattcacatgacattaaacacatactrgaggaggtatttaaaatcactgggggaaagggatgagcaaataaatgaagttgaaacatatggttaaccatctgaggatagatgcaagctaaatcttatatctctccttataccaaaataaattccagatggatcaaatatctaaatttgaaaagaaaaagaaatgagttttgaaagggagaagtgctatgaaagcaaaacgcaaactccagatgccataaagaaaaaaattaataaattaattacactaata

SEQ ID NO: 389299 - DNA, 532 bp, Homo sapiens
ggaacaggtggtgtttggttatacggataaatttctttagtgatgatttctgagattttggtgcatccatcacctaagcagtgtgccctgtacccagtgtgtattcttttatgttatccccctcccacccttttcccctgagtccctagaatccgttgtatcattcttaagggcctagtaatctttaaattctgatggtggctgacaaagaaacagagatactagtagaatagaatagagagttcggaatcaaattcacatgacattaaacacatactagaggaggtatttaaaatcactgggggaaagggatgagcaaataaatgaagttgaaacatatggttaaccatctgaggatagatgcaagctaaatcttatatctctccttataccaaaataaattccagatggatcaaatatctaaatttgaaaagaaaaagaaatgagttttgaaagggagaagtgytatgaaagcaaaacgcaaactccagatgccataaagaaaaaaattaataaattaattacactaata

SEQ ID NO: 389300 - DNA, 499 bp, Homo sapiens
ttcatgccttggctctgtcactaactagttttataatctttggaaagtcatttacatttgatttgattcaaaagcttcctccatgaaatgaagttaaatgtgaaacaactgaaattttggcagcttatgtagatgaagaggaacagataacccgcacttaaggggtgtgggaagctggagttgatgacacacaaactaaagtcattcttcagacctcagatcctttaaatgttaggtcargtgaagggtaaggaggcagagcaaagggaattgatctgtacagagggaactgtatgaacaaaaactttaagccaagaagttgaacagtattttcagaaacactgtaagtaatttgctatgacttgtagggcataaatcagtagaaggcatttgcttttttaatattctcaacaaacttcaaataaagtagacattaatgttaacattttataggagaaaacagattcagaaatgttatttgcctgaaaacacataactt

SEQ ID NO: 389301 - DNA, 350 bp, Homo sapiens
aaataaggcagaaaaactcctcataccagagttgtcttctttttcattggagggtacaataccgaagttaaaatcattagctacagattacagcatacaggctaaatgtctacatacaaaacaatcaataaaactttttgtttcagctaaacttagaaataaatcattgtcctatttagtgtcagtaggttctacagtaattagtacatcaatcatytgaggaactcgtaataaaatactttactcagagatagaatgtcaccatcaagtcacgaaacctttccagggcgagttaatttggaagtctgcttacttctaaagtaaactgtcaaatgtggtctgtaggttat

SEQ ID NO: 389302 - DNA, 574 bp, Homo sapiens
taattatttaagacctactttatattgaagtatcctacatgttataggatacatgagacattcaaacaaacacaggacaygccactccctacaaaagtgcatggttcaattgaggaaggaagtcttacagatgggacagagaaccagaaaataacataaagccaacatgtaatgtgtaggtccacctctctatctttgtagggatatagcatttcagaccaaaacctttaatttgggtctgagaattcaggaacaaatattttccttggtaaggacatttcttgcacaatttctaatagtgcaaaattggaaacaccgtgaagggcaccaacaaggcaaggttgagtaactattgttcttatcacaggacgtcacatggtcattaagaagaatgggggaaaactacattaagatgacctgaaaagataaggaacacatattttttgaaggataaaagtcagctgtatagtgatccatatacaatacttctatgtatatgtgtacctctatgtcttaaacgtgtctcattgtatacatatacatgtgtgcatataagtgcagacagaattgaaaa

SEQ ID NO: 389303 - DNA, 595 bp, Homo sapiens
ggtgatacacacacacaagcttgtcaagctgtgcccaacacaggtcaaaattcctactaagttgcatgttatgcatcacttcacattcccactctccctttctcaatacctatctcccttacacatgtgtaaggactctacttaggaaggtaagaactagactgaaacactacatatattttctttgtatgagcctgtaacaatatgtgctgtctttmctacaacacagtttataggctttgtttataggctcctatagacactttaggggcacctgaaaccacaaatatatggccctgcgccaaagacagcagatgttctttgggaccgtatggataaaataagagccaattatcatcagaggcttactttggattttagcttactgaattctttctgccttagaaataaattttataattttatcaagaaactacaaacaaaactcattctctcttttgttttttttttttttttttagttttcaagccaatttttcttattgttgaacaattattcactatgcctactgaagttatttggaactgtttttaagtgtgataacctacaggtcacattttacagtttacattat

SEQ ID NO: 389304 - DNA, 556 bp, Homo sapiens
agaaagcacattacaatagtttaaccgtaatagactttgctaagatatgttcagtaaaaatggctttttttcctgagaattttacaatgtccgttatggtaatgatctggatttggatgaatttaatgataactaaaggaagattccacagattttattaatgtccgtgattcgtattacctttttctacagtgcttttttaggtaagcgcatgctgtttgagatacataagtgaacgagytaagaaaggcagcatttctgctgcagtggtaaaggtagacctcatttggtaaaacacataaccaagggaagttgttgcctcttttttgaagtttctctgctagtcattggcaagagaagtcactctcgaataatctcttcacattgtatgtgaccaagccctgttttcttctcttctttctggatgatatcggttcacccttcaaacctttcaaatatttttttcctaggtgtgtcaaggtgtatcatgaaaaaaaagtgacctttgaggccaccaaacaagtttcctgagtgaggctgtttgcctggttggggg

SEQ ID NO: 389305 - DNA, 556 bp, Homo sapiens
agaaagcacattacaatagtttaaccgtaatagactttgctaagatatgttcagtaaaaatggctttttttcctgagaattttacaatgtccgttatggtaatgatctggatttggatgaatttaatgataactaaaggaagattccacagattttattaatgtccgtgattcgtattacctttttctacagtgcttttttaggtaagcgcatgctgtttgagatacataagtgaacgagttaagaaaggcagcatttctgctgcagtggtaaaggtagacctcatttggtaaaacacataaccaagggaagttgttgcctcttttttgaagtttctctgctagtcattggcaagagaagtcactctcraataatctcttcacattgtatgtgaccaagccctgttttcttctcttctttctggatgatatcggttcacccttcaaacctttcaaatatttttttcctaggtgtgtcaaggtgtatcatgaaaaaaaagtgacctttgaggccaccaaacaagtttcctgagtgaggctgtttgcctggttggggg

SEQ ID NO: 389306 - DNA, 565 bp, Homo sapiens
ttttattgctcaagactattgcttgttgcaattgagaaatgtgggaaatagctgaagtgatattttggttaataatttctcaaccaatactttttgaaattttttttaatgcaataaatcttgagtgactgttttgtgcaaagcacaaactagttgcttcagggaacaaaatatactgcctggcattaagwgtctaacatgatatataaagggaaccaggccaggtgccatggctcacacctaacactgtagtcctaacactttgggaggccaaagtgggcagatcacctgaggtctggagtttgagacaagctggccaacatggtgaaaccccatttctactgaaaatacaaacattagccagacaaggtggtgcgtgcctgtggtcccagttacttgggaggctgaggcaggagaatctcttgtacccaggaggcagaggttgcagtgagccaggatagtcccactgcactccagcctgggcaacataacgagactttgtctctaaataaataaataaataaataggaaaccaccgagtttactcatgactgaaaaataagtg

SEQ ID NO: 389307 - DNA, 565 bp, Homo sapiens
ttttattgctcaagactattgcttgttgcaattgagaaatgtgggaaatagctgaagtgatattttggttaataatttctcaaccaatactttttgaaattttttttaatgcaataaatcttgagtgactgttttgtgcaaagcacaaactagttgcttcagggaacaaaatatactgcctggcattaagtgtctaacatgatatataaagggaaccaggccaggtgccatggctcacacctaacactgtagtcctaacactttgggaggccaaagtgggcagatcacctgaggtctggagtttgagacaagctggccaacatggtgaaaccccatttctactgaaaatacaaacattagccagacaaggtggtgcgtgcctgtggtcccagttacttgggaggctgaggcaggagaatctcttgtacccaggaggcagaggttgcagtgagccaggatagtcccactgcactccagcctgggcaacataacgagaytttgtctctaaataaataaataaataaataggaaaccaccgagtttactcatgactgaaaaataagtg

SEQ ID NO: 389308 - DNA, 554 bp, Homo sapiens
tggtgcgtgcctgtggtcccagttacttgggaggctgaggcaggagaatctcttgtacccaggaggcagaggttgcagtgagccaggatagtcccactgcactccagcctgggcaacataacgagactytgtctctaaataaataaataaataaataggaaaccaccgagtttactcatgactgaaaaataagtgatatggtttggctgtgttcctacccaaatcttatcttgaattgtagctcccgtaattcccacgtgttatgggagagacctggtggtagataattgaatcaaaggggcaggtcttttctgtgctgttgctgtgatagtaagtctcaaaggatctgatggttttataaagagaagttcccctgcacaccctctcttgcctgccaccatgaagacataactttgctcctcatttaccttctgccatgtttgtgaggcctttccagccatgtggaactgttagtcaactaaacttctttcctttataaattatctagtcttgagtatgtctttattagcagtgtctttattataacagactaa

SEQ ID NO: 389309 - DNA, 589 bp, Homo sapiens
ccaacaaacacgtaaatgctgttcaggttcttggttattgtcctcaatcctgggaatttaatgtcttccctggattcattttaaaattttatatttaaaagtgatactttcccactagggcacagatgtttttctacaggaaaacctaaatcttaggccctttatgcatggcatatttagtttttcaaaaagcattttcagttattaggaacaagtgaaattatgctttcccaaggcccagcaatcttatatttgtcaacaatctaatagtcagtgagcgtcaggctttttgcattgttacttgatttctgtgtctgtttaggtcctcaaagatacagatgccaaggtggaaccagatgtgcaagagatgtattaggagaaacacctacagaggataaacaagtgaggtatcagaaataggagaagagagctctttgaacacaatgtggatctgacacctgtgaaaggggagagagaaagccaggagggaaggcaggaggactgaggaaaaggagcttyggcctgcagtgtgattctgagaaagtcttggccaggctgatgggaagtcctggagcaaagattgcctact

SEQ ID NO: 389310 - DNA, 597 bp, Homo sapiens
agtacagaaattaatgccaagkttataagcagaatattactgtttacattgttctacattgccccttcatttattatttatctttattttagtctctttattttacaattctaataatagcttagatttactgaaaactcctttgccaggcacagtgcaaagtactttggagattagttcatttcccacaactacttaacatgaggtaagtgctattactatacctgttttacagacaggggaaatgaggcttgaagaagctaagtgacttacacatggtttacacagcaaaaagacacttgagtctgggcactgtggttaatgcttgaaattccaacactttgtagggactgaggctggagggttgcttgagaccaggagtttgagaccagcctgggcaaagtagtgagacctcgtctctacaaaaaataaaaaaattattcagacatgttggcatttgcttgtagtcctagtcaggaggccgaggcagaaggattgcttgagtccatgagtacgaggttgcagtgcctgggcagcagagtaggactctctctctcaaaaaaaaaataataataatagtaataatttcggcaggac

SEQ ID NO: 389311 - DNA, 503 bp, Homo sapiens
taacatcgcagcttctgaatcttgagataatctgaattgttgaaacaggatggaaaggcgacaacagtgtgtttcccatgtgatatgagaagagtgagttcttctattatctgacatctactgtgaatgtattataggtatctcactggattccatctctgaacagagactgtgggtggttatattttggtgggcagagcagaaagggtcagcagcttcagtgccttctcaagacgacaggyttggctgggcagcaagagagcttgggtcccagagagggaagcgggtgggggcagagggagacaaagggctggccttatccattttctcaaatgtcaggcccaaccagctccgaagcttagactgtaattacaatcctcttacttttttgctaatagatgttgagactccaagttgccacaaaacatccacagttttgcaatctaagtaaaatccctggtattaaaagaagggaaagtcaaaaggctgcttccgctaaactg

SEQ ID NO: 389312 - DNA, 595 bp, Homo sapiens
tgctctttattatgggaaaatgagttagtttacatacactgcttaagttataaagatagtattgggattttggggtgctttttttggtttttgtttttttgagatggagtcttgctctgtcacccaggctggagtgcagtggtgatcatggctgattacagccttgaactcttgggctcaagggatcctcccacctcacccttccacgtagctgggactacaggcaagtaccaccatgcccggctaattttttcattttttgtaaagacagagtctcactctgttgaccaggctggtctctaaatcctgggctcaagtgatccgcccacctttgcttcccaaagtgttgagattacaggcgtgagccactgtgccctgccagatagtattgttattcatgttattgctgtccaattatctggtaccttgtatgtgttgaggcagttactatgtaggaaggccgcagttaytatgtaggaaggcctgcacgtgagttatctcagttaactcttattcttttgaggtatacactcttttaccttttaagctgtatactttttatctccctcgtatagtcatagagaggttaaatatt

SEQ ID NO: 389313 - DNA, 620 bp, Homo sapiens
ttaatatatagccaaaaggtctaccttagtgattagttcttctaaatcttttatatctctacttattttttgtccacttggcctgtctcatactaattgtccgttaaagcctcccattattactgcgtttgcagttcttaccgtatcttctgtggatttatgctttatccaagtgattgctgtgttatatggtacatatctttattgtgcaatgtggcttttaacttcaagtgcactgcaatttgttttagttaatgctctctggcttgaagacaacttagtctggtattaggattttaacccgtgctttcttgttgttttcatttgcctggcaatttttgttcatccttttatttttagtctttttgaatctctgcgtgtgtttttaggcatacttttttgtacatagcagggttgttttttttaaagtcaatttgaaaatccttttcttccaataggcaagttaagtcctcttacattaatcaacatgastgtttggtctaaattctgtggtatttttttcacatcattctattatcttgtgggtgtaattactgaatgtgttatatttgctagagtttctttatttggtgtttcttctttatgtttccatttaaaat

SEQ ID NO: 389314 - DNA, 549 bp, Homo sapiens
tatacacagtatgttcgtcatgtgcatcagtcctgcatccatggattcaaccaacctcaaatcaaaaatattcagaaaaaaattccacaaatctctgaaaagcaaaacttgaatttgctgtgtgtactatgtgtacaagtactatgttgaatccatgcaaatgaagtgatgtgcgtgcattgtattagtatcatgagtaatctagagatgatgtaaagtatacaaaagggctgggcrcagtggcttatgcctgtaatcctaacactttgggaggccgaggcaggtggatcatgaggtcaggagatcaagaccatcctggccaacatggtgaaacctgttctctactaaaaatacaaaaattagccaggagtggtgacacatgcctgtaattccatctactcaggaggctgaggcaggagaatcgcttgaaccagggagtcagaggttgcagtgagccgagattgcaccactgtactccagcctgctgacagagtgagactctgtctcaaaaaaaattaaaaaataaaaagtaaagtgtacaaaaggata

SEQ ID NO: 389315 - DNA, 552 bp, Homo sapiens
gaacataaaaagcaggcttcagagaggcagagaaaagcgtgtgttcctctctgaccttttgtttgttgagtgtaccctttaagcagtctaaggtygcttaaggttgctcagaggcggcactggttgaaataacattgccacaaggatttaggttaagggttatgcaaggaggtttacaaaaggaggcagtgttattcaaacgcaaccccccaataaattatgaaatcaatttagtgagcttcaaataagcatctgaagagaacagaaaatagctggcatcacatgtaataggagtaaatattgttttatgaatcttgcttcagttgcatgtgtgttggatcataagatgaactatatttcttactttggaagacactgctgtaaaggacccacatctataactgagattatacagtttcatgttactctctatggcttagactttagtaaagtcctgtctaaattccatccttatcttagctttgataaatgttgaggtatcttatttccatgcgcgagccaagtagaaacagccccctcctgtggccggct

SEQ ID NO: 389316 - DNA, 561 bp, Homo sapiens
tgtattagtcccttctcgcattgctgtaaagaactacctcagactggataatttattttatttatttatttttgagacagagtctcactctgtccaccaggttggagtgcagtggcgtgatctcagctcactgcaagctccgcctcccgggttcatgccattctcctgcctcagcctcccaagtagctgggactacaggygcccaccaccacgcctggctaattttttgtatttttagtagagatagggtttcactgtgttagccaggatggtctcgatctcctgacctcgtgatccacctgcctcagcctcccaaagtgctgggattacaggcatgagccaccccacccagcccagactgggtaattgataaagaaaagaggtttaattgactcacagttctgcaggctgtacagaaagcatggcttggaggcctcaggaaacttaaaatcgtggaagatgaaggagaagcaagcacatattcacatggcaacaggagagagagagacagagagagagcacacaaagggggaggtgctacacactttgaaacaaccagat

SEQ ID NO: 389317 - DNA, 578 bp, Homo sapiens
  misc_feature (1)...(578): n = A,T,C or G
nnnnnnnnnnnnnnnnnnnnnnnnnnnnnnnnnnnnnaaaactcttgtagacattgggttagacaagagttcatgaccaagaacccaaaagcaaatgcaacaaacacaaagataaatagatgggacctagttaaattaaaaagcttctgcatagcaaaagaaataagcagcagagtaaacagacaacccacagagtggaagaaaatatttgcaaactgtgcatctgacaaaggactaatatccagaatctacaaggaactcaatcgaatcagcaagaaaaaaacaaataatcccattaaaaagtcggctaaggacatgaatagacaattctcaaaagaagatacacaaatggtcaacaaacatatgaagaaatgctcaacatcactaatgatcagggaaatgcaaatcaaaacaacagtaygatactacctactcctgcaagaatggccataatttaaaaatatgacataagttaaaaatatgaccaacagatgttggtgtggatgtggtaaaaagggaacacttttacactgtaaactagtacaacaactatggaaagcagtacagagatttcttaa

SEQ ID NO: 389318 - DNA, 472 bp, Homo sapiens
ccccaggggctgggagaggggcggcgatcgctgcgacgcgcccggtggggacgcggcgcggaggcccgacccagaggccgaggcaccccccgccgggagcatcgaggccgccccgagtagtgcggcggagccggtgatcgtctccaggtcggatcccagagacgagaagctggccctatacctggccgaggtggagaagcaggacaagtatctgcggcagaggaataagtaccgattccacatcattccagacggcaactgcctctaccgagctgtcagcaagacggtgtatggggaccagagcctgcaccgggagttgagggagcagacggtgcactacatcgccgaccatctcgaccacttcagccccctgattgagggcgacgtgggggagtttatcatcgctgctgcccaagacggggcatgggccgggtacccrgagttgctggccatggggcagatgctgaatgtg

SEQ ID NO: 389319 - DNA, 585 bp, Homo sapiens
attcccactttacagatgaggaaactgaagcatgcaggtgtgtaagcaaatggtggaaatgagattcaaatccagacagccaggcaccagcgactgagctcttggtttttgtaactcttgaaagatgaaaaagtgtgcagctgccgtgcaaaagtcaagtaaatggaatagcacagaggatagctagtttgtctctgcacctggcctaggatagtgcgctcccacattcacagcccttggttaggggggaaaaaagtgarcctggagaagttacaggaagggatcatgacaaagcattcaagttatcagaagggctttccatttaaaaacagactaacatgattcagacctgtcgatttggaaaaacaaaagtcactgagtgaatgtaattaaattcattaagacccttgagtgaaaggtacaaaaccagctcacccttggacttgtaacactacaggtgtgtcccatgttactaatgagaagaaatgggtgtgggaaccatcacatctctttttccattttgcaccctgggtggcatcatggaagcatgacttgtcaggcgcacatggctccaggcttactagg

SEQ ID NO: 389320 - DNA, 585 bp, Homo sapiens
attcccactttacagatgaggaaactgaagcatgcaggtgtgtaagcaaatggtggaaatgagattcaaatccagacagccaggcaccagcgactgagctcttggtttttgtaactcttgaaagatgaaaaagtgtgcagctgccgtgcaaaagtcaagtaaatggaatagcacagaggatagctagtttgtctctgcacctggcctaggatagtgcgctcccacattcacagcccttggttaggggggaaaaaagtgagcctggagaagttacaggaagggatcatgacaaagcattcaagttatcagaagggctttccatttaaaaacagactaacatgattcagacctgtcgatttggaaaaacaaaagtcactgagtgaatgtaattaaattcattaagacccttgagtgaaaggtacaaaaccagctcacccttggacttgtaacactacaggtgtgtcccatgttactaatgagaagaaatgggtgtgggaaccatcacatctctttttcyattttgcaccctgggtggcatcatggaagcatgacttgtcaggcgcacatggctccaggcttactagg

SEQ ID NO: 389321 - DNA, 605 bp, Homo sapiens
atggaaagcgagtttccaaggtttgtcagacagtggtgaagccaagattactatccaggtcccttgaccctagccagggcttttaattatctttgggcagtatgactggcagggtcccagctcaggtcactccagccgcttatgtaaattaactcagaagaaggtaaatgactgtctaacttttcaaattctggtaactaccccattgggagcttgaagctctcatggctaattagaaaaaggaaattaccatccttggatttcatcactgatttgttgagcatctgttgctctgtgcatgaagcacttcacgcttaactctttcattagctggtgttctgaaacagaagacaagactgttaacaaggccgtcaycaaataatatttaccatacccaccacgtgcctggcaggactagcataactggagcctgaagggagataaggaaaatattagaatttaaaccctaaagcaagagtagatattaacaggttggggtaaatgcagaaaacagcaacaacaacaacaaaacactaggtccacagaagacacactacctctgatgtaccaagttagcagcagacaaaaacaaagaggtgaagatt

SEQ ID NO: 389322 - DNA, 649 bp, Homo sapiens
gttatcccatttacactctaagcttttaaaagttgtttccatatcatttcctacagcataagtgtcatataattttaaggttgaaagaaatcatggagatcattaaaccttcttttgtagaaggaataattaagagccagggagatgtaatgatctgttcaaagtcaaacaattagttttgaggctgggagtagaatctgaaggtcccgattctagcttacattagcaaattataagacattcaccaaatatcagagatcctaggtgttcatgggtatgatagaggaatgaatgctataagaggaaatagagaaaaatgaaaataactattttccatctcagttattaataggttgatcatatattctatattttctaggcactcccaatttacacctgatatctgaaataattattaataagaaccctttttactctaaawatgtactggttcagaacataaattacaggttacttaaagaaacacattaaaaaattgcattgtttttcaatgattccatttgctcagaaaatgtattgaagtgagagttggcctgtactgtaaatacaataacctatcagagtaaaactgaagctgtaatgcattggttttcaaattccaagtcacagtcattagtgggccatgaaa

SEQ ID NO: 389323 - DNA, 589 bp, Homo sapiens
aatgtcactgtcatagaagctagaattggtttttttgagctatctttcacactgactccacctggggttgtgactcatgactcaatggatcctgtgacctgacccagaagtggactcagcccaaccaatcagtatcacccattccccagccccttcccaccaaattgtccataaaaaccctaacccccaagcatttggggagactcatttgggtgatagctccagttctcctrcatgggttggcctcacatcaattaaactctttctctactgcagtgctgtgggctcaatggattgattttgtctgtgcagcaggcaggaagaatctgttgggtgatcacaattaccctgcatggctaagcactgtactaactgttagggatacccagaagtccttgctttcaaagagtgtgtgatttagcagcagaaggagatataattgtaacacattataatagggtaaaactgtaacataatgggtcagttgcccaatgtgcaaagcaatgtgctgagacaccaggttgcatcagagaaagaggtttcattgtagggctgccaaatgaggagacaagaggaaacctcaaaccaa

SEQ ID NO: 389324 - DNA, 498 bp, Homo sapiens
tgttcttggagataatcacacaatagggctggctgattttgctctaaattcatgatcttggcccatgcacttgccctcaagactgccaggcaaccccaccactctctctagtaggccactgcccactcccagatgacaattttacttctctttttcctctcaccttcccttccaccctgctctctccctctggttccaagggacccttccccttcattacttcrctcaactctcatcttcccaataccagactaggacccatcctggctgcttctctcttctgcttcttcctgtgctgatggagaaagtccctccacctgtgctctgaattcatcctctccagctccttgggaacttattgctctcattgtccctctctggctctctcactagtctcttggtttttctaggcaagtccaatcagcacccagacatgctcctcccacctgcagttcatctatctccagcccctcccgttgacaactacttcccaatccc

SEQ ID NO: 389325 - DNA, 610 bp, Homo sapiens
ttatgcctgttagaaatatagatgacatagtactcttaaaaagtgtcttgtatcatacataataaaaaccttctttatgataaaaaaaattttcaaaaatgttaaattatttatttcacttaattcccatggaaacactatgtaggaaactatacgtctcctaaaggttaggaaaattcttttaatttttttgtagtgtagaaaatagttttgttagtttttaaagtgaaaacctggtttgagataagaagctatcatgccgatgcaggcaattagaattgcgttctcwaattttcttctgagatcctcacaatagcagaaactacatatgtatctcctatgtactatgaaagtactagtttttcctctatcaaatacaacttgcctagaaatgtcattaaataaacaatcctatgattaaacaagtcagtattattttatctctgattctgtgctaatatatatatggttagaaaaacaaaatgcaatgattcttctctagattatttttatgtgagtttagtagtcttaatgtcattgtatgtgaattttttatgtaaacatcattcattattatttttattttcttgtgtttttggattatattttc

SEQ ID NO: 389326 - DNA, 476 bp, Homo sapiens
ctctttgaggcttttttttttttgtctttgaagtggaaaattataagcgattagaaaacatggaattggcgaagacagaatagtagaaacactactaaatggtttttaggaggcattgtaaacagattcaaattttcttgaatgcaaagttttcctcctcatttcttattactttcttatttttgtgtctyctatctctctttgctttctctttgttctgtagccttctctgaacactgtttctgtcatcgaggcttttaaatatatattgttaaatattattaacttgatgtaattaagcaaaggaaggaagtcagtctaaatcaatggcaaactggagaaataagcaattttttaggaaatgaaggattaatactcttagggatatactgaaactattgaaagcagtaacacactacatcactaaggaagtggaaggctgccttaactcctacataagcacattttggaaattt

SEQ ID NO: 389327 - DNA, 581 bp, Homo sapiens
tgtatgaacaagaaactcagatcataagcagcagtgggggagaggatgtggatgagtctgtccaatatgccttctcatattggaaaatggctctgttttcatctgatatgcacctgtggttagtagcttcgtatttctttgtgagcatcagttatcctagaattttaaagataattttaataccatcattgttgctttaataatttattttatttgctatttcaactctactatgtggtaatattacttaaaactagatgagaattttctgctttcattgatatttcttgcacgtatatttatattcttctcattaaggctaataatactatgtgagctcatagaattggcattggaattctctgaaggaaaaataatgatccatttcatgagatgagcgatttttacaaactgctgtttccagctcagagtgctttgttcagtgattaaaatgtatttctcaattaaattaaaatgcaaatatagacagtctattttatgattataatagaattatttaaagaaggttttatgtaaacctgctattaatatttkatgcataaactgttcgttttattgtt

SEQ ID NO: 389328 - DNA, 566 bp, Homo sapiens
taatatagaacaaatactagctttctaaagtgtatttctggttgggaataagagcaagctatatgggacatcagttccctttctcgatttggagtccttgaaggaaaactgcttttaaaagaaggaaacctaaaagtagtcttgctctctcatgccaaggatagtgaaattaacatgcagctgggcttctctgataaatggattctgttaggtcactgagggggtgcatgtgacattaagtgatttacagtcctttaccttaatgaaattgtttcagcaagatgacgctgaaagctcttaatggatagcttttcttgatstaatgaaattgcattcctatggcatttaatataaggtgcagttattatttactggagctttccaagggctgctatttgcacagacagttcagaacaaaaagatttcagtggcggcatagaggcgagaatggcttatgacattcgtaagcagatgagtgtgtttgtgagggcacttcagtgagtgtgtccagggtatcatagacccttcaggaaacttctcatcacctaccccagctactgtccatc

SEQ ID NO: 389329 - DNA, 336 bp, Homo sapiens
tgtcaaaactcacagggcagcgagctcagagctaagaatcaggagtatggggaaacatctaatcacatctgtgagaagattagccagaaagaacactccagaaccatggtgtaacatcgtgctaagcctaaaagtaggttaaagatacgtagagagtgggagaacattctaggcytatggaagagagacctgagtaagcattcagggagagtattgtgtgggaacatgtcacagattcaagaaccacctacttttaataatgatagttacgatcgtaaccatctgtattaagttcctagggcttaaaaagtaccaggtattaagaagtaccaggtg

SEQ ID NO: 389330 - DNA, 336 bp, Homo sapiens
tgtcaaaactcacagggcagcgagctcagagctaagaatcaggagtatggggaaacatctaatcacatctgtgagaagattagccagaaagaacactccagaaccatggtgtaacatcgtgctaagcctaaaagtaggttaaagatacgtagagagtgggagaacattctaggcttatggaagagagacctgagtaagcattcagggagagtattgtgtgggaacatgtcacagattcaagaaccacctacttttaataatgatagttacgatcgtaaccatctgtattaagttcctagggcttaaaaagtaccaggtattaaraagtaccaggtg

SEQ ID NO: 389331 - DNA, 625 bp, Homo sapiens
taccactactgttgatacttcatgtcaagtgaacttaccattgaattacacagttatgtcttcaatcactaaagaagtaaatccatctaayttcagtcatgtatataacctactcattccctttaggacacacattggaaatccctagtattgtcaactgatgaatcttcacttttcataccgtgaatatttagtccccttaacaattgatgtatacaaaagtgacaatatcaacctctcttttttcctcaaagtaatttatcatttttaacacaaacaagtattctatgtctgtaacaatatatataatagttgatcaaacttaagaaatcacgggcttcttttaaagtagaaaatattgtgactttttgtattttaattattttcaaacaaaacatttaaatacattctttatgcttcgagctattttgcattcctgcagccaaaacagatttatcaattagatataaacaaaagtataaactgatacaacactaagaaataacacaaagcaatgggataggtgatgctgttttgttgaagaaaacctcttctttgtcatgtgaatatatttttgagaaacaagctcttgtgagtctgccctgcctgtactctgcagggtgaa

SEQ ID NO: 389332 - DNA, 625 bp, Homo sapiens
taccactactgttgatacttcatgtcaagtgaacttaccattgaattacacagttatgtcttcaatcactaaagaagtaaatccatctaatttcagtcatgtatataacctactcattccctttaggacacacattggaaatccctagtattgtcaactgatgaatcttcacttttcataccgtgaatatttagtccccttaacaattgatgtatacaaaagtgacaatatcaacctctcttttttcctcaaagtaatttatcatttttaacacaaacaagtattctatgtctgtaacaatatatataatagttgatcaaacttaagaaatcacgggcttcttttaaagtagaaaatattgtgactttttgtattttaattattttcaaacaaaacatttaaatacattctttatgcttcgagctattttgcattcctgcagccaaaacagatttatcaattagatataaacaaaagtataaactgatacaacactaagaaataacacaaagcaatgggataggtgatgctgttttgttgaagaaaamctcttctttgtcatgtgaatatatttttgagaaacaagctcttgtgagtctgccctgcctgtactctgcagggtgaa

SEQ ID NO: 389333 - DNA, 510 bp, Homo sapiens
gatgagttgtgtttagattctagctcttcaaactgaagcctccacaaaatcattttcagcctaattatgagccttgatgaacctgactggccattgaaagagaccactattcctcaaaaagttaaatagagttatcacatgactgagaaagtctattcctattttcccagaagaattaaaaatatatttctacataaaaacgtatacaggaatattcatagcaccattattcataaaagcctgaaactggaaacaatccaagtatctatcagttaataaactgataagcaaaatayggtaaatctaagcaatataatattatttacccataaatatgaataaagtactgacacaatatagatgaaccttgaaaacattatgctaagtgaaagaaggtagacacacaggtcatatttgttttattccatttctataaaatgttcagaatagaaaaattcatagggactgaaggaagattgttaatttccagaggagggaattgaaaatgac

SEQ ID NO: 389334 - DNA, 562 bp, Homo sapiens
cacaggtcatatttgttttattccatttctataaaatgttcagaatagaaaaattcatagggactgaaggaagattgttaatttccagaggagggaattgaaaatgactgctaaggagtaaagggcgtgtgtgtgtgtgtgtgtgtgtgtgtgtgtgtgtgtgtgtgtgtgtttgagaagataaaaatattgtgaagttagatagtggtgatggttgcacaagtttgagaatatgmtaaaatccacttgatttttcaccctaaaataataaatttatggtatgtgattcatatcttcttaaacaaaaaatgtatatattttaaaaataatctctaacaagactttcacaaagtattccaaaaacatgagcagaaatttcccagacaaaatatttgtagaccacctagacgcagtaaaaaagaattagcatgtcttgatggcaggttttatgtgaagaagagctgtatacaaagtaaaaataaaatccaactggcagcagattattaatctctctttcaccatgctaaggagctgggtccatgtattagtccattttcacgct

SEQ ID NO: 389335 - DNA, 544 bp, Homo sapiens
tactttgtttccaaagcagacacttactataacaacaataataattaaccaatattagctggtgctttgatgtttgctgtctgtgaaaaatcagtgtttccaytgaagtaattatgttctcttaaaacaatttcatttcacaactagaaaatcatagatgcagagaggtgaggcaatttgtacaaaatcatatggtcattcagtaacaaaatccaccctcagacaaaaatcatctgcctccaaaattatatttttattatcacagagcatcctgtctgctggcaggaacttcagcagaaatcaattgaccagcctcaaatcatgtcaattataatttcagtgtttatttctgcacttagtaataaaaggctgtgaagcaagagtgggtatctctgtgcagaccatgtagaataaaaagcaacatcaaactcaccaaagaatccagaccagaccacgactggacactttgtttaatgactatcactgactatcatcagtttcttactcagatgggatgcacagatgtgacagattgcaatgtgtg

SEQ ID NO: 389336 - DNA, 544 bp, Homo sapiens
tactttgtttccaaagcagacacttactataacaacaataataattaaccaatattagctggtgctttgatgtttgctgtctgtgaaaaatcagtgtttccattgaagtaattatgttctcttaaaacaatttcatttcacaactagaaaatcatagatgcagagaggtgaggcaatttgtacaaaatcatatggtcattcagtaacaaaatccaccctcagacaaaaatcatctgcctccaaaattatatttttattatcacagagcatcctgtctgctggcaggaacttcagcagaaatcaattgaccagcctcaaatcatgtcaattataatttcagtgtttatttctgcacttagtaataaaaggctgtgaagcaagagtgggtatctctgtgcagaccatgtagaataaaaagcaacatcaaactcaccaaagaatccagaccagaccacgactggacactttgtttaatgactatcactgactatcatcagtttcttactcagrtgggatgcacagatgtgacagattgcaatgtgtg

SEQ ID NO: 389337 - DNA, 546 bp, Homo sapiens
gtatagtttttgacactcttcccttttattgctggcttgtaaacttatatttccactaagatgaaacatccatttctctatgactctgcctcttcaccaacccttcccatgtgaagatacagttaaccaagcccttctttttgtttctactctcctttccatagatctgtctctaattagtgtttgccacgygatgctgaaggcatttatttaatctctgatttctcttgaaaccatactttttgaaggtacgatccattctgatttagccttctactttttgacataaagtgtcgataaacttgcagatgtttggtattgataattgggaggctaaattattcagacaagcaaaaactttacaatctgttcctcatccactatgtcagcagaagtttccctaaataaaaaagtcagagcgtttagttatttgcagaattgccttcccttttgttttactctgcctcaggcaaatgttttaaataaacacaaatactcaagcatctccctataagtcagtccctctgataaatgaatatttaaata

SEQ ID NO: 389338 - DNA, 546 bp, Homo sapiens
gtatagtttttgacactcttcccttttattgctggcttgtaaacttatatttccactaagatgaaacatccatttctctatgactctgcctcttcaccaacccttcccatgtgaagatacagttaaccaagcccttctttttgtttctactctcctttccatagatctgtctctaattagtgtttgccacgcgatgctgaaggcatttatttaatctctgatttctcttgaaaccatactttttgaaggtasgatccattctgatttagccttctactttttgacataaagtgtcgataaacttgcagatgtttggtattgataattgggaggctaaattattcagacaagcaaaaactttacaatctgttcctcatccactatgtcagcagaagtttccctaaataaaaaagtcagagcgtttagttatttgcagaattgccttcccttttgttttactctgcctcaggcaaatgttttaaataaacacaaatactcaagcatctccctataagtcagtccctctgataaatgaatatttaaata

SEQ ID NO: 389339 - DNA, 546 bp, Homo sapiens
gtatagtttttgacactcttcccttttattgctggcttgtaaacttatatttccactaagatgaaacatccatttctctatgactctgcctcttcaccaacccttcccatgtgaagatacagttaaccaagcccttctttttgtttctactctcctttccatagatctgtctctaattagtgtttgccacgcgatgctgaaggcatttatttaatctctgatttctcttgaaaccatactttttgaaggtacgatccattctgatttagccttctactttttgacataaagtrtcgataaacttgcagatgtttggtattgataattgggaggctaaattattcagacaagcaaaaactttacaatctgttcctcatccactatgtcagcagaagtttccctaaataaaaaagtcagagcgtttagttatttgcagaattgccttcccttttgttttactctgcctcaggcaaatgttttaaataaacacaaatactcaagcatctccctataagtcagtccctctgataaatgaatatttaaata

SEQ ID NO: 389340 - DNA, 503 bp, Homo sapiens
aaggcaatgcctattttctatgataaagggaataacacgggtcaacaagattttcacatgtgcactggctaatgttctatgtagtttttaaatagatggctatttttggtcatccacagtactgatttttaaaaggtagggggctgcgtgcagtagctcacatctgtaatcccagcactttgggaggctgaggtgggcagattacccgagaggtcaagagttcaagaccagcttggccaagatggtgaaaccctgtctctactaaaaaatacaaaaattakctgggcgtggtggtgggtgcctgtaattccagctactaaggaggctgaggcagggagaataagtgcttgaaccctggagtcaaaggttgcagtgagccgagatggtgccactgtactccagcctaggtcacagagagacagagtgagactccatctataaaaaaaaaaaagatagggggcaccacgtcctagtagccttaacattacccatcccagctttcc

SEQ ID NO: 389341 - DNA, 604 bp, Homo sapiens
tattgcaaatgtgttaagcattcatatagcagatgctgctggtgccctgctcatgccctttcatcatgaccttttcagtgtacaaggaccctacttccaaggaacagcatctgcatttctttgcctaagggatttctttagttgtcagagcccactttgccaaccttagtgataagccaaaagtgctaccaaattaatatacagctttctcatccaaagactaatggaatgtggaatgtaaatactccattttcctcacctctcagcaggactmaccctgcatgtcctgtacacatggggtttagctcccattacacagtgttagttgtctgataagtcaccttgtatcgacttccttcctatacctgccttaccactcacctttaggtgttttgtagtgtcacctgttcaataaactatttgcactcaagtcccaattcctggtctagtactgtggcccagatatgctcttctgaaatccttcataagaggctcaatcctgcccctaaatgctaactgggaatctggattcatggtgcctggatacattcagacagactacctaagtattacctgattgtatttctacttattttactttcaa

SEQ ID NO: 389342 - DNA, 610 bp, Homo sapiens
gtatttctacttattttactttcaaaccttgtttattttttacacttttagaatgtggtaatgaattgcattgtggcccctaaaaggtatatctatgcagaacctcaggatttgaccttatttgaaataagcgcctttgcagatataacttaggatctcaataagcgattaccttgtattagggcaataaaatctaaattcagtgatgaatatccctgtaagatgcagaaaatggaaggaagatcatgtgaaaacaaagatggagattagagttatgctgccgcatgccaaagaacgtgagtggccagcagccagcaaaatctaaagagatgtggaacagattcttccttaaagcctgcaaaaggcaccaactctgttgacaccttgatgtcagaattctggcattcagaattgwcaaagagtaaattgctgctgttgttagccacagtttctggtgatgcattgtggaagtcctacaaaactaatacagatgtcacctgtatttttcaggactctacagagaaacaatcaatagtatacatatgtgtgtatactactggacatatatatatcttcaaattatttatttacttattataggaattggctt

SEQ ID NO: 389343 - DNA, 442 bp, Homo sapiens
ataaaaccatcagatcttgtgaggcttattcactwtcatgagaacagcatgggtaaaacctgctctgatgattcaattacctcccagcgggtcccttccacaacatgtggggattatgggagctacaattcaagatgagatttgggtggggacactggcaaaccatatcacccactatccatttccatatcagatctgtgagtacaccccagtctcaaatgcctatgtatacaaactaaaatcatctcaaggtaaggaagtccctgtcctggaccaccctccacggactaagcttattccattttaaaataattccctgtagcttcttaccccaagctttaatgtttatgcagacagttacgttaagactttggatttctgtttcttagtgagcactctcgttctcaccttctttcatggaccttggcttacattcattcag

SEQ ID NO: 389344 - DNA, 568 bp, Homo sapiens
tttgctcatgttcaaggtaacataatttaagttcaaagatataacagcttgggaccaatcaggagacagacaccatgtagtggcttaaataagggaagatgaaataaataattagaaagctatgataaargagtaactataagaataaaaaataagtccataatatggtgctctccagttgagggagagcaccaaggggaaaataatttggggaggaccctctccaatgctgggctacaggcctcattgcagcaggtgcagttacatcccactggatgactaagaaagaccttcgttgcccagaccagtgcatgttcatggttactggacaaggagctagtgggcaggtatggagaggaagagggagccacagtggacagaaaacctagggtacttgttgtgagtattagctgagctacagaaggcaaactagtgggatgggtgagccaagggaattggggtatgagtagggatgaaaggcctgaaaggtatagttgctgagttgagaggtccatggttaggtgaatatcaggccagtctggggctgggaggtcaccaaaggactgtg

SEQ ID NO: 389345 - DNA, 584 bp, Homo sapiens
gactgggcaatttgcaaaggaaagaggtttaattggctcacagctccacagggctggggaggcttcaggaaacttacattcatggcagaaggggaagcaaacatgtctttcttcacatggcagcagcacggagaagtgaagagtgaaggcgggggaagccccttataaaagcatcagatctcatgagaactcactatcacgagaacagcatggaggtaactgcccccatgattcaattacctcccactgggtccctccaatgacatgtggggattatgggaactayggttcaggatgagatttgggtggggacacagccaaaccctatcagtactccttggtatttacccagtgcagttgaaaacgtatgtctacataaaaacctgcatgcagaagttaataacagcttgattttaattgccacaatttggaagtaaccaacatgtcttcaatgggtgattagcgagattaactatggtacacatgtcattggatttagggcatactctaatctaatatgatctcatgttaactaactatatctgcaaagaccctgattccaaataagatcacattctgaggtt

SEQ ID NO: 389346 - DNA, 600 bp, Homo sapiens
acccttccttacagcatattcaaaaatcaactcaagattgattaaagagtaaatgtaaatcccaaaattayaaaagttctggaagacaacctaggcaagaccattctagacataaaaatgagcaaagatttcatgacaaagatgccaaaagcaatcacgacacaagcaaaaattgacaagtgggatctaattaaacttaagagcttctgtgcagcaaaacaaactaccagcagaataaagagacaacctaaaaaatgggagaaaatatttgcaaagtatgcatctgacaaaggtctaatatccagcatctataaggaacttaaaccaatttacaagaaaaataaatcatactaaggtattttaatagtcactgaaataggggagcttactatcatgaataaagatgttaaagggagtcttctttgttatggatattctatttgcctctccacaagcactctgtcaccccttcttacacatattcgcatataagaggccaacagttgagttgcttctgactaccacttggctccaattattgagcaataacagcaggtgatcagcagatcagaggggaaaaagaatgagaccaggatgatc

SEQ ID NO: 389347 - DNA, 600 bp, Homo sapiens
acccttccttacagcatattcaaaaatcaactcaagattgattaaagagtaaatgtaaatcccaaaattataaaagttctggaagacaacctaggcaagaccattctagacataaaaatgagcaaagatttcatgacaaagatgccaaaagcaatcacgacacaagcaaaaattgacaagtgggatctaattaaacttaagagcttctgtgcagcaaaacaaactaccagcagaataaagagacaacctaaaaaatgggagaaaatatttgcaaagtatgyatctgacaaaggtctaatatccagcatctataaggaacttaaaccaatttacaagaaaaataaatcatactaaggtattttaatagtcactgaaataggggagcttactatcatgaataaagatgttaaagggagtcttctttgttatggatattctatttgcctctccacaagcactctgtcaccccttcttacacatattcgcatataagaggccaacagttgagttgcttctgactaccacttggctccaattattgagcaataacagcaggtgatcagcagatcagaggggaaaaagaatgagaccaggatgatc

SEQ ID NO: 389348 - DNA, 582 bp, Homo sapiens
tgtttaggcatgggagggaatccgaccaagtaaataaagacaggcataaggactcccagatccaattgagaaacagacaaacttggccttcagtacagccggctttttcatccaattccatgcaattcacttcagctcaatcccttatattaaattcagtgttgttccaaagtagacctgatgtggggaaacagaaggaagcagtagacactggctttgatgtcagacctggatttattctcaacttagccatatgtaagtggtgcaaccctaacttatataatctcactcaacttcaatgtctccatctgygaaatgggaaaaatgatccttgaagtactgaagcagaatttcaagcaggtaatgtgtataaacatgagtggtgaacagtcaacatattaaatatcattttcaaccccttcctctcactatcaaagaaatagactgtaaagagacaccttcactgcttcaaaacagaaccaaacacagctcagtgttcaatcgagggaaacctgtgagagcagtgaggaaggactgagtttttttcctggaatgatcagggaaagtttcacatagaaaata

SEQ ID NO: 389349 - DNA, 561 bp, Homo sapiens
catatatacactaaatacaattctagtcaccaatgcctaatcattggtgacaccttacattcttacattcctttttttttccaaatgaaagacatctgtggagtaaaaatagaagaaacaattaaacacttagctctgttataggaagtagatgatatgtggttagagctaatttcctttgttgtaatataaatgttgtttaatttgttcaacacatatttcataagcaattaggagatgcagacattagagtccaactcaacagccagttttgagcgccttctatttgccaaggtgagctgaagcttgtagctaaaatttcagtgctttgtaaatgggatagaatacatttcccaaagaccaaaatactttccactatgatttttgaagtgactcatcccactcaaaacatcagaaatggctgcttggggaattgtctctattacaaaattagtttctcttgttgcaaatgatggtcccattttacagytcataatgaatcgttactgttaattgtacgtagagttttccaacctatgtctttttttcctaccatcactc

SEQ ID NO: 389350 - DNA, 666 bp, Homo sapiens
cccttcccagagagtaattatattctaggtgaagggaggacaataagtgagtgcaagtaagtgtgtaaattgttggacagtgctatgtgctatggacagacagtaaagccaagccaggcagaagacaaggaaaatcactattsttattatcactgtaattaaaattatagaaggttattcacataatcaattataatcaacagaatgggtatagcaatacatgtggacttccctgttaccctaaaatcacaaagtagatgtagaattgttcccaaacaggacagtatgcaggtagatgggtgatgaagacagagactgagctcaaccttgaaacaagggagtaggaatttgctatctagaaaatgaagtcgggttggaggtgtgggatctgaagggggagcatctcaaggaggtggcagggagctgcgtggaagctgcgtgtgtctgtggggctgtgagcagaggctgcgatctggtgaggagtggctgaaaccctgccctgggagaaccagcagttgttctcacattcactggactgacatgtcctcaggccccacgctgggtgcactatgcacattagctcattaaatgtgcttcctgactttaccaagtgggtactgttatcctcattttcaggcaagtttgatctctcatctaaacatacta

SEQ ID NO: 389351 - DNA, 666 bp, Homo sapiens
cccttcccagagagtaattatattctaggtgaagggaggacaataagtgagtgcaagtaagtgtgtaaattgttggacagtgctatgtgctatggacagacagtaaagccaagccaggcagaagacaaggaaaatcactattgttattatcactgtaattaaaattatagaaggttattcacataatcaattataatcaacagaatgggtatagcaatacatgtggacttccctgttaccctaaaatcacaaagtagatgtagaattgttcccaaacaggacagtatgcaggtagatgggtgatgaagacagagactgagctcaaccttgaaacaagggagtaggaatttgctatctagaaaatgaagtcgggttggaggtgtgggatctgaagggggagcatctcaaggaggtggcagggagctgcgtggaagctgcgtgtgtctgtggggctgtgagcagaggctgcgatctggtgaggagtggctgraaccctgccctgggagaaccagcagttgttctcacattcactggactgacatgtcctcaggccccacgctgggtgcactatgcacattagctcattaaatgtgcttcctgactttaccaagtgggtactgttatcctcattttcaggcaagtttgatctctcatctaaacatacta

SEQ ID NO: 389352 - DNA, 527 bp, Homo sapiens
aggtccctcccacaatgcgtgggaattatgggagctacaagatgagatttgggtgtggacacagagccaaagcatgtcactgacctagaagtttggttaagcttacggaatctagacccagcctgtgtgagtccacatttggctctgccatctactatctaccagactttgagcaagctatgtaactctggatgtctcattttcctcatctactaaatggagataataacactgacttcaccagattattaggaaaattaagtgagatataagttagaagatagaacagtgtttgccacacactaagcaagatgcarctgtcctctgttgttcttgttcttctttttattatcatggctgtagagtatatttgttaagaatgaaacttagcagtcagactggttctgtctgctacttatgagcttcaagaacttggccctacctagccacactgtgtcataatttcctccaacataaaatggtaataattacagttctcatagggtagaggggttatggtgacaatt

SEQ ID NO: 389353 - DNA, 527 bp, Homo sapiens
aggtccctcccacaatgcgtgggaattatgggagctacaagatgagatttgggtgtggacacagagccaaagcatgtcactgacctagaagtttggttaagcttacggaatctagacccagcctgtgtgagtccacatttggctctgccatctactatctaccagactttgagcaagctatgtaactctggatgtctcattttcctcatctactaaatggagataataacactgacttcaccagattattaggaaaattaagtgagatataagttagaagatagaacagtgtttgccacacactaagcaagatgcaactgtcctctgttgttcttgttcttctttttattatcatggctgtagagtatatttgttaagaatgaaacttagcagtcagactggttctgtctgctacttatgascttcaagaacttggccctacctagccacactgtgtcataatttcctccaacataaaatggtaataattacagttctcatagggtagaggggttatggtgacaatt

SEQ ID NO: 389354 - DNA, 585 bp, Homo sapiens
actaagtccatgtggttacagtggaaaaagccatggaaaaacatgccatgaccttgccttctctccatgccctgcagctgatgaaccaggaacaggatcctaatccaaccaatcagaaattgggactaaaagacttcagatagtctgacggcactattgagtgaatattggtagttgatgacttactgatagctacttcctgccatactgactggaaaacagtggcagttgatatgctgatctgagagaggactccctggtagagtggacyggttctctattgtagtctgtgctcaagggtcagctgtagccctacccttggaagctgtgattccattttcaacaatggaatcaattcttatttttcttaaacaaagtgaaataggtttttaaggcctgtgtccaacaaatattaacttaaaacctcaccaaatacaacttaaagcatttttttttcttttttctatttcttggttaccacaaaccttaatttaaaattctgttgatcagactgggtccaaataaacaaatggttttttgaatcatttttatccattatcgagtgtgatttattgacttaaatcc

SEQ ID NO: 389355 - DNA, 743 bp, Homo sapiens
agtggagtgacctaggtttaaggcagaggtttgggaggctgtaaaataaaacaggtgtttttgtattcatgctctcagggcccaattcagtaatctttctactgtatttccactagaagaaacaaaacacatttactgcaaagaggagggagcaccttgctattcagttgattttgaagaaacatagctttatgttctaaatctagagttgtscttactatataatagcaggcaagtaaaagtagctttaatttcttaagcctctgatttatatggctgggtgagctaggatactctacatccaggttaagagattcaggatagaattaacttgtagaaaactagagtttgattaagtgatgatttataatttttagtgagagaggagtctatgtatttatagtccttattctttctctaaattctgtatattatctatctgggttggaattacaatttgtaacaaatgacattcatgattatcttaataatttttctattttaattgaaggcacctattagcatatgacattgaggtcatctttaatccaggtgatgaccactatagaactcctggctccctaaactcagtgactacagccttgatgctaccggtggcaattgcttgattcatagaatcatattaggagtcaatatcaaatgatcaattcttctttcgtgggaatggtggacttctaaggagatgtaagcattatcatatccattagctctatacacattgg

SEQ ID NO: 389356 - DNA, 743 bp, Homo sapiens
agtggagtgacctaggtttaaggcagaggtttgggaggctgtaaaataaaacaggtgtttttgtattcatgctctcagggcccaattcagtaatctttctactgtatttccactagaagaaacaaaacacatttactgcaaagaggagggagcaccttgctattcagttgattttgaagaaacatagctttatgttctaaatctagagttgtccttactatataatagcaggcaagtaaaagtagctttaatttcttaagcctctgatttatayggctgggtgagctaggatactctacatccaggttaagagattcaggatagaattaacttgtagaaaactagagtttgattaagtgatgatttataatttttagtgagagaggagtctatgtatttatagtccttattctttctctaaattctgtatattatctatctgggttggaattacaatttgtaacaaatgacattcatgattatcttaataatttttctattttaattgaaggcacctattagcatatgacattgaggtcatctttaatccaggtgatgaccactatagaactcctggctccctaaactcagtgactacagccttgatgctaccggtggcaattgcttgattcatagaatcatattaggagtcaatatcaaatgatcaattcttctttcgtgggaatggtggacttctaaggagatgtaagcattatcatatccattagctctatacacattgg

SEQ ID NO: 389357 - DNA, 588 bp, Homo sapiens
tgccttctgtgtgtcctcacatggcaggaagagcagttttcttcaagcctcttttgcaagggcactgatctcattcaggaaggtggaacccttatgacttaactgcattccaaaggccccacctcttcataccrtcaccttaggggttaagatctccataaatggctttggggaaacataaatcttcagatcataccacagcctgagcagaatcataggttaatcaatgcatcaatgcttccccatttattttcttgaattggaggtcctgatatgctcaaggaaccagtgacttgactccacttgtatcttggcattggctttttctcccctacatcttggctcctgtactgactcctgatttcaaaagatagataatgctataattgagcctttctttgaggttctgctttctgagaaacccaggctaagccaattcatttgccctcaattcaccaataaaatatataaagcttaatatagagattatttagcaaatatttcacaacacaccatttgttaagccaggattcagatcaaggtctactttaccacagtgcctcatgagaggaagagccaattgctcat

SEQ ID NO: 389358 - DNA, 522 bp, Homo sapiens
gatctcattcaggaaggtggaacccttatgacttaactgcattccaaaggccccacctcttcataccgtcaccttaggggttaagatctccataaatggctttggggaaacataaatcttcagatcataccacagcctgagcagaatsataggttaatcaatgcatcaatgcttccccatttattttcttgaattggaggtcctgatatgctcaaggaaccagtgacttgactccacttgtatcttggcattggctttttctcccctacatcttggctcctgtactgactcctgatttcaaaagatagataatgctataattgagcctttctttgaggttctgctttctgagaaacccaggctaagccaattcatttgccctcaattcaccaataaaatatataaagcttaatatagagattatttagcaaatatttcacaacacaccatttgttaagccaggattcagatcaaggtctactttaccacagtgcctcatgagaggaagagccaattgctcat

SEQ ID NO: 389359 - DNA, 442 bp, Homo sapiens
tgaagctgaagcttcaagaccatcacttgcactgattccttataacttccagtagctaattgagagtttttgttattgttgttgttgttttttaagagagctgccaaattctgcctttatgtcccacaggatctggattcactactgcttgttttctcctccctaactccactcactatcccaattagtggtaactccatcctcctagatggtaaaccaaaaaatcttgaaataactcagtatttctttacttctcccacatwtcatgtattatccaatccactagtaaagtctacccactccatcttcaaattgtcctcagaatcttgtcttcatggctgtcaccctagtttcaaccactgtctatcacctgagaaatttaaaagcttcctcacggggctacctgcttcctcttttgctctgcattgttctattttgaaca

SEQ ID NO: 389360 - DNA, 548 bp, Homo sapiens
ggaaactaatctctttttaatagaaacttttcctactgttttttttttcttggaaacacactttgcaacccaaatcacatttagaatacaatgaaacagaatatgaaatgatatttttctgcaaactatcatcttttctggttcattttcaagatctttgatatttacatatgacctttccatttttattaacagtttgttgaatttttgcattccagccagcagaagagaaaggtaatttacagaaagatttgacagttatacacacagctataaacttcagtccattaacttatttcttgtgtaacctttagtcaattctaccaaaacatccatataagcrtatgccttttttcctttatgttaaagaggtctcattatgggaccctatttgtagaatgtcaaaagaaaaggaaacaattttatagtgtctccttatggttcacagatgtttatggcttttactttttaagtcacacaagtaaaaatcaaatatatttatgtgttgctcagatttctattacatgtgaatggatacatatttgaca

SEQ ID NO: 389361 - DNA, 548 bp, Homo sapiens
ggaaactaatctctttttaatagaaacttttcctactgttttttttttcttggaaacacactttgcaacccaaatcacatttagaatacaatgaaacagaatatgaaatgatatttttctgcaaactatcatcttttctggttcattttcaagatctttgatatttacatatgacctttccatttttattaacagtttgttgaatttttgcattccagccagcagaagagaaaggtaatttacagaaagatttgacagttatacacacagctataaacttcagtccattaacttatttcttgtgtaacctttagtcaattctaccaaaacatccatataagcatatgccttttttcctttatgttaaagaggtctcattatgggaccctatttgtagaatgtcaaaagaaaagraaacaattttatagtgtctccttatggttcacagatgtttatggcttttactttttaagtcacacaagtaaaaatcaaatatatttatgtgttgctcagatttctattacatgtgaatggatacatatttgaca

SEQ ID NO: 389362 - DNA, 632 bp, Homo sapiens
gctgtatatattttacaaacacaggatttagtggattaaagagtagcaattttattatttttcatgattctgtgaggattctgtgttctgcagtaaactaagtggcttggctggaatgtccataatggctcattcacacagctggttgttggtgcagacagttagtgcagagtctcaactggggctgtcaaatgaaacacctctgtccttaactgcttggcctctatatgtggtttgagcttctctcagagtgatgactgagttctaagaggcataaagtgaaaactggcagtccttttaaggctggaatggaaagtcccatactgtgacacatttcattattaaggccaatcataaggcctgcacagattcaagagcagatgaaataacgtccacctgttgctgtgagaaatgtatatatggacacagaggaagaaaattgttggaggtcatggtgagagagtagttaccacagggaactggaagaaattctgttctctttgatatttstttgtagtcttccttcaatgtggatttttggtttgtttgtttgttggcgggtatggggttagagtgtggaaagacccagaaaaccaggaatgttcatagcttacatgactctttattcctgt

SEQ ID NO: 389363 - DNA, 629 bp, Homo sapiens
atcccacccaaataaaaactacctcaagacatattataagctaactaccaaaagtcaaggacaaaggaaatattctaaaagcatcaataaaaaaagaagcaactaacatataaaggagctatgatacattttgcagcagacttctcagcagaaactttataggctagaagagaatggaatggcataatcaaaatgtgaagggaaaaaaaaaactttttagtaaaatactgtatccagcaaagcaaggttatctttcaagcatgaaggagaaataaagactacctctagacaaacaaaagctgtgaaaattcataaacactagacctgttttaaaattaacgctaaagagaattcttcaatcagaataaaaagacgttaatatacaataagaaatcatttggttgtataaaatgcactgataaaagccagtagagagacaatacagaatactctaacactgtaattgcaatggataaaccaaagatatctttmgttcaaagactaaaaggctaacctatcaaaaacaataataactacaacaatttgttgagagatagacaataaaccaaaatgtagagactacaaaaggtccaaaagtgggaaggaattaaagtatagagtttttagtt

SEQ ID NO: 389364 - DNA, 617 bp, Homo sapiens
acagaatactctaacactgtaattgcaatggataaaccaaagatatctttcgttcaaagactaaaaggckaacctatcaaaaacaataataactacaacaatttgttgagagatagacaataaaccaaaatgtagagactacaaaaggtccaaaagtgggaaggaattaaagtatagagtttttagttttctctcggctctttttttctagttcctcctttttttttttttttatctcagctaagttttattagtttaaaatgactagttaaaatatgtttttgtaagcttcattgtagccataaggcaatgataatatatacataaaaataataaaaaagcaagaaattaaaacattctaccagaagagagcctggagatcatggttgacgagaggcaggactaacttgcagctcccacttggacgggcagaataacatgtagagattcgcattgtgaacttttgctccagagtgactgcaggaacacattaggaaaaccaagataacctgcagatcctctaaaggaagcggattactcctacaggacccgggagatgcctgaaatattgtaaatacccaaactttgaaagtgagaaagggagatctccacccctg

SEQ ID NO: 389365 - DNA, 617 bp, Homo sapiens
acagaatactctaacactgtaattgcaatggataaaccaaagatatctttcgttcaaagactaaaaggctaaccwatcaaaaacaataataactacaacaatttgttgagagatagacaataaaccaaaatgtagagactacaaaaggtccaaaagtgggaaggaattaaagtatagagtttttagttttctctcggctctttttttctagttcctcctttttttttttttttatctcagctaagttttattagtttaaaatgactagttaaaatatgtttttgtaagcttcattgtagccataaggcaatgataatatatacataaaaataataaaaaagcaagaaattaaaacattctaccagaagagagcctggagatcatggttgacgagaggcaggactaacttgcagctcccacttggacgggcagaataacatgtagagattcgcattgtgaacttttgctccagagtgactgcaggaacacattaggaaaaccaagataacctgcagatcctctaaaggaagcggattactcctacaggacccgggagatgcctgaaatattgtaaatacccaaactttgaaagtgagaaagggagatctccacccctg

SEQ ID NO: 389366 - DNA, 549 bp, Homo sapiens
aaagatacatgataagccacactggagatggactttataaatataaacacactcagttaaaaccccagtagagtgaaaaatacaggaaaattttcgattatagcaatgaattcaaaagtcgttgtgccaatccactggtaaggaattctataaatatatgtaaattggaaagcttgatgccaattaattattgtataatactaaaaaaatgcacataaatgaaatgttatactagttataaataaattctatttatgagtggttcattgttaaagagagactctatattttgattttcatttgttttgcacaaaatcatgaggtgagaatttggtagattttctataagccacggtatacagagtttagtaggtagagtttttttccttaagtcagttaacaaaartcttctctattcatttaaaagtgtattggatctctaggtgaattgaaatgtatttctaatatgtaggtaattttcatttttgtgtagttgtttgattgttctgtgattgatgggcaattgaaaaatgagattttgttcattgt

SEQ ID NO: 389367 - DNA, 531 bp, Homo sapiens
tttccttaagtcagttaacaaaagtcttctctattcatttaaaagtgtattggatctctaggtgaattgaaatgtatttctaatatgtaggtaattttcatttttstgtagttgtttgattgttctgtgattgatgggcaattgaaaaatgagattttgttcattgttggtgagaggaggttccagttgggcttcctgggtcgagtaggggctcagaaagctgtgaagctcactcatttcctgcatcaggacttactttgatcctggatgaataatattgaagatatatgcttaaaatattcctaatagcaggatttgtgcatgtattttcttccccaagaaagctataaacagcgaaaactttgctgtaagcatccctgtatccttctctccctctctcccttccctctccctttctcccttccctctccctcaaaactaaagtttaaagtaatgttaactgcccattttcctgtgaccagcagaccttatgtgtcctcccaattccaattccttgtaaacatactttgt

SEQ ID NO: 389368 - DNA, 650 bp, Homo sapiens
taggttcagtttgtctatgtactaagtaagactgtagtttattatgtaagaactcgaagtatggagacagtcttaggccaatggcctcctgcttatttaatttaacaggtgaggtaatgaataaaataattggatggatgaagacaattaagakacaagacaattacaattatacttatgtcagaaaaacttaggtctctggtccttgggagtgaatacaattaaaaacattgagaatgaatatgagaaataaaatgaataaatatttcagaggtaaaattagcagaaatgggtgaccaactggttactttttacccattattttatatgttcagggctgacatttagttttctagtctgggtaaaattaagatagctttatctcctttctctttgtttctcctgataatattcttaatccttatccaatactaacttgaataatggtgatgctactgatataaaatgaatacaaaaagaagtatattttcagtggaagaaaataatatatcttggtaggaatatattgaattgaataaccagcaacatatctggttggagtttcccctccaggtgttgaaaagaaataaagggcacctttaaattgaggatcaatcttcatgggataattaattgaagttgcaggaata

SEQ ID NO: 389369 - DNA, 650 bp, Homo sapiens
taggttcagtttgtctatgtactaagtaagactgtagtttattatgtaagaactcgaagtatggagacagtcttaggccaatggcctcctgcttatttaatttaacaggtgaggtaatgaataaaataattggatggatgaagacaattaagagacaagacaattacaattatacttatgtcagaaaaacttaggtctctggtccttgggagtgaatacaattaaaaacattgagaatgaatatgagaaataaaatgaataaatatttcagaggtaaaattagcagaaatgggtgaccaactggttactttttacccattattttatatgttcagggctgacatttagttttctagtctgggtaaaattaagatagctttatctcctttctctttgtttctcctgataatattcttaatccttatccaatacyaacttgaataatggtgatgctactgatataaaatgaatacaaaaagaagtatattttcagtggaagaaaataatatatcttggtaggaatatattgaattgaataaccagcaacatatctggttggagtttcccctccaggtgttgaaaagaaataaagggcacctttaaattgaggatcaatcttcatgggataattaattgaagttgcaggaata

SEQ ID NO: 389370 - DNA, 375 bp, Homo sapiens
aagtgaaaaaatcttagacaagccgcagcatggaagatgctcacaaaacaatctctgatagctttgtatttggcatacatggagaacttcattacatcaataacaacaaatgtaaggggaaaatccatgaatgtggagaagttctgtttaaagaaaaataattaatgacttgagattacatraatgtacgtaggagtatcagtaacttagggtgttatcaatgaaataattttaaaacctgtgaagtactgaaagagtgaacatcagctgtactaatgaaaaaaaaggagccctgcctttaattagcctgagagaacagacacagataaaacacaattaataaagaaaaaaatttctcccaatatggtgcattag

SEQ ID NO: 389371 - DNA, 375 bp, Homo sapiens
aagtgaaaaaatcttagacaagccgcagcatggaagatgctcacaaaacaatctctgatagctttgtatttggcatacatggagaacttcattacatcaataacaacaaatgtaaggggaaaatccatgaatgtggagaagttctgtttaaagaaaaataattaatgacttgagattacatgaatgtacgtrggagtatcagtaacttagggtgttatcaatgaaataattttaaaacctgtgaagtactgaaagagtgaacatcagctgtactaatgaaaaaaaaggagccctgcctttaattagcctgagagaacagacacagataaaacacaattaataaagaaaaaaatttctcccaatatggtgcattag

SEQ ID NO: 389372 - DNA, 560 bp, Homo sapiens
aaattagacaaagccattttgctaattataaaccaaattatcatgaactggccacattttatattccaacaatacagtaaagagattcagtctacatttataagtttgagaaggtattatgtcatagtagggtttatggaaatggggctatacaaagagaaaaatgagtatccccaagttagcaagtaaataaacatcataaacagcataaaatgttgtgcttcctttttctcattcattctttatggcataaacctaattaaaacttatattcttaacgtatagtataactgtaaatgccaayaatttactagcatgtttttaactgcatattctagaaagtaaaattttcatgtttaaaataaaatatttagtgagtagttttcttactaatgagtaaaaataatcacagaataatgtactacttgtatctctattatttttgataacattaaactcaatatcagagaaaaataacattgtgaaatgatcctttaaatagtacactaaagaaaaaattgttaatccagatgaattgaaattgaatctgaaattctaaa

SEQ ID NO: 389373 - DNA, 560 bp, Homo sapiens
aaattagacaaagccattttgctaattataaaccaaattatcatgaactggccacattttatattccaacaatacagtaaagagattcagtctacatttataagtttgagaaggtattatgtcatagtagggtttatggaaatggggctatacaaagagaaaaatgagtatccccaagttagcaagtaaataaacatcataaacagcataaaatgttgtgcttcctttttctcattcattctttatggcataaacctaattaaaacttatattcttaacgtatagtataactgtaaatgccaataatttactagcatgtttttaactgcatattctagaaagtaaaattttcatgtttaaaataaaatatttagtgagtagytttcttactaatgagtaaaaataatcacagaataatgtactacttgtatctctattatttttgataacattaaactcaatatcagagaaaaataacattgtgaaatgatcctttaaatagtacactaaagaaaaaattgttaatccagatgaattgaaattgaatctgaaattctaaa

SEQ ID NO: 389374 - DNA, 560 bp, Homo sapiens
aaattagacaaagccattttgctaattataaaccaaattatcatgaactggccacattttatattccaacaatacagtaaagagattcagtctacatttataagtttgagaaggtattatgtcatagtagggtttatggaaatggggctatacaaagagaaaaatgagtatccccaagttagcaagtaaataaacatcataaacagcataaaatgttgtgcttcctttttctcattcattctttatggcataaacctaattaaaacttatattcttaacgtatagtataactgtaaatgccaataatttactagcatgtttttaactgcatattctagaaagtaaaattttcatgtttaaaataaaatatttagtgagtagttttcttactaatgagtaaaaataatcacagaataatgtactacttktatctctattatttttgataacattaaactcaatatcagagaaaaataacattgtgaaatgatcctttaaatagtacactaaagaaaaaattgttaatccagatgaattgaaattgaatctgaaattctaaa

SEQ ID NO: 389375 - DNA, 560 bp, Homo sapiens
aaattagacaaagccattttgctaattataaaccaaattatcatgaactggccacattttatattccaacaatacagtaaagagattcagtctacatttataagtttgagaaggtattatgtcatagtagggtttatggaaatggggctatacaaagagaaaaatgagtatccccaagttagcaagtaaataaacatcataaacagcataaaatgttgtgcttcctttttctcattcattctttatggcataaacctaattaaaacttatattcttaacgtatagtataactgtaaatgccaataatttactagcatgtttttaactgcatattctagaaagtaaaattttcatgtttaaaataaaatatttagtgagtagttttcttactaatgagtaaaaataatcacagaataatgtactacttgtatctctattatttttgataacattaaactcaatatcagagaaaaataacattgtgaaatgatcctttaaatagtacactaaagaaaaaattgttaatcyagatgaattgaaattgaatctgaaattctaaa

SEQ ID NO: 389376 - DNA, 609 bp, Homo sapiens
ttgactattcaggttctcttttgttttcatatgaattttagaatagtttttttataattctgaaaagaataacataggtagtttgacaggtgtaatgttgaatgtgtaaattgctttggcagtatggccatttaaaacaatatctgccttaagtttaatgttcactcaggagttattcacctaatgttcactcaggagtaagtggtttgattccaacacaattccagtgtgtttagatagttttgagagatcttgatattgatttctagttttattacactgtggtctgaaagtgtgcttggtatgatttcaatttttttgaatttattgagtcttggtttatgactgagcatgtggttgatcttagaaagttccatgtgcagatgagaataatgtgtattccatgattgttaggtggattgtctgtagatgtctattaagtccaattggtcaagtcagtcgagttgaagtccagagttyctttgttagttttctgcctcagtgatctgcataaaaccatcagtgaggtgttgaagcttcccaatattattctgtggctgtttaagttttttgtagaccaagaagaatttgttttataaatctgagttc

SEQ ID NO: 389377 - DNA, 574 bp, Homo sapiens
gttgtttttttttttttttttacaccgagtctatttcatattctaaactaatgggatttgcaattcctacctacgagttgcattttttacaatgccaaatggcaagatccttgagtatctttccattgctactaaacactgccatttcaagaaaactgcccttgaaggctctccaactattgcaatttacattttccctaaatttatacctttcccagacccattaagcctttcccattgctaatgcactgagttcctgtaatttctattctcataatgtagacaagtttctcagaaatgcttagtaaacatttttagctttccttaraaaattagccccaaagagaggtggggatgtgacggggaacaacctacagagtgcttatgatattctctgataacaactaattcctttataacaatcctagacagtccccctacaaaaggtgtcattagtgttgaagacattaaatgatgttccctaggctgctggccaaactaacactgaagaaagagctgtaagaatctgcccctgggggagccctgccggttggataaaatttgtaacttgttg

SEQ ID NO: 389378 - DNA, 619 bp, Homo sapiens
ccgcctcctctgtgactctggcttatgccacgctctcccttagttattcaactccaattacaaagctttatttgcctcaggcctgattagctcttgcagttctttctgtctgaaatcgacttcttgtgactggctcatcgctgagattgaatcttggcatcttaggcattcttcccagccccatctttctatcacattgctctagtttattttcttcatactcctatcattacttgattttatcttttttatttatctgtttacaagaatggaatcttcatggaagcagcgtccttgtttgacttgtctattgatagaactccartatctagcacagtgcctggcagacagtaggcactcaataatgtgatgatggaaacagacaaagcaaggtctgagagagaaggccaagtgacaacggaagcagagattggagagatgcactttaaaaatggcggaaggagccatgagccaggaacataggcagccaagtaaaagccaatgacaatgagtctgcaaaaggaatcagctcagttgacatcttgactctagctcagtgaaactaacttcagaattatggcctccaaaacgttaagagaataaatttatgttgttttat

SEQ ID NO: 389379 - DNA, 514 bp, Homo sapiens
atttctccttaaaaaaaaaattaatccttgagtccttagcatstattacagtacttgcactacagtggatacttacatgattttttttaatgcatcaatcttccataaaggggcatagtttatatgatatcagccttattatcatgttgccttaactctttgagccagccagctgtattcttttcagaaaattaacaaatctacttttgtgcatgctgctcacctgcaggccaagggcttagcagattttcagggatgaagacatatgtgaggaggaatggtgccttccccacaggtgttccagtccctttacccccaacatttttcttgattgcttttcaacatctccctgtttctccaagaacctaattctcttcattggtatccttttatacacagcatgaaaacaggtagtatgtaatcattcatttaactaaaataatacttttccaattcattaaggaatggttatcagatgctcataagaggatgtagcagggtattaccagacact

SEQ ID NO: 389380 - DNA, 362 bp, Homo sapiens
taggaaactggggcctttaagtattattattaccattttatttcatggtactaaaaatagaaactataagaatacatcctcaaaagtggcttatccaatgccacgaaaatgaataataaaacagaagctctcattcctaaattctagtcaccaaacagccttctacctacttacagtcccccaaagctttcayagaaaatgctcttctcaaattctgccactgctgtatttaatccccattaaagtaaatttatctgtataggttgagcatcccaaatctgaaaatccaaaatctgaaactttttgagggctgacatgacactcaaaggaaatgctcattggaacattcctgattttagatt

SEQ ID NO: 389381 - DNA, 617 bp, Homo sapiens
ttttgcattttaagtgttaaactctaaatctaactgtctatcatgttttattccataagagacgtatcagcacatagggaaatagtggtaggttataggatgtaatagaaattctaatagactgtttaacaataatatggcaggcagatgccattttaatcagcattgtcattaacaactatcaatagagaggataagatgttcttctctttgtgaattatgatttatggctggcacagcagtcacgctgaagtatatttattttacaatatagagacattgattaaatgcacatggcatctcaaatccagttgacattttaagtcaaaattattacagacacacagccattcatttaagctgttgctttaaaaatgtgtctcaactgattgttaatggaagaaagtctagctgggccaatatttcaayaacttgttcctttattttgctgatatacatacactgggggaaagctgcctcttttggccataccatttctggtgtataggcactaaagagaagaatactctcttaaatacatacactcagggtttctagaccactcagaaagcattctcttactagtgtaaaattattttttgttccctttccatagt

SEQ ID NO: 389382 - DNA, 502 bp, Homo sapiens
ccgctgggtttcttcactatgaagttacgatttttccctttgtaattaatacatatcttggggaagatattttgaaactatgcaaatatcctgtttcttttcatgttttcacccacaacttttaccatccattagtggttcttgtcagtagcaatagttaccatggtgtttcaatggtgatttcctgttgcactaattccttctacattcattaattggaattcttatctaaggaagaactatactttctcccaccactaatgtctctattcgcytagttatgtcattatgagattcatggatatttattttattctaagggttataatctaggcctatcatttattttgttgctcagattattcagtattggccactgggagcattttcaggatagctcatgttccattttaacttgtccataccttttgaagaagtttcttattttttggcaccgtgaaatgctgtaagtttacctcataggttccccgccacagcccag

SEQ ID NO: 389383 - DNA, 572 bp, Homo sapiens
ttcaacctttatacttttatgctgccatagataagtacataaaattatcataatgtgccatgacagcattaaggtagtcaatgccttgggcttttcatattccctgtgactacaatgccctttccccatccttcaatccacactaaccccgtggtcaactcttagtgatgcttaaatgctgggttcaagggttctttggaagccttgctgacaacaattctctccacactcagtactgataaagatagtttactaatatcatctcattgtttattagtagtagtagtagtagtagtagtagtctcagagtcttcctctattgcccaggctggagtgcagtggcgtgatcataactcactgtagcctcagaccccagggctaagtgakcctcccacctcagcctcccaaatagctgggattgcaagtatgagccaccgtacccagcttcatcctattattttgagtaattagacatcctatctagtaataagataagtaattttactggtgtcactttggaggtaactggcttcagataaggttattgaatttcatagtccattatttcaatt

SEQ ID NO: 389384 - DNA, 592 bp, Homo sapiens
ggatataccaatactggtgggaaatatggtgttagaatgacaaaggattttgtatttccacttgaaacttttttgagtctcagttgtttgtagtatatatgaatatctgatattatcagatttaaaaagttgtaaaataggccgggtttggtggctcacacctctcatcccagcactttgggaggcygaggcaggtggatcacttgaggccaggagtttaagaccagcctggccaagatggtgaaacctcatctctactaaaaatacaaaattagccgtgcatgatggtgcacacctgtaatcccagctacttgggaggctgaggcatgagaattgcttgaacccaggaggcagcgtttgcagtgagctgagatcgggccactgcactccagcctgggcaacagagcaagattccgtctcaaaaataaaagttgtaaaataaaaaattcaaataaaagaatagacaatcccctattggcaggtacaaaactaacgttatcattgtgatcttacttttaattacctctctaatatttctaaagtatttgtggaacatgagactggtaggcatgtcgtgtcctcaggcactgtg

SEQ ID NO: 389385 - DNA, 592 bp, Homo sapiens
ggatataccaatactggtgggaaatatggtgttagaatgacaaaggattttgtatttccacttgaaacttttttgagtctcagttgtttgtagtatatatgaatatctgatattatcagatttaaaaagttgtaaaataggccgggtttggtggctcacacctctcatcccagcactttgggaggctgaggcaggtggatcacttgaggccaggagtttaagaccagcctggccaagatggtgaaacctcatctctactaaaamtacaaaattagccgtgcatgatggtgcacacctgtaatcccagctacttgggaggctgaggcatgagaattgcttgaacccaggaggcagcgtttgcagtgagctgagatcgggccactgcactccagcctgggcaacagagcaagattccgtctcaaaaataaaagttgtaaaataaaaaattcaaataaaagaatagacaatcccctattggcaggtacaaaactaacgttatcattgtgatcttacttttaattacctctctaatatttctaaagtatttgtggaacatgagactggtaggcatgtcgtgtcctcaggcactgtg

SEQ ID NO: 389386 - DNA, 622 bp, Homo sapiens
aagtgggcatcagaggctgtagagttttctgatttgtgtacctatctatatattccaggattatcctccagagaaaataacctatagttagagcatcagtatttggagtttcttccttwgaagatcctggagatgatatcatcatctcaaaagcttaaacttcactgtaacccagtcatttgatttggggaagagagggtttttattacgatataattcacatgccataaaattcaaccgtttgaagtgtagaatccagtggtttttaatatattcacagagttgtacaatcattataatcaacttcaggatattttatcaccctaaacaaccactaatctactttctgtcgctctacatttgtctattctatatatttaatataaatagaattatgtaccatggggtctttgcgactggcttctttcacttagcatagtgttgtcaaggttcatccatgttgtaacatgtatcagtacgtgtatccctttttattgcctaataatattctattgtgtgcataaataccacattttatttatccattcatcagttgatggacatttgggtggtttccaccttttgtctattgtaaataataatgctatgaatattcgtgtac

SEQ ID NO: 389387 - DNA, 622 bp, Homo sapiens
aagtgggcatcagaggctgtagagttttctgatttgtgtacctatctatatattccaggattatcctccagagaaaataacctatagttagagcatcagtatttggagtttcttcctttgaagatcctggagatgatatcatcatctcaaaagcttaaacttcactgtaacccagtcatttgatttggggaagagagggtttttattamgatataattcacatgccataaaattcaaccgtttgaagtgtagaatccagtggtttttaatatattcacagagttgtacaatcattataatcaacttcaggatattttatcaccctaaacaaccactaatctactttctgtcgctctacatttgtctattctatatatttaatataaatagaattatgtaccatggggtctttgcgactggcttctttcacttagcatagtgttgtcaaggttcatccatgttgtaacatgtatcagtacgtgtatccctttttattgcctaataatattctattgtgtgcataaataccacattttatttatccattcatcagttgatggacatttgggtggtttccaccttttgtctattgtaaataataatgctatgaatattcgtgtac

SEQ ID NO: 389388 - DNA, 643 bp, Homo sapiens
tacatcctcacaaacatgtgttcttatctatccttgttattatagcaatcttagtagttttgaagtggttttgagtggtgtctcattgtggytttgatttgcatttctctggtgactgtgactaatgactttgaattttttctcttgtgctcattgaaaatttgtatatttcctttgaagaaatgtctatcagtttccagtcatttaactttaggacctgttttcaaatatgaataaatctaaaaggtaaataattggaaatgagaaatgtagagaaaaatgaggaaaaaatttggtttatgtaaagtttcctcccttttctaatattcttatctactaaatgactctgaatatttatttcttatccacactgcataaaattaaaaacatttttaaaaggccaggtttggtggctcacacttgtaatattagcacttttggaggccaaggcagaaaattacttgactccagtagttcgagagcagcctgggaaacatagtgagacttcatttctacaaaaggtccaaaaatcagccagcatagtgccatgagcctgtaagcccagctactcgggaggctgaggtgggaggatcacttgaatctaggaggtcaagcttgcagtgagctttcattgcaccactgc

SEQ ID NO: 389389 - DNA, 643 bp, Homo sapiens
tacatcctcacaaacatgtgttcttatctatccttgttattatagcaatcttagtagttttgaagtggttttgagtggtgtctcattgtggttttgatttgcatttctctggtgactgtgactaatgactttgaattttttctcttgtgctcattgaaaatttgtatatttcctttgaagaaatgtctatcagtttccagtcatttaactttaggacctgttttcaaatatgaataaatctaaaaggtaaataattggaaatgagaaatgtagagaaaaatgaggaaaaaatttggtttatrtaaagtttcctcccttttctaatattcttatctactaaatgactctgaatatttatttcttatccacactgcataaaattaaaaacatttttaaaaggccaggtttggtggctcacacttgtaatattagcacttttggaggccaaggcagaaaattacttgactccagtagttcgagagcagcctgggaaacatagtgagacttcatttctacaaaaggtccaaaaatcagccagcatagtgccatgagcctgtaagcccagctactcgggaggctgaggtgggaggatcacttgaatctaggaggtcaagcttgcagtgagctttcattgcaccactgc

SEQ ID NO: 389390 - DNA, 643 bp, Homo sapiens
tacatcctcacaaacatgtgttcttatctatccttgttattatagcaatcttagtagttttgaagtggttttgagtggtgtctcattgtggttttgatttgcatttctctggtgactgtgactaatgactttgaattttttctcttgtgctcattgaaaatttgtatatttcctttgaagaaatgtctatcagtttccagtcatttaactttaggacctgttttcaaatatgaataaatctaaaaggtaaataattggaaatgagaaatgtagagaaaaatgaggaaaaaatttggtttatgtaaagtttcctcccttttctaatattcttatctactaaatgactctgaatatttatttcttatccacactgcataaaattaaaaacatttttaaaaggccaggtttggtggctcacacttgtaatattagcacttttggaggccaaggcagaaaattacttgactccagtagttcgagagcagcctgggaaacatagtgagacttcatttctacaaaaggtccaaaaatcagccagcatagtgccatgagcctgtaagcccagctactcgggaggctgaggtgggaggatcacttgaatctaggaggtcaagsttgcagtgagctttcattgcaccactgc

SEQ ID NO: 389391 - DNA, 570 bp, Homo sapiens
taatatagacaataaacaggaaaatgtatctttttaaaatctaagatgaactttgaaacaattaygtgtgtcctaaaagagatcttccttattctaagtagagagttatattgctgaatatttttaagtagagactgaaaaaccactacctagaatgaatccccctgttaaatgctctctaagctccttgtcacaaggtaacaataggagttgcattgaatctatagattgctttgggtagtatggtcattttaacattattaattctgaagatcttatacagtattattctgtataaaggtataaatgaaatagaaaaattcctaaaatctacgtagaaccacaaaagaccctgaatagtcaaagcaatcccaagcaaaaagaaaaagctggaggcatcacactgcaacttcaaaatagactacaaagctaccataaccaaagcagcatgatattagtataaaaacatacacatagaccaatggaacacaatagagaacccagaaatgagttcatatatttacagccaactgattttcaacaacggcatcaatatacattcaggaaggg

SEQ ID NO: 389392 - DNA, 570 bp, Homo sapiens
taatatagacaataaacaggaaaatgtatctttttaaaatctaagatgaactttgaaacaattatgtgtgtcctaaaagagatcttccttattctaagtagagagttatattgctgaatatttttaagtagagactgaaaaaccactacctagaatgaatccccctgttaaatgctctctaagctccttgtcacaaggtaacaataggagttgcattgaatctatagattgctttgggtagtatggtcattttaacattattaattctgaagatcttatacagtattattctgtataaaggtataaatgaaatagaaaaattcctaaaatctacgtagaaccacaaaagaccctgaatagtcaaagcaatcccaagcaaaaagaaaaagctggaggcatcacactgcaacttcaaaatagactacaaagctaccataaccaaagcagcatgatattagtataaaaacatacacatagaccaatggaacasaatagagaacccagaaatgagttcatatatttacagccaactgattttcaacaacggcatcaatatacattcaggaaggg

SEQ ID NO: 389393 - DNA, 427 bp, Homo sapiens
ctgcaacttcaaaatagactacaaagctaccataaccaaagcagcatgatattagtataaaaacatacacatagaccaatggaacacaatagagaacccagaaatgagttcatatatttacagccaactgattttcaacaamggcatcaatatacattcaggaagggacaccctctttaataaatggtgtgggaaaacttgatatctgtgtgcagaaaaatgaaaccaggcccaaatctctcaccatatacaaaaattaactcaaaatgaattaaagacttaaaggtaagatcccaaactatgcaactacttgaggaaaccaggggaaacagttcagaatattggtctagtcaaagattttatggctaagatatcaaaagcacaggcagcaaaaacaaaaatagacaaatgggattatagtttactg

SEQ ID NO: 389394 - DNA, 427 bp, Homo sapiens
ctgcaacttcaaaatagactacaaagctaccataaccaaagcagcatgatattagtataaaaacatacacatagaccaatggaacacaatagagaacccagaaatgagttcatatatttacagccaactgattttcaacaacggcatcaatatacattcaggaagggacaccctctttaataaatggtgtgggaaaacttgatrtctgtgtgcagaaaaatgaaaccaggcccaaatctctcaccatatacaaaaattaactcaaaatgaattaaagacttaaaggtaagatcccaaactatgcaactacttgaggaaaccaggggaaacagttcagaatattggtctagtcaaagattttatggctaagatatcaaaagcacaggcagcaaaaacaaaaatagacaaatgggattatagtttactg

SEQ ID NO: 389395 - DNA, 649 bp, Homo sapiens
taactgtttatattaataatattcacatgtgaaaagattggaagggagtaaaataaaatgctaactgtagttagttgataaaaaatttaatcctcttgtatacagttaaaggttaatcctctttgtataaagttcaatgtcctctatgatggtctatatttctgttcctctcagaattccattttttttaccctgctcccacctcaatttgtcttgaaaggtaagtacttaaaaatgagctgctggtatatattatcttccaaaaatgtcattattgtgagtataaccmcacacacacacacacacacacacacacacacacacacacacacgacatcttattctcttattatgggataaaaggatataccatatttctctttttaagacccaaacaatatcattatgggcaaagttttgaaataatagaatgaaattcccttgaaatttactgaatgtttaataccaagacaaaacaagttcttaagaagatgcattaaataatttcattacaaagacattaatttagagtgttttatacaattattgaaataatgtggtcaaactagatagtccaccctatacaactcaaaccaaagactgctgctttggaaattctgatatccagtttagctgcccaaattttagt

SEQ ID NO: 389396 - DNA, 487 bp, Homo sapiens
aacaatcctggttttcaacaatgctacttttctgtccccactttctctaaaataaagcagagacccatcagtgttactagatattaaatacttgaaaatattgtcatgagytgcatttcagtcaatgatgaaccacacatatgacagtgatcccctaagtttataatggagctaaaaaattcctattccctaatgatttcctagctgttgtaatgtcatagcacaacagattactcctgtgtttgtggtgaagctgatgaaacctactgtgctgccagtcatataaaggaatagtgcacacaattttgtgcagtacacaatacttgataatgataataaaattaagttatgggtttatatatttattatactatacattttactgttattgtatttaatttttacttattcaatttggagtctttttgagacagagtcttgctctgtttcccaggctgtagtgcagtggtacaatcacgactcccta

SEQ ID NO: 389397 - DNA, 632 bp, Homo sapiens
tatggctaaggacaactagcaaagaccatttgatttattaaacaaatagctacctttgacaattaaaattaaatctaaactttatatatttagatatttttaaatttaatttagaatttaattgagaaattattataatattacttggtgggaagccaaataatttctatatatagattttyatataatgtctgcattttcagtagatagcctttactccacatcagtgtgaaaccacttttaaaactatgtcttcatgtataagtagaaggatttaattatccccaattattatttccccactaaggcgtttactgcaacagaacctgggatggatggctctgctggaacgatgttgcagcaggaactgaatcaatgcagctctgccctgattactttcaggactttgatccatcaggtaaaagcagaaatgtatctacatatctccttgacatctatttaataaatcctaggttaattaaattcctgttttccctttttttttaattttaaagaaaaagttacaaagatctgtgaccaagatggaaactggtttagacatccagcaagcaacagaacatggacaaattatacccagtgtaatgttaacacccacgagaaagtgaaggtat

SEQ ID NO: 389398 - DNA, 637 bp, Homo sapiens
aggacgttccaagatttattctagttcagagaaaaagcacgtgggaaagaattaatagaacctttgtcatttttaaccttttcaagtacaagggaggatgaacagatactaagtagtaaattataatagccaagcacttsattaatttgatatttttctctttcacatgacatgaaaagaaaaaaatatagctctgaaacttgtattactaacttttgctttaattataatttttctgtccataggaaccacttttgaaagtgattgttttcagttacatcaaaagattagtcagtgtatctgtcaggaaaggaaaaaaaaatctttatcttggtgaaaatatttgaaactgttagacatatcaatttttttttgagacagcatctcactctgtcgcccaggctggtaagatcatggatcactatagcctcaacatcctggcattcagtaatcttgccatctcagcccacggaggagctggaactacaggtgcacaccctcatgcccagctaattttcgtggctttttttaaaatttttttctttggtagagacaaggtctcattatgttgaccaggctggtctccaactcctggacacaagcaatcctcccgcttggcctcccaaactgctgggat

SEQ ID NO: 389399 - DNA, 572 bp, Homo sapiens
aaaaagtgcactatggttctagatttgtaaaaccaacttgaggaggtctatattgtaattaacactctcatgtacctatctcaacagtaggccaaaccttattaaactagcaatatttttaatcaagaatattctttctttgagattagtataatcacaaggaggagagattataagaaaaaaacacaagtgttttaaatgggcattttctccagaaaacagaaaatgatgtacattattattgatcataaaaataaaaattagttattaagtggaatgcaactgattattgccctaaggatagagtggttttgcacttatttataaatttatttcaacatttttaatattctcatatagtgtgatattttgaattctcctttgaatttttgtaacatcttacttgttccttcattaattaatgagytaaacgaaatctttgaaacattttcattttatatttgtgtgagagccatgaatatgccctctttaaaaattacctttaaatacttatttttctttctaatatttaaacaaaactacaaaatgaaatatagtagataaaggagatg

SEQ ID NO: 389400 - DNA, 605 bp, Homo sapiens
cctcacggtcagggaattaggttagaatgggagagctctgtaattaatartactatacaaaaaatatattcttataagactgaattattataaatgcattattttcttgaaataaattagtactttgtaaatcataagcaaaattatactgcttatacatgatgtgtgcagaaaataaatgttgcccaaaactttttcaaagcacaaataatttgaaaaacatgactgttgtgaatagtgcagtgtcatgtgtttataaaatgggaagctcaattctactttataaccatcttcctttaaatcaatttgtttgtgttacagcaagggatactgggatttatttaatctggagagtaataagaaaacccttgttcagaatatcttttccctttcttaaccttacagtgtccaagaaaagttgtagtatgagttaatgctttgcttctcaaaatttatcaaattaataaaaataactcaaactttgtccattacaatttttccttaataaggagagagtaattataataatatttataaaggaaatttaactaataatacttgaccaaattaacacttctaaaagttaaaactgtctcatgcactaa

SEQ ID NO: 389401 - DNA, 604 bp, Homo sapiens
gtattccttatagtgcgggaagtgcaaagatgaatgaaacactctagtaaagagcagtgtgcttcaagtttttctgttgacaccttgtgtaaaataattttgaaagaacttcagccatttcaactgacagatcagttgtaaagcatgtaacttttggcacattttaaatgttgacattctaaactataactgttatatcatttttaaaaattcacaatgaaacataaatataaaagcaattcaatatctaccacattcatttaaaataaatgagttcttcacagcggttggaaatggtacttcatttctttctctccttgaaatcatatcccagtccactacccacccttcctgttatagaattttattctattaaaatktatttttatactttaaattatttttagtgataccctgaaagagagccaggaaaactcattatatagaaaaaaaaaggaataaaggtagcacggagcaagaaagaagataaagtgacagggaaatagatcattagatgagcacgtaacactttaaaatctgtgaagttatggtgtctgtcatttattattttttttttttgcagacgtgtgcattgctgtgatgt

SEQ ID NO: 389402 - DNA, 556 bp, Homo sapiens
acagcaataatgactaatccttgaatcaaggtgtgtgtgtttgtgcgtgygtgtgtgtgtgtgtgtgtgtgtgtgtatttacccctgaatctgatggtgaaaagcgtctacaaatttgtaatttggattattaccaagttcctaagatttttaagttagaatgattcagacaggaaaaatgtgccaccaactcacagaactaatcattctcagcccagaattaaaatgggaagtattacatacttcttgttatttattggtagttcaatatatatttatagttattatttagttatttgtaaagacaatcacttgatttaaacatgcgtcctacttactgacttattttgttattgttagtttgactctattgtgttattatgccctattcatacaacatccaaaatacagaaaagagaacactatgtcagggcacacatgcatcatttaagcatcatctccatctgtccattgagccatcccagactcatttggtaggttcagaataagtagagagattttcactttaccaaacagcactgctgctttaaatgtg

SEQ ID NO: 389403 - DNA, 580 bp, Homo sapiens
atataaaaatgtaactaatttctgtatctagtaacttcattaatattctttatcaattataggtatactggaagcaataacagacataatcatatatatttttatgcttaccataaaaaaaggcaagagaaccagaaaatwcagggtacactttttctccatcattaagccaaaatgaaatatgctgtataacataaactgcaacagaaaataaaagaaatataattcatcaatatttatgaaataaatgcagatgattctcaacagaaaatttattttaaaactacacaataattcaataattttactttaaagatttgataaatcattttttttaagacaaggtctcactctgtcaccaaggcctagtgcagtgccacaatcttggctcactgcagcctggacttcccgagttcaagcgatcctccctcctcagcctcccaagtagatggattacaggtgagcgccaccacacccagctaatttttgtatttatagtagagatggggtttcaccatgttggccaggattacaagtgtgagccaccctgcccagcagattaaaatatattaaaactgca

SEQ ID NO: 389404 - DNA, 626 bp, Homo sapiens
cactcctgccaggttgttccagaccttaatatttgctcatatctcatttgaaggccttcctatccaaattaatgaagacaaatattcatcaaagctttattcttaggaatatcactttctttaaccttggtatttgcaatggaattagacacaaaaaaatattttttgtcaaagtaagaaaggtaaaaaattatattagaagcaattgaaagggagatatttcagaatatcttaaccaaggaaaacataaaattgcgaacacagtgaatctggttgttgtttatttcaggttttttgatgtttcatcaataactgaaggtttgctacgataataaatatatacatatttattatatgtatttgatttatctaatttttcagacattaagagatctgatttaccaggttttgtcattttagaaaacactctagttaagatattgagtcttgatcttgtgacaagatgaaaaatagagtggcagccagtatggattaagactwtacactttgattggaattgtctttacataacatggaagtggtggtgttgttgtccagagcaggagacctgtcttgttggccttcgacacctagcatagggccaggcacctcataagtacctctta

SEQ ID NO: 389405 - DNA, 591 bp, Homo sapiens
actgtttgtccatcaagttaaataagtacatatgtagctagaaaatgtctttccttttgcatatgtggcattttatgcatattaaaatgtgaattagtttgcttaaaactatggttattacatcattataaatatatctatgtaccactatggtagataagtttctaagacatattttaaatatgtcataattattacatatcttaagttagaactttactagatttgaacaaataaaaaattgttgatcattatattgccttctttcaaaacaatattattaattcaatgtaaattaaaattatatttatagtatttgttactgttyaaaatgatcaataatcctgatgaatttttaaattattcaatttataaaaggaaattgaagaaaaaagaggggtatatgctgaagtagagagaaagagaaatgtcatacacataaggaaaaatctgagaacatccaggtcttcagcaacaaatttcaaatttcaagtataagagaatatgcaggttaagtggagattttttaataaaaggacaaatgagcattgatgtgaaaaacaaagccaaacattgtaatgtgactaacac

SEQ ID NO: 389406 - DNA, 545 bp, Homo sapiens
ataaatgtactgaccagaccattctatatgttaattcttacgaatttagataatttgtcttagcaatttgaaataagttctgaactcaccatctattgacatattgacagcttaagaaacaacttatgatgagtaatttgtttcatccattttaatcarattgacacacttaaaaaacagatacccatgacttttcccaaaattgacttttactaattgaagtcattcttgttctttagagatttcagcggaaaataacattagagaaactgaatcccatgcaaatttcactttaattcattagcaaggttttcttctatctttatttaataaagtctgacaataattcagtaagatctgacaataattttttctcaatgatatattcaagtatttccctaatttgtattatatacagtagctctattaaaatattaaagcattgtatatggtatatatagtatccttctagttttttatatttcttgaatagcctgggacatttccaaagctatatatcttcacatagtaaaagtcagtaaagt

SEQ ID NO: 389407 - DNA, 545 bp, Homo sapiens
ataaatgtactgaccagaccattctatatgttaattcttacgaatttagataatttgtcttagcaatttgaaataagttctgaactcaccatctattgacatattgacagcttaagaaacaacttatgatgagtaatttgtttcatccattttaatcagmttgacacacttaaaaaacagatacccatgacttttcccaaaattgacttttactaattgaagtcattcttgttctttagagatttcagcggaaaataacattagagaaactgaatcccatgcaaatttcactttaattcattagcaaggttttcttctatctttatttaataaagtctgacaataattcagtaagatctgacaataattttttctcaatgatatattcaagtatttccctaatttgtattatatacagtagctctattaaaatattaaagcattgtatatggtatatatagtatccttctagttttttatatttcttgaatagcctgggacatttccaaagctatatatcttcacatagtaaaagtcagtaaagt

SEQ ID NO: 389408 - DNA, 593 bp, Homo sapiens
tgagcaaatgattttaagaagtacatgacatagttggaacaaaatgaatttggcagttgtttcttcatgttatgagagtgggaaaaagtaagaggcattgagacaaaaagggagggatcacagtatttcttaagaagagaaatgaatcatactgaaacagggattgtatctccagagatgaagaaaaggaacagatattagaaatgttgtgaggaactgaaagatttggsaacaacctagctcaaacattgtgtattattgtaattttccaatgtcaaaattttctcaattttaggacatggcagaagatcaaggttctgtgtcccttttgtttacacagatcgagtgtaacaggagtgttaggcattactttagatattccctgggcactctttctaaataaaagagccaatttgggattttgatccaaaatgattaatgttcctgttggcacatgtgtttttgaaaataagtgatttgacaaatcaaataataagtatactgagaatctcatgaagtggggcatggtgctaaaaactttatctttcttagcttgtatttatttttctgagacctgtgtagagaacttgctt

SEQ ID NO: 389409 - DNA, 602 bp, Homo sapiens
tacagttcaaactacacaaatagtttttcaacatagctcacagaagtagatgtagttatttaaagcagttgagttagatctggtatcattgttttcaagcacaaaatgaaattttctgtgttccaattggaggctatatcaaagaacttcagagtatgacccagatacaacacctcccttggatgaaaaytcccatgctatattccaaaagtgttataaacagtatgcaaactagtgtgcaactagcttacagcatgcaagagaaaaaggatgaaattataacaagtaagatgacagaaatccacatctatctcatgtcgccctcacatggaccatttgctttacttgcttgtgtatggtaggaacactataggtctcacagtggagccatgtatctgctgacttcagagagttttacaaagtctgcattcctggctgcacatccatgctctacaaaggaaggatacacccaacaaacaagcaacctatttcaactcaaatgcaaagggaatttattttatttttctttcatttttattcttattttgaaaagtgtggtgggacaataaataaagaaccttacctgaaccttagatctacct

SEQ ID NO: 389410 - DNA, 650 bp, Homo sapiens
gagttcactaccaccagacctgtcttaaaagaaatgccaaaagaagttcttcgagctgtaagaaaaggacactattaacataaaaacatctgaaagtataaaacctactggcaaaagtaagtacacagtcaaatttagaatactctaatattataatggtgatctgtaatttatttatatctctagtataaaggttaaaagagcaaactattaaaaatgataactacaataattttagagatatgcaatattaaaatgtgtaaattatgacatcaaaaattcaaaatatagggggagagtaaaaaagggagagggttttttttaagataactgggcttttttwaaaaaaaactttttttttaggttcaggggtacatgtataggtctgttatataaacttatgtcatgggggtttgttgtacagattattttattacccggatactaagcccagtactcaatagttattttttctgatcctctccatccctccaccctccaccctcaagtaggccccagtgtctgctgttcccctcttgtgtccgtgtgttctcattatttagctcacacttgtaagtgagagcatgtagtatttggttttctattcctgcattagtttgctgaggataatggtctccagctccaaccat

SEQ ID NO: 389411 - DNA, 567 bp, Homo sapiens
tccaaatgaatcttaatagttgagtaaaattgaatttggcttctctaggccataacagttagyattactccattgtgagcagatctggattataattaagaaaacccaacattaccactgacacagaagtatgctaggaaaatgactaatttacatagatctatgcctgttctgtaacttctgcatctggcatgctatgagggacagtgtgatcatgcatgtaaagtggagggacacatgataaggacagaaatctactctcaggattatctattagtcaactaaatttttaatattaatgcaaaatctcattcttcagtaattgttaatattcggtactaaatggctagaaaatagcagcaatctggctttggtgcagtcaaacacctggattcattcaatcatttagttattccacaaatatttattgagcaccttcagtgtagcataggattgtgttaggtggcaagtagcagaatgcccaactgaagcagctttgacaataagaattgattttttcctgcataacagaaagtaaggaggtattggtttttgacataagtgcca

SEQ ID NO: 389412 - DNA, 567 bp, Homo sapiens
tccaaatgaatcttaatagttgagtaaaattgaatttggcttctctaggccataacagttagtattactccattgtgagcagatctggattataattaagaaaacccaacattaccactgacacagaagtatgctaggaaaatgactaatttacatagatctatgcctgttctgtaacttctgcatctggcatgctatgagggacagtgtgatcrtgcatgtaaagtggagggacacatgataaggacagaaatctactctcaggattatctattagtcaactaaatttttaatattaatgcaaaatctcattcttcagtaattgttaatattcggtactaaatggctagaaaatagcagcaatctggctttggtgcagtcaaacacctggattcattcaatcatttagttattccacaaatatttattgagcaccttcagtgtagcataggattgtgttaggtggcaagtagcagaatgcccaactgaagcagctttgacaataagaattgattttttcctgcataacagaaagtaaggaggtattggtttttgacataagtgcca

SEQ ID NO: 389413 - DNA, 630 bp, Homo sapiens
gatttcacaaaatataacaatacttcattatagaaactctcaacaaaaaaatatagaaagaatgtgtctcaacacaaataaaggccatatttgacaaactcatggccaacattatacagaacagggaaaagttgaaagttttcctctaaaatctgaaacaagacaaggatgaccactcttgccgcttgtattcattataatactggaagttttagctaaagyaattaagaaaatgaaagaaataaaaggcacccaaattggaagggaggaagttaaattgtccatatttggagatgacttgatctatacatagaaaacccaacagattctattaaaaagctgtgagaactgataaacaaattcagtgaagttgcaggatacaaagtcaacaaacacaaatcaacatttctgtacactaacagtgaactctctaaaaaagacgtcaaggtaaggcatggtgacttatgcctgtaatcccagtgctttgaaaggctgaggtgggaggatcacttgagctcaggagttcgagaccaaactgggcaagatggtgaggccctatatctacaaaaaataaaaaaaaaattagccaagcatggtggtgtgcacccgtagtctcagctacttggtagg

SEQ ID NO: 389414 - DNA, 615 bp, Homo sapiens
taggctttggtgttcttattggcagcttgagccaacttatatggcttcccatagctttctggagaggagtaccctggagaggaggttatagtgggcactgaatgggcattcagcaagctatctcttttcccttcgaggtgtacaagtggacttttttttttttttaaaccagctttccctacagttaggtggggccataagccagagttstgcttagtggaatgtgggcagctgtattttataccacttccaagcctgttctttaacatctctggagtggtcctctgagcttgctctctcttctttgctggctgataggaagcagaggcttcgtggaaggtttcataggccctgaaatgtagaaacctctcaggtatttttagcttggaatccaaggaccccttagtctatggataaaattcaaggagttcaaccattttctaagcttggttacaaaattctacatctgtattttcaggaggctctaacttgattttagcacttccttctattatgaatgtaggcaaatcaccaccatgctattacaagtacctgtgactttgtcacctagagaaattacagatttttcatatcccattatagttgttgtggata

SEQ ID NO: 389415 - DNA, 615 bp, Homo sapiens
taggctttggtgttcttattggcagcttgagccaacttatatggcttcccatagctttctggagaggagtaccctggagaggaggttatagtgggcactgaatgggcattcagcaagctatctcttttcccttcgaggtgtacaagtggacttttttttttttttaaaccagctttccctacagttaggtggggccataagccagagttctgcttagtggaatgtgggcagctgtattttataccacttccaagcctgttctttaacatctctggagtggtcctctgagcttgctctctcttctttgctggctgataggaagcagaggcttcgtggaaggtttcataggccctgaaatgtagaaacctctcaggtatttttagcttggaatccaaggaccccttagtctatggataaaattcaaggagttcaaccattttctaagcttggttacaaaattctacatctgtattttcaggaggctctaacttgattttagcacttccttctattatgaatgtaggcaaatcaccaccatgctattacaagtacctgtractttgtcacctagagaaattacagatttttcatatcccattatagttgttgtggata

SEQ ID NO: 389416 - DNA, 579 bp, Homo sapiens
ctcaggcatttttacaaagctccccagctgatctcatgcaaaagaatattagtatagatgtgctgaggctaaaggtgaacaattgtcctgtgtcccacagtgggggcaatgaataaaaatagagatttcttctttcaccatcttggacttcaatttatttcatttctattaggttgaaaacagcacttatcattttggttaaacaaatataaaacatctcctctcttctaacacataccatgtcatcaggctagagctgttaccaaatatgaatgactagcgtgtaacctcttgcccagagtttaaaaactgttgtttagggaatggtttttgctgtctgtctccttttcttttttctttttcccttttttccttctcagcctcatttcctccctttcttgttccttcccacccatattcccttccaacatactgagaacctactatgtgcctcctaggtacttttcyggatgtcctgagatttgtttcagtttgtctgtacattgtcttaaaatttttacattattttccagcatctaaaaataggaagatttcatagaaaaattagtggagatggtg

SEQ ID NO: 389417 - DNA, 600 bp, Homo sapiens
tggtttcagagcatttgaccattttgaacactacaattgcagctaatctacttgaaatatgcttaagatattatgctcattttatgtctccagccagcggggaaaagatctagtttattgggttagagccaaatgtccaacagtggtaagacacatatcaaagttcctaatctttttcaggaaaagattgtctgaaaaaagaatcatttaaaaactcttttctttcaccttcttggtacatttgctcaaacaactgactagagtttgttaaaataaaattttctctctgtaaaatgctgacttgcaacaytttcttaatctttctccatcctggagaatggactttttgttgagctttatgtactgggttccaaacaagagaaaatataacataatatataattcaccatggtagcctgtagcatgaaaatgttctacaggaaggggtatcaatgttcttgtcattccacatttgttttgtcaagtacctaacaagtgcctaagactgttctcaagtataaaggaataataaaaaataataagcatgaggaaaatgtggcttagctttattaagatacaatgttaagagccctgaaattg

SEQ ID NO: 389418 - DNA, 552 bp, Homo sapiens
tgaaaataaaaactggaaagattgtttgctgtttttggtgacaccagtagtccacagtgcttctataattctgcaagcactctgctactaggttttgcatttgaagcccttcccatgccttgaggccctcttagctgctatttgtttgtttgagacaaagtttcaatcttgctgcccaggctggagtgcaatggagccatctggctcactgcaacctccacctcccaggttcaagcgattctcctgcctcagcctccagagtagctgggattacaggtgcttgccaccaagcctggataatttttgtatttttagtagagacagggtttcaccatgttgaccaggctggtctttaactcctgacctcaggtgatccacctgccttggcctcccaaagtgctggaattataggcrtgagccaccatgcctggcccttacctactgttttaaatgaaaaataaaaaattaaatatttgagaaacaggaaaacatctagcttggaatcttttttgtgtttttatcctctgccttgaagcacattgctgaactttt

SEQ ID NO: 389419 - DNA, 584 bp, Homo sapiens
attttttattttctatttttcatagatggggtctcgctttgttgctcagggtggtctccatctcctggcttcaagcaatcctcccacctcagcttcccaaagtacttggattccaggtgtgagccaccaaaatatcaaaaacttttcagttatttataratttttctagaatatcctgagattttagctgtggattgaatatgataggctgattttgtgtaatgtcttccagtgtctttctgtctaacttggtgagatctgatataaatcatttcctcactacaaattctcaatgagaacacgtatttggattgagattgtaagatgtcaaaagtctctactcgatgggccagtggaaggagagcagttccagtggtgttagcaacatacataaatgtgcagagaaatgatagggaaaggttcggggagctagatggccattccgatttactgaagcagaaaaagaaaggcttccaagtcttcttctagtcaattggactggtgcttcagaggcagcacctaagtcaggctctgagtacatacataaaaggcacttgaggccaggtacagaggctcatgcctat

SEQ ID NO: 389420 - DNA, 584 bp, Homo sapiens
attttttattttctatttttcatagatggggtctcgctttgttgctcagggtggtctccatctcctggcttcaagcaatcctcccacctcagcttcccaaagtacttggattccaggtgtgagccaccaaaatatcaaaaacttttcagttatttataaatttttctagaatatcctgagattttagctgtggattgaatatgataggctgattttgtgtaatgtcttccagtgtctttctgtctaacttggtgagatctgatataaatcatttcctcactrcaaattctcaatgagaacacgtatttggattgagattgtaagatgtcaaaagtctctactcgatgggccagtggaaggagagcagttccagtggtgttagcaacatacataaatgtgcagagaaatgatagggaaaggttcggggagctagatggccattccgatttactgaagcagaaaaagaaaggcttccaagtcttcttctagtcaattggactggtgcttcagaggcagcacctaagtcaggctctgagtacatacataaaaggcacttgaggccaggtacagaggctcatgcctat

SEQ ID NO: 389421 - DNA, 584 bp, Homo sapiens
attttttattttctatttttcatagatggggtctcgctttgttgctcagggtggtctccatctcctggcttcaagcaatcctcccacctcagcttcccaaagtacttggattccaggtgtgagccaccaaaatatcaaaaacttttcagttatttataaatttttctagaatatcctgagattttagctgtggattgaatatgataggctgattttgtgtaatgtcttccagtgtctttctgtctaacttggtgagatctgatataaatcatttcctcactacaaattctcaatgagaacacgtatttggattgagattgtaagatgtcaaaagtctctactcgatgggccagtggaaggagagcagttccagtggtgttagcaacatacataaatgtgcagagaaatgatagggaaaggttcrgggagctagatggccattccgatttactgaagcagaaaaagaaaggcttccaagtcttcttctagtcaattggactggtgcttcagaggcagcacctaagtcaggctctgagtacatacataaaaggcacttgaggccaggtacagaggctcatgcctat

SEQ ID NO: 389422 - DNA, 548 bp, Homo sapiens
caattttggtaatcaaagtgacaaccaataatacatatgaagtacctagcactgtgcctgacatttaccaagtgctcaatgaatattaattttccttccttatcatagagactggagattgacartggtgcatcaacacttggaggccaatgtgacagcaattaccaagttggactcttgggttagacagaccagaatttgactcttggcctcattgctgtttctcaaacacacccacaccatgatgctgtctttgggcctctgctcttcttccttctgttgtctcaattctcttccctcatgcatttacttggccagccttctcatcttcttctagtgatcactgaactcttacttgccctatgaactctatctataccactttatttaatgttgttacttgcctctacttcttccaacactacgaatctaccttaatctactatattttttcatgcactataatttcctgattttgtatatattatgtctattggtgttatttttgtctgatttccctcataagaatgtaagtttctcaaggatga

SEQ ID NO: 389423 - DNA, 548 bp, Homo sapiens
caattttggtaatcaaagtgacaaccaataatacatatgaagtacctagcactgtgcctgacatttaccaagtgctcaatgaatattaattttccttccttatcatagagactggagattgacagtggtgcatcaacacttggaggccaatgtgacagcaattaccaagttggactcttgggttagacagaccagaattkgactcttggcctcattgctgtttctcaaacacacccacaccatgatgctgtctttgggcctctgctcttcttccttctgttgtctcaattctcttccctcatgcatttacttggccagccttctcatcttcttctagtgatcactgaactcttacttgccctatgaactctatctataccactttatttaatgttgttacttgcctctacttcttccaacactacgaatctaccttaatctactatattttttcatgcactataatttcctgattttgtatatattatgtctattggtgttatttttgtctgatttccctcataagaatgtaagtttctcaaggatga

SEQ ID NO: 389424 - DNA, 548 bp, Homo sapiens
caattttggtaatcaaagtgacaaccaataatacatatgaagtacctagcactgtgcctgacatttaccaagtgctcaatgaatattaattttccttccttatcatagagactggagattgacagtggtgcatcaacacttggaggccaatgtgacagcaattaccaagttggactcttgggttagacagaccagaatttgactcttggcctcattgctgtttctcaaacacacccacaccatgatgctrtctttgggcctctgctcttcttccttctgttgtctcaattctcttccctcatgcatttacttggccagccttctcatcttcttctagtgatcactgaactcttacttgccctatgaactctatctataccactttatttaatgttgttacttgcctctacttcttccaacactacgaatctaccttaatctactatattttttcatgcactataatttcctgattttgtatatattatgtctattggtgttatttttgtctgatttccctcataagaatgtaagtttctcaaggatga

SEQ ID NO: 389425 - DNA, 512 bp, Homo sapiens
tgttactataaaagaatactgcaggctgggtaatttataaataaaaaatatttatttggctcacagttctgctggctggaaractgggcatctggtgaaagcttcaggctgccaccactcatggcagaaggtgaaggggagctgtgtgtgcagagaccacatggcagagaggaagcaagggagagaggagaggtgccaggctcctttaaacaaccagctctcgtgggaactaagagggtgagaattcactcaccctcccctgtaggggaattgacctgttcatgagagatccacccgataactcaaatgcctcccattaggccccatttctaacattggagatcaaatttctacatgaactctggagaggacaaaaaatccaaactacagcaggttttctccttttattccccaacctgagcctgctctattaacacaacatatttactaggggaagagcactttgctcatttatacttctttcctgtaatttatgacaaaatgccagtaac

SEQ ID NO: 389426 - DNA, 530 bp, Homo sapiens
gagaatcagttgtaaatgtgaataaattaggaaaacagccaggatattgtggtagatagttgccaagatggccttccagaagacgctgtttctaatattgagtagttgactgtaattcctctccccttcaacctgggctgtcctgagtgcttccttgaccaataaaatgwtagagaagtctgaacttccaagactaggtcgtatgaaatcttgcagcttcctttagtatcttgcaatggtccctatgggctgtttcttgtcaaaagctagtctcaatgctctgagaagcccaagccacctggagaggttacgtgtaggttctccatttaacagacttaatgggctttcaggcaacagcagcatcaactgccagtcctacaagtaagccatcttagatgtgtccatccagcccagttgaacctttagatgaccaaagatgaaatcaagatactgtgttgttttgagccacctaatttgagtgaaagataactggaacagatgttgtcaagcacagtggttaagaatatggg

SEQ ID NO: 389427 - DNA, 530 bp, Homo sapiens
gagaatcagttgtaaatgtgaataaattaggaaaacagccaggatattgtggtagatagttgccaagatggccttccagaagacgctgtttctaatattgagtagttgactgtaattcctctccccttcaacctgggctgtcctgagtgcttccttgaccaataaaatgatagagaagtctgaacttccaagactaggtcgtatgaaatcttgcagcttcctttagtatcttgcaatggtccctatgggctgtttcttgtcaaaagctagtctcaatgctctgagaagcccaagccacctggagakgttacgtgtaggttctccatttaacagacttaatgggctttcaggcaacagcagcatcaactgccagtcctacaagtaagccatcttagatgtgtccatccagcccagttgaacctttagatgaccaaagatgaaatcaagatactgtgttgttttgagccacctaatttgagtgaaagataactggaacagatgttgtcaagcacagtggttaagaatatggg

SEQ ID NO: 389428 - DNA, 530 bp, Homo sapiens
gagaatcagttgtaaatgtgaataaattaggaaaacagccaggatattgtggtagatagttgccaagatggccttccagaagacgctgtttctaatattgagtagttgactgtaattcctctccccttcaacctgggctgtcctgagtgcttccttgaccaataaaatgatagagaagtctgaacttccaagactaggtcgtatgaaatcttgcagcttcctttagtatcttgcaatggtccctatgggctgtttcttgtcaaaagctagtctcaatgctctgagaagcccaagccacctggagaggttacgtgtaggttctccakttaacagacttaatgggctttcaggcaacagcagcatcaactgccagtcctacaagtaagccatcttagatgtgtccatccagcccagttgaacctttagatgaccaaagatgaaatcaagatactgtgttgttttgagccacctaatttgagtgaaagataactggaacagatgttgtcaagcacagtggttaagaatatggg

SEQ ID NO: 389429 - DNA, 545 bp, Homo sapiens
aatgacaagtggagtactcacaaaggaccttccacaatcagaggatgatcctgactttatcctatttggatatataataaagtctttgcagtagcggaatgacacaggcagaatggttttgtgtttgttcatttgtttcttagtacagctttgactgctgtgcatagaaatagctgtagcccaggtggaagaggataatagcttgcccttgggagtgatggcatggatagagaaaaatgctcagcagtcattgctacaggaaaattatctcyacctggtaacccactaattgaactttttccaaaggatccacttggatctgatgctactctggggagaataggtgacttccattactaactctttgcttgatactaagtacattctttaccaacgtagcttgaggcacttggtattgtcaaatagttaagagattctagatcagagtttgatcctagctgggcaattactggttgttgtataactttttgcttctttttcctcatctgtcaaatgggcataaggatagtgtctacctcatgaag

SEQ ID NO: 389430 - DNA, 590 bp, Homo sapiens
aatcaggctgagcaaatgtcctaagctaggaaacagcctggttccttccaggaaacaaaagtagacagagtgtgctgaatgggaaatgatcttgcaaggagcctgaaatgacaagtggagtactcacaaaggaccttccacaatcagaggatgatcctgactttatcctatttggatatataataaagtctttgcagtagcggaatgacacaggcagaatggttttgtgtttgttcatttgtttcttagtacagctttgactgctgtgcatagaaatagctgtagcccaggtggaagaggataatagcttgcccttgggagtgatggcatggatagagaaaaatgctcagcagtcattgctacaggaaaattatctctacctggtaacccactaattgaactttttccaaaggatccacttggatctgatgctactctggggagaataggtgacttccattactaactctttgcttgatactaagtacattctttaccaacgtagcttgaggyacttggtattgtcaaatagttaagagattctagatcagagtttgatcctagctgggcaattactggttgttgtataa

SEQ ID NO: 389431 - DNA, 542 bp, Homo sapiens
attactaactctttgcttgatactaagtacattctttaccaacgtagcttgaggcacttggtattgtcaaatagttaagagattctagatcagagtttgatcctagctgggcaattactggttgttgtataacyttttgcttctttttcctcatctgtcaaatgggcataaggatagtgtctacctcatgaagttgcaatgaggatgaaaagtatgaaaagtatttataatagcacctggaatggagaaagtcctcaataattattatattattttgtaatcatttaatccacacatatgtattgatccaggcactggggatgcaaagatgaattagtcaatgtccccactctcaaagatacatctaggaggcagggttataaatcacagagattaaacgtaagctgggggctaagaacaatgccacagccgtgcaaaatatgaataccaaattacaaaagcatattgtggctaagtgggtctgagtatctgcatttccttaaagcagagaaatttattattttaaggaaaaaagaccatgt

SEQ ID NO: 389432 - DNA, 542 bp, Homo sapiens
attactaactctttgcttgatactaagtacattctttaccaacgtagcttgaggcacttggtattgtcaaatagttaagagattctagatcagagtttgatcctagctgggcaattactggttgttgtataactttttgcttctttttcctcatctgtcaaatgggcataaggatagtgtctacctcatgaagttgcaatgaggatgaaaagtrtgaaaagtatttataatagcacctggaatggagaaagtcctcaataattattatattattttgtaatcatttaatccacacatatgtattgatccaggcactggggatgcaaagatgaattagtcaatgtccccactctcaaagatacatctaggaggcagggttataaatcacagagattaaacgtaagctgggggctaagaacaatgccacagccgtgcaaaatatgaataccaaattacaaaagcatattgtggctaagtgggtctgagtatctgcatttccttaaagcagagaaatttattattttaaggaaaaaagaccatgt

SEQ ID NO: 389433 - DNA, 542 bp, Homo sapiens
attactaactctttgcttgatactaagtacattctttaccaacgtagcttgaggcacttggtattgtcaaatagttaagagattctagatcagagtttgatcctagctgggcaattactggttgttgtataactttttgcttctttttcctcatctgtcaaatgggcataaggatagtgtctacctcatgaagttgcaatgaggatgaaaagtatgaaaagtatttataatagcacctggaatggagaaagtcctcaataattattatattattttgtaatcatttaatccacacatatgtattgakccaggcactggggatgcaaagatgaattagtcaatgtccccactctcaaagatacatctaggaggcagggttataaatcacagagattaaacgtaagctgggggctaagaacaatgccacagccgtgcaaaatatgaataccaaattacaaaagcatattgtggctaagtgggtctgagtatctgcatttccttaaagcagagaaatttattattttaaggaaaaaagaccatgt

SEQ ID NO: 389434 - DNA, 488 bp, Homo sapiens
cccactctcaaagatacatctaggaggcagggttataaatcacagagattaaacgtaagctgggggctaagaacaatgccacagcygtgcaaaatatgaataccaaattacaaaagcatattgtggctaagtgggtctgagtatctgcatttccttaaagcagagaaatttattattttaaggaaaaaagaccatgtctgaccttggctgaaaacatggtaattacagagcccaagatgtcactgaaaatgcaagacagcttgagggcacaaagatagttttccttcgaaggctgattcaagtagaggattagaaaaaggctatttgggattataaaaattcctcccaaagccgtttggtgggttttttttttttttttttttttttttgagagagagagagaaaactattttagtggccaccatgtagaaagaaacatttgaagtaattcttgtgtatagagggttggctgccagcgtgattgacta

SEQ ID NO: 389435 - DNA, 470 bp, Homo sapiens
acagccgtgcaaaatatgaataccaaattacaaaagcatattgtkgctaagtgggtctgagtatctgcatttccttaaagcagagaaatttattattttaaggaaaaaagaccatgtctgaccttggctgaaaacatggtaattacagagcccaagatgtcactgaaaatgcaagacagcttgagggcacaaagatagttttccttcgaaggctgattcaagtagaggattagaaaaaggctatttgggattataaaaattcctcccaaagccgtttggtgggttttttttttttttttttttttttttgagagagagagagaaaactattttagtggccaccatgtagaaagaaacatttgaagtaattcttgtgtatagagggttggctgccagcgtgattgactaaaatggtcttcagggactttcatgagtaaaggagatgtattttttaacatttactgggaaat

SEQ ID NO: 389436 - DNA, 488 bp, Homo sapiens
cccactctcaaagatacatctaggaggcagggttataaatcacagagattaaacgtaagctgggggctaagaacaatgccacagccgtgcaaaatatgaataccaaattacaaaagcatattgtggctaagtgggtctgagtatctgcatttccttaaagcagagaaatttattattttaaggaaaaaagaccatgtctgaccttggctgaaaacatggtaattacagagcccaagatgtcactgaaaatgcaagacagcttgagggcacaaagatagttttccttcgaaggctgattcaagtagaggattagaaaaaggctatttgggattataaaaattcctcccaaagccgtttggtgrgttttttttttttttttttttttttttgagagagagagagaaaactattttagtggccaccatgtagaaagaaacatttgaagtaattcttgtgtatagagggttggctgccagcgtgattgacta

SEQ ID NO: 389437 - DNA, 470 bp, Homo sapiens
acagccgtgcaaaatatgaataccaaattacaaaagcatattgtggctaagtgggtctgagtatctgcatttccttaaagcagagaaatttattattttaaggaaaaaagaccatgtctgaccttggctgaaaacatggtaattacagagcccaagatgtcactgaaaatgcaagacagcttgagggcacaaagatagttttccttcgaaggctgattcaagtagaggattagaaaaaggctatttgggattataaaaattcctcccaaagccgtttggtgggttttttttttttttttttttttttttgagagagagagagaaaactattttagtggccaccatgtagaaaraaacatttgaagtaattcttgtgtatagagggttggctgccagcgtgattgactaaaatggtcttcagggactttcatgagtaaaggagatgtattttttaacatttactgggaaat

SEQ ID NO: 389438 - DNA, 563 bp, Homo sapiens
atttatgattaatcaagatgaaggcacacccccacttcagaagctcatgaacagagagtagaaactagatgattctccaaaggaaattgagattcagctatcaaaagagggggaaaatgggccaggcayggtggctcacacctgtaatcccagcactttgggagcctgaggtgagtgaatcacttgagagcaacctggccaacatgttgaaatcctggctctactaaaaatacaaaaaaaattagccaggcatggtggcaagcgcctatagtcccagctactcgggaggctgaggcacgagaatcacttgaatccaggaggaagaggtcgtagtgagctgagatcatgacactgcaccccagcctgtgtagcagagtgagaccctgtctgaaaaaaaaaaaaaaaaaaaagggaaaatgttttagggagccaaaaatctgtaaatacctagttccaaacttagatctttttactcttaattctctcatcttttgctgactctattgaaaattgaattactgtataaaatgaatactgcgaagtcaaaccatgccttaagtgaa

SEQ ID NO: 389439 - DNA, 563 bp, Homo sapiens
atttatgattaatcaagatgaaggcacacccccacttcagaagctcatgaacagagagtagaaactagatgattctccaaaggaaattgagattcagctatcaaaagagggggaaaatgggccaggcatggtggctcacacctgtaatcccagcactttgggagcctgaggtgagtraatcacttgagagcaacctggccaacatgttgaaatcctggctctactaaaaatacaaaaaaaattagccaggcatggtggcaagcgcctatagtcccagctactcgggaggctgaggcacgagaatcacttgaatccaggaggaagaggtcgtagtgagctgagatcatgacactgcaccccagcctgtgtagcagagtgagaccctgtctgaaaaaaaaaaaaaaaaaaaagggaaaatgttttagggagccaaaaatctgtaaatacctagttccaaacttagatctttttactcttaattctctcatcttttgctgactctattgaaaattgaattactgtataaaatgaatactgcgaagtcaaaccatgccttaagtgaa

SEQ ID NO: 389440 - DNA, 563 bp, Homo sapiens
atttatgattaatcaagatgaaggcacacccccacttcagaagctcatgaacagagagtagaaactagatgattctccaaaggaaattgagattcagctatcaaaagagggggaaaatgggccaggcatggtggctcacacctgtaatcccagcactttgggagcctgaggtgagtgaatcacttgagascaacctggccaacatgttgaaatcctggctctactaaaaatacaaaaaaaattagccaggcatggtggcaagcgcctatagtcccagctactcgggaggctgaggcacgagaatcacttgaatccaggaggaagaggtcgtagtgagctgagatcatgacactgcaccccagcctgtgtagcagagtgagaccctgtctgaaaaaaaaaaaaaaaaaaaagggaaaatgttttagggagccaaaaatctgtaaatacctagttccaaacttagatctttttactcttaattctctcatcttttgctgactctattgaaaattgaattactgtataaaatgaatactgcgaagtcaaaccatgccttaagtgaa

SEQ ID NO: 389441 - DNA, 563 bp, Homo sapiens
atttatgattaatcaagatgaaggcacacccccacttcagaagctcatgaacagagagtagaaactagatgattctccaaaggaaattgagattcagctatcaaaagagggggaaaatgggccaggcatggtggctcacacctgtaatcccagcactttgggagcctgaggtgagtgaatcacttgagagcaacctggccaacatgttgaaatcctggctctactaaaaatacaaaaaaaattagccaggcatggtggcaagcgcctatagtcccagctactcgggaggctgaggcacgagaatcacttgaatccaggaggaagaggtcgtagtgagctgagatcatgacactgcaccccagcctgtgtagcagagtgagaccctgtctgaaaaaaaaaaaaaaaaaaaagggaaaatgttttagggagccaaaaatctgtaaatayctagttccaaacttagatctttttactcttaattctctcatcttttgctgactctattgaaaattgaattactgtataaaatgaatactgcgaagtcaaaccatgccttaagtgaa

SEQ ID NO: 389442 - DNA, 594 bp, Homo sapiens
tcccataagaaagaggaggagcaactagccaacagaagtgtagtttggacacagcrtagagacgtgtagtgtggacatgcataagaaaagcaggtgccgaggccctctggcaggaaaatcttgatctcctccaggaaagaaaatcaaagtaagctagaagaaaaataatccaaactatttgggaggttagaaacccaatcattcaagctgggccttagtacatggaaattctttactgatttggcaaagtgagaaaaccttgaagggctttcaagcaagtggagtgacgtagtttaatttactttttataatactatttttgctctcttatattaaatgagtaataatcatgatataatggttgcttcatagcaagggcatcattctaagcaatttaaacatattaagttacttaatcttcatagcaaccctataattaattctgttttacagataaggtttataattactctttttattgcttactcagaaaattaaatttgagccttcttgtgctttagaacacacagaaaaaaaaagactttcaccaaacacaaaatagttacttatgaaacctcagctgccatgcccaaa

SEQ ID NO: 389443 - DNA, 487 bp, Homo sapiens
tctgccacattcaccttcaccctcccaagtaaaacagctccttcttaatactctgagacacaatatgcaaagagctatggcatcatctataacagttttgaccaggtctgaagattttccccacaaaagacacaaaaccaagcatyattctaagattctaaagtattgaagacatgtattcagaccaacactcttacacaaatgttcacagcagcactattcataatccccaaagggtggaaacagcccaaatgcccaccagcgggggaatagctaaacaaaatgtgatgtatccatgcaatggaatattattctgccataaaaaggaatgatgtatagcccaagtatccctaatccaaaaatccataatctgacctactctgaagtttgaagtgttttgagtgccagcatgacagcacaagtggaaagttccatacttgatctcatgtgacaagtcaagtgagtcgaaatgcagattaacaacaca

SEQ ID NO: 389444 - DNA, 562 bp, Homo sapiens
caataggggctgtgaggagaggaaaatgatgatgcttaattcgaagagggtttccttttgggatcctgaaaatgttctggaattaacttgtggcaatgacttgacattgtgaatatactcaaagccactgatttgtacactttaaaatacttgaagtcatgagttttagttatgtgaattttaccgaatcgttttttgaaaaatcattcctagtagggaggcctttctgatgaaaacctattaagtttccatttctccaggaaagggcatcattttctaataatattttggaaagagagttaatggaacagcattcatagatttatttttatatttgaacaaaatgcttaatgctaagagaaygattaagtaaaaagatgatgataattataatgacaattaccttgatcatcatcattatattatcataatcatataatttggataaacttgggaaccacagaaataattaatccaatgtacacaaactgaattttagtgcatacctaattgactgcttttttggaggattatatatttttaaagcataatatacgtggag

SEQ ID NO: 389445 - DNA, 582 bp, Homo sapiens
taataatattttggaaagagagttaatggaacagcattcatagatttatttttatatttgaacaaaatgcttaatgctaagagaacgattaagtaaaaagatgatgataattataatgacaattaccttgatcatcatcattatattatcataatcatataatttggataaacttgggaaccacagaaataattaatccaatgtacacaaactgaattttagtgcatacctaattgactgcttttttggaggattatatatttttaaagcataatatacgtggagaagggacaagaaaaaggctaataatcacattttagtcttatttatgtataaccaaatataaagcaaagggtaaatatttccagccttggagtttgtatgtccccttagtctgtcgtaaacattattccataaggatctttctttcscataaaacctagtccctcttgcccagctctctgagttgagccacagagaaactgcttgctagacctttgtgttgaaagccagcagggccccttagctgccatcctaacatgaattgctccaagcacaaattgttcccagagcaagcactat

SEQ ID NO: 389446 - DNA, 590 bp, Homo sapiens
cttatttatgtataaccaaatataaagcaaagggtaaatatttccagccttggagtttgtatgtccccttagtctgtcgtaaacattattccataaggatctttctttcccataaaacctagtccctcttgcccagctctctgagttgagccacagagaaactgcttgctagacctttgtgttgaaagccagcagggccccttagctgccatcctaacatgaattgctccaagcacaaattgttcccagagcaagcastatgcatttgcctgcaacggccccatgaggggtctccctagactctggcatgcattcctggagcatcttaactagggctgataccatgatccaagcatgacagccacattgttcctacattgtctgccactggagctttaaattgatttgattagtttcacctggtccacacaggcacacaattgtaagagatctgcagctatccctgtcatgtcactatgtatcaagtgtcctcatatctgactcagccccttaacacagaaaaggaatcctttaccaaatcaaaattgtacctcacctttttcttatcccctcaccacaaatttaccatc

SEQ ID NO: 389447 - DNA, 567 bp, Homo sapiens
gcatgcattcctggagcatcttaactagggctgataccatgatccaagcatgacagccacattgttcctacattgtctgccactggagctttaaattgatttgattagtttcacctggtccacacaggcacacaattgtaagagatctgcagctatccctgtcatgtcactatgtatcaagtgtcctcatatctgactcagccccttaayacagaaaaggaatcctttaccaaatcaaaattgtacctcacctttttcttatcccctcaccacaaatttaccatccaacctcttaacagttaagctaatgagctttaaaatattccccatctgcagcaacaaaaatatcaatgttcagtaaaagtaaaagtctctccaaaagtagtggggccaggtttcaacctgtgctatggtacacagatgtaccatgaccctttcaaagggatcaaagtatgatcaagaatgcaagttattcctgctaaaagtgaggagggtatctactcagaaacaagtttataagaaaaggttgtcagattgtaacatttgtgggcatgcagaatggtaaga

SEQ ID NO: 389448 - DNA, 519 bp, Homo sapiens
atctggaggcttaactatggaagattccatttccaagctccttcaggctgttggcagaaattatttccttgcagatgtatgactggggacccagcttgttcctggctgccagatggagcctgctcaacatcctagaagctacttgcaattccctgccacawgacccctcccacaggcagtttgcaacatggtggtttgcttcttcaaggccagcaagaaaatctctttagtctaccaagaaggagtcttatacaataaaacaatcatgggagtggcattcccatcaccagtgccatattctatttcttttttttttttattattattatactttaagttctgggatacttgtacaggacatgcaggtttgttacatagatatacatgtgccatgatggtttgctgcacccatcaacccgtcatctacatgaggttatttctcctaatgctatccctcccctacctccccacctcttgataggccccagtgcatgatgttcccccctctgtgtccatgtg

SEQ ID NO: 389449 - DNA, 519 bp, Homo sapiens
atctggaggcttaactatggaagattccatttccaagctccttcaggctgttggcagaaattatttccttgcagatgtatgactggggacccagcttgttcctggctgccagatggagcctgctcaacatcctagaagctacttgcaattccctgccacatgacccctcccacaggcagtttgcaacatggtggtttgcttcttcaaggccagcaagaaaatctctttagtctaccaagaaggagtcttatacaataaaacaatcatgggagtggcattcccatcacyagtgccatattctatttcttttttttttttattattattatactttaagttctgggatacttgtacaggacatgcaggtttgttacatagatatacatgtgccatgatggtttgctgcacccatcaacccgtcatctacatgaggttatttctcctaatgctatccctcccctacctccccacctcttgataggccccagtgcatgatgttcccccctctgtgtccatgtg

SEQ ID NO: 389450 - DNA, 516 bp, Homo sapiens
cttttaagtcagcaatctcatccctctagtgaatactggatagagagagaattttaatgtgctcctgctttgcttcagggtctactccatcccgttttaatgttaatcctctgtgacattatcatatgtcatttggcttctttgtgttgtgagacttaaagatcatggtggagagcatctttggaacatgggggatggaggggagtgagtaaagaacgagggttctcgtcccgtgtaaaaacagccaaccagaaagcatcgtaagacaaacacctggctgacattttgaggattctgaatgggaaatgcccaggtggatttgggaagagctaacacagggaggagctacagaaatgactggtgcttgtgtwgaaatcatttttcaattaaggcattaagggaaatatagagtttcttgatttgcattgagtgaatctagtcactggttttataaaattttgttatcagaaaatgtgtgctgtaaatatttagtacatacactaaattcattgccag

SEQ ID NO: 389451 - DNA, 477 bp, Homo sapiens
caaaagacattattcagaaataagcctggttcatgcaacttatccacagagaccattttaattaactagtagaaggtgggaaatcaggtttccctttggttaccttttgcctaaaactgattcttcccaataatttgaagttgccctcacarattggtttgttttaagctattctgaattatggccagtatgattggaatctaaccacctttgttttaaacacattgctgatatatttcctgccaaatctcttttctctattctaaagaactgattgccttttattgaaggcaagtcttattctcatggtgtctccagacctgaaacacagtaaagaaaaataattcaagtcaggatttaaatatgtgaaattccaagagtaccaactaggagactctttggaagatagaatataaaacaaacaaaacaaaaaaacagaaacatagattgttaatgctacttttttgagaccaatgt

SEQ ID NO: 389452 - DNA, 594 bp, Homo sapiens
tcaaatattgattctaacaatttaactttaagaatggtttaattcacagatgtactttaattattatgagtcacatgttttcattgttctgctgttatcaaagaggtaaaaaaaaaaacaaagaaatttacctcttttgttcttttttgtgtgagaataattcaaagacarttcactcaggataaaaataaagttggggaaacacactcagattgttaatagcaactgagagtttccttcatactgttattttaaaagtaacttcaatataaagataatccagggaaaggttcctgggacttcattctctttcctataaaagactgttccaaaccttcatcttttgtaggttacttccaaaataatcatcctgaacaaaattctcttcgaaatgtggttaaataatgtttcaaagtctgatctaatttaaaactttatggtgttcattttttaaggaaggtgaagagtagaaatgtggtggttcatctaaactaccagacaccccagaacgtctggagtagcccaggtaacaggccacagtctaaagaaaaacctcaggaacaatggatctgagtgatattattaccccagaag

SEQ ID NO: 389453 - DNA, 512 bp, Homo sapiens
cacaatggtattatatcctgttattctctctctcttttttttttaatcaaacacctgtattaacacattctcaagtgtctgtgagccaggcaaatagtgctgagaaccacaagcttttcatccagacgttagtcatcctgagttttccatgttctcagttgtgattcaytcagccacctatgacagcttaataaaataagagaaacaatgtatctcctttgattcctaggatttggcttctaaggcaataggtgagttcagagttaagagacacttctctcctagttggtatcaatttgtatagatctgaagtggcctaagaggttttgcatgctctgtagtttctcccttgtctaaagtttccatcaatgccaagagcatctccctgggagtttgaacttccctttaatctaatccatttagaaaatgactcacaattcattgaatgaagtagagaaaattgataacttttcattagtctgacaaagtctttttcagtgctggcatctaaa

SEQ ID NO: 389454 - DNA, 622 bp, Homo sapiens
tgagctcgaggtagaatttaatgttctcagaagactaaaaaaaaatcccttaggtgtgtgatatgaagaaagaacattgcctccttatttctgctccagttcatccatctacaaggcaggccagtgggaaggctggaaaaaagtctaggctaaattaatactctggttccaatattcgctatttatatattgcatgaggaaacctgctggtggccccatggagtgatctgaaaaggataggagacaaagacggctatgagtacaaagggcattgtggacaagagctaatgtttcctcagggggagtatgagccagtaagaatgttagtaagaatatcagcaaaagtagcagcaataccagtaacaataaggtgctaccatttaattgagtgcctccaatgtgtcaggcataaaagttccatcatatacattgactcttgcacagatgaggaaatggaggtgaagagaaggtcagtgatttggccaaatttatttaactagaatgaygagggagtgggattcaaacccaggtacatctcagtctacagtcttttcatttcatcaagctagggtgtcaagaaggatctcaataactctttcatggtggccttatttttctgtcc

SEQ ID NO: 389455 - DNA, 597 bp, Homo sapiens
ctagtcaagtggtgggtacacgaaaattttagtctaaaatttaaccaaaaaccacttgtatccctacaactattgaaaaaaagttttaaaaaattaattatggtgaaggtggccatgaacacatttmatctacaaactgaatttagacctaagctttttccagacctgttctctgcaatcagatcctactctatcaaatcctcaaacaggttaaggttagatgtcttaatggaaaaatggtacaaactctgagcacatagagaatgtttagagttttcacatatttctgactcactgctaggaattttctaattatgttaaaagcagaagagtttgaaagtccaggtatctgcacagagaccctgtttttgtttctttctttggggtttcttaaactgggataagcatacatttgcagagctataaacacaaaatcatgactctgaacttcggggataatttgcaagctcttcaagggtgtttttgatcagtcataacttctactttacacactgactctgacacctgtcttttctcttccaaccaaatgaagggtctgcactaagaatcattgagctaaacagtccaggacttgaa

SEQ ID NO: 389456 - DNA, 642 bp, Homo sapiens
ttccagctgtttcccagcatctatctgcaatcaggctttgggattccatcctctctaaatggataagctgcccaaggtagggggtccaagacctccttctgagataatgccatttggtgcatcaagcactggaatgctttaaggatcatctctgtactctctaaattccaagaggttgggacttacacctgtattaagtacctactacttcactattttattcctagtgcctgggaggaagtaggtgcttaataaatgagtgcatgaatgcataaactgatgaatgaatggtccatgcagttagagtctaaaatacttccctaaatagaaagaaaatgatctggataaggcatacaaaagtcaacagcaagaagccatcaagaaaatccccaattcaggaactttgcactggcttttgtcactgcttggatgatactttctacagattcttgcatgtttggctccgtctctacctttatcatctccaaggccatctcctcagagatgcttacctcaccatctcccctttgtgtagagttkatcttaaatctagttactttctgttccctgactctaattgattatagtgctcattattgaggctatcttgtttattcatttgtttctttctttctttctttg

SEQ ID NO: 389457 - DNA, 620 bp, Homo sapiens
ggtattttatccgtcttacttccacaactgctcccactagggactatagaacacacaaattcttgcacaaaggaaatgaaataaccagcctatgaatgaagacaaagccaggtcattcagagaaagtcagtgcttatgaagtatgccagttcaatctctgggatagccaagcatgtcctcagcagaccaaaacagattcagagaatgaattaccacctaatgtggatattcctgaaccctgaccctcacttcaacacacataatttttcattagagagaggtagccatgtacagggaagggcatcagacttagrtaatttttaatcctggctcagtcattgcctagctgtgtgacccagggccactcacttaatctctctgagccccctggatactcattcataaaagtagaccaattttggctacctcatagagttgaggattcagtgaaatagtgaatataaagcactttttatagtgctacatatcgtagatgttccacaaattagtctgattagatatatctctatataccgcatgacattgatatgttgattagcagagaatcctgaaattactggaaaaaagtgaagctcagacaaattagttcactgctattg

SEQ ID NO: 389458 - DNA, 620 bp, Homo sapiens
ggtattttatccgtcttacttccacaactgctcccactagggactatagaacacacaaattcttgcacaaaggaaatgaaataaccagcctatgaatgaagacaaagccaggtcattcagagaaagtcagtgcttatgaagtatgccagttcaatctctgggatagccaagcatgtcctcagcagaccaaaacagattcagagaatgaattaccacctaatgtggatattcctgaaccctgaccctcacttcaacacacataatttttcattagagagaggtagccatgtacagggaagggcatcagacttagataatttttaatcctggctcagtcattgcctagctgtgtgacccagggccactcacttaatctctctgagccccctggatactcattcataaaagtagaccaattttggctacctcatagagttgaggattcagtgaaatagtgaatataaagcactttttatagtgctacrtatcgtagatgttccacaaattagtctgattagatatatctctatataccgcatgacattgatatgttgattagcagagaatcctgaaattactggaaaaaagtgaagctcagacaaattagttcactgctattg

SEQ ID NO: 389459 - DNA, 566 bp, Homo sapiens
cacacacacacacacacacccttctggttgtgtttctctggagaacccagactaatacacaaagtcattgggcatggtggctcttgcctgtaatcccagcactttgggcatccaaggctggaggattgcttgagcccagttcaaaactagcctggcaacaaaataagaccctatctttgccaaaaaaaaaaaaaaaaaaaagaatagctgcgtgtggtagcacgyacctgtggacccagtcactcaggaggctgaggtgggaggattgcttgaacctgggaggttgtggctgtagtgagctgcgattgtgccactgcattccagtctgggtgacagagcgagaccctgtcttcaaaacaaaacaaaactaaggtggttacaatgatgtataatgccgtgcatcttcaggccttattattccctgttcattcctttagtccaggggtctacaaactatggcccataggcatacagcctgattttgtaaataaagtttgattggagcagtctcgcccattcatttacgtattgtcctgctgctttcataccccactggtagagctgag

SEQ ID NO: 389460 - DNA, 534 bp, Homo sapiens
gaaaaggaacacaaataggccctscttttctctaatcctgtagactattccacgtctctgtcccaatgaacatttccatttcccttcttccctccctccctcccttccttccttctttcctttctgtcttctctctgtcttttttttttttttgagacagagtctcattctgtcacccaggctggggcgcagtggcacaattatagctcactgcagcctcaaattcctgggcttaagccatcctctggcctcaggctcccaagtagctgagactacaggtgtgaaccactatgcccggctaatttttaaaaattttttgtagagatgggggtcttgctttgtcacccaggctagtcttgaactctagggctcaagtgatcctctggcctcggcctcccaaagtgctggtattatggtcatgaaccatccccccaacgaaccagcgaacatctccctttctaagtacctataaaataagcattatatctcaagccagtcaaagctgtagggctgaattaagcctccagttctaca

SEQ ID NO: 389461 - DNA, 534 bp, Homo sapiens
gaaaaggaacacaaataggccctccttttctctaatcctgtagactattccacgtctctgtcccaatgaacatttccatttcccttcttccctccctccctcccttccttccttctttcctttctgtcttctctctgtcttttttttttttttgagacagagtctcattctgtcacccaggctggggcgcagtggcacaattatagctcactgcagcctcaaattcctgggcttaagccatcctctggcctcaggctcccaagtagctgagactrcaggtgtgaaccactatgcccggctaatttttaaaaattttttgtagagatgggggtcttgctttgtcacccaggctagtcttgaactctagggctcaagtgatcctctggcctcggcctcccaaagtgctggtattatggtcatgaaccatccccccaacgaaccagcgaacatctccctttctaagtacctataaaataagcattatatctcaagccagtcaaagctgtagggctgaattaagcctccagttctaca

SEQ ID NO: 389462 - DNA, 497 bp, Homo sapiens
tgaacatgtaagtacacgtgtccttttggtgtaatgatctactgtcctttgggtatatactcagggattgctgggtcaaatagtagctctgttttaaattctttgcaaattctccaaactgctattcacagtggctgaactaatttacattccttccgacagtgtataagcattcccttttctctgaagtctcaccagcatcagttattttttgactttttaataataatcattctgactagtgtgagatggtatctcattgtggctttgattgggatttctgtgatgattagtgatgmtgagcatttttttcatgtttgttggctgcttgtatgtcttcttttgagaagtgtctattcatgtcctttgttcattttttaatggggttatgtcttctgttttttgatttgtttaagttccttatggattctacatattagacgtttgtcagatgcatagtttgcaaatattttctcccattctgtagattgccggtt

SEQ ID NO: 389463 - DNA, 502 bp, Homo sapiens
tgctacatttttagtattaagtaggctaaagcaatcttaatcagtaaaaagtgaccttttgaattcattgtttgcttctatttcctactcatctgctctcccacttggcctccaggtttgctatgtatgcaaaatgtctctactgagtaggraaagtgggatggcagccatttccctgctcctgaggtcaacatggcctaaggacttcagcaagcccaaatatgtacaacagtatccggcccactcgcgcctggagggggccatgctggtagactcagtccggctgcccagcaacagtgattctggctaatggctccccgttggagcagtttcctgaggttcctgctaatcctgttatttgcaaagagccaaagcccccataacagcagttttaaagcttgcttctggctgtattaagttagaccttgcaagggagatgaaggcagcagcatccgacactgaagaaatggctccagaggaaaagagccaatatccatgggtc

SEQ ID NO: 389464 - DNA, 502 bp, Homo sapiens
tgctacatttttagtattaagtaggctaaagcaatcttaatcagtaaaaagtgaccttttgaattcattgtttgcttctatttcctactcatctgctctcccacttggcctccaggtttgctatgtatgcaaaatgtctctactgagtaggaaaagtgggatggcagccatttccctgctcctgaggtcaacatggcctaaggacttcagcaagcccaaatatgtacaacagtatccggcccactcgcgcctggagggggccatgctggtagactcagtccggstgcccagcaacagtgattctggctaatggctccccgttggagcagtttcctgaggttcctgctaatcctgttatttgcaaagagccaaagcccccataacagcagttttaaagcttgcttctggctgtattaagttagaccttgcaagggagatgaaggcagcagcatccgacactgaagaaatggctccagaggaaaagagccaatatccatgggtc

SEQ ID NO: 389465 - DNA, 649 bp, Homo sapiens
ggagggagaaattgagagattagagtcatgctttcacaagttgaagaatgcctggagctatcagaggctgaaacaggcaaaggaggattctcccttagagagagcacagctctgccaacaccttgatttcaaacgtttagcctcctgaactgtgagacaatacgttactgctctttaagcctctcagtttgtgacacttggttagggcagccctaagaaactaataccaccacttacaatgaagggaatagtttgatatcacaaatattcattctttcattcaacaaatatttattgagctcctgcaacacaccaaacacacaaataattcttcagttaataaaaaaaagattaaaatcttgttaccaagcaatcaatgggctcactgctccatgcacttagaggtcgataccatggcacatgcctttgagaaaagaaamgcttcattgcaagtagactggcaaagagacaggaggaaatgctcaaatctgtctgcctgagctcagggctggggttggttttataaatgtagggtaatgaagcgtaatcttattggatcctgcaattaggtgatgctaggaggcatgatttgactggatcctgccatgggatgatgcctgggctcaatctcattggattctgtgtcctg

SEQ ID NO: 389466 - DNA, 599 bp, Homo sapiens
agacttatttgcattttctagacttttatataaatggaatcatacagtatgtgctcctttttgtctggcgtctttcaaacagcataatgattttgtgactcatgttgtgtgaattgattgttcattcctttttattgctgagtattttttcatggactacaacaacttgcgttcgtacattaatagacatttgggttggttattttgccattggaaataaagcttctatgattattcatatacaaatctttgtatggacaaatgctttcatttttcttggataaacatctagcagaaaaatgactggatcatatggtagacacatggttaacattttaaggaatttccagttttccaaagtggttgtataattgtacattcctagcagtgrtgtaggagaattccagttcctccacatcctcccaaatacttggtatatgtggcatgactagcctttttaatttcagtcacttaaatagatttataattcattatagttttaatctgcatttctccaatgactaatgatgttgacttgaatctttgtaaatttattgaaacttgtcttatgatccagaatataatttgtctttgtatat

SEQ ID NO: 389467 - DNA, 607 bp, Homo sapiens
aaacaagaccctcgatccatttctaaccagatttccagctcctaggcaaattcctatcctacctaacaacctataccttctctggcataacrccttactcatttgtatgattggactcttgggtcctcatagtaaacttcccaagggagatagaaatactatgtcatgaaaccctgttttgctttgttttacagggtgcgtagcagattaataaagagccagcatttattaaatatgctatttatagctctatgataaaatatcaattgtctttgtccaacagtagtttatttttaaaatttgaggtgggtctggggaggctgatggagatggggctgaagacccccaagccatccagtagcattgccactgactacagggaaatcaagtgttctggagccacagaagacaggagagacagccaccagagacatatatgaagatgaggtttcaataggaaataggcaggagggttaagagatacttgaggactagcagctgtcaacatcagaacagttaactctttcatgcttggctcacaaggagacaaacttgaggtaacacattcgagtcagagtgggcaagaaatgccccccccccaagggaa

SEQ ID NO: 389468 - DNA, 568 bp, Homo sapiens
agtttccaagcatctgctcagaaacatttccagaagcaccactggccaaaatgggttcccttcaggcctgctgctggactgaaagttgcccccctcaccttccaaagggaatattttagggcttccttagtcattaacactatagagagaattaatcaactacttttctctcatggtagcaagctcttagaaggcctggagcaagaggagcttggattcggggaaggtctggaggaggaagtagcagagtgacgaagaaagcccagttggatgggcacaatgaggaaaaggaaggggaggagtttgaggaacaaggctacttaaatcttattttctgtactttacaatttgaaccagccctctagaaccagccctactcacccagtggttgtctttttttccatcctagctctgtcctttccttcagcatcagtgatttcctgccaactctgacccatcattcttttccccagtctcaaaaaacctcctgcccacctccccattgagtatccttcttgtttaaggattttaattmtttaacgattgaacataatgccttggatgtggg

SEQ ID NO: 389469 - DNA, 595 bp, Homo sapiens
ggctgcaacctctgtgccaggactcactgagtgcatgtattggaggtgccagcctggggccggaatagttaccttcatgcatgaccccaagatgctgcagagccaaattgccaagtgcaaccctccctgagcctgcatctgaagccctgctcccagtggcaggggctggtgaataccaggaagggtaaggggagggaggatgggcaggggttggagggtggatggtgaaaaaaacttccacccccaggggagaaaggcaggtggcaaagggtgagatttcctaggaactgaaattccaagccccagtgctcgcttggacaaacagcccatcagacttcacatacaaaacagacattcaaggataaaattgtcaagaatttcattttaagacagtgatagcagagcatgaagctgcaggcatgggatctgtgtgactgcactggacatccgcctttgaggctggtctcgagtgaaaggckacctcagagcccactgcctgtacgcacagttgctgaggatgtgctagggaagctttctctttctctccaccgcattcttatctctgtctcttagttatctctatgagcaccccagc

SEQ ID NO: 389470 - DNA, 596 bp, Homo sapiens
aggggagaagttctactaaaaagaaacctggagggaggaggaaaaaactgccacttgaggaaaaacttaaacatttcaaaattcctacaacctaaatccatatagaaagaaaaaaaaaccctaaatgaagttaccataatattcctttaccaaattctgaaataagacaccgaaaggagcgaataaaactctagtgtgtggttttcagaggtggaaaggarccatgctgggggacatggacccacacaagctagtttttaaaggggcttaatatacagacacagtccatttaattgacatacaaagatagggcgcaaggctttgcaagaaatcaagggaccaaaactggaatctcaggtgttgaaactgttttatcccacagggcagaatgttctctttcccatttgctccgctctgtcctgctctctgctttcagacttactttttctttgtatactacatggttttcccacaacatagacttatgttttctgaccttggctttgacttccaactcaattcaatgcttttcatgttcgcttcatcatctgagtcagtgtctcagtatccaagtcccacatttctgggaagagact

SEQ ID NO: 389471 - DNA, 596 bp, Homo sapiens
aggggagaagttctactaaaaagaaacctggagggaggaggaaaaaactgccacttgaggaaaaacttaaacatttcaaaattcctacaacctaaatccatatagaaagaaaaaaaaaccctaaatgaagttaccataatattcctttaccaaattctgaaataagacaccgaaaggagcgaataaaactctagtgtgtggttttcagaggtggaaaggagccatgctgggggacatggacccacacaagctagtttttaaaggggcttaatatacagacacagtccatttaattgacatacaaagatagggcgcaaggctttgcaagaaatcaagggaccaaaactggaatctcaggtgttgaaactgttttatcccacagggcagaatgttctctttcccatttgctcygctctgtcctgctctctgctttcagacttactttttctttgtatactacatggttttcccacaacatagacttatgttttctgaccttggctttgacttccaactcaattcaatgcttttcatgttcgcttcatcatctgagtcagtgtctcagtatccaagtcccacatttctgggaagagact

SEQ ID NO: 389472 - DNA, 596 bp, Homo sapiens
aggggagaagttctactaaaaagaaacctggagggaggaggaaaaaactgccacttgaggaaaaacttaaacatttcaaaattcctacaacctaaatccatatagaaagaaaaaaaaaccctaaatgaagttaccataatattcctttaccaaattctgaaataagacaccgaaaggagcgaataaaactctagtgtgtggttttcagaggtggaaaggagccatgctgggggacatggacccacacaagctagtttttaaaggggcttaatatacagacacagtccatttaattgacatacaaagatagggcgcaaggctttgcaagaaatcaagggaccaaaactggaatctcaggtgttgaaactgttttatcccacagggcagaatgttctctttcccatttgctccgctctgtcctgctctctgctttcagacttactttttctttgtatactacatggttttcccacaacatagacttatgttttctgaccttggctttgacttccaactcaattcaatgcttttcatgttcscttcatcatctgagtcagtgtctcagtatccaagtcccacatttctgggaagagact

SEQ ID NO: 389473 - DNA, 468 bp, Homo sapiens
cacagtttctgtaggtcaggagtctggggccctgctgagctaggttctctgcttagagtctcacaaggttgagatcaaggtgttggttgggctgtgttcttatttggaggatctactagggaaggattcacttccaagtatggtcctcccacccsctgcccctggttgttcacagaattcatttccttttggtcgcagaattaatggcagcttgcctcttcgaagccagcaagggagagggagaatctttgctgcttagtctctgaccccaggaccctcttttaaaggacttccctgattaggtcaggcccacctatgataatctcttttgattaaagccacctgctgagagattttaattatatctacaaaatcttgtcaccattgctatattctgttaataagaagcaagtaacaggttccacacccattcaaaaggagggagttatatgagagtgtgactcattg

SEQ ID NO: 389474 - DNA, 468 bp, Homo sapiens
cacagtttctgtaggtcaggagtctggggccctgctgagctaggttctctgcttagagtctcacaaggttgagatcaaggtgttggttgggctgtgttcttatttggaggatctactagggaaggattcacttccaagtatggtcctcccacccccygcccctggttgttcacagaattcatttccttttggtcgcagaattaatggcagcttgcctcttcgaagccagcaagggagagggagaatctttgctgcttagtctctgaccccaggaccctcttttaaaggacttccctgattaggtcaggcccacctatgataatctcttttgattaaagccacctgctgagagattttaattatatctacaaaatcttgtcaccattgctatattctgttaataagaagcaagtaacaggttccacacccattcaaaaggagggagttatatgagagtgtgactcattg

SEQ ID NO: 389475 - DNA, 576 bp, Homo sapiens
ccaaatagacacatcaggttcggggcagctttgatgacatttagtgcttagagcagcttccactgaggagcatggacttaggaaagctgtattctaggagtctgtttctgattatttaatgttagcaggacatttgaagaagccaaagaatttgtataatgattcagacatcaggcagggttttcgtgtcctaaaatctctaggagggacggacaagctcatccccctccaaacacgtsccatgagaatgagatgcccttcatggtgtttctgtacatttccaaagggcttaagcaccctgtggttacccctggccccacacttgtgcttctgctgaatcggttgatgttggaaatggtcttgacgtccttctgtcatctgtgatgtacaacagagctgaggagctcagccaacttcctgaatttccttcagacaagctattcccacaagatgtgtgcctgtgtgtgtgtgtgtgtgtctgtgtgtgtgcacctgtgtgtagattgcactgaagctttgggaagacgggagaatttacagatcagtatctgggtccttttatggtttgggttccca

SEQ ID NO: 389476 - DNA, 576 bp, Homo sapiens
ccaaatagacacatcaggttcggggcagctttgatgacatttagtgcttagagcagcttccactgaggagcatggacttaggaaagctgtattctaggagtctgtttctgattatttaatgttagcaggacatttgaagaagccaaagaatttgtataatgattcagacatcaggcagggttttcgtgtcctaaaatctctaggagggacggacaagctcatccccctccaaacacgtcccatgagaatgagatgcccttcatggtgtttctgtacatttccaaagggcttaagcaccctgtggttacccctggccccacacttgtgcttctgctgaatcggttgatgttggaaatkgtcttgacgtccttctgtcatctgtgatgtacaacagagctgaggagctcagccaacttcctgaatttccttcagacaagctattcccacaagatgtgtgcctgtgtgtgtgtgtgtgtgtctgtgtgtgtgcacctgtgtgtagattgcactgaagctttgggaagacgggagaatttacagatcagtatctgggtccttttatggtttgggttccca

SEQ ID NO: 389477 - DNA, 576 bp, Homo sapiens
ccaaatagacacatcaggttcggggcagctttgatgacatttagtgcttagagcagcttccactgaggagcatggacttaggaaagctgtattctaggagtctgtttctgattatttaatgttagcaggacatttgaagaagccaaagaatttgtataatgattcagacatcaggcagggttttcgtgtcctaaaatctctaggagggacggacaagctcatccccctccaaacacgtcccatgagaatgagatgcccttcatggtgtttctgtacatttccaaagggcttaagcaccctgtggttacccctggccccacacttgtgcttctgctgaatcggttgatgttggaaatggtcttgacgtccttctgtcatctrtgatgtacaacagagctgaggagctcagccaacttcctgaatttccttcagacaagctattcccacaagatgtgtgcctgtgtgtgtgtgtgtgtgtctgtgtgtgtgcacctgtgtgtagattgcactgaagctttgggaagacgggagaatttacagatcagtatctgggtccttttatggtttgggttccca

SEQ ID NO: 389478 - DNA, 500 bp, Homo sapiens
agattttctgttgttgttgttgttaaatccataggactggttagatcacctagtatattagtcagggtatgctaggttctgctgcagaaacaaacaaatcttggaaattgtagtgacttaaccaagtaagatttatttcttgctcactcagagacagatgcaaatgtttctgggtaggcagttctttaagcaaagatctaargaattttttcttttcttttttggagatagagtcttactctgtcacctaggcttaagtgcagtggtacaatcatggtcactacagcttcaacctcccaggctcaagcaatcctcccaacttagccttctaagtggttgggactacaggcatgagccatcatgtctggctaatttttattatatttttaatagagaccctgtgttgtccaggctggtcttgaactcctggcctcaagtgattctcttacttaaacctcccaaagtgttgggattacaagtgtgagcccttgcactcaccc

SEQ ID NO: 389479 - DNA, 572 bp, Homo sapiens
ataccaatggtaagtgtaatattccactggattaacaagaatttggttcacagcaaggatttatagtcattctgataacaaatacggtacctctttttcttgtatatatatatrtaggagttacctgtgtatgtatgcattttctaataagaacttagatataaatttttagctgtcatacttccatatatttaaagtataggtaattgtcagcattgtctagaggacagagaaataggcattctcttaaattcttatctggtagcatatattgttagagccttttgacttttaggaaaatttggaaatagctattacatgaaaatgctcatatcctttgaccaaacagaaatgcttccataagcgttcaaatatatgtataagtattgtgtattgtaatttgcgatgacaaagacagtcagatatttacacacatcccaaagtgggaatttgatgaaatcaactgtggaatgtctgtctgtgctgtagaatgctgtgaaatgatcaaagagtgaagcagattgcctggctggtacacagttggtcgtatttgcaagcaagagtagcaaagc

SEQ ID NO: 389480 - DNA, 556 bp, Homo sapiens
cagtcagatatttacacacatcccaaagtgggaatttgatgaaatcaactgtggaatgtctgtctgtgctgtagaatgctgtgaaatgatcaaagagtgaagcagattgcctggctggtacacagttggtcgtatttgcaagcaagagtagcaaagctatctgtttataagaaccaacctgaattatatcattaagtagaaaaaaagcaagttgtagttcaatttgtagaatatgatcccatttatataaaaattcagtaaatgaaaattacacacwctcactttatgtgtggaaacaagtctgtatgaataactgcactgaataacctctggttatctctgaaggatgaaattataaaggactctcatttcctacctcctacattattgtagtttaaaaaaaatttgatgatgacataaataatgacaactttttccatttgtaattagaaataaacctgccagtttccttattgaaagtgcatttggagtttctgttggtcacattagatcatgaattctcatggaaaggtgtataccctaggcaacaagttgc

SEQ ID NO: 389481 - DNA, 556 bp, Homo sapiens
cagtcagatatttacacacatcccaaagtgggaatttgatgaaatcaactgtggaatgtctgtctgtgctgtagaatgctgtgaaatgatcaaagagtgaagcagattgcctggctggtacacagttggtcgtatttgcaagcaagagtagcaaagctatctgtttataagaaccaacctgaattatatcattaagtagaaaaaaagcaagttgtagttcaatttgtagaatatgatcccatttatataaaaattcagtaaatgaaaattacacactctcactttatgtgtggaaacaagtctgtatgaataactgcactgaataacctctggttatctctgaaggatgaaattataaaggactctcatttcctacctcctacattattgtagtttaaaaaaaatttgatgatgacataaataatgacaactttttccrtttgtaattagaaataaacctgccagtttccttattgaaagtgcatttggagtttctgttggtcacattagatcatgaattctcatggaaaggtgtataccctaggcaacaagttgc

SEQ ID NO: 389482 - DNA, 559 bp, Homo sapiens
aacaatagccaatctattaatacccacacaccctcttcaaacacattttgtaagtaacttgcaggctctctatccttttagaggtattcctatgaagacactatttttgtaggtgtttaaaatgggtgaactagacaaaggcatgatagaaagtaatgtgtttgtgttcagagacatgttcaaaaacggctgtaacttcagtgtaaagatggtcttagaaaagtataaatagctttcttcaaatatttcaatgaggaaatgtcattgtaggtttatgctttggaaatttgaggtggttatgagttgatgaccactgtattgatgatatgcacccttgaaatgtggatctccagaagaaatttctgcttaatgtcactaggagcaatagctggacttctggtttattcttatggtgtgaatactggggactttgtaaatgattaaggtttctctttttggctttgttgctagaaagacttagaataaaatcagyggtcccttcaaacaaatgtgtaagactacattctgttttgcattcaaccatttctggatccatttt

SEQ ID NO: 389483 - DNA, 618 bp, Homo sapiens
gtgcagcatgggagggaggaaactatggagactgtttgtgagagaaactgtagacctgcttctggagcatggagaagtggctttaggtagagcatgaacttgaggattcagagactcaagagacttcacgtcttagcatttccctaattggcacttgctgtccatttttatcccaacttgacttgtgaagtggctgttttctttaaagcttgtatttccatatgtagtcactttctagataaaccattttattataaaaggtggcccattttttacaaaaattagctgggcgtcgtggcaggcrcctgtaatcccacctactcaggaggctgaggcagagaattgattgaacctgggaggcagaggttgcagtgagccaagatcatgtcactgcactccagcctgggcaacagagtgagactccgtctcaaaaaaaaaaaaaaaaaaaaaggcccatttttgctgattcaggtaaccagtacagtgtaaacctcttttaatttctcacttaaaaaatgtggaaagtctattcatatagatactttggccatctcataatcagttgggtatatgaggaggtaacctcagggtgtccctcaagtgaaggcttctttcttc

SEQ ID NO: 389484 - DNA, 586 bp, Homo sapiens
ttttttttaacactccttcaacagtaaaggtagtggtttatgtggtgtctcttagatgagagttgttgcataagaattattggtatagccatttctcttcctcagcatgggtcattttcaacatctgctctatttcatgggagtgagcttttaaaaaatatttattttgtttgatattatttttttcattttcattttttacatttttatttctggagacagggtctcactctgtcatccaggctggaatgcaagggcatgaacrtggctcagtgtagccagagtgagtttctgggaagtcagcttaacatccaggaattgactttgctattttgtgacattccatctttctcaatcccttccagatactccctttagctacagagaaaaaaaaagtcccagttctgattcttgcagttgttggcaacctgaggcagtaacctgcctgagcctcactttccttacatgcaaaatggagataacatgtcacccagacatagcaagtgtgaggattagatgaggtactggatgttaagtgcttagcaccataactggcacagagtaagtactcattgggtatcagcca

SEQ ID NO: 389485 - DNA, 587 bp, Homo sapiens
aagggacactagtgcaaacactgcacgattattagtctctaaaagaaatataagatttctttagaaagatctcttactacatgacatttgcatttaaatcrtatttaccaaaggtttgtggcagacataaagctacgtgctactcatcaagaaccccacataaattgtaaaaaatatgttaggttttaatattcttattgttcaataaaaattttataagtccctattaattcaaaaaggtaggacttttcacatggttttacatttggtttttttatttcaatggtatagagaatgcatttttaaagaaaacgacttccagttttaaattgcactattaatcaaaagacaaataattttctttacgtaagtaatctcatcacataaatccccattgagtagttgcttttatatactatgtttaaggatatgtgtacatcattcttttacaacttaaaaaatgcaataatacacttgaacttttaaaggatagattggaaaattactactctggtggtatctatatttaaagcataaaccaatgtaatagacttttctagaacaaccattgcatgaagatttttcga

SEQ ID NO: 389486 - DNA, 587 bp, Homo sapiens
aagggacactagtgcaaacactgcacgattattagtctctaaaagaaatataagatttctttagaaagatctcttactacatgacatttgcatttaaatcatatttaccaaaggtttgtggcagacataaagctacgtgctactcatcaagaaccccacataaattgtaaaaaatatgttaggttttaatattcttattgttcaataaaaattttataagtccctattaattcaaaaaggtaggacttttcacatggttttacatttggtttttttatttcaatggtatagagaatgcatttttaaagaaaacgacttccagttttaaattgcactattaatcaaaagacaaataattttctttacgtaagtaatctcatcacataaatccccattgagtagttgcttttatatactatgtttaaggatatgtgtacatcattcttttacaacttaaaaaatgcaataatacacttgaacttttaaaggatagattggaaaattactactctggtggtawctatatttaaagcataaaccaatgtaatagacttttctagaacaaccattgcatgaagatttttcga

SEQ ID NO: 389487 - DNA, 572 bp, Homo sapiens
aaagccatgaaatgagatagctcaaaagggaatgtctatggggaggcatgcatgtaacaraaacatcacacttgggaaaaaggcgccttttcaggaaccttactttttgctgaatagcaaaatgtcattgtttggtgatagtggtgttctcaaatgtacagtgatcgcatatacatttgtgttgcaaaccaggttatttctgaaagtgaaagagggctgtgtttgacatttatttattaaaagttgttttattgtaaccgtatgattccacttatttgagatacctaaagtagtcatattcatacaaagtatgatggcggttaccaaggactggggagaggggagaatggggagttcttttttttttttttttttttagaagcacacatggaacttgctttattggatttccgttggagatttttagtttaaccaacaagaaacataaagttaggttttatcatcaaaccttatagttgactcataaccctatgactcaggtctctgactcaccttcacaagatttcattccaaatactttcagctgtggggatttcttgtttaatgggtac

SEQ ID NO: 389488 - DNA, 605 bp, Homo sapiens
atgatcaattcagaaagtccttagaaaacaggcaaggggtgaattcaagcattttgatgatccctaccaatgttaccacagccctgctttgtctatgtggattcagtagggccaggatgaatcctggaagtttccaagtggtactacaggatcatcttccccttaagcmggagatcctggtgatggcgccccaacagctggcaccctggtccctgactcagcctaactcccacagcagagctggtcagaaaaaacaagcatgcagatgaggagggcatggacaaatgaggtcataccacatgaaacttctaaactcagtgcctatgtaaagcaatggtcagtaaggaattttcctcattggcctgctttgacaggtctggagaaataccatgctgaggtcttaccttcctctgaggctgctgcacacatgcgccacagccaaaggcagattctggctctatcagaccaattatttcacaggacataagagtacctagtctgatgttcctttcatttccattactatctcactcaatcacttctgaatgtagtgacaggacttggcttccttccctagagaactctgctcactgtccagtccttat

SEQ ID NO: 389489 - DNA, 551 bp, Homo sapiens
ctcaacataactaatcattagggaaatgcaaattaaaaccacaatgagataacatctcatactagttagaatggctattattaaaaaaatcaaaaaataacagacgctggtgagttagtggagaaagggggatgcttatacactgctggtggaaatttaaattagttaagccattgtggaaaatagttcagatatttctcaaagaacttaaaaaaagaccatttgacccacaatcctattactgggtatataccaaaggaacagaaatcattctaccataaagacacatgcatgtatatattcattgcagmactattcttgatagcaaagtcatgaaatcaacctagacgcccatcaatggtggactggataatgaaaatgtggtatatatacaccatagaatactatgcaaccataaaaataatgatattatgtcctgtacagcaacatggatggagctggaggccattattctaagtgaattaatgtggaaccagagaatcaaataccacatattctcactcaaaagtgggaactaaacattgagtaca

SEQ ID NO: 389490 - DNA, 552 bp, Homo sapiens
aggtacaggaccttagaccagaaactctagcactataggagccagtatactgatattcattcaacatttaactagcatatataaagacagaaaaaaaaagttactaagctatttaacaaatataaatatcaaggcaatattacaaatatttgacaaatacatatgcaagtagaaatttttaataataccagtgatgatagtgccttcatgttgccaaaaaatagatkatctaacaacagtcatttattctgatatgctaagatgtttcctatcacttccaaggtatttgattcaaagtggctttggaagaaggtatgattacttcaaagggatacttaacacatggtaggatccaggcatcagagaggaatgattctttggaactttcctagaaattcacacatctacttcacccaaattgcttcaaataaggtaaaactttaaagaactagctataattaaaagcactgaaaacagacagattctcccaagatgtatcaaatagcgtgatgactgaacatcaggtagggtgggcagcgctaactgaggcag

SEQ ID NO: 389491 - DNA, 552 bp, Homo sapiens
aggtacaggaccttagaccagaaactctagcactataggagccagtatactgatattcattcaacatttaactagcatatataaagacagaaaaaaaaagttactaagctatttaacaaatataaatatcaaggcaatattacaaatatttgacaaatacatatgcaagtagaaatttttaataataccagtgatgatagtgccttcatgttgccaaaaaatagatgatctaacaacagtcatttattctgatatgctaagatgtttcctatcacttccaaggtatttgattcaaagtggctttggaagaaggtatgattacttcaaagggatacttaacacatggtaggatccaggcatcagagaggaatgattctytggaactttcctagaaattcacacatctacttcacccaaattgcttcaaataaggtaaaactttaaagaactagctataattaaaagcactgaaaacagacagattctcccaagatgtatcaaatagcgtgatgactgaacatcaggtagggtgggcagcgctaactgaggcag

SEQ ID NO: 389492 - DNA, 434 bp, Homo sapiens
  misc_feature (1)...(434): n = A,T,C or G
tttaaagaactagctataattaaaagcactgaaaacagacagattctcccaagatgtatcaaatagcgtgatgactgaacatcaggtagggtgggcagcgctaactgaggcaggcttgggcctgaaggctttggaggtccttatcattggtctgcatatgatatcctctgaaaactgtaggaagtcatcaggcctgaaaactggctntgatgactttncttccaaaagattttgtgatgcgatgggttttaattcagaacctttatttaggataaacttagaaaggaagaygagaaatggcattgacagatatgtgaatttgttgtatgaagtgttgggctctgggttaggtgcttcacataaatttaaaaaataaaggttactatttatcagacataatgttctagccactaccctataaactatgtgtatga

SEQ ID NO: 389493 - DNA, 434 bp, Homo sapiens
  misc_feature (1)...(434): n = A,T,C or G
tttaaagaactagctataattaaaagcactgaaaacagacagattctcccaagatgtatcaaatagcgtgatgactgaacatcaggtagggtgggcagcgctaactgaggcaggcttgggcctgaaggctttggaggtccttatcattggtctgcatatgatatcctctgaaaactgtaggaagtcatcaggcctgaaaactggctntgatgactttncttccaaaagattttgtgatgcgatgggttttaattcagaacctttatttaggataaacttagaaaggaagatgagaaatggcattgacagatwtgtgaatttgttgtatgaagtgttgggctctgggttaggtgcttcacataaatttaaaaaataaaggttactatttatcagacataatgttctagccactaccctataaactatgtgtatga

SEQ ID NO: 389494 - DNA, 474 bp, Homo sapiens
aagaactaatgcaaatgtgytgtatcaaggtaaaggcattaaaatatatggtgcttagtaatattgcctgtaatccagttctcttgcccagtctggcctgtctctcaatggctatcaatgaatcttcgctaagacattcactaattatgttgtgaccccttcctaagaatttctgcaaaactaaaagcatttctattttacctttctacaactctttactatacattcacacattacctcataacaattccatgtagtagatgttatccttgttttttatgacgtatagagtaaggagttatatacacaaaagtgacattccatgtttgcctttaacccacagtgtgaccttgtttacatggtatagcctctctgagtcttagttttctcacccacaatgtggcaaaaaataggagtcaaataatgacaataaagatttaacaacaataaagtttattctataatttgtacttc

SEQ ID NO: 389495 - DNA, 476 bp, Homo sapiens
catttaacatttcatgtttcaatttctttatccacaaaccggaggccatcatcctgacctgcatcatcaaaaagcaatttctattagcaaattaatgactgttgaggcagctatcaatgctgagtttcgttcatattagattgggcttcaattgccaaacagaaagtgaaccattccaggaagccccttcrggaacaagagtttaagttttttctctttctggccgtgaaggaaaagtactggtcaaagagaagagggaaaggcaagggggaggagaagggcagggaagagaggagataaaacagttcaaggttgtatttccctgacttcattcctgcaatgttggccttaccctttatgacaaggtctggggaagatgtagtttatgatgtgcttcaagtgtgataaagaagctgagaggagagcctgggaagggttaggtgtccttgaggaccggatgggcttgagtactctgt

SEQ ID NO: 389496 - DNA, 494 bp, Homo sapiens
tgctctttgcagacgcctctttgaaaagtgctgagatcactcattaactctcccagagggtaaatgaatgctcaagcaaagagccaatatatcctgcctgttttactaagcgctatagatacgcacagcactggcctargacctttttaaggtatagggaatatgtggtgtttggcctcaaacagttttatgtctagacagggaggctggagaaaccatatgaaacactttatgacgccagactctcgtcttggaagctgaagaatgagattcaaaatctaagcaaagacaaaaggaccatcaacaaaaagatagaagtgagttattgaaacaagtgaaagttgacccaaattcttagattcttgtttttgtcatcttattgtaaaatatatttgtaaggagagacctcgcagttaaacgaccagtatcaataaccttcttaatcatactagaaactcctgtaatctctgtgttttccacattctatttccctt

SEQ ID NO: 389497 - DNA, 494 bp, Homo sapiens
tgctctttgcagacgcctctttgaaaagtgctgagatcactcattaactctcccagagggtaaatgaatgctcaagcaaagagccaatatatcctgcctgttttactaagcgctatagatacgcacagcactggcctaagacctttttarggtatagggaatatgtggtgtttggcctcaaacagttttatgtctagacagggaggctggagaaaccatatgaaacactttatgacgccagactctcgtcttggaagctgaagaatgagattcaaaatctaagcaaagacaaaaggaccatcaacaaaaagatagaagtgagttattgaaacaagtgaaagttgacccaaattcttagattcttgtttttgtcatcttattgtaaaatatatttgtaaggagagacctcgcagttaaacgaccagtatcaataaccttcttaatcatactagaaactcctgtaatctctgtgttttccacattctatttccctt

SEQ ID NO: 389498 - DNA, 598 bp, Homo sapiens
ttctagttctttctgacttgttccctctgaaagagtaggggcatctcaaaaataccttaatgctttctcatgtagttcaataaacaaaatttcgagaaacttgtctgtggtggtgataggcattttgtgggataagaaaaaaaaataagtggaaaaaaatccttgttgcaaatagttaactgggagaatcaaggagaaatgcatggatcaagtctattcagtaaatatgaattgagcacttgaaatgtgccaggccctacactagaatcagctggactcatgcctatgctggaggaagcaacactctttatctaggtacgtaattttcatcacaaatgtcagctgaacttacccagtagagatgtttataacaatacacaaagcattttatctactcacctatttactagttcatttatttattttcccttactatgtaaagggcttgtttactattatatacacaatataacattcaagatgccattatatgcaccatrtaccattcaatggcatattgaatataatgcatataatggtaaacaaaacagatgaagcccctgctcttatgaagcttgcagtctaggaacccttaaat

SEQ ID NO: 389499 - DNA, 634 bp, Homo sapiens
gttttcttggaaagcccagctctagaaaataatttctggtgttaatatctatgatgcttgtcttttggacgtttcactaaagaattcaagatgtggatcttcactttgaaattctacattgctttctctgtacataaattacgcggcgttactatgcagatccatatagatgttcatatctttttgtgcatatcctttaycgccaactaggctggaagcacttgaaagcagtgatcacacaatccatttctatattctaagtgcttagtgcagtgccctgtagacagtaggagcttaataaatgtctttgttggtggtgagaaggacactttctgatattcaacagcaccctaaaacactatgagctgtgcctctaagcagcagaggggagttaaactacagagaagccctgagggacagatcacgagtttggacttcgccacattgagtttgatcccaaaggctatttctgcacatcaagccatctggagatagtgtgggtgccaggcatcacgcctgtgcagtgatgtatctcatcccttggtatttaaatgctgtcttggcatgggacactggtgtccacagtcagccacaggcagagaaaaaagttctgactctaagtcgtgggctgtaa

SEQ ID NO: 389500 - DNA, 599 bp, Homo sapiens
gcaagtttcaaagctcaatctaaactccacatcttccagaggagcttccccaatttatgcagcaattatacataaatccyataatcttccacttacaggattgattaggtatgtttctataatgttgtcttatgcctgtgtaaatcacataaatctgtactttatgaacagttttaaaatgtaaacttcttggggtcaaagagcataattcatctctctattctttcaaagcacaggctaaacttctggttgggagaattacgttgacagaataaagaaaagcagtaaggagtacgtattgttttaacactggtagatgtagtgaaatataactctaaaatctatgaactcttaaaattactgtctagcttctatcattcaatttttgctttaggaaaggaggaggaaatggaatgcatgatagaatacaacatattttatctctaaaattactttttaaaagaaagctgaaaatattctgagacatttcaaaaccattctcttaagatacagagtttagttttgtgacttcaaagtttgtagaatatttatcagccttggcaaaaaggtgcctagacttttaaaaatgtgattatttg

SEQ ID NO: 389501 - DNA, 551 bp, Homo sapiens
caccaggccatgtatgacttttagacaytcaggattccagcggagtcttgcagcaagtaactgcagatgtggcagaaagagcaaaggaactagaattagaagtggagactgaagatgtaattgaattgttacaatctcatgataaaacttaaatggagagttgcttctgattgatgcacaaagaaagtcgttcattgagattgaatctactcttggttaagatgctgtgaacatcgttgaaatgacaacaaaagatttagtataatatataaacatagtcaacaaagcagtggcaaagcttgaaaggattgactccaattttgaaaaaagtgctactgtggatataatgctattcaatagcatcatgtgctacagagaaatttttcaggataaaaaaaagaatcaatgtagcaaacttcattgttgtcttattttaagaaattgccacagccatcccaacctttagcaaccactaccctgatcagtcagtagccatcaacattgaggtgagaccctccaccataaaaaagattactatttgttggggaccc

SEQ ID NO: 389502 - DNA, 572 bp, Homo sapiens
gaagagtcctcaaagatgattaccatgaggccaamtaacaagactgagtggaaggtcacaactttaatctgagttttatgcagaactgaacattaatgggtgttggttgttcaaatcccttttatttctatccattttagctttgaggctagaattagtcaactttttaaatcacttcaaggttctaaattttatgattctttctatatattttcatttttattcgaaaacttgtaagtccttcctggagtttatcttttttcttcttcttcgaatacctcaataaacagatccagtagcagccaacatacactacaatattttgttttccagtcttctcttgaagttacagttctaggcaaatggtttgtcttacttcaggcaatggtttacagaagtgttgtcactacatgacatggatttcaagctttccagtttctgatatcagttgccttgccacctgccacatgacagctatgacaatatattttaggattttgttatggcagcactctactttgaggcaacattttttgtagtagttacgataatacaagttgccataacaaaca

SEQ ID NO: 389503 - DNA, 572 bp, Homo sapiens
gaagagtcctcaaagatgattaccatgaggccaaataacaagactgagtggaaggtcacaactttaatctgagttttatgcagaactgaacattaatgggtgttggttgttcaaatcccttttatttctatccattttagctttgaggctagaattagtcaactttttaaatcacttcaaggttctaaattttatgattctttctatatattttcatttttattcgaaaacttgtaagtccttcctggagtttatcttttttcttcttcttcgaatacctcaataaacagatccagtagcagccaacatacactacaatattttgttttccagtcttctcttgaagttacagttctaggcaaatggtttgtcttacttcaggcaatggtttacagaagtgttgtcactacatgacatggatttcaagctttccagtttctgatatcagttgccttgccacctgccacatgacagctatgacaatatattttaggattttgttatggcagcactctactttgaggcaacattttttgtagtagttaygataatacaagttgccataacaaaca

SEQ ID NO: 389504 - DNA, 408 bp, Homo sapiens
tcaatacataaaaagaaaaatagataaacaaatggagttgaccgtgggaatgcaaagttgattcaagacgcaaaaaacaatccatacaagaaatcatataaacaatctaaggaagaaaaaaacacatgattactacaattggtgctggaaaacatttgacaaaattcaacacccaacatgattaaaatttkcagtgaaagaggaataaaagataactcactcaacctgatcaacggcatctaaaaaactattgctacatcttacctaatagaaaaagactgaatgttttcttcttaaaactggtaaaaagaagtgtgcccactctcatgtctcctattcaatatgtgctggctattctagccattgaaataagaaaaaaagaagtacaaagtatgaattttgagagta

SEQ ID NO: 389505 - DNA, 529 bp, Homo sapiens
ttgcagaagacaaggtcaaataatatttctatatactaataattagcttttgaaacttgaacttaaaagcaaataagcatttgcaacagttctgcaaaataaaatactttgctatgcatctaaaaaaacttatttaaaacatcaaaaaagatccaaacaagtggagatgcatactgctgtgttcacgtgttagaagactgaagaacatacatcagtgttttccaaattaatctatagatttgacacaattccaaccaaaatcttagtggattttttatgtatgtagatacaatgattctaaaatttrtatggaaaagatatgaactagaaaggtcaaaacaatactgaaaaagaaaaacaaagtggattcatactaccagataaacagttactatgaggctacatttatgaaaaatgtgtcatgttgatgaagggataaatgtatagatcaataaagctgaatatataatccagaagtaggtcaatacaaatgcgtccagttgatttttaactacattttaaaggaaat

SEQ ID NO: 389506 - DNA, 578 bp, Homo sapiens
ttatagccaccaaaaatggaaacaactcacgtgtccttcaataagtgaacgcattagcaaactggaatatcactcaaaaagaataaactatgtatgcaccagcttggacacatctcaaagtcatcatgctgaatgaaataagccagtattaaaaggtttcatactgtayaattccatttatgtgacattctaaaatgaaaaagactataatgacagaaaatagagtggtggctacagggggttacagatttggggaaaaggtgactagaaaaaagatagcatgaggtagtgttcttggagtgatataactattttgtgtcctgattgcagtgatggttacattaatctattcactgttagaagtcatagaaattgaatacacaaaaggtcaaattatagtatcctaatttgaaaaaaaaatgttttaaaaaatcagcaaaattattgggatacgtatgtgtgtatgtactgcaagtaagagataaagcatacgcataaaatatttggaaccattggccatgtattcagtcacaaaaaggctcaacatcttttaaaaaatcaataatatacaagttaca

SEQ ID NO: 389507 - DNA, 590 bp, Homo sapiens
cagtattaaaaggtttcatactgtataattccatttatgtgacattctaaaatgaaaaagactataatgacagaaaatagagtggtggctacagggggttacagatttggggaaaaggtgactagaaaaaagatagcatgaggtagtgttcttggagtgatataactattttgtgtcctgattgcagtgatggttacattaatctattcactgttagaagtcatagaaattgaatacacaaaaggtcaaattatagtatcctaatttgaaaaaaaaatgttttaaaaaatcagcaaaattattgggatacgtatgtgtgtatgtactgcaagtaagagataaagcatacgcataaaatatttggaaccattggccatgtattcagtcacaaaaaggctcaacatcttttaaaaaatcaataatatacaagttacaacctccatccaaaaggcaatgkaattataaataaacaaaaagtgcactttggacaaagtatgtatttggatacttaagaatgaaatactaaataacttagataaaaagaaaatgaaaattacaaaatgcttaggactgaatgacagtgtaagttc

SEQ ID NO: 389508 - DNA, 530 bp, Homo sapiens
tgtggttgcatcagagctctttttagcaaacctagctacatttttttcttgtttgtgttaaggaaaaaaggacttttcttttccttacccatcttggacttttttccaattggatcgtcttagatcaagtgcctatcctygaactgattactatggcaaggagcttgggattggcttaggtcaattaaggccaatgcttggagcagggaactactccaaccagagtcaaacacctctttggaaggagaaggaaggtgtggaagctggggatgcagtgagtgatggaaaaaaaataggtcaggtgagaacttgataaatgtttgtttggaattttcccttgagatatactaataaaaagtatttaattcatataaatgcaaagttgtacatgatacttctacctataacatcttgttattcattcttatttttattttttaccttcaaaataaaaattcaagaaacaagcagagaaaggcataggtaaaagaaaagaataggaaagccatattataatttatcaaaaagag

SEQ ID NO: 389509 - DNA, 463 bp, Homo sapiens
aggaactgaaacctactggtcagtgcttgacaaccagaaagcgtatgttgagggccagagagttttgaataacaaaggagaattattggatcagcctcagggtagtgacattcagtacaagaaattttttatgaatccacttttttagccctggtagataggttctcgggaaagactatcacccatcatgtattaccaaccatgtaattagccaggcaagcaaataaattgaacttctttaggaaggtagtctttacatatgtgtttaccttttatttgtagcagaagttgactggtgcacaagacagggcagaamaggggactcccagcgcaggcctgaactctggcctccatcagccgaatgagctcctgcaattagccacagccacacactttggaaggcagtctagccacctgttaagtttgggcacatactccacaagggcttcccttttgtctgtac

SEQ ID NO: 389510 - DNA, 548 bp, Homo sapiens
atttgcagctgtggtaagtcctttggcagcagaggctgaatattttgggttcagtatctagaacaaggacactgataggatagcaacaactaccagtcaatcttggtttctaagggaaagcatttatatacaaatgacttttaaaccatccattgtttctacagagaattttgaggcgttatgaatttacctttatatacactataatgaatactccataaaggcaggaattattatccgttctattgcctattctgtcctcatcccctaaaacagtgcttggcacttagaagaagttccatgaatattgctgaaagaatataattcagattagagaagagggaagtaagtagtgyaggcatatgaataaacttcgaccccacactccccgtttagctcaagagtaaccaggttgaagcttccctaacatgccagtttctaccatcttcaatcatgggaactctgttctccagggtctgacatttgtctcctgatcatccacttcctccctgatgggctgctgtgtgctgtgctccccttctgctgaa

SEQ ID NO: 389511 - DNA, 548 bp, Homo sapiens
acctgctttgctgtgtggccttgcacagaaaactctcaatctctgggtttctgtttcatgccctgtaaaacagtagtgagattaatgagtctctgaaaggagggactctttctgctgttcaaatattctgattctgtgtatgtggaatcacacatgcattttacattcatctacatatagagagcctcggaatttgactttatcatttcttcaagtttccctacgccatgatgcttcaytcctaggataatggtctttagcatgtcaatgattcaaatacagggccattttcttgggccttcattgtttcagagtgaaattgaaagagggaatccagctgtttatacgcaatatgcagcaattatgaagttcatttccagaagccactgtaaccatggcaacctgtaattctggaagaatagagacaggctgtagactgacttccaatggggccaacttctaaccaggatagctcaggaaatgctgatgagaagccttactgtttactttaagttagaagcagtttttgaaactcagacttccttaat

SEQ ID NO: 389512 - DNA, 466 bp, Homo sapiens
cacagcttgtgacacaagtttgcgcccatatttcatacacctggatgtcatctaggggagaactgggagaaaaggttgaaaatacataaaaactgagcatrgtttccaaggaaactgagttctatatattcatttattgattccttcattgatgcatttattcattcaagaaagatgttatcaagtggctacagcatactagacatcattctaggcactagagaacaagaaaaatccaccctctcatgaaccttccttatctgagagacactgattaggccagaaatgactaagatgattggtatgtgttagttattccttgggctatgtggcaggtagagttttggcaggaaatttagatgggttagagaaaataaaccatgtatttttgcactttttgttgcagtgttttatccactataattataccagagttcatattgtatagttatttgaaggaaacagg

SEQ ID NO: 389513 - DNA, 466 bp, Homo sapiens
cacagcttgtgacacaagtttgcgcccatatttcatacacctggatgtcatctaggggagaactgggagaaaaggttgaaaatacataaaaactgagcatggtttccaaggaaactgagttctatatattcatttattgattccttcattgatgcatttattcattcaagaaagatgttaycaagtggctacagcatactagacatcattctaggcactagagaacaagaaaaatccaccctctcatgaaccttccttatctgagagacactgattaggccagaaatgactaagatgattggtatgtgttagttattccttgggctatgtggcaggtagagttttggcaggaaatttagatgggttagagaaaataaaccatgtatttttgcactttttgttgcagtgttttatccactataattataccagagttcatattgtatagttatttgaaggaaacagg

SEQ ID NO: 389514 - DNA, 462 bp, Homo sapiens
tttgcactttttgttgcagtgttttatccactataattataccagagttcatattgtatagttatttgaaggaaacaggattgttttattcatttatttaactatttattatacagagttctaaagtatctatgatgggccaagcgttattctcatgcagaagatacaacagtagacaattccatatttgtatttcttttacttaacacatgatacacactccatatttggraaaaaataaagagcagaggtaatgatttttgccctactgactatactagtttttgtagaaggcaacaaagtattttggggttcctccaccatcagtcaacaagaacaatttacataggacctccatggttccagagtctaaggtcttccatgttttctctgacacctatgctgatccatcccattgtaggatgtgccaggaaagaaaggatttttagcacctggcaacct

SEQ ID NO: 389515 - DNA, 448 bp, Homo sapiens
ggccagctccttagagatttggaaagaataagagggaaagattagtgatgagaaagttcatcagagatgtgtggacatatgcagcaaacttgaaagagaagataaatatacttctatctcatgtaagtaaatgccctccttagagcatcaattacacagggatgtctcaatagttatgaatataatgattcatcctgtggatgtcaatcagttgatttccacaactatctcatttgttcaataaktcaaagtggaaagagctcattgccacagatggagactatgcatgggctcaaaaatatgcatattctatcatctacagtgatctgaatgccaccactgctgactgttaactacccaatgataatgactgacactgagttcctgacatagtaccatttcccctgaagggtgagccaaccactcagtggcagatagattacactgg

SEQ ID NO: 389516 - DNA, 559 bp, Homo sapiens
agtaccatttcccctgaagggtgagccaaccactcagtggcagatagattacactggacctctgttaatcatggagcaagtagcaatttatcatcttgagaatagattcattttctggatatggatttgcctttcttgcctgcaatgcttatgtgggaaagactatttttggrctttatcttattctttaccatgctatctcatataacatcacatcagaccaaagaactaattgtatggtgaagaaaatgtggcagttggcttattccatgaaattcatttgtcttacacagtgctccatttgccagacgtatctggcttaacagaaacgtgaaatgaacttctgaagcctccctgattacaccttctggggcagaacactttgtaagattgaagggctgtccaaagaatccaatggatgacttaaaaggaaatatataatgtgttttcctccataactatattatgcatctctgtgaatacaggtttggcaggaaagtggctcacttgttatatccattatataaaagaaactgcagaaagctagctagtgccttcc

SEQ ID NO: 389517 - DNA, 559 bp, Homo sapiens
agtaccatttcccctgaagggtgagccaaccactcagtggcagatagattacactggacctctgttaatcatggagcaagtagcaatttatcatcttgagaatagattcattttctggatatggatttgcctttcttgcctgcaatgcttatgtgggaaagactatttttggactttatcttattctttaccatgctatctcatataacatcacatcagaccaaagaactaattgtatggtgaagaaaatgtggcagttggcttattccatgaaattcatttgtcttacacagtgctccatttgccagacgtatctggcttaacagaaacgtgaaatgaacttctgaagcctccctgattacaccttctggggcagaacactttgtaagattgaagggctgtccaaagaatccaatggatgacttaaaaggaaatatataatgtgttttcctccataactrtattatgcatctctgtgaatacaggtttggcaggaaagtggctcacttgttatatccattatataaaagaaactgcagaaagctagctagtgccttcc

SEQ ID NO: 389518 - DNA, 671 bp, Homo sapiens
tttccctaagtactgctttagctgaatcccacaaattttgatgttgtggttaaaatttcatttagttcaaaatattttttaaaaattttctcttgagaatttctcttcatctacaagttatttagaagtgtgttgtttgttttccaaatttttggaggttttacaaatttccttctgatgttgacttctagattatttttattatggtttaaacacatgccttgtatcatttctattytttcaagtttcttatggtatgttttatgatccagagtatgctctctcttgttaaatgttccatgtgcacttgaaaagaatgtggattctgcttgtgtgaagtatgctacaaacattaattagatcaagttggtagctagtgttgtttatgtcatctgtaacctgactgattttctgcttacttgttctgtcatttaccgagagatgagtattgaaggctccaaccttaattgcaaattttcttcttacagatttaacagtttttgcttcatgcattttaaagctaaatgtggatacacatttaaaatattcatgtcttcatggggaatttaccctttatcaatatgtaatgtctctcttttcactaatgttttcattatatatctatttccatcctttatttttatcctatatatgtctttattttaagtggt

SEQ ID NO: 389519 - DNA, 671 bp, Homo sapiens
tttccctaagtactgctttagctgaatcccacaaattttgatgttgtggttaaaatttcatttagttcaaaatattttttaaaaattttctcttgagaatttctcttcatctacaagttatttagaagtgtgttgtttgttttccaaatttttggaggttttacaaatttccttctgatgttgacttctagattatttttattatggtttaaacacatgccttgtatcatttctattctttcaagtttcttatggtatgttttatgatccagagyatgctctctcttgttaaatgttccatgtgcacttgaaaagaatgtggattctgcttgtgtgaagtatgctacaaacattaattagatcaagttggtagctagtgttgtttatgtcatctgtaacctgactgattttctgcttacttgttctgtcatttaccgagagatgagtattgaaggctccaaccttaattgcaaattttcttcttacagatttaacagtttttgcttcatgcattttaaagctaaatgtggatacacatttaaaatattcatgtcttcatggggaatttaccctttatcaatatgtaatgtctctcttttcactaatgttttcattatatatctatttccatcctttatttttatcctatatatgtctttattttaagtggt

SEQ ID NO: 389520 - DNA, 621 bp, Homo sapiens
cacattgtcttttgtatattttctttctccaaccacaccccaggagagacacagaggtggcgcctaccaggagctcataaaaagatctttaaaagaaatcattaaagttataattgatgtagaagtaattgcatatataaaagtatagtatttaataagaattgagatatgtatacacttatgaaaccattgccacaatcaagataatgagcatatccattatcccccaattctctcataccygtttatagtctgtctctccctctcctcccttctcccgacctccatcctcaggcaaacactgatctgctttttactgctatagataacgttgaattttatataatttatataaattgaatgatacagtgtattctcttttctggtctggtctctttcactctgcattattctttttaaaatcatcagtgttgctgcacataagttcacttccttttttattgttgagtaacattttgtttttacattcaagtgttggtgtttctttctagttggaggctattacaaatacagcattccgaacattcttgtctaagtttttgtatgaccataaacattcatttacctttacaaaatacctaggactagaatggctggatg

SEQ ID NO: 389521 - DNA, 621 bp, Homo sapiens
cacattgtcttttgtatattttctttctccaaccacaccccaggagagacacagaggtggcgcctaccaggagctcataaaaagatctttaaaagaaatcattaaagttataattgatgtagaagtaattgcatatataaaagtatagtatttaataagaattgagatatgtatacacttatgaaaccattgccacaatcaagataatgagcatatccattatcccccaattctctcatacctrtttatagtctgtctctccctctcctcccttctcccgacctccatcctcaggcaaacactgatctgctttttactgctatagataacgttgaattttatataatttatataaattgaatgatacagtgtattctcttttctggtctggtctctttcactctgcattattctttttaaaatcatcagtgttgctgcacataagttcacttccttttttattgttgagtaacattttgtttttacattcaagtgttggtgtttctttctagttggaggctattacaaatacagcattccgaacattcttgtctaagtttttgtatgaccataaacattcatttacctttacaaaatacctaggactagaatggctggatg

SEQ ID NO: 389522 - DNA, 621 bp, Homo sapiens
cacattgtcttttgtatattttctttctccaaccacaccccaggagagacacagaggtggcgcctaccaggagctcataaaaagatctttaaaagaaatcattaaagttataattgatgtagaagtaattgcatatataaaagtatagtatttaataagaattgagatatgtatacacttatgaaaccattgccacaatcaagataatgagcatatccattatcccccaattctctcatacctgtttatagtctgtctctccctctcctcccttctcccgacctccatcctcaggcaaacactgatctgctttttactgctatagataacgttgaattttatataatttatataaattgaatgatacagtgtattctcttttctggtctggtctctttcactctgcattattctttttaaaatcatcagtgttgctgcacataagttcacttccttttttattgttgagtaacattttgtttttacattcaagtgttggtgtttctttctagttggaggctattacaaatacagcattcygaacattcttgtctaagtttttgtatgaccataaacattcatttacctttacaaaatacctaggactagaatggctggatg

SEQ ID NO: 389523 - DNA, 671 bp, Homo sapiens
tttccctaagtactgctttagctgaatcccacaaattttgatgttgtggttaaaatttcatttagttcaaaatattttttaaaaattttctcttgagaatttctcttcatctacaagttatttagaagtgtgttgtttgttttccaaatttttggaggttttacaaatttccttctgatgttgacttctagattatttttattatggtttaaacacatgccttgtatcatttctattctttcaagtttcttatggtatgttttatgatccagagtatgctctctcttgttaaatgttccatgtgcacttgaaaagaatgtggattctgcttgtgtgaagtatgctacaaacattaattagatcaagttggtagctagtgttgtttatgtcatctgtaacctgactgattttctgcttacttgttctgtcatttaccgagagatgagtattgaaggctccaaccttaattgcaaattttcttcttacagatttaacagtttttgcttcatgcattttaaagctaaatgtggatacacatttaaaatattcatgtcttcrtggggaatttaccctttatcaatatgtaatgtctctcttttcactaatgttttcattatatatctatttccatcctttatttttatcctatatatgtctttattttaagtggt

SEQ ID NO: 389524 - DNA, 527 bp, Homo sapiens
caacccacttctggtacaaatttactatgttagtccattttcacgctgctgataaaaacatacccaagactgggtaatttatacaggacaaagaatttaatggacttacagttccacgtggctggggaggcctcacaatcatggcagaaagtaaagaggagcaagtcacattttacatggatggcagcaagcaaaaagagcttgtacaggaaaactcccctttgtaataaccatyagatctcatgaaacttactcactatcatgagaacagaacaggaaaggtctgcccccatgattcaattacctcccttcaggtccctcccataacaggtgtgaattatagattagatttgggtggggacacagccaaaccatatcagcccccaacaagataagcccataccttagtccctggaacctgtcaatgttaccttatttggaaaaaggaactttgtagatgtaatttagttagggatcttgaaatgagaagatcatcctggattatctgggtgagtcctaaatccaat

SEQ ID NO: 389525 - DNA, 526 bp, Homo sapiens
aatatgttttgtttaacaaaaaccaaaaaaaaaaaaaaaaaagcaaaagaaggatgaatatcatgtgtctaaaatcgtttgaaaacatctgctggactgaaagatttggtttctaatctgtttgataatttcaacactttttctaatctctttcagatcaataatgtttgtgactcaatttccaattctcctgaattcagtaggggaaattgttaggcttcatcctgaagttcccatcagatataactgaatagttgttattttctttattaggaacttaagcagttctatttgcacytaagaggcaaacacctcttaaagaggtgtttgcgttggtgtctctgtggttacagagaagattaaaacattttctttcttttgttttgtattgatttcttcactttctagtgccaaggtgacattgtgtgtaatggttttacaatgtagattagtactgtttgtgtttgttggcctgctagtttgtttgtttttatttgttctttgtttggggggtttatttatgtaa

SEQ ID NO: 389526 - DNA, 652 bp, Homo sapiens
gttgtttccctgtgacactgaggccttcttgatgtcagtcatcattgattttcctgcagccacactgttcccagggaggcaaggcagagacactcaggaggcagagcattgcattaaaccgcagttgggaacagaccaggagattaagacagaggaagaagggttaagggggctgtgaatccgtaagcagtgactatcactgtgtgcctggaatccaagctacgtaaaacaggaaatgagtttaagaggggcctgatagagaaaaagtggtaggtacatgggaaagagggtgtcagattggttttgtattgtttacagttgcagtggaagtactttgaaagtgagctgcagagatagaaagtgagctgcatggtcagagggtgttctggacattgcaattctgaaagagtacaaagcaacggtaaggtgagagtaggcagcgggtggagattgagaggtgagataaagaaaccgtggtagaagcagagaactcaagatgaaagggcacatctgtcctcagagcttgatctgttgctctaaagcattcatcagtctgcccgtyctgaacgagacctccctgtctttccagcattttgggtctattcaacctggctgtgaatccctctcagtctctggcttgggcagccagccc

SEQ ID NO: 389527 - DNA, 509 bp, Homo sapiens
tttggataattcaagaacttctgaactctaagtaccccttgggatccaccattgttctaattcattttaaatcacccctcttcatgagcacccagccatatagcagccccaaaactgactgtgttctgtatgactgcacagggagccaatctgtcctggacagtccccttactccatctgacacagcctccctagggctctttaagacctgggactccagacctacttcttgatatgttaaaggagaaaatgaatttagataatcctttagtctttcataaggccttgctttcgagactatcttttacaaaagaaggtaagaaagtcaccctcgagagaaagttgatttataagattctttgccctctgggaaactacacccacattttactggtttgattaaccttgaagtgaagtcccagaggtaggaggtgaatraaaattaaggagcaaattaaaatccattggccgaatattagtaaaatgctactctgttttgttaattttga

SEQ ID NO: 389528 - DNA, 583 bp, Homo sapiens
aggctgacttaatacatgtgatttaattccagaatgtgtttctgaaaatcccctgacttctttgtgaatatcggttatctctctgcttaaaaacaaggtacacaatgcttcttgtagaattktggctgcttgttttagaaggagacattgataaattggagaggatccaaaaatgataaaaggattagaggatatgacctacagagaaagattattaaaagaactcatacatccagcctggagcaacgatgacagtgggtggggaatgtgataactgaacataaatactaggaataggtaagaaataaggaaaaaaactattttgagttattagagggtggacaaacaagaatcaatggccttaaaccagaaaagcaagcacttgtgtgaagtattccaagaagaattattttcaacagagaggtcaattaacaccttgattatttcatctgagaggtgatcctatgcagttctttagatagtacctccaaaggctgattatgcagaaggaatatgtatcctggctgccaacactgcatctgtgcccaagtccttaggcaatatatacattttgaaatggaga

SEQ ID NO: 389529 - DNA, 583 bp, Homo sapiens
aggctgacttaatacatgtgatttaattccagaatgtgtttctgaaaatcccctgacttctttgtgaatatcggttatctctctgcttaaaaacaaggtacacaatgcttcttgtagaattttggctgcttgttttagaaggagacattgataaattggaraggatccaaaaatgataaaaggattagaggatatgacctacagagaaagattattaaaagaactcatacatccagcctggagcaacgatgacagtgggtggggaatgtgataactgaacataaatactaggaataggtaagaaataaggaaaaaaactattttgagttattagagggtggacaaacaagaatcaatggccttaaaccagaaaagcaagcacttgtgtgaagtattccaagaagaattattttcaacagagaggtcaattaacaccttgattatttcatctgagaggtgatcctatgcagttctttagatagtacctccaaaggctgattatgcagaaggaatatgtatcctggctgccaacactgcatctgtgcccaagtccttaggcaatatatacattttgaaatggaga

SEQ ID NO: 389530 - DNA, 583 bp, Homo sapiens
aggctgacttaatacatgtgatttaattccagaatgtgtttctgaaaatcccctgacttctttgtgaatatcggttatctctctgcttaaaaacaaggtacacaatgcttcttgtagaattttggctgcttgttttagaaggagacattgataaattggagaggatccaaaaatgataaaaggattagaggatatgacctacagagaaagattattaaaagaactcatacatccagcctggagcaaygatgacagtgggtggggaatgtgataactgaacataaatactaggaataggtaagaaataaggaaaaaaactattttgagttattagagggtggacaaacaagaatcaatggccttaaaccagaaaagcaagcacttgtgtgaagtattccaagaagaattattttcaacagagaggtcaattaacaccttgattatttcatctgagaggtgatcctatgcagttctttagatagtacctccaaaggctgattatgcagaaggaatatgtatcctggctgccaacactgcatctgtgcccaagtccttaggcaatatatacattttgaaatggaga

SEQ ID NO: 389531 - DNA, 534 bp, Homo sapiens
cataccgtgactgcctttcaaccaccagaaacagcttacatggggctctttatacctaaggcacctcaggtgctccagttcctccacataaaagttgagccttcctatgtggacagctgggtctccactaagtggtaagaatctaaggaccaactgccttcttagcaatttataaaaagagcttgattcacaggtagatttccatgactgctgcaggtctttcctctttcaccatgagaacttttgaagctyttcacatgtgccagatgctgggattttatcccaaggtaagcaaccagaaagcaagttgacctttccttgaaagaagagctctcctcatagacatcagaaaaaaatatttttgcaaaactctattcaactattgagcaaacacttgaatcttttaaccttatggaaactcttatgtctcaaggaacctcagccagtgccagcttgctgtcccaagaaaagtcaaactaatttttctgcacattactcagctacatttcaactcccctcatattattgccattg

SEQ ID NO: 389532 - DNA, 534 bp, Homo sapiens
cataccgtgactgcctttcaaccaccagaaacagcttacatggggctctttatacctaaggcacctcaggtgctccagttcctccacataaaagttgagccttcctatgtggacagctgggtctccactaagtggtaagaatctaaggaccaactgccttcttagcaatttataaaaagagcttgattcacaggtagatttccatgactgctgcaggtctttcctctttcaccatgagaacttttgaagctcttcacrtgtgccagatgctgggattttatcccaaggtaagcaaccagaaagcaagttgacctttccttgaaagaagagctctcctcatagacatcagaaaaaaatatttttgcaaaactctattcaactattgagcaaacacttgaatcttttaaccttatggaaactcttatgtctcaaggaacctcagccagtgccagcttgctgtcccaagaaaagtcaaactaatttttctgcacattactcagctacatttcaactcccctcatattattgccattg

SEQ ID NO: 389533 - DNA, 583 bp, Homo sapiens
aggctgacttaatacatgtgatttaattccagaatgtgtttctgaaaatcccctgacttctttgtgaatatcggttatctctctgcttaaaaacaaggtacacaatgcttcttgtagaattttggctgcttgttttagaaggagacattgataaattggagaggatccaaaaatgataaaaggattagaggatatgacctacagagaaagattattaaaagaactcatacatccagcctggagcaacgatgacagtgggtggggaatgtgataactgaacataaatactaggaataggtaagaaataaggaaaaaaactattttgagttattagagggtggacaaacaagaatcaatggccttaaaccagaaaagcaagcacttgtgtgaagtattccaagaagaawtattttcaacagagaggtcaattaacaccttgattatttcatctgagaggtgatcctatgcagttctttagatagtacctccaaaggctgattatgcagaaggaatatgtatcctggctgccaacactgcatctgtgcccaagtccttaggcaatatatacattttgaaatggaga

SEQ ID NO: 389534 - DNA, 594 bp, Homo sapiens
aaaatgggatttagttcttaaatcttaggtcttttggcacaaaatgaaggagtttaagcactagctacagctataatttgaatatgtccagtttatatgttatttcaagcaacatgtttgaattcaggccttccaaagatgccaactataaatactattaatgcttcccagagaaaaatggatttcatttacttgtgtgtttcatacctgtcccatctcctctctagatgtaaggattatatcatttttgtccttacattaagtggtaggcacatacatgtttatatttaatacttaactcatacaaaatttgcatatatatttttatatacctaataataatacataatgaaacttgggcacttcagtttcaggttagagatgtagagaatgggaamgaacatcactcccaaatacagaaaaagtagagaggtggacaaatcacaaatgaatggcttttcctaaagctgtcaaatgtgagttcacaggtcacccaactgtcccaaatcatggggagagacaggaacctgcatgaagaaataggacacaagcatttgcttacttggaatggaagtcaccaaatgcctaatataa

SEQ ID NO: 389535 - DNA, 593 bp, Homo sapiens
taggtatgctcttgattatttctcaggaacaacaactcatctttcctacatgttatttccctgttatttgagtaactatgtaatgagtatctctttcctacattcagtgatatgggtgtgcataagtgtaatttgtaacatcagtaactggattcaccatctaaccttcaattcatgtttaattctattatatagtatttccataactttggatactttagtcaaacttacacttttcatcaattataaaaatcaagatgttaattaagatgttatatcaactgtgacaatgaagacgttaaaaattccggactagacagcactgggcccacttatagacaggctgttgtgagaggtccttgaacagctactgcttcaatttcaacctggcctcctttgggtaaagcagcaacatggtaagcagctctagtagaaaaaccactcttaaaatactgtttgtagattacattgacagccckgaagtcatttgtgtcagctagccaaacagttgtttttgccacattagtgaagtcacagcctgcagctttcaaaatatcacccatgttcttaagggcctgtttagcttcttctgt

SEQ ID NO: 389536 - DNA, 586 bp, Homo sapiens
tttgctagcatctaagtcttcgttgcactgtcatccagcaaacactttgcagagtagatgtctttgggctcttggacaattcagggatggaaaaaacaagattttcccatcctcctgcaccacgtctccctgaatgctttcagatctatctctaatgccaccttctctggactctatcatttatttgcttgacttctttgtccccagccttatttcaaaaagtctttgaagcacgtccagccttttatttctaactgtaaggggactcaatgtttccctaaacccagagactgccagtattccttcccactagaccacacacttgagaaacatgtgcagaaatttaacaaataaaacaaaaagaaagaaaaagaagggaagtgttaaaaggagaaatatgtgtgcttggccatattstctccttcatctgtaagttccccaaggataaggcccgtgcatgactttggaatttcctgaggaatggaacaagcttctcccagtccccaactcctactcactgctgacaaaacagcattactttattcattactgtgaaaactgctgcagtcaccctgtggagcaaaca

SEQ ID NO: 389537 - DNA, 584 bp, Homo sapiens
aaactcataaggaaaatggggccctacataatcctattcccatccctttctccacaggagtcaggagagacagggacaggtaataatccctttaaaaatagaatgaaattgtggaagagacctcaaagatcccgtgcctccatcctaagtgtcagcatgaacgaatcatcccagggcctcccacctcactggtcaagcccagagcaggcacttttccatggaagtaatctgtctgtgtcaaacattcacactcccccacaaaaacactacacacacacctgcttgtctgtctgyctctctctctaaaaatctgtccttcggatgctccatacaggctgcatgagctgttccctatctgcttctacttcctctcataccagactttcaaccacccttcacagcccagcctcacttgccatggtttaacagcttgaacaaaccacactcctttctgctgcaagcccccttgcacatgctatttcctctgcttggaccagtctctggatttttaaaaatctagttaattcccattcatccttcagatttccatcatcgttttccccaaggaaactttttctccctcc

SEQ ID NO: 389538 - DNA, 617 bp, Homo sapiens
gtctggccccagaggtactagagtttgtcactccctctcaggaaaaaaaaaaaaaaggacaaaagtgccccctatgcctaagaagtgcagagtctaatggaggaagcagacaagatgagaaattataatagggtatgatacaaactacagtagaagaatggccagggttccgcagaaaccctaaggaaggtgaaggaaggtgcaactaactccaccaaagggagtataggtatctagggcatgttcataaaagagaggacatttgggggaattcttgcaggaggacaacagcctgttcagatggcaaagcaggagcaagtcactctacacgtatgaagaggtgagaggtctgaaagacacagagttttctggagatgggttaggcagagaagggacttcttccctaccatgctaacaattttcagcttaaatctggggcaatggggagtcaagcaagttacttaagcaaaggctgacacgatcagatttggttttgtaaggaaagttgctggcagcrgtatagaaaacaacctggaacaaacagcccttgctggcccacaccccagtgggtactaaggcgaacccctttgtgttagcttcccggtgcctggaaactg

SEQ ID NO: 389539 - DNA, 591 bp, Homo sapiens
atcatattgctccttcagcttgtccatctcctgatcatggctggaaacctcttctttcagggctcccttcagggcggtgagttcacgctctcgctttctcaagaggtcttcttgctcctctttggcaatcagcagatcttgaagatcctgttttgcctgtaagagctcctagagagagkaaacacgaagggagaaggtgacaatgaaacatcttgttgagaggccctgtatctcccctccagttcagtccccatgtgcacagccatctcacctggccttgccactctctccttctacatcccgcacacctgtttagaccatttcttcctctccccctgcatttctcagaggccatcattcccttggattcctctgcctctgcttcttggagatttgattgaatttgagggagaaaggggaaactaatgtaaatttcactgctttggggaacacgtctgtatcttccatctcatttcacttctgtgcagtgatctgttgcccttgctcttgccctgtgtgtgctgttgcttcacgggggcacgccagcttgcctaccttgcttcatatcccctgggaccctgagtgtggtca

SEQ ID NO: 389540 - DNA, 591 bp, Homo sapiens
atcatattgctccttcagcttgtccatctcctgatcatggctggaaacctcttctttcagggctcccttcagggcggtgagttcacgctctcgctttctcaagaggtcttcttgctcctctttggcaatcagcagatcttgaagatcctgttttgcctgtaagagctcctagagagaggaaacacgaagggagaaggtgacaatgaaacatcttgttgagaggccctgtatctcccctccagttcagtccccatgtgcacagccatctcacctggccttgccactctctccttcyacatcccgcacacctgtttagaccatttcttcctctccccctgcatttctcagaggccatcattcccttggattcctctgcctctgcttcttggagatttgattgaatttgagggagaaaggggaaactaatgtaaatttcactgctttggggaacacgtctgtatcttccatctcatttcacttctgtgcagtgatctgttgcccttgctcttgccctgtgtgtgctgttgcttcacgggggcacgccagcttgcctaccttgcttcatatcccctgggaccctgagtgtggtca

SEQ ID NO: 389541 - DNA, 610 bp, Homo sapiens
cacatctttacttgttttgtctctctgttctgtcttggggctttctgaatatattcagtttcctaccagtagcatagtgttgtcagttttgcttggtgataattcttttaaatctcaaacattttagctactatcatttaccactttaaagataggaacaactcagagaggtacattcatctgtaatatttatcattatctcaccaattccaaatatttcattgtcaactttcattttcagttatactagtatttttaaataatttattttttaatcaaagtaaaataagtgaaaacctacattcttcagcttcccttccctgatcctgaacacactgcccaggaggaaaaaaaaaaaaaaaaaaaaacctgcaaatttcagctattttcttctaatacttacctcccttttgctaaacaatattcctgactgtgattccttaacttattggttctacatagggtggataccacaccatacatacaagtctctcacttggctaacctaccaataataaaatcaagagtcaactatttacattattawgacaatataaatattcactaaaaaattatatactatggtcttacagaacttttcttataaaat

SEQ ID NO: 389542 - DNA, 538 bp, Homo sapiens
gtgaagaggggacagggacgctgaaggccctaaggcatgaagcataagagcaggaggctgctgggtgtgttctgggaacagcaaggaggccacagtagctagagggagggagtgagggtgggggttctaagagaaggagggcagagcattctgaactttacaggctggcataagggttttcatctgatgggagttagaagccagttaagggttctgagaagggtggaggcgagtggctcagctaggagcctagtgaagtagcctagaactttctgtggaatttgttctgcaatcatgcgaagtggcagtggcatggtaacatgggtaagtggtagtgactagatcctgagatgggaactgaaagcctggagtgaatgtctcaggaaaccmgacacccgtctggcccagagggtccttatttcaaaactgtgtttaaaatggcaaacacatgagatcatggtaatcaaacttacataagtactgtgcaaatccagaaaatttgtagtgagtgtactgaattatttgccaatgatcaata

SEQ ID NO: 389543 - DNA, 538 bp, Homo sapiens
gtgaagaggggacagggacgctgaaggccctaaggcatgaagcataagagcaggaggctgctgggtgtgttctgggaacagcaaggaggccacagtagctagagggagggagtgagggtgggggttctaagagaaggagggcagagcattctgaactttacaggctggcataagggttttcatctgatgggagttagaagccagttaagggttctgagaagggtggaggcgagtggctcagctaggagcctagtgaagtagcctagaactttctgtggaatttgttctgcaatcatgcgaagtggcagtggcatggtaacatgggtaagtggtagtgactagatcctgagatgggaactgaaagcctggagtgaatgtctcaggaaacccgacacccgtctggcccagagggtccttatttcaaaactgtgtttaaaatggcaaacacatgagatcatggtaatcaaacttacataagtactgtgcaaatccagaaaatttktagtgagtgtactgaattatttgccaatgatcaata

SEQ ID NO: 389544 - DNA, 524 bp, Homo sapiens
agaactaaatgaaaatgaaagcacaatatatcaaagtgtgtcagatacagctaacgcagtatttagggagaaatttatatcactaaaacacctaaattcattaatttgaaagtctccagttaattacttgagatatcacattaataacctaaaagaagaaggaaaaaattaaactttaagcagaaaaaaagaaaataataaatatcagagaagaaacaaatgaaatataagtcaggaaatcagcaatgaaaatcaacaaaaccaaaagctggttctttgagaagatcaataaaattaataattctctaaccagattgaaaaaaaaagatagcagataacaaattaccaacatcaggaataaaagaagtgacattgctgcaaattctactgatcaatgtaattcagcttattaacagactagccaaaagcaaacrtatgatcacttcaattaattcagaaaataaactatattagtttcctagtgctgttgtaacaaagtaccacaaactgagtagcttaaattt

SEQ ID NO: 389545 - DNA, 587 bp, Homo sapiens
gtggagtaagagcaccccagaaagtagagcagcgtgtgcacaggcatggaggcatgaaaatgcctaatacatgcaaggctgtgagaagcctggtgtagctgcagcaaggagttctgggggcatcaggagacaarttgagagatgtagactggggtaggattgggaagggcctggaatgccagttttcaagtgtgagctttcactcctaggccatgggggccaacagagacttgaagcaggagactgaggatgggggatacacattttacaaagatccctcaggttgcaggtggtggggctgaaagctactgcaccagtccaggcaggaactgatgaagcctgggcaggacagtgggtataaagagagggcacagagaggagggggcaggtggaatgaacaagacttggttagtccctgtctccaactagactcaggattctcctgccaactccctgtcattcacctcccacatcccgctagccccatggcagaggacagaagaagaccaggatggagaagatgctgtggacttcttcagtcttcttcagcctgggtcccttctgggcttaggaactcctgccccaaa

SEQ ID NO: 389546 - DNA, 644 bp, Homo sapiens
atcctaatacatgatgataaaaatctgaacattcttgcctccaaggcaggaaggagggcaactaattagaaaggggcaagaggaaactttctggggtgatggcaatgttctatattttgttttgagtggtgttatacctatgtaaataattaaagttcatcaagctatatacttaagatctgtgtatttgattcttcaattgtgaaaaacaagatgtttcacgaggaactattttaaaaacaaagccaacacaagtaacatataactattcagtaaaaagaagataactagaatgtcaatagacctacctaatatatatttcaaagatttttttttcaagtatttaagtacaagtaagtagaaaaattcaggcttgtgggttaatatactggagagaaacaaagagaaaagagtaataaccatttcagtcactctgaatttgaaatagattgcttcacaatctagaggattttaaracgtgaaataactgaaagaaacaaaggtgaaaaagatcaaacacaggatgcagaactaacagctgtgacttagttaatgcatatgctgaataaaaacaaactcaacaaagcactgggaagccggcagcttccaagtaattaactaagcagaaacacatgcaatgtgtt

SEQ ID NO: 389547 - DNA, 440 bp, Homo sapiens
gtagtatattttaaagataatgctttttgaatgctttgtttccttctaaaatggtaactatcaccccctggaatgttgttctgagacaagtgtattattattcaattcataatgatagattatccagcatagctcttaagactgctactactatatgaataactaaaaccttaccttaactaaaaagaatataattttatgatatgattgggmtaaagctttcccaataatctcttaaatgagtattaatatttattaaagtgggagttttatatctccctgatgcataaaatccaaattcaagcctcctcaaatgacttttcctagaaatcccacaaactatagaaaagcaccctagtgaatgaagcttgatgaaaaactgaaatttgtgcaaaatggttttatgatgtagataaacacaaaattatcactcctagata

SEQ ID NO: 389548 - DNA, 575 bp, Homo sapiens
ttcctcctctttctcaacccatggcagggagatggtcttttagcataataattcaccagaggtatgctgtaattggtgagcaatattagtaggagaaatgtttccttgtcttataaattctctactctgaagaatctcaaggatttatgagaaatgcaggagtcttgtagaattttaccttcctcctcccaggatgatgccaagaatgacaattccctggccttggctagcaagactgaactagaatcctggagaactgcacagttaagaaaatgaaagagaaagggaggccatagaagatggtttctctcccaatgcttacttttatggactaaatgttaagcaatgaagaaagtaaaaaagaaagaaaataytttgcatcacatcagtaatccgtggattctctgttttactaatgcacttgtgcttcaattcttattttggctcttcaggctctcctggttttgagtcccattttaggttgtatgctttcccttttgtcttaacaacctattcttttctccggttgtactcttagtggtccctgtattcatcttctatatctttctattcat

SEQ ID NO: 389549 - DNA, 613 bp, Homo sapiens
agatttgctaaattaaaaaatattttcaactcatagcctaaataatcaaactcatgaaatagatttttaaaatttacatcaaagaaataatttctactaaatgtgaaaamattagtatctatcacaacatgtggtattcctgttatattagatcaaaaatccagattttttgacttttaaaacaaaaaaattcctttattgatttattgcacagtttgaagtatattaaaaatatcttttcttagtaagtaaagaaatggcaatgtgcctacattttcttgatatcacactacacatgaagaagctaagtttgaagctccaaggaaaggaagagcttattagtgagaaggacacaaagagttgtgttgaaacagagcttttcataaaacaaatcaatataattattttacacattaatatgaatcaatatgaaaaaatttttgaatatttaaaatacatgcatgttatttatgtctctctcttatagggtatactctatgtcctagtcatctatgtatttttttaaatttttcaataaaaattgatctttaattgacaaataataggtgtatatatttatgggatacagtgtaatgttttgatatatgtatac

SEQ ID NO: 389550 - DNA, 613 bp, Homo sapiens
agatttgctaaattaaaaaatattttcaactcatagcctaaataatcaaactcatgaaatagatttttaaaatttacatcaaagaaataatttctactaaatgtgaaaacattagtwtctatcacaacatgtggtattcctgttatattagatcaaaaatccagattttttgacttttaaaacaaaaaaattcctttattgatttattgcacagtttgaagtatattaaaaatatcttttcttagtaagtaaagaaatggcaatgtgcctacattttcttgatatcacactacacatgaagaagctaagtttgaagctccaaggaaaggaagagcttattagtgagaaggacacaaagagttgtgttgaaacagagcttttcataaaacaaatcaatataattattttacacattaatatgaatcaatatgaaaaaatttttgaatatttaaaatacatgcatgttatttatgtctctctcttatagggtatactctatgtcctagtcatctatgtatttttttaaatttttcaataaaaattgatctttaattgacaaataataggtgtatatatttatgggatacagtgtaatgttttgatatatgtatac

SEQ ID NO: 389551 - DNA, 527 bp, Homo sapiens
tctcatgaatgggattagttcacttataaaagaggcccatgggaacttgttcacccttgcaacacatgaggacacagcaagaactcggcaatctgcaatctgaaagaggaccttcaccagaacccaaccaaggtggaaacctgatcttggacttctcaacctccagaactgggagagaccccataactttttggtatttgttaatagcagccggaaaagacattcyaattggctttagatgttcctagtaccatccaaacctcaccactaacccaaaacctcatcctaaatggaattcaatagaatgaaataacaccaggctgcattcttttgcagctaaggagggaccatagcaaaaagaagcaaagaggctgtagaggtaaagaaaataaggagaaaggtcaaaggctcagagctctcaagacactaaaggagatgattggaggaaagatgagtcatttctgaacacctactcataatggaccatgtttagatcaggtacctactcaacctgaaagaaacatttt

SEQ ID NO: 389552 - DNA, 584 bp, Homo sapiens
gtccagcaggctaccctaaatctcaatgggatgtcttaaacttaacttatatagcactgcagtttgcatttcagttaatagcagctcaggcttaaaaacttgaccccatccttgatttctttctttctctcacacctcagatccattccatcaaaaaaatcctctaggccagcagttctcaatgtgtggttcaggacctcttagcaggcttcaaaaccttttcaaaggtctgtgaggtcaaaaatatttccataataatacaaagacattttgccttgttctgcttttatttgtacatgagttctaaatggagatttccagaagctatatggtaagtgatgacatcatcatacckctgatggctaatggaatgcgcacttgtgtattatgcttaaagaatttttatttttagtttttatataaatattaacagatatgactctcatgaacaaaaaatcttcagtgttattaatttttaagggcatcaagggatcttgagaccaaaaagttcaaaaatcagtcctctaacttttctttaaaaatatatcttgaatcttaccatctgtcatctgtcactattgtat

SEQ ID NO: 389553 - DNA, 562 bp, Homo sapiens
attgacttctcttctctagctgtgaaagtcctaaatgacatcttctggtatgaggctrtttcatctacattgcaaatctattgtttagtgtagtcaccttcatcaattgtcttagcgggatcttctggataacttgttgcagcttctccattagcatttgatgcttcaccttgcacttttatgttatggagatagtttctttccttaagccttatgaactaaccacagccagcttcaaacttctgcagcttcttcacctctggcagccttcattgaattaaagagaattagagtcttgctctggattaggatttggcttgtgtgaatgttgtggctggtgtgatcttctatccagaccactgaaactttctccatatcagcaataagactgtttccctttcttatcatttgtgtgttcactggagtagcacttttaatttccttcaagaacttttcctttgcattcacagcttggtagctgtttggcacaagaggcctagctttttgacatgtcttcttcactaaccttaatcattgttagctttttatttaaagtgagaga

SEQ ID NO: 389554 - DNA, 590 bp, Homo sapiens
tccacattagccaggaacccatactttggttacctgatattttggcataaatgtgaccacatattcatcttactatattattaccatatgaacatatatttcctttgaaatgctatcatgttcttcaagttatatgaatactaatgataagagatcttacatgttataaaaggaatacattgtatggaattacaatttatttagacatactttgggaaaagtttgattgcatttcatatgcgttcataaatcaaattgaactgtttcaggattttcaggaagcaaaatgacaaycaaaagtataatttaatcctaaagcatctttcctctttttttcttaatactcacagctaaacttaactgaaagtaaagttttcattctaagctttccaggttcattaaattgttcctatatcctcacaaaatcatgatttttgtttaaaatttaaggacatttttgttgttgttaacaaaatattgcttaaatacttgttatacatcatatatatttatgagtccaaaagtacctagttattataactttggaagcccagagtcctgtttaaaaaaaaaattagatgtcacaaaag

SEQ ID NO: 389555 - DNA, 590 bp, Homo sapiens
tccacattagccaggaacccatactttggttacctgatattttggcataaatgtgaccacatattcatcttactatattattaccatatgaacatatatttcctttgaaatgctatcatgttcttcaagttatatgaatactaatgataagagatcttacatgttataaaaggaatacattgtatggaattacaatttatttagacatactttgggaaaagtttgattgcatttcatatgcgttcataaatcaaattgaactgtttcaggattttcaggaagcaaaatgacaaccaaaagtataatttaatcctaaagcatctttcctctttttttcttaatactcacagctaaacttaactgaaagtaaagttttcattctaagctttccaggttcattaaattgttcctatatcctcacaaaatcawgatttttgtttaaaatttaaggacatttttgttgttgttaacaaaatattgcttaaatacttgttatacatcatatatatttatgagtccaaaagtacctagttattataactttggaagcccagagtcctgtttaaaaaaaaaattagatgtcacaaaag

SEQ ID NO: 389556 - DNA, 590 bp, Homo sapiens
tccacattagccaggaacccatactttggttacctgatattttggcataaatgtgaccacatattcatcttactatattattaccatatgaacatatatttcctttgaaatgctatcatgttcttcaagttatatgaatactaatgataagagatcttacatgttataaaaggaatacattgtatggaattacaatttatttagacatactttgggaaaagtttgattgcatttcatatgcgttcataaatcaaattgaactgtttcaggattttcaggaagcaaaatgacaaccaaaagtataatttaatcctaaagcatctttcctctttttttcttaatactcacagctaaacttaactgaaagtaaagttttcattctaagctttccaggttcattaaattgttcctatatcctcacaaaatcatgatttttgtttaaaatttaaggacatttttgttgttgttaamaaaatattgcttaaatacttgttatacatcatatatatttatgagtccaaaagtacctagttattataactttggaagcccagagtcctgtttaaaaaaaaaattagatgtcacaaaag

SEQ ID NO: 389557 - DNA, 634 bp, Homo sapiens
ggggataccagctagcgctggagcccgctgccatttgcatgctggagtaattataggtccgagcgggaggggtctgggcttgttgtgaaatggggtggacagtgaggttagctgctgaaaagggaggaattttctgcagttaggcagttaggcctgggacttatccagcaggatgtttttcacagcccaagccttagtggaattttccactgtgaccagggtctgtggaatggcgggagtttacaaaatgttgggctaacaggatcytctttatcttacattcactgaactaggttagttcatgcattgactatagaatgcatgttccttaggcaaattagtttttatctaattgctattactaagcaatatctaattgctattactaagcaaaccactggtttggttaacagcttgcttgtcaagcattccatgtaaagcattcatgaaagtgttggacaagcacttgttgaataacagaaattatgaaagatagaaagaaaagagtgagggagagaagaaggaagaaagagaatgaagaagaataaaataaattcatcttagcataacttaatttagcaaattctgttggttttcatgaataccagtttatttactaagacttcaaaaacca

SEQ ID NO: 389558 - DNA, 478 bp, Homo sapiens
acgcacattctgctgttgtttggtagagtagtctatagatgtctgttaggtctacttggcttatggtattatttaagtcttctgtttgctggttgatgttctgcctaattgttctattcattattgaaaatgtgatattgaagtctccaactattattttttaattgtctatttctyccttcaattctgttactttttgtttcatgttttggaggccctatttttaggtgtatatatgtttatgcttgttgtgtcttcctgactgactgttttatctttataaaatgtctttttttttgtctctagtgacaagttttgtctcaaagtctatttgttcaatattagtatagtcactgaagttatcttttggttgttatttgcatgatgtatctttttttcatatttttactttcaacctattaatgtctttgaatattaagtgtatcttttatggacaacatgtggatcattttttgaa

SEQ ID NO: 389559 - DNA, 628 bp, Homo sapiens
cttgagttgatgaacaccccatttaccccaaaatgattattacactgcatgcctgtgtcaaaatatctcatatactctacaaayatatatacctactatgtaccccaaaaaactaaaaattaaaataaaaaagagatatctatgtggagaaatggaataacagcaatgggagaaaagaataaagagatggtcataatattaaaatggagataaaaaagaataggtctagaatattcatttaaacatgtttgatttaatataatttttactactcaaatagaattgcactcagccattcagtataaaaaagaaaaagtgttttcacaaattcactgaaattacatattgaatttgccaagctttgatatgtagaatgaattgcacttgtgttcgttgtggcttctccactttaaaacatatccctccactgtggtccagtcctcatatcaccctactttccagaggacttgcttctatacatatttacttagcaggagtcagcaaactacatcttatgtgccaaagccaggcttctgaatatttttgttcagcctgaaagctaagaatggttttcacattttttatcgttttttagaaaaggaaaaataatattagtaacacatgaaaa

SEQ ID NO: 389560 - DNA, 616 bp, Homo sapiens
atgcattaaactcttacagtcactacattttttataagagaaaggcagaaaatttttaaaaatctttatatctcctgactttagctcttcatttcatttttatatagaggtatctgactatgaaataatatgcatactcatcttctatttaaaaagacaaattataaaacagactgtagggactctgtactgcttctcagacactgcaatcccacataggagcaaggtcagatttactgatacaggcaactgtccaaagcagctcttctcctgctagctgttgatgttctcttcctctctgccagctccataacaagggccctcacccggtgcaccaccctcgcccacacacacaccctgacygaggccctgagagttccaggttcctgcacctgcctttcctgcccagggctttttgagaacagacagttgctctcaagcccagggctttctgagagcagacagttgctcttgagcccttctctgaggtcctctgaacacccctactccaccatcaatcagagcagttatactttttttttttgcttttacctattaggtttctgttaggttgaaacatatgaaactgctgatattcaaccgtattacctgcaaa

SEQ ID NO: 389561 - DNA, 589 bp, Homo sapiens
ttgctttgttcctaatcttagaaagaaagtcttcatgtttttaccattaagtataatgttagctgtagattttttatagatgctcttcatcaagttgagaaaattcccctcaatttctattcttttaagaggtcttaaaamacaaaacaacatgaatgggtgttgaattttgttgaatgctttctgtgtatcaattaatatcattatgtggattttcttctttattgatttcaaatattgaatgagttatgcatccctaaaataaacctcactttgtaattgtatataattttaaaaatacatttctgaatactatttgctaatattttgttaggaattttttgtctatattcatgaggaatattgctctggggtgtgggtgtatgtggaattgggaatactaggtcataaaatgaattagaaaacattcccccattttcttttttcaagacaagattgtttagagttagtgttaattcttctttaaatgttgttataattctccaacaaaacaatgtgagcttggagatttattttttgaaagcttttttgattatgaattccatttcattaatagttgtagggctat

SEQ ID NO: 389562 - DNA, 601 bp, Homo sapiens
tactctagtgcctaacatccctggaaacaaagagaaaaatctctgtggatggtgaagataagtattgctgcttaagttttgatataaaaatcatatagaggatgcttacatgcaacagataatatccaaaaaatgcataagaaaaaaatttcctcctgagaggatttaaatctaatctttgaattaaaagtaagacctaaaataattgtagaagacaacatacaatgaggcctcggtcaagtgtttcagtacttcagaaaatgaagaattttaygtgatatagaaatatttacttgaagcaaacattttataaaacagtatgaagcattcagtaatacagctgaggtacacctggggtactaatttggttatttctaggctagaaagtggtttcatgtttaattcactgctttctgaagaggaattgatctctaattgactgtaaagttatggtgagttctagttgcttattttctttgttcctgtaatattaatttcttataatctccaagcaaaatataacattatctaatgttcacttgagtgtctgaataccacacgttacctcaatagatatgttgttttttttcacatagcccaa

SEQ ID NO: 389563 - DNA, 517 bp, Homo sapiens
gacctcttccaggcagggtgacacggaaagatgtcacagtgaatggtggggctctgctggaggcagggcacccccaaagcagaggcacaatgtggtgattgaggagggtctgtactcatgtcacctgtgggggggagggactagacccagcccagcttgcatttgcttcctcccaacccaagagcaaacagctttgtcaggagagctgccccaggtctggtgacagctggscatttctcccctgatccaggtctaccacacctcacacagctgccctgggttcatgggggagccgacagggcagccgaagtgccgcaggaagtcacgggagttggagagagtgcccagcacgcggaagcgggcagggctgtgggggtcggtcaccagcccctcgtgagagctctctggtgtgcggaccgagcaccacacctgcgggccaggacagacatgggggcatatggtgtctagtgtggagccgggccttagagtcagctacagccatcccaggggcacaaac

SEQ ID NO: 389564 - DNA, 631 bp, Homo sapiens
caatagtaatatactgctactaggtgaaaatgatgctacatattccagacttcaagcttcattccttttgatttacctagaagaagtgagcacatatttatgtctctgttaataaaaaataaatggcaagtgcaaaagtctatcttaaaatgcaaataaaccataccaacacaacccatgcttttttttcaattgaagaagatttatttatggggcatttatgcataatcttaattgtatagtttaataagttttgaccaatgtatataccataaaaccaacaggcaatcaagctgttgcatgacctcagggtgcctctagtgtcctttaaagaatatgatttttgagggcatagaataaaaatgttagtagtggaaaacccaatttagaaggatatcaggatttccrgggttgggtatagttcaaaaagcatctcttcacacaaatcacatgggaaactgagggtgtatgtcttacttctgccttaagagtgttaacttctgagaatgtgttgtgagaataaatgctctaagagtgaaaaaaatgggtggaacacctagaacatttaatcaaataaacccctagaagcaacacaacacctactttcaataaccctggatgaaacatcaat

SEQ ID NO: 389565 - DNA, 594 bp, Homo sapiens
ttacaggcacccaccaccaaatctggctaatttttgtatttttagtagacacaggatttcactatgttggccaggctggtctcgaattcctgacctcaggtgctccaccaacctcggcctcccaaagtgctgggattataggtgtgagctactgcatccagcccagaaaagtatatttctacattttacatatcacagagaatgaaaagaycattttgtatattccaatcaattttttaaaatatgtgtatgtggttatagttacatagataaatatagtggtagtcaaatggcttatcatcattcttcttgctttttatcttatgatattaatttcctattaaaatattttgattactgtgtgatatattatcatatgggcatattatggttcattgtatctcttgttacttatatgatgataataataattttaggtaataaatattatttgaaagcactattctatccactttgaatacatgaattcatttaaaactcatgactacctttaaaataagcactattattaaccttattttacatttgagaaaatatagccacaaagagtttaagtaacttgctccaaatcat

SEQ ID NO: 389566 - DNA, 594 bp, Homo sapiens
ttacaggcacccaccaccaaatctggctaatttttgtatttttagtagacacaggatttcactatgttggccaggctggtctcgaattcctgacctcaggtgctccaccaacctcggcctcccaaagtgctgggattataggtgtgagctactgcatccagcccagaaaagtatatttctacattttacatatcacagagaatgaaaagaccattttgtrtattccaatcaattttttaaaatatgtgtatgtggttatagttacatagataaatatagtggtagtcaaatggcttatcatcattcttcttgctttttatcttatgatattaatttcctattaaaatattttgattactgtgtgatatattatcatatgggcatattatggttcattgtatctcttgttacttatatgatgataataataattttaggtaataaatattatttgaaagcactattctatccactttgaatacatgaattcatttaaaactcatgactacctttaaaataagcactattattaaccttattttacatttgagaaaatatagccacaaagagtttaagtaacttgctccaaatcat

SEQ ID NO: 389567 - DNA, 497 bp, Homo sapiens
ttgcagtgaactgagatcttgccactgactccaccctgggtgacggagcgaggctccatctcaaaaaataaaataaaataaaataaaataaaataaaataaaataaagagttcacatgttaagttcacgtgttaaattttacatccaaatggagatggtaagtacgcagctggaaatttgtagttactcttgattttactgatagaatctctgcrtttcaattagatccaccagttcttacttaacatgcatttttttattggaatgaccttgcctagaatgtgacacacattccatgattaaaagtgaaaaaataacaaaagttagaatagctttgtactgaataggagattagacaatattacttcaaggaaacttcaaattcatttaaagggcataatattacttttgataaaaaaaatctaagtaacggaaaattttcttttaggaaaaattacccggaaaagagttaaccgaaacaatttaagaataaaaaa

SEQ ID NO: 389568 - DNA, 555 bp, Homo sapiens
cctgccgtcaagctgtccccctgaagtcaagctgcttctctctgacatctggctgctttttctcttctcttcttctctgccactccaccactctgccagtggagcctggagtttttatgggtacaggatgggggaagggcaggccaaaaacagcattcaagtgggaaaacaagaattcatgctctcactttgggccttggtcccaggattgagggtgtggccctcgctggggtccaccctcttctacccagtatttccctgcctcctgtccgtatcatttacacatacttcaacatgcatattattaactagagttcaatatttattttcagtgattttgtcattgttgtttttgaggtaaactgcacatcmagttaaatgcataaatctttagtgctgctttcaacgaatcctgacaaacgcatctagatgttagtttaatatggacttaagatcatcttcttgttattttctcaatgtctttctagtttggtggattgagggctataaataaaaggcatacaatcaacattaataaatgacattttatgagca

SEQ ID NO: 389569 - DNA, 561 bp, Homo sapiens
aattactctagagcagtttcttttcttctttacttacagaggatctgagggcttgctaccatccagattcctaggctctatcctaccactgtcagcagaactttcaacttttacctttataacttccctatatttatgtgatactggtataaccatatcagccttatcatgctcagagttggyatagtataacttctttcatccgcttattttcaactatactatgttctaataaaatactatttatagacgtaagtaggaatttcatataatttttcacatcatacaatattttcctcttttgatttttttcacaataattttaaatgtaaaaaaccacactcagcttgtgggtcatccaaaaacagtcagtgggctgagtttagcccctagaccagtgtttgccaacctcactctaaaacacaaaataaagttgatgatattgcaaatgtttaatttaatatttatagtttatttttatttgcttaattgatacttattctctaaatcaggcaaggcactgcagaattgtaaaagtaaagaagtaactcaggcaggatt

SEQ ID NO: 389570 - DNA, 561 bp, Homo sapiens
aattactctagagcagtttcttttcttctttacttacagaggatctgagggcttgctaccatccagattcctaggctctatcctaccactgtcagcagaactttcaacttttacctttataacttccctatatttatgtgatactggtataaccatatcagccttatcatgctcagagttggcatagtataacttctttcatccgcttattttcaactatactrtgttctaataaaatactatttatagacgtaagtaggaatttcatataatttttcacatcatacaatattttcctcttttgatttttttcacaataattttaaatgtaaaaaaccacactcagcttgtgggtcatccaaaaacagtcagtgggctgagtttagcccctagaccagtgtttgccaacctcactctaaaacacaaaataaagttgatgatattgcaaatgtttaatttaatatttatagtttatttttatttgcttaattgatacttattctctaaatcaggcaaggcactgcagaattgtaaaagtaaagaagtaactcaggcaggatt

SEQ ID NO: 389571 - DNA, 561 bp, Homo sapiens
aattactctagagcagtttcttttcttctttacttacagaggatctgagggcttgctaccatccagattcctaggctctatcctaccactgtcagcagaactttcaacttttacctttataacttccctatatttatgtgatactggtataaccatatcagccttatcatgctcagagttggcatagtataacttctttcatccgcttattttcaactatactatgttctaataaaatactatttatagacgtaagtaggaatttcatataatttttcacatcatacaatattttcctcttttgatttttttcacaataattttaaatgtaaaaaaccacactcagcttgtgggtcatccaaaaacagtcagtgggctgagtttagcccckagaccagtgtttgccaacctcactctaaaacacaaaataaagttgatgatattgcaaatgtttaatttaatatttatagtttatttttatttgcttaattgatacttattctctaaatcaggcaaggcactgcagaattgtaaaagtaaagaagtaactcaggcaggatt

SEQ ID NO: 389572 - DNA, 555 bp, Homo sapiens
tgttttcagtctcactttcttcaacctgattaacttcctgtagtggctcttagattgctggtcagttagtaacatattcttgtgggctttttaatctaaagtttttctatgtcaccttcatttcgaaggatacttttactattaaaatattcaaggtagatgggtttgtttctcattttkgaaagtacttttaatatatcatttcattgctttctgcctttcattacttctggtgagaaatgtttattgttttttcactgcatgcattatcttacttgttttttactggctcctttaagatgctttcttctatttgacaatttttatttgttttattttttgacagtttttttgacagtttttaattgtgcctttattcaatttaattcattaaaaatatacttgttttgagtgggcaaggtgcctcacgcctgtaatcccagaactttgggaggccaaggagggtagatcacctgagctcaggagttcaagaccagcctggccaacacggtgaaaccccttctctattaaaaatacaaaaaaaaaaaaaaaaaa

SEQ ID NO: 389573 - DNA, 555 bp, Homo sapiens
tgttttcagtctcactttcttcaacctgattaacttcctgtagtggctcttagattgctggtcagttagtaacatattcttgtgggctttttaatctaaagtttttctatgtcaccttcatttcgaaggatacttttactattaaaatattcaaggtagatgggtttgtttctcattttggaaagtacttttaatatatcatttcattgctttctgcctttcattacttctggtgagaaatgtttattgttttttcactgcatgcattatcttacttgttttttactggctcctttaagatgctttcttctatttgacaatttttatttgttttattttttgacagtttttttgacagtttttaattgtgcctttattcaatttaattcattaaaaatatacttgttttgagtgggcaaggtgcctcacgcctgtaatcccagaactttgggaggccaaggagggtagatcacctgagctcaggagttcaagaccagcctggccaacacggtgaaacccyttctctattaaaaatacaaaaaaaaaaaaaaaaaa

SEQ ID NO: 389574 - DNA, 619 bp, Homo sapiens
agggtaaggtcaagggtaagcatcgaagtttttagtcacatcgaagaatgtagatttaaattcaaaatgatgagggaatcagcctgcattagaaagccgcttttcaaattattcgaattgatgtttgcataaatctggatagtgaaaacaaaagtatcttctacagcaaaatggtagatctaaatagacaaaatcaaagcagagttatgctgtgttaycttaaaagaaaaggaagtgtcaaaatttggttaacaatattaagatccctgaataaataataaagtataagatgattactaaaggaaaaacagaaaaatcaccaaagcaaattagtttgtttacattttctgtgttcaaagggctgaagagaatcttaaaatatagcagtaagttcattgtgttcagattaaatcagcaaatttaaatgattaaaaaacacataataaacgtgtgttaataaaatgagcatatacataaaagcataactataatgaatgtatataatatatgtatatacaaataaattcatgcacgtgtatatatatactagaaggcagagtctgtgaagataagaggtgacagagtgttctactttagattgggaagtgaagcaatgtga

SEQ ID NO: 389575 - DNA, 611 bp, Homo sapiens
tgtggctacaacctagcaagtaaaggtgatactaataaaaggtaattttgtgataaatttgtgaaagccaatgggaattcttcaccgtctatctcacacttctgcyaccctctgtgttggtttcgttttcaggcagttttcttcccatgataacaaacattagcagctccagtctttagggctcacaacccatggacatgacctaacttcacaaacctgctcctttgaaatctctcccacccaagttaaagggaattccatctttcctattatttgagggcaaaaaaagtcaggattacctttgtctctttgttttcctacattccaaatataagcagtaattctggtaggaggcaccttcagaatatttccagtttctgtccatttttaccacacatgcctcagctattatcttcttttacttggattattacaataaccttttcagtgatctattttatacttgtactgcattctattttcaatgcaacagccacttctctgacctcatctctacctcatctgccatcctttctctttactcacacagctccagtcacactaataagccacactgtttacataaatttttctgagctttaattcacagg

SEQ ID NO: 389576 - DNA, 614 bp, Homo sapiens
tacagatgtagtgactgtgtagagccacttttaaaaatctctgagttcctgtttgtgtgaccttgrcattaatatattattgagtgctataaaggtataaatgagctcaacactgtagatattgaaaagatagagtcgacagttattcattttcaaataacaactataagcatgggaaatatcataaaaagataatatgaaagttttgaatgagtttagacacataaaattggaaaataaaagaattccaagcaaaagtaacagctagagcaaagagaagaaatgaaaaaaggagggatttactggggaactctatctaattccctaactcctattggctgggtgtataaaaagaatatctgaaaataaatttggaaatgtgggtggtaccatgttcattaaccttaatatgaaaccacttaagaattattgaaagatttttaattagtaaacagatctatgagatgttagctaaacttaaaagtgggactgaaagaagtttcctggagtaatgagattattacataataagatttgtaattaaacttggtcttaaactcaagcagtattaataagagtatatagaatgaaatagatgcaaaagatgagtaagt

SEQ ID NO: 389577 - DNA, 507 bp, Homo sapiens
aatataaaatagaaaaaggaaactaaaatagagccctacttgttattcagataatctttgtggaattaattaatggacaaagaaataaatatatcaaataatcataatgtatggaactaaaaaataagatgcataaattggtaaaaacagatttattgataaataatagaaccttgatttaaatggagaaaaaaactccgaagtttacatatttaaaaacacaataaaraatttctaaatattctgaacttggaaatatttatctaagagcacacacgcacattacataatatgatatgatataatattacatattataaacaaatagttatttagttaactagtcttaaggaagtgattggtgagaaatgggtaaggaaatacgatgaaaatttgttcagattattatctcaatattcattattaagaaaatatttcaatccacttgagtgatcaaacatgtgtcaccttagtttgatcttctctgacaaatatgacatatatcca

SEQ ID NO: 389578 - DNA, 613 bp, Homo sapiens
ctcagtgtcctttttggctagacaaaaaacaacaaccacacacaaaaaacttatcattattattttcatagaagagaaaacgattttttttccaaatgtgacaatacatgcaaaacaaagatcacaaagaagtgaactsaaaaagttatgccaatgtgtttataaatttaccgtttcacaaattgccttccacgactattcccttctctttaccctgtgaggcattaaacaaaaaattgattcccatcttttctatctccccaaaacccacacacaaagcaagttgtctctgttttacaatcacaacaagacttggtgacatttgaaataatcttaaagtactaaaatcattcatattactgagttggttaaaaaggatattattattgatttaaaattgggcatagaaagctgaagaataaaaatataacaaattaataggtcataggtatcaaggtgaatatatatatgtgatatattcatgtttatgtagagagcctctaacctcttattagatttatgtcctattaatatgctttgaaaatttatactaaaattgctagcctaggtataaagtactatcatttttccaaggaatactcaggtcaacaat

SEQ ID NO: 389579 - DNA, 613 bp, Homo sapiens
ctcagtgtcctttttggctagacaaaaaacaacaaccacacacaaaaaacttatcattattattttcatagaagagaaaacgattttttttccaaatgtgacaatacatgcaaaacaaagatcacaaagaagtgaactcaaaaagttatgccaatgtgtttataaatttaccgtttcacaaattgccttccacgactattcccttctctttaccctgtgaggcattaaacaaaaaattgattcccatcttttctatctccccaaaacccacacacaaagcaagttgtctctgttttacaatcacaacaagacttggtgacatttgaaataatyttaaagtactaaaatcattcatattactgagttggttaaaaaggatattattattgatttaaaattgggcatagaaagctgaagaataaaaatataacaaattaataggtcataggtatcaaggtgaatatatatatgtgatatattcatgtttatgtagagagcctctaacctcttattagatttatgtcctattaatatgctttgaaaatttatactaaaattgctagcctaggtataaagtactatcatttttccaaggaatactcaggtcaacaat

SEQ ID NO: 389580 - DNA, 532 bp, Homo sapiens
attttttttaaacctacatttatattctatctgttaaaattaaggtaagttacaggaatactacagttggcatttttgccttattcttttctgagtaactcctaaattaatttctaaggagaaaaaatgatttaaagtgatagaacattgatgctgttatgataacaataaaataaatccaaggggatttaagccctgattcttttttaaagtcatgaaaatgttccattgggttaattatgataatataccacaaataattgtagaatcagagggtaagaatttttctcttcactctggaagccacgtgaactattatctgtcrgaaaatctaattataagtctgataataattggactagatggccagatgacagtctcacaaacttaaacttgcctctaagtctcatgatgtctaattttagtctgttctctgcccttacctctataacattaaccaagcaggtataagcatgctaacatttaaaattacaagtttacaaccaaatgcattttgtaagcatacttaatg

SEQ ID NO: 389581 - DNA, 555 bp, Homo sapiens
tggtacctaaggtgcaagacaaaaatcccctttacgtttacctatgcttttctcaaacataagtaggctctctccatagccaccacaactgggaatgtgctgagtctcatttgaagccagcaagtctcagagtctcacccaaggccctcgacatagtacctgggtattgctgctggttattcagtgcccaaggacttttcagttatcaggtgatgtataccaccaggacttggtccttcccttcaaggcagcaggttctcttctggcycagggtgtgtctggaactgttgtccagaagataggccctggaaaggcagccttatgactctgacctatgccctatcctgctgtgactgagctggtattcaagatgaaagacaaagtcctccctattcttgcctctcctctccttaagcagaaggagagggtatcttttggagctataaactgtgcagcctgaggttaggggagaggtgatgctagcttgctagctctcctttagctcctctcccaacccccaagcaaccaagttcactgtctcttgacccagttcag

SEQ ID NO: 389582 - DNA, 555 bp, Homo sapiens
tggtacctaaggtgcaagacaaaaatcccctttacgtttacctatgcttttctcaaacataagtaggctctctccatagccaccacaactgggaatgtgctgagtctcatttgaagccagcaagtctcagagtctcacccaaggccctcgacatagtacctgggtattgctgctggttattcagtgcccaaggacttttcagttatcaggtgatgtataccaccaggacttggtccttcccttcaaggcagcaggttctcttctggctcagggtgtgtctggaactgttgtccagaagataggccctggaaaggcagccttatgactctgacctatgccctatcctgctgtgactgagctggtattcaagatgaaagacaaagtcctccctattcttgcctctcctctccttaagcagaaggagagggtatcttttggagctataaactgtgcagcctgaggttaggggagaggtgatgctagcttgctagctctcctttagctsctctcccaacccccaagcaaccaagttcactgtctcttgacccagttcag

SEQ ID NO: 389583 - DNA, 570 bp, Homo sapiens
  misc_feature (1)...(570): n = A,T,C or G
agtagtgcaagaatggactaatatgctctgcatgctaataatattcagcagccaatttctggaaaaacacaactagctgtaatttttttaaggaatgtgacttgttatgttaatcttataatactacataaataccaaagctgtaatttttttaaggaatgtgacttgttatgttaatcttataatactacataaataccaaatgataaagaataattactttccagtacttaaaaaaccgattgggctaaatgccctgatactggttggacttactacacttgttcttttctaaacttagagctaattttctctcacactttggagaaatatacctaaaaagtttaccaaaattaggtaatagcccctgtggctttgtatcgaatacaaatgcctgggctttgtgtgtttangctaagataacatctcaccacagtctgccctgtaggaagggttttattccatttggtgttttaatacttacacactgttaatgtttaaattcaccaaacttcttgycgtctatgtgcccactgaagtaccaaggagaagccaaagatactgacttcc

SEQ ID NO: 389584 - DNA, 636 bp, Homo sapiens
catgctttaaccatcagtacacagacctayacattcaatttgtcctatcctgaaggcaaattttcaatgcttaattagcataaacaatatacactcctttgttttggaacttaaaatactctgacttctctcctttagtaaactactcagtgaatttattcaatggcatgtgctcccttgccaagcatgctaataaatgcagctctgtaatttttttaattgcaaaaataagacagtttgtctacagaaagtacaaccatttctcttctggaattgaacaattttcctattaatatgttaatatttctgggtccaggcaagggttgccctgtcccagatggtacacaacctaactttagacttctatgcacccactttttaaaaatttttgaattacggaaaggtaattcacatatgtacatgtttgtggtgatttgaggatagaggaggtgagggagagcaagagtcaaatgaagaatataatttgaaggcattacataaataattacattattttatattttgtttcttggtagcagcattctgtttctattataaggtgttttaaagtggctgagcctctcattttaagattctttcttgcctttatataaaaaacaaagagaccaatgattt

SEQ ID NO: 389585 - DNA, 636 bp, Homo sapiens
catgctttaaccatcagtacacagacctacacattcaatttgtcctatcctgaaggcaaattttcaatgcttaattagcataaacaatatacactccyttgttttggaacttaaaatactctgacttctctcctttagtaaactactcagtgaatttattcaatggcatgtgctcccttgccaagcatgctaataaatgcagctctgtaatttttttaattgcaaaaataagacagtttgtctacagaaagtacaaccatttctcttctggaattgaacaattttcctattaatatgttaatatttctgggtccaggcaagggttgccctgtcccagatggtacacaacctaactttagacttctatgcacccactttttaaaaatttttgaattacggaaaggtaattcacatatgtacatgtttgtggtgatttgaggatagaggaggtgagggagagcaagagtcaaatgaagaatataatttgaaggcattacataaataattacattattttatattttgtttcttggtagcagcattctgtttctattataaggtgttttaaagtggctgagcctctcattttaagattctttcttgcctttatataaaaaacaaagagaccaatgattt

SEQ ID NO: 389586 - DNA, 636 bp, Homo sapiens
catgctttaaccatcagtacacagacctacacattcaatttgtcctatcctgaaggcaaattttcaatgcttaattagcataaacaatatacactcctttgttttggaacttaaaatactctgacttctctcctttagtaaactactcagtgaatttattcaatggcatgtgctcccttgccaagcatgctaataaatgcagctctgtaatttttttaattgcaaaaataagacagtttgtctacagaaagtacaaccatttctcttctggaattgaacaattttcctattaatatgttaatatttctgggtccaggcaagggttgccctgtcccagatggtacacaacctaactttagacttctatgcayccactttttaaaaatttttgaattacggaaaggtaattcacatatgtacatgtttgtggtgatttgaggatagaggaggtgagggagagcaagagtcaaatgaagaatataatttgaaggcattacataaataattacattattttatattttgtttcttggtagcagcattctgtttctattataaggtgttttaaagtggctgagcctctcattttaagattctttcttgcctttatataaaaaacaaagagaccaatgattt

SEQ ID NO: 389587 - DNA, 636 bp, Homo sapiens
catgctttaaccatcagtacacagacctacacattcaatttgtcctatcctgaaggcaaattttcaatgcttaattagcataaacaatatacactcctttgttttggaacttaaaatactctgacttctctcctttagtaaactactcagtgaatttattcaatggcatgtgctcccttgccaagcatgctaataaatgcagctctgtaatttttttaattgcaaaaataagacagtttgtctacagaaagtacaaccatttctcttctggaattgaacaattttcctattaatatgttaatatttctgggtccaggcaagggttgccctgtcccagatggtacacaacctaactttagacttctatgcacccactttttaaaaatttttgaattacggaaaggtarttcacatatgtacatgtttgtggtgatttgaggatagaggaggtgagggagagcaagagtcaaatgaagaatataatttgaaggcattacataaataattacattattttatattttgtttcttggtagcagcattctgtttctattataaggtgttttaaagtggctgagcctctcattttaagattctttcttgcctttatataaaaaacaaagagaccaatgattt

SEQ ID NO: 389588 - DNA, 593 bp, Homo sapiens
aaatagaaagatgattcagataattcctgctttcaagtagtttgcaaagtatatgcatgtgttaggagaaaggggtgtgtaggtaggaatagcgtgaggcagtgaaccactaatggtctatatacttcaagaactttgaaattctgatttatttggaagtgtattgttaaaaaatacagattgtgaacagtaaaaactattaaattacaatgttttaagacacatatttttgttcctggtataaaggcataataagcaatatatataactgtggttttctttttaaacttttagaatgctaagctacagtcattaaactaacaaaaaattttaagtaatttcatgtatactgaaaatagggrctggcaactcttttaatatatacttttcagttagaaatctttgaaattaattaaactttgtaagatattactttggaggagaaaatttagtgactaattttaagctagtacaaaaataaaaatatttaaacctttttgcagacattacaatatcccttgtaatttaggatatatttaggtttgaaatgttcacaatgcttggacattggaaaaatatttgaaagtttacat

SEQ ID NO: 389589 - DNA, 606 bp, Homo sapiens
tgattgtcattctctaagtgtaaatattttttatgagaaagggaaaaaataatcaaattctgaatgagagaagaaaaggaaatgtgtagaaaagagaaaaagaaagtggaggcttgatactaaattcacaggtcaaatattgatgtgacgttttctttaaacaagataaaaattaattttagaaataaagaaccctaacttgtagaaagagttttattattattttttcttctttatagtggtaacattttgtgttttggacactgtgaacataatggaaagactaccataatatattatggttttaattatattttataaagaaaaatgaatcrattgacctttccagattcttatgtagagagtaaatataaagtcctctttattcatactacaatgatcatactatataataatatgtataaaaagtgtcttaattcataatatcaacaataggtcacatagtatttatccattgacctcagctgatggcatttaaataatacatgtaaaatacggtaatatagagaagtgaagataaaaggacaagggcaaatatatagcagaaatgtaaataaaagaaaaaaatagagttggcaaatgtat

SEQ ID NO: 389590 - DNA, 592 bp, Homo sapiens
aattcacaggtcaaatattgatgtgacgttttctttaaacaagataaaaattaattttagaaataaagaaccctaacttgtagaaagagttttattattattttttcttctttatagtggtaacattttgtgttttggacactgtgaacataatggaaagactaccataatatattatggttttaattatattttataaagaaaaatgaatcgattgacctttccagattcttatgtagagagtaaatataaagtcctctttattcatactacaatgatcatactatataataatatgtataaaaagtgtcttaattcataatatcaacaataggtcacatagtatttatccattgacctcagctgatggcatttaaataatacrtgtaaaatacggtaatatagagaagtgaagataaaaggacaagggcaaatatatagcagaaatgtaaataaaagaaaaaaatagagttggcaaatgtatagcaggcatggtaaaaatcaaggccaaaaaataaatgagtaaataagtatatattaataggattttaaatcctcaatattaataaagcttacaattctcgtaactatt

SEQ ID NO: 389591 - DNA, 606 bp, Homo sapiens
tgattgtcattctctaagtgtaaatattttttatgagaaagggaaaaaataatcaaattctgaatgagagaagaaaaggaaatgtgtagaaaagagaaaaagaaagtggaggcttgatactaaattcacaggtcaaatattgatgtgacgttttctttaaacaagataaaaattaattttagaaataaagaaccctaacttgtagaaagagttttattattattttttcttctttatagtggtaacattttgtgttttggacactgtgaacataatggaaagactaccataatatattatggttttaattatattttataaagaaaaatgaatcgattgacctttccagattcttatgtagagagtaaatataaagtcctctttattcatactacaatgatcatactatataataatatgtataaaaagtgtcttaattcataatatcaacaataggtcacatagtatttatccattgacctcagctgatggcatttaaataatacatgtaaaatacggtaatatagagaagtgaagataaaagracaagggcaaatatatagcagaaatgtaaataaaagaaaaaaatagagttggcaaatgtat

SEQ ID NO: 389592 - DNA, 606 bp, Homo sapiens
tgattgtcattctctaagtgtaaatattttttatgagaaagggaaaaaataatcaaattctgaatgagagaagaaaaggaaatgtgtagaaaagagaaaaagaaagtggaggcttgatactaaattcacaggtcaaatattgatgtgacgttttctttaaacaagataaaaattaattttagaaataaagaaccctaacttgtagaaagagttttattattattttttcttctttatagtggtaacattttgtgttttggacactgtgaacataatggaaagactaccataatatattatggttttaattatattttataaagaaaaatgaatcgattgacctttccagattcttatgtagagagtaaatataaagtcctctttattcatactacaatgatcatactatataataatatgtataaaaagtgtcttaattcataatatcaacaataggtcacatagtatttatccattgacctcagctgatggcatttaaataatacatgtaaaatacggtaatatagagaagtgaagataaaaggacaagggsaaatatatagcagaaatgtaaataaaagaaaaaaatagagttggcaaatgtat

SEQ ID NO: 389593 - DNA, 611 bp, Homo sapiens
ttgcattaattatagataagaaaataatctcaaacttgaaacaaattggcttcttttttgagtcttccaaattctatcggttttgctcttattcacgtctgtttgctttagtctgtgccataaaattgatggcagcaagcccacagtttcagggatgagtctaggaactgccagaaaatgtcctggaaacttagttttgtagtagcatatacaaatcttaaaatagcttgattttaaatgcatacttaaatattagaaaagacttgggaaataatactccaagaaaattatacaaaaatttaattgtgatgtttttctttaatgggtagtttcagcatatcaaataattrttcttgaattcaaagttattgactttatatcactattcactggaggtcccaacatttgactaatcacctccattagactttaaggctccgtaatagcagacaacatgtctgtttttttgactcttgtagacttgcatagagtcagtgtctgataaaaggctgtttggtaaaggttttacctgagtaagtaaaccattagactaattgtattagaaagaacctttaaagtgattagaattatactgcatacacttgaaacta

SEQ ID NO: 389594 - DNA, 632 bp, Homo sapiens
cctgggcatgaaaggatgacatttaccattatgaaaacacatgaaagtataaaacctactgataaaacaaacacacaaatgtggaaaagtatcaaataatactaccacagaaaatcagcaaaccacaaggactaacaataaaggaaaaagaaaggaacaagaacatgtaaatagcaactggaaaacaaataagaatatgatagaaacaaacctcccatattaataataaccttgaatgtamaaagaatagattatctatttaaaacatatagtctggctgaatggattaaaaaatgtgacccaactatatgctgcctaaaaaaaaacacactttacctgtaaatatacatatatactgaacataaaaagatgaaaaatgatattctgtacaaacaaaagccagaaggaaacaggagtaggtattatgatatcagataaaacagactttgagtcaaaaatggtattaaaaaaaaatgaaggtcattctataatgataaatagattaatccaaaaagaagatataacaactttaaatatatatgcacccaatactggaggacccagattcataaagcaaacatgactgtaatagatctaaagaaacagatagactgttaatagaataatggtgg

SEQ ID NO: 389595 - DNA, 632 bp, Homo sapiens
cctgggcatgaaaggatgacatttaccattatgaaaacacatgaaagtataaaacctactgataaaacaaacacacaaatgtggaaaagtatcaaataatactaccacagaaaatcagcaaaccacaaggactaacaataaaggaaaaagaaaggaacaagaacatgtaaatagcaactggaaaacaaataagaatatgatagaaacaaacctcccatattaataataaccttgaatgtacaaagaatagattatctatttaaaacatatagtctggctgaatggattaaaaaatgtgacccaactatatgctgcctaaaaaaaaacacactttacctgtaaatatacatatatactgaacataaaaagatgaaaaatgatattctgtacaaacaaaagccagaaggaaacaggagtaggtattatgatatcagataaaacagactttgagtyaaaaatggtattaaaaaaaaatgaaggtcattctataatgataaatagattaatccaaaaagaagatataacaactttaaatatatatgcacccaatactggaggacccagattcataaagcaaacatgactgtaatagatctaaagaaacagatagactgttaatagaataatggtgg

SEQ ID NO: 389596 - DNA, 632 bp, Homo sapiens
cctgggcatgaaaggatgacatttaccattatgaaaacacatgaaagtataaaacctactgataaaacaaacacacaaatgtggaaaagtatcaaataatactaccacagaaaatcagcaaaccacaaggactaacaataaaggaaaaagaaaggaacaagaacatgtaaatagcaactggaaaacaaataagaatatgatagaaacaaacctcccatattaataataaccttgaatgtacaaagaatagattatctatttaaaacatatagtctggctgaatggattaaaaaatgtgacccaactatatgctgcctaaaaaaaaacacactttacctgtaaatatacatatatactgaacataaaaagatgaaaaatgatattctgtacaaacaaaagccagaaggaaacaggagtaggtattatgatatcagataaaacagactttgagtcaaaaatggtattaaaaaaaaatgaaggtcattctataatgataaatagattaatmcaaaaagaagatataacaactttaaatatatatgcacccaatactggaggacccagattcataaagcaaacatgactgtaatagatctaaagaaacagatagactgttaatagaataatggtgg

SEQ ID NO: 389597 - DNA, 569 bp, Homo sapiens
cacactctacagatttaatgcaattcctatcataataccaacatcatttttcacaggaatataaaaattatacctgaaatttatatggaaccaaaaagaggctgaataaaaaaagctatccggagcaaaaagaacaaagctggaggcatcacagtaagtgatttcaaaacacagtacaagactatagtaaccaaaacagcatgttattggtataaaaacagacacatggatcaatagaacagagtcagaaataaatacaaatatttataactgactgaccttaacaaagctgctaaaaacatactttggggaaaggacacccycttcagtaaatggtgctgggaaaactgaataaccatatgtagaagaataaaacgactcctatctctcactatatgcaaaagtcaactcaaggtcgattaaaaacctaaatgtaagaccaaagactacacataaaagtggtagacattcaagatgatggatacccaacagactctgacttaaatgttatacattctatgcatgtaacaaacactcacatgtactgcataaatctgtaaaatattact

SEQ ID NO: 389598 - DNA, 569 bp, Homo sapiens
cacactctacagatttaatgcaattcctatcataataccaacatcatttttcacaggaatataaaaattatacctgaaatttatatggaaccaaaaagaggctgaataaaaaaagctatccggagcaaaaagaacaaagctggaggcatcacagtaagtgatttcaaaacacagtacaagactatagtaaccaaaacagcatgttattggtataaaaacagacacatggatcaatagaacagagtcagaaataaatacaaatatttataactgactgaccttaacaaagctgctaaaaacatactttggggaaaggacaccctcttcagtaaatggtgctgggaaaactgaataaccatatgtagaagaataaaacgacwcctatctctcactatatgcaaaagtcaactcaaggtcgattaaaaacctaaatgtaagaccaaagactacacataaaagtggtagacattcaagatgatggatacccaacagactctgacttaaatgttatacattctatgcatgtaacaaacactcacatgtactgcataaatctgtaaaatattact

SEQ ID NO: 389599 - DNA, 409 bp, Homo sapiens
ccagcttgcagacagcttatcataggacttcccagcctttgtaattatgtgatctaattttcctaataagccctctctttatctgtctrtctatctatctatctatctatctatctatctatctatctatctatctatcttattcgtctgtctctctaatataaattttgataccagaagtggttctagaagaacctaattttaagagtgagtttttgcaattcattttgatgtttcttgagtttattttctaatcttcttagactttaaaatgcaaaaaaatctacttccaatggtactgataatctgtggcatgcctgttaatagaaatacacaaaatacctgcattggatacctaaaaaccacttgtaaatggcaaggaatttgatgactctgtaaatggaacttt

SEQ ID NO: 389600 - DNA, 557 bp, Homo sapiens
agcttccgctacctagtaaaatagtaaatcaaaagcaatactgcattcctggaaagattgcagagattagcgctaccatcaagaamttgaaaggtgcaggggttgggatttccaccacttctccattccatctcctatttggcttgtgccaaagacagatggattttgaagaatggcatgattatcaagagtttaaccaagtaatgactctaattgcagctctgtaccagttgtggtttcattgcttgagcaaattaacatatctcttggtacctggaatgcaattattggtctggcaaatgttttttttttgtttgttttttttgtttgttttttcctccatacctgtctgtaaggtccaccagaagcagttttctttcatctggcatggccagcaatacccctccactgtcctcccccagaggtatattacctctccagccctattataatttagttaacagggatcttgatcattttttcccttccacaggatttcacactagttcattacattgatgccgtcaggctgattgaacaaaatgagcaaaaagtaa

SEQ ID NO: 389601 - DNA, 557 bp, Homo sapiens
tcatttaatacacttttttctttaattacatctttattttatttttttttttgtcctgcaatttcggttttcagattttagtgtgcgggttttattggattttctttaaaaatctttcttacatgttttatctgttttttaaaaaaacttttttccttttattttatttagtttacttttcagtcctgttgtattttcattctatttttattcatgattgttctaacttgtgttgcccctaatgttgacttcacaactgagagattattttttttcttctgcgtctttcctgtgttctgctaactcatgcattgtcactggaatctactacctctttcctgaattcttatttctgggctttgaattgctgatttatgtcactkcttgttgcattattattttcttattgaataacaacatatttggtcacaatttatatctgctcctttagaccattcttctttttctactgtgtgtttttttgtgttcatcatttattttcctttttcaccccagtattttcctgtacatcttttgccagtttccaaatttgtgtt

SEQ ID NO: 389602 - DNA, 572 bp, Homo sapiens
gcctcttaactcttaattaaaaaatacttcaatgaataataaagacaatccttaaatgctactgaacgtataagcatgttataataaaatatgtcagagttattctgtctattacaaagaaataaaatccttgctagaagtactagttgaattgaaaactggggtaatgtgattcagtaaaaatagttttagaattcttgtaactattatgtgattatgctaacatgtatttttggatgcctcttttaatagaacaattaataccagtattatgattacctgtttataccaatgtagccacattacttacttttttgtggggggtattgccctttgagattctgatgtaagacctctgacacattgacttacctaaactttttgaggatatacaggttatattactttttccaagataggaatttctgcaccaagtcacacaatstcaacctatgtcacttcagatttttaagatttaaaaaatctataccactgcagtcagaagcttttggaatctaccatttaaactaataattttcctgttactgaaaagggagttaggcaaagagcaa

SEQ ID NO: 389603 - DNA, 593 bp, Homo sapiens
ttcttgttttcatgctggaatgcagccatttttaaaaccacccatagcccgccctacttcccccatcctgtacccataaaaacccctgacccaactgggttcagaacagagatggggagaaggggagaagcagctggacgtccgagrctgtggtttgacttcagagagaagcagcatgacttcagaagaacagcttgatgccattgctttcaattttatgccataaaattgagtctcagtcctggagtgccaggtctgctcaatccagatttgcacacaatctctaggtaatctctttcagtcctatggctttatataccatctttgtattgtagactccctgatttctatcactaatacagacatctcccctcaactccactctcattaaacaaagtgatattatagatatctaataagaaactgcaagttaacatgacctgaaacaaattcttgttgtttctctatttagacctgctgaactgatggttttctcagtcttagaaagtagtcactctattcagcaagttatttaggcagaaaatcttattggctgtctattcctttgtcttttggcaaatcctattagctgt

SEQ ID NO: 389604 - DNA, 593 bp, Homo sapiens
ttcttgttttcatgctggaatgcagccatttttaaaaccacccatagcccgccctacttcccccatcctgtacccataaaaacccctgacccaactgggttcagaacagagatggggagaaggggagaagcagctggacgtccgaggctgtggtttgacttcagagagaagcagcatgacttcagaagaacagcttgatgccattgctttcaattttatgccataaaattgagtctcagtcctggagtgccaggtctgctcaatccagatttgcacacaatctctaggtaatctctttcagtcctatggctttatataccatctttgtattgkagactccctgatttctatcactaatacagacatctcccctcaactccactctcattaaacaaagtgatattatagatatctaataagaaactgcaagttaacatgacctgaaacaaattcttgttgtttctctatttagacctgctgaactgatggttttctcagtcttagaaagtagtcactctattcagcaagttatttaggcagaaaatcttattggctgtctattcctttgtcttttggcaaatcctattagctgt

SEQ ID NO: 389605 - DNA, 593 bp, Homo sapiens
ttcttgttttcatgctggaatgcagccatttttaaaaccacccatagcccgccctacttcccccatcctgtacccataaaaacccctgacccaactgggttcagaacagagatggggagaaggggagaagcagctggacgtccgaggctgtggtttgacttcagagagaagcagcatgacttcagaagaacagcttgatgccattgctttcaattttatgccataaaattgagtctcagtcctggagtgccaggtctgctcaatccagatttgcacacaatctctaggtaatctctttcagtcctatggctttatataccatctttgtattgtagactccctgatttctatcactaatacagacatctcccctcaactccactctcattaaacaaagtgatattatagatatctaataagaaactgcaagttaacatgacctgaaacaaattcttgttgtttctctatttaracctgctgaactgatggttttctcagtcttagaaagtagtcactctattcagcaagttatttaggcagaaaatcttattggctgtctattcctttgtcttttggcaaatcctattagctgt

SEQ ID NO: 389606 - DNA, 619 bp, Homo sapiens
aagcatttcacaaagtaatatttgggaatgttggatttatgtagcaagaagcatagtggtatagagttttmtattttctggtgcaatagcatgaatttggaagtgtaaaagaaatatgaacggttgagaccgctaaaaaaatcaggatttttttatctgaatgtggaatacttggtctgtgtttcaactgtgaaagatagtagggcaatgttaaggtctaagatttggctatgaatgtaaataggctgcatctattattttacactggttctgtctttatctagctttatgactttacacaagtgacaaattcttagcactatattttctgcttgtaaaatggcgataacaacaatagctgtcttaacaaacgtgtgaattttaaattaattgttatgtaaagtgggtagcaaactgccaggaacagtgatttctccataatgctgtttttattatgtacaatacaattattatatataaaactttttatccctagcacttagcagaataaactactaaaatcatttataatagatatttattttgtagatctttttggggagattagaaaattttaatactgtactattaccagccatttctcaattggactagagtt

SEQ ID NO: 389607 - DNA, 603 bp, Homo sapiens
actgttacttccatctgcattgaattcaccagaacaatcacatgttcaagtccaaagtcaagggacaaggaaagacatgataagtattatatggccaaggcaagggtgaagatttgaggtaatttatttattatcacgatagagcaaacatttttctatgaatattctcatgagctttgatttaatgttttttttttttaattagcttctttgttaatcaaggcgataaacytgtggaatatgctttctttatataaaatgtaaggatcagaagcacaatttagaaaatcacactgtaaaagtcatttatcttcaaaatttagaattcactcttaaaatcgcattgataaaaacattactgcaaaattaagagacagtagatgcattggagaagtagaacaccttaaacttgggttttagttttagaagatattgtcaacatgccatttgactatagctactggtagtattttcagattctagttaaacctggaaaataaaattttcattggccttcaattaaatctcaaacatacatgaaaaacacttaaatatgaaagatatagacaatgaatgagatataaaaatttcaaaagttttatt

SEQ ID NO: 389608 - DNA, 603 bp, Homo sapiens
actgttacttccatctgcattgaattcaccagaacaatcacatgttcaagtccaaagtcaagggacaaggaaagacatgataagtattatatggccaaggcaagggtgaagatttgaggtaatttatttattatcacgatagagcaaacatttttctatgaatattctcatgagctttgatttaatgttttttttttttaattagcttctttgttaatcaaggcgataaacttgtggaatatgctttctttatataaaatgtaaggatcagaagcacaatttagaaaatcacactgtaaaagtcatttatcttcaaaatttagaattcacycttaaaatcgcattgataaaaacattactgcaaaattaagagacagtagatgcattggagaagtagaacaccttaaacttgggttttagttttagaagatattgtcaacatgccatttgactatagctactggtagtattttcagattctagttaaacctggaaaataaaattttcattggccttcaattaaatctcaaacatacatgaaaaacacttaaatatgaaagatatagacaatgaatgagatataaaaatttcaaaagttttatt

SEQ ID NO: 389609 - DNA, 571 bp, Homo sapiens
ttggccttctctcatattgcagaagatttccaggttataacctggaaatttcattacttaggattgtttatgcccagtgtcacaagaacatgaaagacttatccagaccctgaccacttttcccttctagggcacactccagaaatgcagccacagcaatatttcttatgtatattacackgcaactttgatatttgcttaataaaatttggcaacacatggtccgaagtgcttagttttcttggggcactttctaagtgatttgtacctctgatttgattattcagtccacaaaaaatctgctctttagacctgtctagagtatttgcattcagtctcttttgtctctggggaaacaagtgagccttaggccacagaagatgctctaatttgcccatccctttatgataacaagaattagccagccaaagactggaataaagcaatcactacttatttcttattttaccatgaggataaaatgatcacatgcaaaaaaaaaaaattagcaaggtatacactgcaaacaagtttcggggagacagagaggggtagaagattgtggtttcat

SEQ ID NO: 389610 - DNA, 571 bp, Homo sapiens
ttggccttctctcatattgcagaagatttccaggttataacctggaaatttcattacttaggattgtttatgcccagtgtcacaagaacatgaaagacttatccagaccctgaccacttttcccttctagggcacactccagaaatgcagccacagcaatatttcttatgtatattacactgcaactttgatatttgcttaataaaatttggcaacacatggtccgaagtgcttagttttcttggggcactttctaagtgatttgtacctctgatttgattattcagtccacaaaaaatctgctctttagacctgtctagagyatttgcattcagtctcttttgtctctggggaaacaagtgagccttaggccacagaagatgctctaatttgcccatccctttatgataacaagaattagccagccaaagactggaataaagcaatcactacttatttcttattttaccatgaggataaaatgatcacatgcaaaaaaaaaaaattagcaaggtatacactgcaaacaagtttcggggagacagagaggggtagaagattgtggtttcat

SEQ ID NO: 389611 - DNA, 542 bp, Homo sapiens
gttgtttataaattacccagtctaaggcattttgctatagcagcctggatggattgaaacgagctttgcrttaggacttgggcccggagtaagagcagggtaacacgaggggtctgaaagatcattggagaaaagaacagggcaatgatggggacaggtaggtgcttgggtgggtaccaaagagaattcttttcacacttctgccaaattcctgcacatatatgcatgtacaccaaaccataccacactctacatacacatttgcctattcctaacaccactgttctaaattcctaatatgtttccaattgctgcctccagcataagtgccagattccatccttgatctgagagaatcttggaaaatgtcagtccaggtggatgtccacaggaagaacattaggaacaaagagagacctctgtttctttcttgagctgggtgtaaacactaatgcgagagtgatcaacccccttgtttacataccttcctattttagagtttctgctttggaatatttagattaacaagaatatcatatgta

SEQ ID NO: 389612 - DNA, 538 bp, Homo sapiens
cttctgttcgtcctctgtttgatcatgtcccagtgggctggtggaaaggatctggtgaaagtgatttctttataaatttctcttttattattacattatctgggccctggtcaccaaatctccccagcatccttggcttaggtggaatattgttacactgagcagcttggatatycttgtagtgtggaaatgaaaaatgaataagaaaaatcagttgtgctttcattagaaaaatccttagatactacaatgtgcaagtcagaggattatgggaataagtgataccagaaaaaaacccaccttgctctctgttgagccaactcttgaagctttaaggactgaaatatttttctggtgtgcatagataaagacttaaagtttcaggtttgcttgtctcttattaaaaggaagaaaaatatgtctctccctcccacctttaaccacttcatttcagaccgcagagcttattaatattcagtaatatgtctaggcttgaacagataaaaatagccaagcctttcatttagaaacagacttc

SEQ ID NO: 389613 - DNA, 597 bp, Homo sapiens
ttccttgcttaaacacccccatttcttttaccccaggattttcaaccttagcactgacattttgggtcagataattctgtgcatttcaagatgtttagaagtatttctggtctctacccactagatctcagtagcatagcccctccccaacctgaactgyactaggtctccagcaagggttcttaactgggctgaaatgactgaaatgacagaaataaaattcagaatgtcgatagtaatgaagatcattgatattcaggagaatattgaaacccaatttaaggaagctgagaatcacagtaaaatgatacaggagctgaaagacaagatagccagtatagaaaataatgtaaccaacctgatagagctgaaaaacactctacaagaatttcataatgcagtcacaaatattaacagtagaagagaccaagctgaggaaagaatctcaagcttgaaaaatggctttttgaaataagatagttagacaatagtaaggaaaggagaaaaaaaggaacaaacaaaacttctgagaaatataggattatgtaaagagaccaaatatatgactcataggcatctctgaaagagatggggaga

SEQ ID NO: 389614 - DNA, 542 bp, Homo sapiens
taaacttttttttttttttttaaagacagagtctcgctctcttgccaggctggagtgcagtggcgcaatctcggctcaccgcaatatctgcctcctgggtttaagggattctcctgcctcagcctttcaagtagctgggattacaggcgtgagctactgcgcctggctaatttttgtatttatagtggaaacgggtttttgtcatgttggccaggctggtctcgagctcctgaactcaagtgatctgcccgcctcggcctcccaaagtgccrggattataggcatgagccaccgttcccagcctaaacttcaaatctatagccattacatggtttggtgactcaaaagttataacacgtaggtcaagaaaccagtggcagaaggagtgattcctctcactgtcactcccagtgaccctctcaggacatttgtacttccattctagcacttttaggctctgctgcagtggaggtactagttcacaggtgttaaagtgaactaaatatggcctgagaaggactccgtagttctacatttgagtc

SEQ ID NO: 389615 - DNA, 542 bp, Homo sapiens
taaacttttttttttttttttaaagacagagtctcgctctcttgccaggctggagtgcagtggcgcaatctcggctcaccgcaatatctgcctcctgggtttaagggattctcctgcctcagcctttcaagtagctgggattacaggcgtgagctactgcgcctggctaatttttgtatttatagtggaaacgggtttttgtcatgttggccaggctggtctcgagctcctgaactcaagtgatctgcccgcctcggcctcccaaagtgccgggattayaggcatgagccaccgttcccagcctaaacttcaaatctatagccattacatggtttggtgactcaaaagttataacacgtaggtcaagaaaccagtggcagaaggagtgattcctctcactgtcactcccagtgaccctctcaggacatttgtacttccattctagcacttttaggctctgctgcagtggaggtactagttcacaggtgttaaagtgaactaaatatggcctgagaaggactccgtagttctacatttgagtc

SEQ ID NO: 389616 - DNA, 559 bp, Homo sapiens
gttaaatatacgtttaaataagtgaaatagacatctagctttagatttacaattttcttgagcacacaaaatatgaaatattttatacagtgaacatttcactctttgggaaaaataatctattgcttaataacattcatagcagagcttccctgggtgtaatgcctctgtcatgattcaacagattctaaagatgaaaaaattaggatcttgagtttcggataccctgctcttagccagagtgtatatccagaagtcttgtattcttttccaacagccgataatgccatttgctctaatttttaagcaaaagaaaatctatataggtaacaaggcctatgaagacctatttctstaacctttaatcatttttctgcaagaccagcaggtggtgctcctcactttgctcatgttagctttgaaattttgagtactgagtacacttcacttttttatcctctcatacttctatagttaactttccaagaacataagtatttatttaatttgaccagattatatctatagcttaatgaggtaagacagtgatttgttagta

SEQ ID NO: 389617 - DNA, 553 bp, Homo sapiens
tttttctgctctggagaatcaaactacagtaaratttatatggtagtgattattattttattataatgaggactttgccaaaataggttacttttcaacagttaaaagaaccttcctgaagagtaatagagaatagtagtaaattatcactgaagtttttaggaagagattgtgtcatcaggatgttttagaagagattccttcatgagtgtagaagttggactgatttctaaagtccctttctatttttagattctcttctgcacagttatgacctacacataatgcactgaatctgttcccttgatagtttctgcataggctttggttgtgccacaagtgtggcctgcagtgaatgacctggtctaactctgtcattggtcctaggactgaactgtccaggaatatgcctaatcctgagggaaagcatcaatatggctgttggttatagagagaaagatggcttagactcaagatctcaaatccttgtccagctgcatcttgctgccgtgggttttcaagatccacatacagaggggataacttgacaaat

SEQ ID NO: 389618 - DNA, 553 bp, Homo sapiens
tttttctgctctggagaatcaaactacagtaagatttatatggtagtgattattattttattataatgaggactttgccaaaataggttacttttcaacagttaaaagaaccttcctgaagagtaatagagaatagtagtaaattatcactgaagtttttaggaagagattgtgtcatcaggatgttttagaagagattccttcatgagtgtagaagttggactgmtttctaaagtccctttctatttttagattctcttctgcacagttatgacctacacataatgcactgaatctgttcccttgatagtttctgcataggctttggttgtgccacaagtgtggcctgcagtgaatgacctggtctaactctgtcattggtcctaggactgaactgtccaggaatatgcctaatcctgagggaaagcatcaatatggctgttggttatagagagaaagatggcttagactcaagatctcaaatccttgtccagctgcatcttgctgccgtgggttttcaagatccacatacagaggggataacttgacaaat

SEQ ID NO: 389619 - DNA, 591 bp, Homo sapiens
tatttcataattattgcatctctagggctttattttttaaaaagctttttttcttatatgcactttytactgttttgttgttgttcatggtttaactacaaaaaaaaaaaaccttagagtaatcctttatattccatcgtttgcatattctgcatagtttccgtaaaatatatttcatctaaaagcacttgaaagaatataaaatatatttagtaatatataactaattatttgttagtcaacatttaacttcaatacacataacattatcacacagatttttctgacatacgatcttggtgtaattgaagacatactagttatattatgtcacgataatgtcaacttgatttgaatatggtctagccttctaaatcatattttttttattgtggtaagtacacttaacgtgaaatcttccctcttaatacatttttaagtgcacaatacagtattgataactataggtacaatattgtacggcagatctctagagctgattcagggtaaagtatcagttatgcattctctactttaaatagcccaccttcctctgaggtggctacaaaagaaaaataaatagcatctttt

SEQ ID NO: 389620 - DNA, 573 bp, Homo sapiens
caacaatgtttaaatatgtctatttccccagacctctccaattaatgtgtgtaatcaaacttttggatgcttttgaccagtgtaatatgtgaaaaatggtatcagtatagggtagtattgatttgcatttctcatgttgtgagtatgattgaacacattttcatgcttagggagcatttatatttcctttttagtgttctttgcccatttttctattgcgttgtcatctttttcatcccaatgcataggtactctatataaattgkaaaaaaattcagactcccacctcccctttctactccaagataatgactcatttgtttaggaatgaggtccaggaatctatattttaaaatgttgctcaggtgattctgatttgctattaggtttgatctagagcagaaggctaggtagaggataagaggtgaagagagggctagaaatgtagtttggcacctgaaattagatttctaataccaagataaagtattcaaactttatatgtaaaccatgtgaagtcactaaatatttctgaatatatttttcaaatatatttataactttaagatttga

SEQ ID NO: 389621 - DNA, 524 bp, Homo sapiens
aacaactacccaggaaattttttaratgcagattcctgggcttcaccaccagtaattctgagtcaattgatctggatccaagaattgtaattttaacaagcactcctggtgactgtgatgaaggtggatagtggatcgtacttttacaaactgctagaagagattgggaactttcaaaggaatgcgagaggctaaagtagtccaggcattagtggaattgcctgaacttaggcaagagagggttggaggaggagaatccacggatgtcacaaggaaagcagttacagatggaagctttaagcgtaatgcctagcacacatttggtgtttaatatgttataactgaagctgaattttctgcagtgtcattgctgtctatagtgagtcacgaaaggacaaatacatgaaaaaatttagtaccacctgaatttgactgctgatgtttggggttggaatttttaaagaatagcactctaggcaaatgtcttactactagggccagaccttatcagcacataacagagt

SEQ ID NO: 389622 - DNA, 535 bp, Homo sapiens
ccttgggtctgctcaggaaagaaagcaatttgtaggtctgaaattaacgttttccttctcttactgggcttcactgcctgaaacaatgttagaactgtctcatgcttcccagtgaagatgggyttcgtcctgcaagccagacaggcttgcaggctatgtctgactagggattgacagcaattatgtcactgctgagccacaaaccaaacaaaacttagggctttggaatttagacaatagctgaattacaagggtactgtcccagaagggaccgtgcttatgttttgcagacctggacaataaaatggctgtgtctttcaaaataattgcccaggtctttgttttactgaggtgtgcctttgccttgacaacagagaatttccaacatggggagaaagcaggttccctatcataatcttcaggatagcttgattgactataatttccaatctttcgaatctgcaggacaccagcaagcactgacttcaccatgctgggaaaaaacatattggtccagagaggaggatgttgtttt

SEQ ID NO: 389623 - DNA, 514 bp, Homo sapiens
gcagcaaattggatccccatggggtcagctgtctttgtgagtgcatgtttatagttcgtctttgtgggtatgcccagatgagcattctgctaatctgctaatgaaaataaaagtatttccattaggccaagtcagcaatttaactgtttgtaacagagatcggcaaactttttctataaaggaccagaaagtaaaaattttcggtttgttggccmtatattctctgtcataactactcaattctgccattgctgcacaaaagaagccatagacaaaacaaaaatgagtaagctaactatgttctaataaaacgttattgatgggcatcaaaatttgaatttcatataatattcatgtgttgcaaatattcctttgattattttcagccatttgaaaatacaaagcccttattagcttatgagccatacataagcagacccatacccatggccatagtttaacaacccctggtctataatcctaaaatgaagacttacattttttagtgctttct

SEQ ID NO: 389624 - DNA, 514 bp, Homo sapiens
gcagcaaattggatccccatggggtcagctgtctttgtgagtgcatgtttatagttcgtctttgtgggtatgcccagatgagcattctgctaatctgctaatgaaaataaaagtatttccattaggccaagtcagcaatttaactgtttgtaacagagatcggcaaactttttctataaaggaccagaaagtaaaaattttcggtttgttggccctatattctctgtcataactactcaattctgccattgctgcacaaaagaagccatagacaaaacaaaaatgagtaagctaactatgttctaataaaacgttattgatgggcatcaaaatttgaatttcatataatattcatgtgttgcaaatattcctttgattattttcagccatttgaaaatacaaagcccttattagcttatgagccatacataagcagacccatacccatggcyatagtttaacaacccctggtctataatcctaaaatgaagacttacattttttagtgctttct

SEQ ID NO: 389625 - DNA, 577 bp, Homo sapiens
cactaaagcttttatttaaaaaaatcatcaggagagaaaattttatccatgttacatatgttcttttcttaagagagtagacataaggagagaagtggggggcctattgcagtcctccaagcaagagacaatggtggcttaggctggattgacagtgaagaaaaatagatgttttacagaatgatacaaaaaggctcatggttggccaggcgtggtggttcatgmctgtaatcccagcactttgggaggctgaggcgggtgaatcacgaggtcaagagatcaagacaatactgaccaacatggtgaaaccccatttctactaaaaatacgaaaattggccaggtgtagtggcgggcacctgtggtcccagctattcgggaggctgaggcaggggaatcacttgaacccaggaggcagaagttgcagtgagccaagattgcactactgcactacagcctggtgacagagcgagactctgtctcaagaaaaaagaaaaaaaaaaggctcatggttgaatggagagagagagagtgtgtgtgtgtgtgtaaaggagtagaagcagtaggggcaaaacagg

SEQ ID NO: 389626 - DNA, 496 bp, Homo sapiens
cctatattagaccatccctagtcatcaatacctaattaagataagattattatacaacaatccagactgttagctctgtgagagcagggatcttttttatctagtacttgaaatgtctagcataatgcctaggcctkctaggtgccaacaaatgaatacatacataaaggaaattttagttttcaaactactctatgttctattaaaagcctgaaggaatggaactcaagagaggtgaggtttgattaatagttcttaagaaagtttcaaataatgcagtagtgccagcccagtgggaagaacaaaatatcagcctctgagaatgaaacagttggcatctgaaaggaaggaaagcatggaacatggaagatgggaagaagcaaatgaaaaatcaggagtcaggtgaagaaatacggataggcggggctctgctttactagttttcctctggtgcaattaacagaactccaattctttattttaacttttattataa

SEQ ID NO: 389627 - DNA, 531 bp, Homo sapiens
ctgatctcaggaaagtaagatgtttgccctgacaacatttgattatgggggcaaagagaatattattaaactgacaatggaggcttaacttcataatgttaatcctctaactgttaaacccttcccagtattaccagctgggctaagatctaaaataatttgaggaagaaaagagataagaatgagaattttgacagtycatatgtggtgaaaaaatttgttcaagaaggcaccaggtttgcaagaacaatccagacaggtatttccggaattctgctttggagtgctttggggttttttctcactgaggtgtgtaatatcttacacaggggttaaacaactggggtcttgctgacccctgtgttgtatgcatatttatgttgcaagcctccttgttccaggagacagctgcaatagagtgactggaagcattcactatcttctaacactctgtcacaaggctgctgatcctgacacactcacaaaccacaccttcaacctgttgcttgcagggaaagggtcatgcaaaca

SEQ ID NO: 389628 - DNA, 510 bp, Homo sapiens
gtgatcagggagaacataggaaagaatgtcatagagttatttccctgtaaatgatagaatgagggggaaattctaaatcctcactaataagaaaataacagatacttgatttagattcatcartgttcacaagcagtatggtgtcatggacaagagtacaaaattgagagccagagcactgcgttcctatttccgctgtgtgagtgggcaggctgcttaactctttgtgcctccatttccatattcttatgaaaattaattgctatatatatatacatatatatatatatataatgcttaaaacaatgcttgggcagatagtagtcctattgactattgtaatcatggctttattcttgtttagatggacgaaggggacatgggggaaaacaaggtggcctgagtctaaaacagtgatcattaacgttgattcagtattttctatggaccaggtgccatgctaggtatttcacagtcatcattttatttaatgccctaccataacctatg

SEQ ID NO: 389629 - DNA, 510 bp, Homo sapiens
gtgatcagggagaacataggaaagaatgtcatagagttatttccctgtaaatgatagaatgagggggaaattctaaatcctcactaataagaaaataacagatacttgatttagattcatcagtgttcacaagcagtatggtgtcatggacaagagtacaaaattgagagccagagcactgcgttcctatttccgctgtgtgagtgggcaggctgcttaactctttgtgcctccatttccatattcttatgaaaattaattgctatatatatatayatatatatatatatataatgcttaaaacaatgcttgggcagatagtagtcctattgactattgtaatcatggctttattcttgtttagatggacgaaggggacatgggggaaaacaaggtggcctgagtctaaaacagtgatcattaacgttgattcagtattttctatggaccaggtgccatgctaggtatttcacagtcatcattttatttaatgccctaccataacctatg

SEQ ID NO: 389630 - DNA, 564 bp, Homo sapiens
ttgtagcatgagcctaggactggatctaggaggtctagattttaggttgagctctgtttttaaaaaactgtaggatgctggctgaattgtttatctctgagcatcarttgccttctgtgtaagaggagctgaattttcagttcccttcctgccgttataggctgtaatttaatgatccttaagatcccttgcacactatgtgtggaatggagcttaatgcagtgggaatttccagcaagtaaagcgagccacctctggattttacttgccccaaattatcatttactcaaaattgggctcattattctaatggttcccacaactcaagagcgcttacaagggtggctggctcccacaaaatctttgagtttcattgagcttattatatttactgagcttattatgttataaaaaaaaaaagaaggaggagtaagccaggagtgctgtttcaaggtgctaatgaaaaaaatctgatgtttaagctcatccaagcaggggtttcggtattttttgtttgtgctacattcccagccctagaatagtacctggcacgtagtaggcact

SEQ ID NO: 389631 - DNA, 625 bp, Homo sapiens
atcctaaattcccactaagtttacattctatgataagccttttaaaatgcctcatcagacattcaagaaaagtaaagtcaaattaagtatctgcttgaagtggtgaaaaacgtctgtctgctagccaggggtacatttatgcaaaataaaagaaaaaagaaagaaagggaggaaaaagcaaattaaagaaggaaacaaaaaaaatttgaagaaaagactatcattaaatggtcaggagaaatgatatgacctagttcttctaaattagcattcagaatactcaaatacatagttgcctgctctcttgaccaatttttctaactccgtctaacgtcaagtctttcctcaacacatttttggttgatagttttttcctatataaattaaggaagtatgtgttcttttttattaataactcgaatagttaagagaaatatttttctaaagttttaatgtytcctttttctcttacatgggtatttttagaaaaattaatacaaatacaaatgatgtcaaaaaagttattgttgtcattgttcttgggggagtagcagaatgacatttgataccagaggttaaatgtcaaccttgataccaaggttaataccttggcattgtaagactg

SEQ ID NO: 389632 - DNA, 560 bp, Homo sapiens
acccaggtcagcaggtggcttgcactgcagctgcttatagagacccctgtctccatccccaattcccagaataaggaacgctttaatcaggaaagagactgrttataggccagcaaagttcagtctttaccgatttctgcagagaatggcacttgctggaacacagccactaggcagcaagacagagcaaactagaagttagctgattgggaatttggtcccagccctcactgatcgttgtgcgactgtgggtaggtcattcctttttgggtcacagctgattaactcagtcctgtagctagtcaggcagtcattttattcatctgccaggcatttacccagagcccactctgtatttgccgctgtaatgtacaagtagcacctacgtaagtaggtgccagggatccagagataagcaaaataacacacatccctgcccttatggagcttacagcctagtaggcaaacaccaaatcacataagtacctgtaaattaatggtgatatatgttagtaagggaaaggaaaggtgcatcattataaggagagacaggagaaatt

SEQ ID NO: 389633 - DNA, 560 bp, Homo sapiens
acccaggtcagcaggtggcttgcactgcagctgcttatagagacccctgtctccatccccaattcccagaataaggaacgctttaatcaggaaagagactgattataggccagcaaagttcagtctttaccgatttctgcagagaatggcacttgctggaacacagccactaggcagcaagacagagcaaactagaagttagctgattgggaatttggtcccagccctcactgatcgttgtgcgactgtgggtaggtcattcctttttgggtcacagctgattaactcagtcctgtagctagtcaggcagtcattttattcatctgccaggcatttacccagagcccactctgtatttgccgctgtaatgtacaagtagcacctacgtaagtaggtgccagggatccagagataagcaaaataacacmcatccctgcccttatggagcttacagcctagtaggcaaacaccaaatcacataagtacctgtaaattaatggtgatatatgttagtaagggaaaggaaaggtgcatcattataaggagagacaggagaaatt

SEQ ID NO: 389634 - DNA, 409 bp, Homo sapiens
tttgtcctttcaaatagctatgcaagataaaatgatgtccactctgcagatgcagaaactgaggcatggtgaggttaagaaacttgacaaggttgcaagggtgcaactccaccctgctatatctcaagcctgtgtytaaattggccctacagtaacaggacagagttttcatctctgcattgacggaaagagtaccacccatgagctagagacaattgtctctggtggacttgaactgatggctcaggcaatacctgtctacacttacacagtgctgggcttagttctccatcactttaaaggaaaagcccaaggaattattttcctctacttgactgacaagtcaaaacaaccacacagcctctgcttgacctcttctagtaggaagattatttgtctaattaggtaa

SEQ ID NO: 389635 - DNA, 522 bp, Homo sapiens
actctgcagatgcagaaactgaggcatggtgaggttaagaaacttgacaaggttgcaagggtgcaactccaccctgctatatctcaagcctgtgtttaaattggccctacagtaacaggacagagttttcatctctgcattgacggaaagagtaccacccatgagctagagacaattgtctctggtggacttgaactgatggctcaggcaayacctgtctacacttacacagtgctgggcttagttctccatcactttaaaggaaaagcccaaggaattattttcctctacttgactgacaagtcaaaacaaccacacagcctctgcttgacctcttctagtaggaagattatttgtctaattaggtaaagagcctttatgcgcatgtacatttttgaaccctaatgatctgccaacgtgaaaggcttgcccttggcttggttctccagctgatctttcctttcctcagtggaaaagaccagcgcaataaacagaaccttgtttccatggaagctcactctc

SEQ ID NO: 389636 - DNA, 522 bp, Homo sapiens
actctgcagatgcagaaactgaggcatggtgaggttaagaaacttgacaaggttgcaagggtgcaactccaccctgctatatctcaagcctgtgtttaaattggccctacagtaacaggacagagttttcatctctgcattgacggaaagagtaccacccatgagctagagacaattgtctctggtggacttgaactgatggctcaggcaatacctgtctacacttacacagtgctgggcttagttctccatcactttaaaggaaaagcccaaggaattattttcctctacttgactgacaagtcaaaacaaccacacagcctctgcttgacctcttctagtaggaagattatttgtctaattaggtaaagagcctttatgcgcatgtacatttttgaaccctaatgakctgccaacgtgaaaggcttgcccttggcttggttctccagctgatctttcctttcctcagtggaaaagaccagcgcaataaacagaaccttgtttccatggaagctcactctc

SEQ ID NO: 389637 - DNA, 567 bp, Homo sapiens
gttgctgagctagttaactgtcaggatcaattagaaaaccaaacaaggcacttaagtatgaagccaacataatgcagagcaaaagagttccagtttgaggcagagcagacttggtttcaggtgactagtaccactttaccagaagtgtgatttggggcatgttcctctacttaccaagactcagtttccacatccgtcaaatggggataatgataccaacctttacaaagttgtttcacatgtggaattttccaaactgctctgtgatttttggtggaataattgtgtaaaagacaaggttaaatgcagttaaaaacaattatttactctagaatttctccaagtcttgattatgttgacatattacaaattttcaagaggaatcatcaattcctcaccccagaatcctttttcctgtgtgaatgcacattagcctctgtttcttgggaccctttagaaaaggctgtaaaacaggtcatagggtatttggtgtttggtacaggcatcaataaatgctaatcctttcttctttatgcccaartcatgcctgttcttgctggatttaag

SEQ ID NO: 389638 - DNA, 506 bp, Homo sapiens
tgcccatatgttacacagcttattttttttttttttttttttttttggccacacagaattggcataccaattcatgttccatgggatctaggtggggttctactcccagccacaaggacagaggacataagctatgcctatgcacatcagcacagcatattactggccatagaaattggccagtaatatggccaattggacatgtacttaagttagactttgggtgagaatttggggatgaaagactgtctccatcttccttgcatattacaagaggaaatatkcacttttccgttagatagcatgatgtgatgttgtgcagtccacatctttagcaacatttctgtgaagataggggagccaaactgagcatgaagccaccccagaggaaccaaagccaagattttaacaaaaatctcagttgtggtgatatcacctgagccctgattccagcctttcctgaagctgggtctaccccaggatattttcttttgttgttttaagcc

SEQ ID NO: 389639 - DNA, 377 bp, Homo sapiens
gctttcatttattctttgtacttttttccagcccatgcttcttcttgctgggctgctataagatagctgaggtacctggagtctscctgctctccatcttctccttgacacccaagaagaggacaaaagcatccctgtaggaatcatggttcttgtctcactgcaacttctgttcttataagaaatttttatgaagaatttctgacaaggaggaataagttcaagagacctattgtgcaatatggtgactatgattaataacaatacattgtatacttgaaaattccaagagtagatatttaataaaaagagccatgttactaattcacgttaaattcacaaataccatatgagagaagactgcctcatttttttat

SEQ ID NO: 389640 - DNA, 416 bp, Homo sapiens
catgttactaattcacgttaaattcacaaataccatatgagagaagactgcctcatttttttattcaaatgaaaagttacaagcattgccatgggtgctaccctaccaagtagtcccagagcagagggacactgaggccagaggggtcttccaggrttcagcaattttgggggattcctggaactaaagttgaacacagatgaatcttcctcttctttttttaatcctttgtagctcgctcactctggtctctcatataactaaaacgtccccagtgaataacagagatgtcagtgacccagtagcaagaattttacaaaaatatcataagagaggatacattcaaatcatgatacaaaatatggcctggagctccaaacccagacatgtgtacctcactttccttcccaacagat

SEQ ID NO: 389641 - DNA, 580 bp, Homo sapiens
gttgcagcgtcacattttccaaggtgctttctggaatcagtcaaggagtctaagtctcatgataggcctcaattcctcctgtaagtggaagtgaaaagtgcttgctgttgtttatgctcaaccacagagctccaaaatctgcgccccgttcctgagccatgtgcgtttccttgtttataagtaccaagcttcacggcaaagtgtgttcaacaattcactcactcaagcattaatgcagctctggtctttctcctytcccttaggtatttatgggccatcggtaagaatgtctggaagagatggaagaaaaggttttttgtattggtgcaggtaactaactcttcaactcttaagagacatcagtattaaagatttgctagaatgaatgaatgctttttaactgaggtataacttaaatacacagagctcatgcatttagcttaatgaatttttacatatatccatgtaaccaccattcagaggaggatacagaacatttccaatacccaaagggctcccttgtgctctattctctatttttatatcacttttaaattttaaaaaattaatgaatactcat

SEQ ID NO: 389642 - DNA, 529 bp, Homo sapiens
gttcacatagaaaataatggatctgaaaaccaaatccagttctgcatgactctaaaatctattctccttctcctccaccaaatggccttcacttcagtgccaatcaggagtctgggatttagacactgtgatccttcattcgcaactacatcacattaaaaatagtccttagtctccaggaactgtgattcacaccataaaaattttctccatgctcagattttggctcaatccgtcaatgcttcctcaggaattccttgcccaaccacccatctagaccaaatctccaagctcttacagtaccatatacctctctttttaatatttgccactattaaaataacacatttgtgaaatcatgggattaatgtctaccttcatgctagacatgagggcaggaatcacatctggttttttgcatgtttatagtcctcgaaccaaacacactacctaygtatttgttgaaagaatgaatgtatctattataaacaactcttttctaaattatgtatatgaattttggacaagg

SEQ ID NO: 389643 - DNA, 415 bp, Homo sapiens
atcaataataacaagttggaaaggcctggtactgtacttggaatcccctgtaaatttggggggtaaaacctctttattggattgtatgtactcaactttctagaaccaatcagattcaactagtgaatgcccattatatggcagattttgcttatgagactgaaaatacaatcaagacatatgactccctagacctgtcttcaatgaatttataatccagtaggtaaatccacctattaagctatactatattagaaagtgtgtcaaatgcaaggaaggkgcctgtataaatgcatgtgtatatgaagtgttcgctctatgggtatcacacatggtatgtaaaactcaattaattctctagcaacaataagatgcaggtaaatacagatgaagactctgaggcttacagaacgga

SEQ ID NO: 389644 - DNA, 522 bp, Homo sapiens
ttaactaactccttccttctctacccactcccctcaaactaaatgtaaagcatctttgtacttcataggcaacagtcgatgactttcctttttctggagttttccagggtcaggaattgctttagtgttcaaaaaacagtattggttatcagctaaagacaggcccttttatttatacgacccatcaagcagacagggtttaaaaataacaccaagtcagcggtgtgctttcctggggtgaagcggcgggggggccagcattgtttcccagagaaacgtgacgctggttaaacaacactggggactaactagatgaggctcgggtcacatgtcagcttgttcacttgaaaagctgctgaatgtagaaaaccatggtgggaagaggggcaggaacgcattcacccgggtrtgcacgtgcgacgggggcttgggtgtgcatgtggacccctggtgcctccgtggagccttgtgaggaggagggagggcaggcctgaccttttcagtgccatgttgtgctgagga

SEQ ID NO: 389645 - DNA, 624 bp, Homo sapiens
ttcagacattttaaaggatagttacggtgtagatttcatttggtcttctattctgttaatgacactgtatcaaccgtattaacctaaaaccctaaagctaattcacctggtgaacattggagtgtgtctttgtctttcatggtaggtacagttaaggtaggaaggataaataaggtgagtatatacgggtcctgcccttcaagggtttgtgtcttttatttccaatcctaatacatagatgagattcaagcaaaaacaaaacatcagttcaaactgcctgtttaagtcatcatcctcaatactatttgttgattgagcttggattaagctagcacatgtgtggttcttcggggagttttaaaattttcctgggagtgatctgagctgctcctgcgaggggatgcacagcttgtgatgtcggtgattttcttcctcagtcctagtttaaatggcgggtctctagatgatgggattatgtttaaacagttccaacaatttcatttatgcagayttataaatttacaattgtgattatggtcatcaggggaggcttcaatttccttggcctgccaacatcaagtgacacaaatagaagatgggtcaccatgacaggaaaaacaaagt

SEQ ID NO: 389646 - DNA, 614 bp, Homo sapiens
agcttcatagtgtgtgaagaacttaccttgtttatatgtttgaagacatacatatttcacatttcagaagagtctatacatagctcaccaaatatcaaaaccaccttgttagaaaacattaaggtctgtcttatttatttgttcatttatttatgagacacagtctcactctgtaatctcactctgttgtagaggttgagtgcagtggcacgatcacggctcactgcaacctccatctccctgactcaaggaatcctcccacctcagccttccaagtagcagggaccacaggtgcacgccactatgcccagctaatttttatattttattgtagaaattgggttttgccatgttattcaggctgatcttgtggcctcaaactcctgggctcaagcgatctgcctgcctcrgcctcccaaaatgctgtgattacaggtgtgagccaccacacccagccaacattaaggtcttaagctaattatgagaagggagggagttgcctatggggggaaagaataagaaaatggtaaaagaagagaaacaggaaaactcaggtttttgagctacaataataattgtggatattctgctacccagcacatgaaaacggtttc

SEQ ID NO: 389647 - DNA, 571 bp, Homo sapiens
tgggggagggggagaagccatctgctccagaatagtcttcgaatgacacgatcaaatgactgcagagcaaactggagggagtccaacagaaagttcctgtctgctgcatccagccccaaccagcactcragccattgtgtttacatggaagctcacacacaggtttcaaaggcaaggccgtgataaccaaggatgtaagtgagatgagtgtggaaaagaccacgtcagggagctttctcaccccgtatctcaccagtataccatttggaaaactaaaaagccattctttagagagaagctcagtcttttttcctgatcccttcagctatgcatttggttacaattaatgtatcagatcaaatgaaaaagttacattcctttgtaaattcatttttatgtgctcgtcttctattagtgtttaaactctgaaatctatttacttaaaatatgaggcaattttcttgtttttaaaatatggcctgtctcaatttgcaaaacatccttgattcttattttgtttctctaaatacgtgtatgtgtgtgttttttctttttctttttgctattaggc

SEQ ID NO: 389648 - DNA, 614 bp, Homo sapiens
ttctttcagcagtgttttgtagttttcctcgtacaggtctttcacttccttagctaggtatattcttaaatattttattttattttttgcagctattgtaaatggggttgagttcttgatttgattctcagcttggtcactgttggtgtatagaagagttactgatttgtgtacattaattttgcctccagaaattttgccaaattattttatcagttctaggagctttctggaggagtctttagggctttctaggtaaacaattatrttgtcagcaaacagcgacagtttgactttctctttactaattaggatgccctttatttctttctcttgtctgattgctctggcttggacttccagtactatgttgaagaggagtggtgagagtgggcatccttgtcttgttccagttctcagaaggaatgcttttgacttttccctaattggtattacattggctgtgggtttgtcatagatggcttttattacattgaggtatgtctcttatatgctgattttgctgagagttttaataataaagggatgctggattttgtggaatactttttctgtggctactaagatggtcatgtgatttttgttttaaattt

SEQ ID NO: 389649 - DNA, 514 bp, Homo sapiens
tttggtgtggtgctttttctatagtaaatttagaatttatatctactcaagtctgatttcaggagataagaatatatataaacaaaaataatcatgaaaacaaattgagattggtatgacaaattcatccacagtttagtgtttgctacatttctaggaaacttcttcagagaatggtagtgtttttgtgtgtgtgtgatctttattgatgtgaaaacatgaatctcktataggcatgcgtgtgaacatttgggctcttattctacgaagtttctgatagtcaaagctctaaccctaaagatactcactttgaaaatactcattttctcaataagtaaagtggattgttagaaattgttggaatttatcttctaaataagccttccagttctatttatatcttggtgataatgttatcatatcctctgctatctcacttttaaaagtgaacttattgtttcataaagagggagtgtggtatatgattttactaggcatctgttacatttctagg

SEQ ID NO: 389650 - DNA, 319 bp, Homo sapiens
aggtcatggcatcaccgtgagccagtcctctaaactttcaggttcaggtatcatggccttacatgatattcatctgaagcaggatgagacagagcaggcagaaaaggaaacatttctgacaatgttctgttatgaagaatccacctttcctagaagccccagcraacctcccatcggactcataggtgcaaactggctgaaaggctcattccaagaccaagcacaggtacaagggccaaaactggctagaacaggcatgactcaccttttcagcttctcagtcatctcctctcaagggcacaggtctgtttggttggtt

SEQ ID NO: 389651 - DNA, 557 bp, Homo sapiens
tggcatcaccgtgagccagtcctctaaactttcaggttcaggtatcatggccttacatgatattcatctgaagcaggatgagacagagcaggcagaaaaggaaacatttctgacaatgttctgttatgaagaatccacctttcctagaagccccagcaaacctcccatcggactcataggtgcaaactggctgaaaggctcattccaagaccaagcacaggtacaagggccaaaactggctagaacaggyatgactcaccttttcagcttctcagtcatctcctctcaagggcacaggtctgtttggttggtttgtgaataaaactgggggactgttattatggaagaagcagtgataagaccctttccataaagaggagagacgtgaactggcatatatcaccaggaccacctccaagtaattgactaataaataaaagctctattagtaagaattatggaatttctgtctcatttttatctcatgaaaaatggttcaagatccattggtttcaatctatagttcaaaaggaatccagtctcttttaaacagcaag

SEQ ID NO: 389652 - DNA, 557 bp, Homo sapiens
tggcatcaccgtgagccagtcctctaaactttcaggttcaggtatcatggccttacatgatattcatctgaagcaggatgagacagagcaggcagaaaaggaaacatttctgacaatgttctgttatgaagaatccacctttcctagaagccccagcaaacctcccatcggactcataggtgcaaactggctgaaaggctcattccaagaccaagcacaggtacaagggccaaaactggctagaacaggcatgactcaccttttcagcttctcagtcatctcctctcaagggcacaggtctgttyggttggtttgtgaataaaactgggggactgttattatggaagaagcagtgataagaccctttccataaagaggagagacgtgaactggcatatatcaccaggaccacctccaagtaattgactaataaataaaagctctattagtaagaattatggaatttctgtctcatttttatctcatgaaaaatggttcaagatccattggtttcaatctatagttcaaaaggaatccagtctcttttaaacagcaag

SEQ ID NO: 389653 - DNA, 569 bp, Homo sapiens
gtgccaaattattgtcctttcagagtcatatacatctttagccattttcttcgaatcaccacctctgttccatgaagaatcctgcaatcagctgcatgtttttttgaagccaactctttgaaatgaactcttaccacctttaactgagccaggtcactgacttcttcccacaaagcaattttatttcatagatatgcaactgaagttagaggaaatgcagcatccacttccaccctactgagagatcctggattctctatgaaaattaagatttctaccttccagagtcaattttgtatgccaaaaagggtaggccactgaataccctttttggcatactctgaataccataattttgtatgccactgaaataactgtatgagaagaggaatttctctgcccttttctatctccgtttactggatagagttcaatcttttgaggaaatgaaggcatgaatgagtgtggctactcagatatttgtcatatgaaaattttaagaaaataaatgtttatrtaactaagagggatggttcaagtgactttcctagagaaaacttcagctgtgt

SEQ ID NO: 389654 - DNA, 565 bp, Homo sapiens
cacacgttgtccacgtgattcctttcagggatccgctagtggtgggtggagagtttcataggttttggctttgctaatagctctctgatcacacttccccttgcctggtttgccactttggaggggtcttcaatgaggcttgcgtggttctagtttcacatgcagaaagtgcatttggtcatcaactcaaatgtgtatttcttttgttagataattcactcagtaactagagatgatcaagaagtttaaaactggaagataatcaattgctgacaatgacactcttcagggcaggtgaaccagtgtacagatgacccaggctggctcagtgtacctgtagtgatatagtgrtggccaaggacacgcaagtgtgtgacagtaaagccatctctattgttcatgaattgcatcaaagcacagatcatcatatcttattaatgagggccactttactactcaaatgtaagtacaagaaccctaataattctctctgtgcttttacccacagttcttccacttctggatcccacctcgactgaaccttacacaatctactgctggactt

SEQ ID NO: 389655 - DNA, 607 bp, Homo sapiens
atctatctatctatctctatttagtctatccatttacccatccatccacccatccatgtatctatgtatcaatgtatttatgtatctatttctatctaatctattcatccacccattcatccatccatccattcatccatccatctatccatccatccacccatgtatctatgtatctatgtaatgtatgtatgaatctatttatccacctatccatctatttatctaactggctgtctatctgtcagtccgcccatctgtccatctgtccattcatccatccatccatccatctatctgcctatctatctatctcctattggttctatttctctggggaactgtaatgyagaggggcataatttctggaaggatggtgcatctgcagtgtttacaccatttttcccagggtatcagtgggagtggtttcagctgcagtgctcacagccttctgttaatggtcttcccccagcacttgccttcctggtcccctgatgggactaatactttagcatcacttggggcattttccctccttgggtatcctctaagcctttccttactatcctcctgtgattacatgagcctacccagtatcacattagtg

SEQ ID NO: 389656 - DNA, 607 bp, Homo sapiens
atctatctatctatctctatttagtctatccatttacccatccatccacccatccatgtatctatgtatcaatgtatttatgtatctatttctatctaatctattcatccacccattcatccatccatccattcatccatccatctatccatccatccacccatgtatctatgtatctatgtaatgtatgtatgaatctatttatccacctatccatctatttatctaactggctgtctatctgtcagtccgcccatctgtccatctgtccattcatccatccatccatccatctatctgcctatctatctatctcctattggttctatttctctggggaactgtaatgcagaggggcataatttctggaaggatggtgcatctgcagtgtttacaccatttttcccagggtatcagtgggagtggtttcagctgcagtgctcacagccttctgttartggtcttcccccagcacttgccttcctggtcccctgatgggactaatactttagcatcacttggggcattttccctccttgggtatcctctaagcctttccttactatcctcctgtgattacatgagcctacccagtatcacattagtg

SEQ ID NO: 389657 - DNA, 607 bp, Homo sapiens
atctatctatctatctctatttagtctatccatttacccatccatccacccatccatgtatctatgtatcaatgtatttatgtatctatttctatctaatctattcatccacccattcatccatccatccattcatccatccatctatccatccatccacccatgtatctatgtatctatgtaatgtatgtatgaatctatttatccacctatccatctatttatctaactggctgtctatctgtcagtccgcccatctgtccatctgtccattcatccatccatccatccatctatctgcctatctatctatctcctattggttctatttctctggggaactgtaatgcagaggggcataatttctggaaggatggtgcatctgcagtgtttacaccatttttcccagggtatcagtgggagtggtttcagctgcagtgctcacagccttctgttaatggtcttcccccagcacttgccttcctggtcccctgaygggactaatactttagcatcacttggggcattttccctccttgggtatcctctaagcctttccttactatcctcctgtgattacatgagcctacccagtatcacattagtg

SEQ ID NO: 389658 - DNA, 607 bp, Homo sapiens
atctatctatctatctctatttagtctatccatttacccatccatccacccatccatgtatctatgtatcaatgtatttatgtatctatttctatctaatctattcatccacccattcatccatccatccattcatccatccatctatccatccatccacccatgtatctatgtatctatgtaatgtatgtatgaatctatttatccacctatccatctatttatctaactggctgtctatctgtcagtccgcccatctgtccatctgtccattcatccatccatccatccatctatctgcctatctatctatctcctattggttctatttctctggggaactgtaatgcagaggggcataatttctggaaggatggtgcatctgcagtgtttacaccatttttcccagggtatcagtgggagtggtttcagctgcagtgctcacagccttctgttaatggtcttcccccagcacttgccttcctggtcccctgatgggactaatactttagcatcacttggggcattttccytccttgggtatcctctaagcctttccttactatcctcctgtgattacatgagcctacccagtatcacattagtg

SEQ ID NO: 389659 - DNA, 565 bp, Homo sapiens
cacacgttgtccacgtgattcctttcagggatccgctagtggtgggtggagagtttcataggttttggctttgctaatagctctctgatcacacttccccttgcctggtttgccactttggaggggtcttcaatgaggcttgcgtggttctagtttcacatgcagaaagtgcatttggtcatcaactcaaatgtgtatttcttttgttagataattcactcagtaactagagatgatcaagaagtttaaaactggaagataatcaattgctgacaatgacactcttcagggcaggtgaaccagtgtacagatgacccaggctggctcagtgtacctgtagtgatatagtgatggccaaggacacgcaagtgtgtgacagtaaagccatctctattgttcatgaattgcatcaaagcacagatcatcatatcttattaatgagggccactttactactcaaatgtaagtacaagaaccctaataattctctctgtgcttttacccacagttcttccacttctggatmccacctcgactgaaccttacacaatctactgctggactt

SEQ ID NO: 389660 - DNA, 567 bp, Homo sapiens
ctcaaataaaaggtccttgcacagaaagcagattgcagataattagaaataaagctggagattcaattacttggcttttcttctaagaagctgatatttattttttacaatatgtctgatttttaaaaaatcaataagtcacaataatgggaaaatrttgaaataattcattgtacttaaatattgaaatacaaataatagcatcatgccatttaaaataatatatgatagcagcatttacattcaggaatgaatgttccacaaacttgctttcaaaaagccttactatcttaactgggcttcatgaattttaactttatgaaacaggcacaattataagattgttaaaaaaagtaagcaaaggaatccaacattcacatatagatggaatagaactcataatacaaatactggtgaaaattactactttttaatatttgtatatgttctttttaacttttcatataagcaataaaaataaaatattgtatcaaaaaatagctacaatatgattgagccctatgagaattgctgtagtttaccaagttttagacaaagcaagacaaa

SEQ ID NO: 389661 - DNA, 567 bp, Homo sapiens
ctcaaataaaaggtccttgcacagaaagcagattgcagataattagaaataaagctggagattcaattacttggcttttcttctaagaagctgatatttattttttacaatatgtctgatttttaaaaaatcaataagtcacaataatgggaaaatgttgaaataattcattgtacttaaatattgaaatacaaataatagcatcatgccatttaaaataatatatgatagcagcatttacattcaggaatgaatgttccacaaacttgctttcaaaaagccttactatcttaactgggcttcatgaattttaactttatgaaacaggcacaattataagattgttaaaaaaagtaagcaaaggaatccaacattcacatatagatggaatagaactcakaatacaaatactggtgaaaattactactttttaatatttgtatatgttctttttaacttttcatataagcaataaaaataaaatattgtatcaaaaaatagctacaatatgattgagccctatgagaattgctgtagtttaccaagttttagacaaagcaagacaaa

SEQ ID NO: 389662 - DNA, 567 bp, Homo sapiens
ctcaaataaaaggtccttgcacagaaagcagattgcagataattagaaataaagctggagattcaattacttggcttttcttctaagaagctgatatttattttttacaatatgtctgatttttaaaaaatcaataagtcacaataatgggaaaatgttgaaataattcattgtacttaaatattgaaatacaaataatagcatcatgccatttaaaataatatatgatagcagcatttacattcaggaatgaatgttccacaaacttgctttcaaaaagccttactatcttaactgggcttcatgaattttaactttatgaaacaggcacaattataagattgttaaaaaaagtaagcaaaggaatccaacattcacatatagatggaatagaactcataatacaaatactggtgaaaattactactttttaatatttgtatatgttctttttaacttttcatataagcaataaaaataaaatattgtatcaaaaaatagctacaatatgattgagccctatgagaattgctgtagtttrccaagttttagacaaagcaagacaaa

SEQ ID NO: 389663 - DNA, 585 bp, Homo sapiens
agttctccagtcacatttattgctaaatattttttatatttgtaactattgtaaatgggattcctttcttgatttctttttcagattgttcactgtgggcatatagaaatgctactgatttgttgtatgttgattttatattctaattctttactgagttggtttatcagtactaacagtttttttggtggagtctttagattttttaaaatataagattgtatcatctgcaaacatagacagtttgacttcttccttcccaaattggatgccctttatttctttctcttgtttagttgctctggttargactcctaggactatgttgaaaacaagtggtgaaagtgggcatccttgtcatgttccatatcttagtgaaagagctgtcagtttttccctgtttattatgatactagcagtggttttgttgtatacgacttttataatattgaggtatgttccctttattcccagtgttgtgagagtttttatcatgaagagatggtatattttatcaaatgctttttctgcatttattgaaatgaacttgtgttttttgtctgttactgttatgatgtatcacat

SEQ ID NO: 389664 - DNA, 585 bp, Homo sapiens
agttctccagtcacatttattgctaaatattttttatatttgtaactattgtaaatgggattcctttcttgatttctttttcagattgttcactgtgggcatatagaaatgctactgatttgttgtatgttgattttatattctaattctttactgagttggtttatcagtactaacagtttttttggtggagtctttagattttttaaaatataagattgtatcatctgcaaacatagacagtttgacttcttccttcccaaattggatgccctttatttctttctcttgtttagttgctctggttaagactcctaggactatgttgaaaacaagtggtgaaagtgggcatccttgtcatgttccatatcttagtgaaagagctgtcagtttttccctgtttattatgatactagcrgtggttttgttgtatacgacttttataatattgaggtatgttccctttattcccagtgttgtgagagtttttatcatgaagagatggtatattttatcaaatgctttttctgcatttattgaaatgaacttgtgttttttgtctgttactgttatgatgtatcacat

SEQ ID NO: 389665 - DNA, 522 bp, Homo sapiens
cagctccaccaacgttcctgcaaaggacaagatctctttcctttttatggctgcatagtattccayggtgtatttgtaccacgttttctttatccagcctatcattgatgggcatttggtttgattctttgcgattgtgaataatgagtagcatctattttaattttgaaaattaaaacagttttataagtaaaggagactatacagacacataaaaagaataatgttttgacatgttttggagagaattagttttaatgaaaatgagaatgtgagaaaccccaggaattgatttcaccttgcaactgaagagactatgttatcataataaggaagattgtgttgtcacagcattttgttgagatcactactggattttctgaagcactttgagatagaagaatgtctccccaggggtatctgcagagtctaaacttatcaaaagactgacagatgaaatatccagggagcttgtacaaatcaatgagcagaagatgaacccctcagcatatatgtgtgaga

SEQ ID NO: 389666 - DNA, 639 bp, Homo sapiens
agttagctcattttgctgaagtaagtgttctgtcacttgcagctgaatggatcctgcctgattaatacaatagaatttcatgtaatgataagaaccaaatctaaaattcttagcagacactaagcattttacacaggttatttaatcctcataattatttaaactatgggactactattatcttcgttttatagataaggaacatgaagctagaggagataagttctcattggctgagctggaatttgcatgcatttgcctctaactgcacagactgtcttctgaaccccgtcagactttcacccttccttttttgaagctttacagaccccacgggttaatatcaatcaatactcttattttgtagattagcaaacttaatcatttgaaagttaaatatcttggtaacagtcaaagtctaacacaaatctggcagaattaaaattccrttcattttgagtccacaggagaaggctcctttaaaattctaattttcctgggcaatgctgatgttgaactcttagaagctaaatccttcgttgctaattctcactgcaacagcaaccagggcactgtccacatatgagcacacataggacacaggtgaggagggacagcgaagacactggctgccaactg

SEQ ID NO: 389667 - DNA, 509 bp, Homo sapiens
tgacttctaacccctggattatttccactgcacctgaggacaaggtttctctgagagtccatttcccttggctttgggctaacaggctggagttctgtagaactgtacattttcttttctgatttatgagcccacaggctattgctttcattgatttttgcctttttattattgttttaccttatatagatttgtgtcattctggctccaagatgaaaactgtatccgtcaatgccatgagtatggctaatacatacaactattgtcatataaaagattaaagtgtgataatgtggcttgggtaagttgcyccattgaactctggatttctgtaaagtaagatgtgtcttggatacacccaatggaccctagactagagagacatcaaaccccaccccacccatttcttaattgagtgcagggcttcagggattccaagggtcattaacatgaataaactcactctgagattggggtggatttaaaagaccaccaaatataggcatttg

SEQ ID NO: 389668 - DNA, 527 bp, Homo sapiens
gattccaagggtcattaacatgaataaactcactctgagattggggtggatttaaaagaccaccaaatataggcatttgattatatttgcccttaattaaatgttcctgatttaggaaaaatgggagtctggcagggtagtggggttgtaatagtcaggattagagagctgaggagtttgcaagtggtagagacccaactcaggaaagctgaagcgacaagaacactgagcatcttggataattaaaaatgtctaaaacagtgccagcttcaggaacagctggagcctggagctcaagtgtggtcagggacatgtcatgcttcctctctcaaacctcctctccttggcttggcctcttttcagtctggattgtcataaattaggatataattttcttaatsagtgtctcctgcttttcctccagcatgtttattcctcaacctcctctactcagaggcagacaatggccaaagtggcagctggaccagatgccttccatccagttttcagcagcaggcaggcaggat

SEQ ID NO: 389669 - DNA, 518 bp, Homo sapiens
gcagatttggtttctcctgaaggctctctccttggagagcagattgtggccttcttgctgtgttctcacgtggcctttcctctgtgcactcacccttggtggctctctgtgtatcctgatctgttcttgaaaggtaaccagtaagactggattatggatggacgtggtggctcatgcctgtaatcccagcactttgggaggttggcacaggaggattgcttgagcccaggagttagagatcagcctgtgccacatagcgagactcctgtctctactaaaaaataaaaataaatagctgggtgtgttggtgcataactgtagtytcactcaggagactgaaatcacttgagcctgggagttcaaggctgcagtgcgctgtgattgcaccactgcactccacttcagcctgttttgagacagagcaagattctatctaaaataaaaagaaaaaaaaaagaaaagatggattgtagcccaccttaatggccccattttatttacctctgcaaagatcctat

SEQ ID NO: 389670 - DNA, 546 bp, Homo sapiens
atatagcttatatcactatatatgagtttttaaaaattctgtacaagcagagaacacaaggacacacctaggcatcagtttgattccctagttagcaggaagggaatatgaaagtattttagaatgatgggtctgatgatgaggaaaaagggcagggaaagaaacaagcgttcatttgttgactaagatcaaaggcaatgtgctagacacttcacaaatgccactgcatttttatcccaaacaccttataatggccaggggtgtgacctaattcacccacatgcccacagatgctgtgtgcagaatgaaagaggagacccagttcctctgtcccctattccacctcagcaccttgcccctcgaggttctgtaatggttctgccttcaataacatgcaggctgatcagtctcttgttggggtggcagagactgggatccagtgggctcccttcttaatgcactttagmtgacctactatttcagcctctcaacccaacacttcctaagaccattcctaatgagccacaacatgctttaggtatactt

SEQ ID NO: 389671 - DNA, 639 bp, Homo sapiens
tagcttacaatgtctctgatcactgttcattttgtaaggagctaccatatttgtcagcaagcaaaactcatctttaccaaaaagcaatatatttgccccatgtctagtgaactaagcctattgaaagcccaacagggaaggaaagaggaatagtggatttatagaccmtggtaatatcattagcccctggtggcagaaaacggaaacacaaacatcacagaaaagattggtgatttctatccttgcgtgcttttctttttctttttttgtttttttcttttgaggtggagtttcactctgtcacccaggctgcagtgcaatggcatgatattggctcactgcaacctcagtctcacgggctcaagcggttctcctgtctcagccttccaagtagctgggattacaggcgcccaccaccaggcccagctaattttttgtatttttagtggagacagggtttcgccatgttggccaggctggtctcaaactcctgacctcaggtgatccacccacctcagcctcccaaaatgctgggattacagtcgtgagccaccgcatctggctgcttttctttacttgagaaataaggtattagccacctagataatcagggggtaaattatggactattttctgact

SEQ ID NO: 389672 - DNA, 562 bp, Homo sapiens
accggtgcacaacctatcaaccagtttcttgttgatgcacattagggtttgcaggtagtatttctgaaagcaaacaatgcttcagtgaacatcattgcacacatattttgcatttttgcaataggtccttaaggtccttctgccagggcagaagttgaatgtctatattgccatattgtttttaggtttttctccratggacaggacctgtgtttctcagtcccctgtgaaatttggtaggggttgcaggagacaaatgtgtaaagggaatacagaatgcaaccagagacccatgaataccaggtgtgctggttattctctgtttccaccccatccacttgtaactcctgttcaccacaccttgtgcccaggaactgactcctccagacctcatcacccagctcctctaccagccgtgataaaggactgtggtcagtgttggtcagtgggaggcaccagcaggggtttggaaggtagaaagaaaaagactggagggtttctttccacttgttttctgctttggcaacatggttctggcaacggcggcatccattcagagcca

SEQ ID NO: 389673 - DNA, 562 bp, Homo sapiens
tctgccccttactaactattaactattgacagctgtgttactcaaccatttggcttccgtttctttacttctacagtgacgtcataacagaaaatacctcacatgtttttcattcagaacaagaagaaaaggcacataaagcacttagaataaatttctatatcaacccactcygttggcattgttagtgtcttataaccctgatcatttcaatatctgcacttaggacccactgtgtaaatatctgttggatgaatggatgcatgctacctcctatgatgacagtctattatgacagggccttgtctttggtcataaggtaaaaatgtggtgggtcagtagacgcctggttactctgcaagtttcccagctccaagagtattatcactagcatgtcagtatcactcttcttcatatcctaacagaaagcatcctagcatgttgtctggtggggaaggtgatggttatacatcttgttgcacagtagacaaaagagaagactactcaaggaagaacactatctttggagaagagtgggatgaaacttgggaggcatctgagt

SEQ ID NO: 389674 - DNA, 613 bp, Homo sapiens
ttgggatactgtgctagtccattttcatgctgctgataaagacatacccgagactgagtaatttatacaggaaaaagggtttaatggacttacatttcaatgtggctggggaggcctcacaatcatggcagaaggcaaggaggagcaagtcatatcttccatggatggcagcaggcaaagagagagcttgtgcaggaaaactcccctttttaaaactgtcagatctcatgagacttatttgctatcatgagaagagtatggaaaagtcctgcccccattattcaatgacctcctaccaggtcccttccaaaatacatgggaattcaagataagatatgggtgaggacacagccaaatcatatcagataccctttcaatctggtataccagtgaaactactaactcagctggtctgaaggaccctgcaagaaactgtcttaccaaagaatgcagtttccatgtcctgatggtttatccctcctatcctaaccaatcaatgaccccaatcttccagcccctcaacctccatgaacagctccagcccagaaacccttgcagagrtggaaaaaacagtctccttccatctcctcacttggtgccctgcaattattaa

SEQ ID NO: 389675 - DNA, 556 bp, Homo sapiens
acttcctaatcatgctggacatttcaaggatgtatttgcactttaaaaatgtggttgagaagatatgcttgcaaacttgaaacttgctttcatagtctagttaaagagaaaagttgttcactagacacttgttgataaagggaagtcgtattttattcaaaggtattgcaataagggagagagactgaactcaactctgaatacaacaaggacaagggaggatgtttagcaaactagctgaataaggagatcaatggatggaaaaataggcatcaagtggaaaggggcgtttgataaactgacctagaaagattcttgytaagggcagaccaaagatttggatgtcaagggcagaaaaagaaatattttatgataaataaaattgatgggtggttctcaatatgctgatttagcaggctgaagacatgaaggtcttcagggtcaaagcttagtcaaggacaaagatcaaagaaatcaaactaaagtgtggtcaagaaagcagtcttcgtcagtaaacaacagaatcctggccttagcagaaagtctgtttttcctg

SEQ ID NO: 389676 - DNA, 563 bp, Homo sapiens
aaataaagaagtaagtctatttatattcaaacatgatatgaccttgtgtatggaacatcttaagaaatccacttaaaacctattataactaataattagttggacaaagtttcaagatacaagatcaatatacaaaaataaattgaaattctatatgctaaaagtgagcaatccaaaaatgattttaagaaaatatgtaattatatttataatagcactcagaaataatatgatatttaggaataaattcttaaaaggaagtgcaaaacctatgcatgtagcactagaaaacattgttgaaaagaattaaagaagatttaaataaatggaaaaaaattcatgtttgtggattggaagacaatattgttcagatggcagtactcctcaaattratctatagattcaatgtggtccctatcaaaattctggctggatttgttgtataaattgagaagcctatcataaaattcatattgaaacacaggggacttagaacatccaaaacagttgagaaaaataacacatttagaggactcacactttccaatgtcagacattacccg

SEQ ID NO: 389677 - DNA, 572 bp, Homo sapiens
ggaaggctctgtagacagagatccagcctcccccgcaaccagtcatatctgttctgcagtggttctatagcttaatgggagtggggtaatcagtcacctctgaagatggcccaggagcagtcaaaagttccatgaaacccttagaaagacgcaggttggagacagacacctcatctttcaaaaagtcaagcagccagttttccctctggatttgggacagttgttgagttaatgcaagtactggacttgagcttggccatcatattccaacacacacacacacacacacacacacacacacacacrcgcgcgcacacacacacccttcaaacagtagtcacagcagtgcagtgagactctcacattatgagaagcatttgaaaacggaacctgctattaaggaaataacagaccttcatctttatctcctactaattccaggacacagacatttttcctggaattgtggttgaatttcctacactatttagattacctttacatcctcttccttcttcctctcctctcgcttttcttcctccttccctttttcctccccttctttctctctt

SEQ ID NO: 389678 - DNA, 518 bp, Homo sapiens
aataagttctaatgtttgatagcagaataaggtgacaatatttaacaacactatattgcatattttaaaatagctagaaaagaaaacttgaaatgttcccaacacatagaaacaatacatatttgaaatgatggagaccccagatatcctgacttgatcattacatttaacaaaatatcacatgtaccccataaatatgaacacatattatgtctataaaacactaaaaaataatttcccagtaaactaatatcaagcagagccactctgtgattccgatagactaagatgataactagaccactttaaaatcatgtctgaattctcaaaaatataaggatagtaaagaacctacaaaaacaaccaaacatccctttattttcctgaatgatatgagtgaatacagttttttcttaattataggcttacctttgatctggyatttctgccttttagatagacatatgaacatgtccagttgtagaattaaccttgctttcagaaagcattttattcaa

SEQ ID NO: 389679 - DNA, 593 bp, Homo sapiens
actgggtcccctgacccccttcctttactattcaaaccccagatggattattctctcaaaatttatgctacttatttttctctcttcaagggagtgtctcaccttaccactcaagggcaccactccagtgctactgaatctggaacacctaccatgtcttggatttgacctgtggtttatcatctacatttcctgtcattattccctttgcatgctccattttacccatcattctttcttccaaatttctatccatccttcaaagcctgaattccgtgtctgatgtttatttgattagctcagatcagagaaaccccccatttttaaaatgtaacaacaatcagtcccataaagtcttgaactgaagttgtttctatgcacatttgctccatccattggcattctaagacctagaggcakggttcctgtcgaattagctctatgctcctagtgatttgggtagtccctgctccatggtacttactaggtaaatgtttggtgagtgaatgaaggtgtgaaaatggttaaagacatgctgattccatctattaaagatactcaaagtggccactatcctgagtacaagaaagctc

SEQ ID NO: 389680 - DNA, 574 bp, Homo sapiens
catgctaaaccaaaacagtgttttagctccaggtattaatggccacttctggagccataagcaaagctgataatatagctcctaaataaagaactggaatatggytggcaaagaatcaccttcttaatttcttaagaatgttcaactctggcacaaagtggacaaggtgagtatgggtgaatatccttctagagagatgagactagaagactgaggatctacagaaggggatgcccagttattctctctccccctactctcgaaactcactcattaattcatgtatttatcaaaatggcatgtcaataccctgagcagccactcaggacaggactcctgcattgctacaataccgatcccccagcctctcctctgcccctcaacctgccttagctgctgtcattttatctacactggacaggacctgtccatttcctgtcttccttccaattatgtttgtccatgtctggacctggctggttgttccctgcagccccttgctggttaccttactctgacagtgatgcagccagaggcactaaagggttagcccaagggccccagccctgcattt

SEQ ID NO: 389681 - DNA, 568 bp, Homo sapiens
aactcattctccacccagttttgttcccttgctagtaagggtgtgatcctttggaggagatgaggcattctggttttgggaatcttcagcctttttgtgccggtttctccctatcttcatggatttatctacctttgttctttgatgttggtgaccttcaaatggggtttctgagtggatgtcctttttgttgatgttgatgctattcctttctgtttgttatttttccttctaacagtcaggcccttctgctgcaagtttgcaggagtttgckggagtttgctgtggaggtccactctagaccctgtttgccggggtatcaccagcggaggctgcagaacagcaaagattgctgcctgttccttcctctggaagctttgtcccagaggggcacattattttgtgatggaatatgaaatatttctttgcttgaaatatggagcaaacaaattgactaagtctagttcgatgagtttcattttcctaatagtcaggcacattttctaattatgcattgtatttgccagattttaagactagacaggatttcacacaaatggcaaggctg

SEQ ID NO: 389682 - DNA, 558 bp, Homo sapiens
tataaacagtttacataatgtaaaactctaggtaaatgcttatcacacattttggggagcataaatcagcataacttccagatttttttttccgggaaagtcataattcggagcctacttccagatttcaacaaattcaatttacatttcaatttgatatgcacacccaatccctgaatccactatcccattggcccattttgkgattcctaatgggcccaaattgaaggtctcccaaactggaaagttgtcttcccaggtagatgtagtgagcctgacattttcccacttgtgttcaaccccgcttttgcagatgttgaaagagaaaatagttctatctgagtagatcaaatgcccagttttattaaaacattgtagcagctcctaatgaatggaaattcccagaatgaagcctgtctctgatgcattcagccctgtattccaagagctgggttaaataccatgcaggttcaccagccaattgactccttgctccttcctttcaattaataaaggacctcagggagcctcttgttttaagtggtgatcacaaaactc

SEQ ID NO: 389683 - DNA, 573 bp, Homo sapiens
agctttttgtttgtttgtctaaagtaatcgtgaattacacatattgataaacactcttcaaaatactgagagaatcagaaatcagagcacattgtgcctggcatctatgaagaatttcagggcaggggatggggtgcagtggagtgtggagctggccttggaaagctgattgktcgggagaagtggaagaaggagatgagacagcagagcagaagtggcgtacacaaagtctagtataaaaggggaacattgaggaaatcagtttgtgtagagaagcaaggattgtgtgttgagcaagatgagtgtgttggtttcctattgcaaccatataatataccacatatgtagtgacttcaacataagtttattatcttacaatcttggaggtcagatgtctgaaatgggtctccggggctaaaatcaatcaaagtattgggaaggctgtgctccttctggaggccctagaagagcttctgtttccttctactttacagtttacaacacgccatggcttatagcccctttcatctttaaggtcagccactgcattattcaacctcttcttcattcatc

SEQ ID NO: 389684 - DNA, 601 bp, Homo sapiens
ggtaatatgaggattacctgcattttgaatatttgctagaattcatttgtgaaatcatctgtctatagaagtttggatgaatgggagatgttgagatggtagctgtttgacatatttgtttttctggataggaattcatatctttatttagcatatcaatgtggccattgtccagaggagtggattacatattccaacagttgttattacattggtaagaaaaaaagaacttgggaagagagcctgatggcctgcrcttttagaaactccaatctgctttctatagataataaagaaaagatggtaagatgtaaatgtttcaaatactattaaaagcagatttcagtcaatattatatttgtagaagtaatccataggcttgtacatgttaggttatttgttttcaaggctgtgtatttaattgattgacttcataattttttttatttcaataggtttttggggacaccagtggtgtttggttacatgaataagttctttagtggtgatttctgagactttggtgcacacatcaccaaagcagtgtacaccatacccagtgcatagtcttttatccctcacacccctcacaccctttccc

SEQ ID NO: 389685 - DNA, 615 bp, Homo sapiens
acttttatcattatgtaatgttcctctttgtctttttttaactctgttgctttaaagtttgttttttctgatataagaatagctactcctgctctgtttgtgaccatttgcatggaatatatttttccacccctttaccttaagttatgctaagtccttatgtgttatgtgagttccttaaagacagcagctacttggttggtgaatttttatccattctgccattctgtattttttgagtggagcatttaggccatttacattcaatatcartattgatatgtgagatactattctattcattctgctatttgttgcctgaataccttgctttttttcatagttttttgttttatagattctgtgagatttatgctttaaggatgttctattttggtttatttggaggatatgtttcaagatttagaggtgcttttagcagttcatatagtgctggattggtagtagtgaattcttttggcatttttttttttctttttgtctgaaaaagactgtatctttccttcatttatgaagcttagttttgctggatacaatattcttggctcataattattttgtttaagaaggctacagatagggccccaatccctt

SEQ ID NO: 389686 - DNA, 570 bp, Homo sapiens
aagccacatctcattgtctggcatgtaggccaaaggcttggaagcaagcttaggagtttgaatcttggcttcactcacttctggttatgtggctttggtcaagttacctaactttgaaaacctcatctattaaagttttaagtgtggcagataagaatctcaatacacaaatttaaaaattgtctttctcacatccagccttgtttcagttcaagtccccagtcmacctgagtgggggagatttaagtgctgctaatttacaattattcattttctgtagggtgcttggctgattgcagggagatttgcaaagtgctagagttttcagcggagcctccaggaacttttccatgcattgtggaaattgtgctcaccagttctgattctcggtcactaatggtctgtcagaactggcagctgtcgggattaccttacttagggggcacacaaatatttctgctgcttctcatgctttctctgtaggaacatccgtggtccatctgcctagatgtaccaggccagcattccttgtcggcatcacccctgccagggctcagcccaggaagcagg

SEQ ID NO: 389687 - DNA, 614 bp, Homo sapiens
aacatcctatgtgttaccatgaaggaaactgtggcctcaattccactctagcccccagtaagctaggataaactacgtagagggcttcttttacctgagaggcagctataaccaaagtcatctataagtcttcctttctaaagttcacctcttcaaagaggaggaaaggtaattccaaagaaaagcacccaaaacataaaaggaaaggattttgaacaccaaaaacagaactccccttttccacctaccactcargcattttttggttgaggcaattttggggcaaaagttgtcttgaactttgtgtgtaagcacataggacatgagaaagggggaaaagaaagattaaactcaattggttcattgggccttacagctttggatcagaaagaccattagcctcttctgcttcttatttcatccttggccatttaagtccctcctcaagcttgtcccttaggagacctcaggaccatcagaataaccactggccttttggcatataatcctttcaaagagtaatacatcatgttaatttaactatgtaagcaaaataaatagcacaaacctttcaacccagtgattttaccacccaaatctccaaaggacaagcc

SEQ ID NO: 389688 - DNA, 516 bp, Homo sapiens
tttttaatgtacaaaattattacatgtgtgtggctctgtttttgagttttcctctctgtttcatttggccatctctgtattcctataccagtatcctattagtgaggtaattgtagctctttaattccattatgtatgttcatgtgcatatttatatatattatacatatgtattttttttttttgaaacaggatctcactctgttgcctaggctggaatgtggtggcatgatcacagctcactgcagccacarattcctgggctcaagcaatcctcctgcttcagcctcctgagtagctgggactataggcaagcgctactgtgctcaggtaatttttgtatttttgtggagatggggccttgttttgttgcccaggctggcttcaagtgatcctgccaccttggtctcccaaagtgttgggattacaggcatgaaacaccacatctgacctcatttaatatgttatgtgtaagtcctctaaattattcctcacttcaaaatgacattggagttt

SEQ ID NO: 389689 - DNA, 607 bp, Homo sapiens
tgcattctcagagttggagagcagtgtttccagagagtctgaagattaggcatttcctctcatttttcatttttgtcagcttcttcatgttttccttgctaagtaagaaaaggcctcggtttcagtctgtcattgtatgaccctaaatgagtcacttctrtattgggttgtcttaggttcctcaactggcagtgtctagtcttccactcacatgcagcagagcagctccacatttacttatgttactcagagggttacttcacataagactttataaaataagttccattggtaatttctctaaaccagttggactacatcttttcatgtaaacctagatgatctctgatactctggtttttacatgtagattccacgatcccttcctgggaaagtcatgtaaccaactataacataggagcattaaacatttttaggtaatagaattaggaaataatggctgtgtaagtatccatgtgaattcctgtcaatagttctcatatcatgtgcttagaatgatttcaatctgactgaatcttgccaagaaactcatagctctgctttccctgcaaatatgaagatgtgtcaacctcaaagagttggttaa

SEQ ID NO: 389690 - DNA, 460 bp, Homo sapiens
tgcatagttctgattttcttacttagtatttgttgaaattattcagttatattccccaaatatgcttttctgcttagccttctttgtgttgggtttctgttagtggcaatcaagagtcctcattaatatagatatagaaataaatgcaatataaaattactatatttataattttgtatagtttacaaagtaccatcgtatgaattatttcatttaaacttcataataatttttaaaagtggccattagcgtgctccccatttaatacatgaaaaaatggacgttaatcaatttacccaagctgcggtagccagtaggtacctgagtcagagttcaaayatcttattcctattctgaatccagtggcacccattttgtttcagggaaattacaatcaagtacaggagacaagtttagcccgtatataaagttaatataacagtaagatataactaatgag

SEQ ID NO: 389691 - DNA, 460 bp, Homo sapiens
tgcatagttctgattttcttacttagtatttgttgaaattattcagttatattccccaaatatgcttttctgcttagccttctttgtgttgggtttctgttagtggcaatcaagagtcctcattaatatagatatagaaataaatgcaatataaaattactatatttataattttgtatagtttacaaagtaccatcgtatgaattatttcatttaaacttcataataatttttaaaagtggccattagcgtgctccccatttaatacatgaaaaaatggacgttaatcaatttacccaagctgcggtagccagtaggtacctgagtcagagttcaaatatcttattcctrttctgaatccagtggcacccattttgtttcagggaaattacaatcaagtacaggagacaagtttagcccgtatataaagttaatataacagtaagatataactaatgag

SEQ ID NO: 389692 - DNA, 606 bp, Homo sapiens
gtgcacaagggtcagagcatgtacagcacaggtaggctcctggggaaagttggactgacaccgccagcaagccacgagacgtggttcagaccctctgcttgaaggcccctctgttgactgggattcggtgtgatactgctaatagttttataatgtcctaattattattattattttgcaccttgaagtgactttttgaaggtcatattgaagctacaaataggcccccagactccacagattctcctgttgcctaaggactcccaacactgcagatcgagaagaygaggcaaagagagctacactgtgaactacggatgtggtggggaagtggaaaccaagccgacatttggtgtgttgtagcattcccagctctggtttaacacaagcgatgtgttttgctcacaaactggcactgagagctcatttccatttaaataagaggcttgttaatgccagcaggaggacgctgtcaatgccaagcctggctaaggattcctgccaaggagtttctaagagcatcgctctaggaaactcccccagaagagaagcaagcatgccttctcattaagacaactccaccacagtgacatttgcctcagagcg

SEQ ID NO: 389693 - DNA, 600 bp, Homo sapiens
ggcttaccacagtgacatccatagtaggagctcgataaagacttgatgagcaagtgaatgcttctttgaccccaaggccaagaggaccaccacagtgatccaaacgtggacaaaggtttctccaagaaggttgttcctacctttaacttcagtaaacaggtagcccagggtggtgtagaagagtttaaaattcactgagcaggaatgcaggacttctttaatgatccctcaaatatatgtgctgcagttttagaaaatgaaatcagaaagaactggggagaaaagaaagaaaaaaaatgaaaccttgagctgaaataaaacccttcctgtgactctctatctcttagttatcttaattacccatcttctggttttagtcttccctctctaaaaaaaaacaaaagaaggatgaaagggaagagagagagagaagcaaagaaacttgcccgagagagctatgagtttaggcaactgattttgttgtcttctaaagccttctatggcctggmtcccttcccagctcaagttgggaaacagaaaagaaatccaattggtttccattgttaagggtttgggacaaactgctgatagaagctgtgc

SEQ ID NO: 389694 - DNA, 510 bp, Homo sapiens
caaggctgtgtaagttgcaagtagtagagccagtttgaacccaagtctgccttattctaaatctcataatattttcatagtagcacatttcttctgtatgcctcagctttctcatctgtgaagtagttatttttaagaaggaataagatataaagtgcctagcacagacttgatatacagtaggtgctccataaaaatcagctactattatgttgaaggaaaccttttgaatgtattgtgttacaccttagatcttaccattttgattatattactcaagaatgttgcctattatcaatcatcatcctcacactcatcaatctccaccagcactgtctcagctttccccggatgtgtcctctctcggggytacgttccaaacatggaagatctaaacagacaggtagggcaggatgggcactgaacctcctcgttggtgctggaatgctgaggcagacaggtcaggtctgacaagagcagctatggccactcacagatccaggtgcagga

SEQ ID NO: 389695 - DNA, 537 bp, Homo sapiens
gattttgggattaagcttgtttgggtggggctggaaggtagcactcacaagagcaagagtgggaccaggttcagaaggagttgaggttggctttggtcctgtcaggtttgggttgcgatggcaatcttgtttaaaatgtccagaaaaactgggaatgcagaaactggggctcaaamgagaagttaaagctaaaaagagaggtttgactgctccctctaaagaagtatcagttaaagctgtgggcaaggatggacttgtccaagagggagggcggcgaagagaaagcaaacaaagatagtgcctcagggaggaaggcaagatgagctgaagtctgaagtttgagaaccaagtcttgatctcctgatccagttatctgatctcttatgcattcagctgtcccagaaaacaccacagatccttgttctgcctagggagatgagtcctttaaatgcatgctgcattttagccactaactacaatcaccaattcttgcatcaaccactaacagtggctcagagattgccacttgaggctgca

SEQ ID NO: 389696 - DNA, 554 bp, Homo sapiens
ctgtgacatcactgagtgcagacacttagaggccccaacagaaatttggagacctctttagatctttccttctgtgtagtgaaaagaaagcaatttcataagagaacatgacagtgaacatttctattgaaaaccacaaagtttttgcaattttagcagaagtctagttttgaagatcaaatcattgagagagaatgtacacttgtttttttgtcatttactgaaagccagaaaaataggtgaagcttgtcttaattcagatggcaccttggaaaggagatcattctgatatcttcttctcactcctatttttttttttgacttttcaaagagcaacagaacattggagctagaagtagcctctaaagttaagtaacacagctccagtctgctatggaattcttcctacaaacaygcatttccttatatgtaaacctcaagaatctactggaaccagaccattgatccattactttaagatacattactccttccttaagggagttatgtaagctctttctatagaggctatgcctggaaagctgcctccctga

SEQ ID NO: 389697 - DNA, 595 bp, Homo sapiens
tggcatctgcaagaggggaggccgagtgatgggagagaagctggggctgtgtgtttccttgaccccaaataaagcagtgttgcaagtcgaggggggcrgggggattatcattccagtgctaccgatacctcaggtcagagaagtgtctgctggactgctggggagcggcaagcatagtctcctggtgaggagggaggagagggagatggcagctactgaagactgaaagggagggaaggaagtggaagcagagagcgtaacacgctctttgcagaaatgtgaccgtgaaggggaagaaggagccaggcagtaggttgtggggttacaggatcgggctgaatttcagaatgaagagaaccagagatgggccaaatggtttacctggcttttatttcggctctgtaataatcctaaacagtacacagatattttctcctgcctccagcttgctacctgcagatggcgctcatcatctgatccaaaactgctctggacccccgcatgcggaagacgggaggacaagcgccctcagccagacttggtgactgtttctccccagggcctttacatctcatcccaaaccacaactaaaatc

SEQ ID NO: 389698 - DNA, 595 bp, Homo sapiens
tggcatctgcaagaggggaggccgagtgatgggagagaagctggggctgtgtgtttccttgaccccaaataaagcagtgttgcaagtcgaggggggcggggggattatcattccagtgctaccgatacctcaggtcagagaagygtctgctggactgctggggagcggcaagcatagtctcctggtgaggagggaggagagggagatggcagctactgaagactgaaagggagggaaggaagtggaagcagagagcgtaacacgctctttgcagaaatgtgaccgtgaaggggaagaaggagccaggcagtaggttgtggggttacaggatcgggctgaatttcagaatgaagagaaccagagatgggccaaatggtttacctggcttttatttcggctctgtaataatcctaaacagtacacagatattttctcctgcctccagcttgctacctgcagatggcgctcatcatctgatccaaaactgctctggacccccgcatgcggaagacgggaggacaagcgccctcagccagacttggtgactgtttctccccagggcctttacatctcatcccaaaccacaactaaaatc

SEQ ID NO: 389699 - DNA, 635 bp, Homo sapiens
cgttataggtgaacaggagatttggaaagaggagagaagttagggtatatgttatgggaccagaatacccaagttcaaatcctgactatgtcactcactagctgtgtaatcttgggcaagttattggacctttctgtgcttcagtttcgtcatgtgcaaaacagggattatarcaatcaagatgcccataagactgtctgaatgcacttggtaataacctgcgaagctatgcaaatgtaagttaaaattaaaagaaggagaagctaagctgggtgcagtgactcacgcctataatcccagcactttaggaggcaaaggagggagtattgcttgagcccaggagttcaagaccagactgggaaacatggcgaaaccccatctctactaaaaatacaatatattagctgggtatggtggcatgcacctgtactcccagctactctggaggctgaggtggaaggatcacctgagcccggggaggctgatgctgcagtgagccatgatcatgccactgcactccagcctgagagacagtgagaccctgtctcaaatacataataaaatgaaaataaaaaataaaaaggagaagctagagaacataaaagaaagtcagtaaatcacagatggtggaggac

SEQ ID NO: 389700 - DNA, 431 bp, Homo sapiens
cccactcactagctcagaattctcactagttttttaaactcttgtgaaacagacaaccaaggtttaacaaacattgcaggaaaatctctaactcagaatayaaagctttttaaaaaaaactataataagaaagaaaatgccataaaaagggaacatttaggaaacaagcaagaggtcttaaacataataacagaaatggaaaaaaaaagcattggaagataaagttgaggaaatctcagaaagtagagtaaaaaggcaatgaagtggagaatagaaaaccaaatataaaattagaggaccaggccaagttgtccaacatcagaaagagagatcagaaagcagagagaaaaacaaaaatcaaagaaataattcaagaaaacatcctcaaactaaagaacacaagttttcagattagaagtttgtacctagtg

SEQ ID NO: 389701 - DNA, 553 bp, Homo sapiens
tataacaaaaccatactcaggaaaaaagtattccaagtaacttttgagcctagtactcttastatacaccctcaatagtttctattcagtggataaaaagaactacaaggaaatctttatttagtagatttgttgttgataatggtattgggtattggtgtttgtcttagtctattcagttttgctataacaaagtaccatagactggctagctaataaacaatagagatgtatttctcacagttctggagtctgggaagtctaagatcaaggtgccagcagatttcatgtctacagagggcccaaactgctgattcacagatggccatattcttgccatgtcttcctatggcagaaggcagagaggagccctctgggttctcttttataagggcactaatctgacttatgagggcaccacccttatgacctaatcacttcccaaaggcctcaattcctaatgcccatcacattaggagttaggatttaacatatgaatttggggggatacaagcattcagcttataacagagttccaattccaaactatgtt

SEQ ID NO: 389702 - DNA, 299 bp, Homo sapiens
ttccattcttgagtttcttcactttgccagcttgggtgtctctcccgaggccgtcgttctagttatggctcatccagctgackctgcaacttctcttgttctgtagcatttcttctacttctctttctctaccagctgtgtcaaccggctttgcccctccaaagatagaagcagctcgactggactgggaggtactagcagaggaatcatcttccttgggagtactccaaagctttagattcagtttgggtctttgcggggacctctatcatcacacctataatcatcccaagtgtaat

SEQ ID NO: 389703 - DNA, 540 bp, Homo sapiens
aatgactaatatcacacagttgcccttctgagcactccttggtaaaattaatcctaggaaaacatggtattttgttttcataagggccatgagccaagcatgtctcctgtccccctccttccttccttstgtgcgccattctttttctgtttcatttttcctttttggatccctgcttgggcactctaattgcatggcctcagcctcagcctccttgcctctcctctggcccgaatgcttctccaaatctagcgacatgaaagcggaattatgggttgactagatcccgataggtcatcatccataagatgccagtggaaaaggtgcccattctgggagctgcaggtcactggcttcccattgcagaccagggaggcccttgagccagcagatcacctctgggctcttggcccaccaagtagtggtgggcctgtaaggagggaactttgccgactttccctccaaagctcaaatctcccaacccacaatcacttcagaatatcatccttgctcccaatctgagggccactagagactcgg

SEQ ID NO: 389704 - DNA, 540 bp, Homo sapiens
aatgactaatatcacacagttgcccttctgagcactccttggtaaaattaatcctaggaaaacatggtattttgttttcataagggccatgagccaagcatgtctcctgtccccctccttccttccttgtgtgcgccattctttttctgtttcatttttcctttttggatccctgcttgggcactctaattgcatggcctcagcctcagcctccttgcctctcctctggcccgaatgcttctccaaatctagcgacatgaaagcggaattakgggttgactagatcccgataggtcatcatccataagatgccagtggaaaaggtgcccattctgggagctgcaggtcactggcttcccattgcagaccagggaggcccttgagccagcagatcacctctgggctcttggcccaccaagtagtggtgggcctgtaaggagggaactttgccgactttccctccaaagctcaaatctcccaacccacaatcacttcagaatatcatccttgctcccaatctgagggccactagagactcgg

SEQ ID NO: 389705 - DNA, 597 bp, Homo sapiens
ggtcatcatccataagatgccagtggaaaaggtgcccattctgggagctgcaggtcactggcttcccattgcagaccagggaggcccttgagccagcagatcacctctgggctcttggcccaccaagtagtggtgggyctgtaaggagggaactttgccgactttccctccaaagctcaaatctcccaacccacaatcacttcagaatatcatccttgctcccaatctgagggccactagagactcggagaagaggccccggcaggccctcgacaatgggcacctgtggtcgatcgacagcccctccaatgtggccgctgtgacggctctacgttgacattcaggcagtgtgattttaggtagcgcctctgcccctctcccaagtgaccccgggacccctgggaatctccaagaaccacaaggaatctctgtgacttgccacgtttcttaatcagtttccttccccacacaagaataataacaacaggaaaagacagaaaaggatgataagaggatagactcacttccacaacaacaacaacaaacaataacaccaccacaacagggaaagacagaaaacgatcgagggataaagag

SEQ ID NO: 389706 - DNA, 540 bp, Homo sapiens
aatgactaatatcacacagttgcccttctgagcactccttggtaaaattaatcctaggaaaacatggtattttgttttcataagggccatgagccaagcatgtctcctgtccccctccttccttccttgtgtgcgccattctttttctgtttcatttttcctttttggatccctgcttgggcactctaattgcatggcctcagcctcagcctccttgcctctcctctggcccgaatgcttctccaaatctagcgacatgaaagcggaattatgggttgactagatcccgataggtcatcatccataagatgccagtggaaaaggtgcccattctgggagctgcaggtcactggcttcccattgcagaccagggaggcccttgagccagcagatcacctctgggctcttggcccaccaagtagtggtgggcctgtaaggagggaactttgccgactttccctccaaagctcaaatctcccaacccacaatcacttcagaatatcatccttgctsccaatctgagggccactagagactcgg

SEQ ID NO: 389707 - DNA, 584 bp, Homo sapiens
tggctcaacctgcttgtgtgcccactggtggcaggaactcagtaaatgtcagctattttcaccattattaaaattttaaatccacaaatagttctaggagacctatgtgtagggtgctgagccatggaaatgtcacaaaaatgtcacaaaaagccatacaaaaccaaggccaaagatggtatagcgctctgagctgacacctggcagaggctgggttttggagtaagtcagatggtggtttaccttctggctctgctgtgcaccagctgtgtgtggggctcatggaggaatacaccttctctgagtcttggtttcctcatctgtcatagggtagtgatccacccatggcacaggatccaacacgatcatggatttaaagtgcctggcatagagcagaagtctcacagacataatttcttttttagagctgtggaaatgtgttcttcaacgttggargtgggatctggtgggcagtgtttggatcatggggatggatccctcaggaatggcttggtgtccaccccacggtaatgggttcacaagagatctggttgatgaagagtctgggacctcgctcctcttcc

SEQ ID NO: 389708 - DNA, 557 bp, Homo sapiens
tctctggttgcctcttttgccttttttctgtcctctccctgccaggtttggctctgtccatgagtcacctctctccacatttctcctaactctcggtgtcttctttttcttccatttccacgccatgtgtacattgcatcttcaggtacctgggctcttctatcggggaaaggggcgtccgtctctttccctagcccgctgatagaagtcagaactagagcaatgacgcacacggtgtcagagayggtgattcgagatgccctttcaatagcagcttttttctgtgtttcgggagggagacttactttttgatgcaaggtcgtgaacgtggcaccacctttctaatctcaatcattgttgccctggggtggtttaattctaaatagaaaatcatagaaatcttttcatttctgtgcgttactatatgcattgtaatgagattaaattggattttataggaaattttgttctagtatcattagataccttcaagcttagctcattgttgcaggcatttgataggaagtaagatgcatcaagcaaaattggaaaaacgt

SEQ ID NO: 389709 - DNA, 638 bp, Homo sapiens
ctgatgtgcctaaaggtgagactaccaaccatatgcatgagaatcacatgggcactttttaaaagcagattccagagtcatcaccccaaatttctgagggtcaggccagaggaccagggcattgccagctcagcgtctcagctgattcttatcacaatggcatttaggaagtgctgactgatacagaaaaggagactactattcatacagataatgcttcttctttcaaatagctaatgtaaaaattaaatgttttctgtaaagtgcttacataatgcctgacaagtggcacctgtttggyacttattaggcaatgctattcctatactttgagctccctggtgagaacatgtctttctcctctttctattcactgtggcatttcagcatctagtatgcaaacttacagataataggccccaacaaactgaattacaccaaactttgattgattttgaataaggctgaagggaaagctaaaaacaagattgccatttttatgtattaaattggtcaagatttttggcaagtgctgaaagctgaccagagggcagttacaagggcattcttgtacaaaattgatagaatcattcataaagtggcacagactttctggaaagcagttctgcccatttacc

SEQ ID NO: 389710 - DNA, 503 bp, Homo sapiens
ctgacccttgctttgttaacctgagcaatcctaccctaatcaatctatctttgcatatactgttgtctcatgattctttaatttaaaacaattcactactactcatctaccaatataactattgggtactagtactgtaaaatattgcaatgtatttaatattaaagttcatcaatctatatcagtaaactattatttattatgttctgtcttactatttcatgttayttatttgttttttttttaacaaggctagagtcttgcctaggatatgactaatgtgatagcatattttatactctgaaatatagtgtatatgtccaatacatcatatattatttattgcatagttgaagacattgagttatctctaagttattacttcttggaatcaatagaacatatgaggtcactgatacaagcaattagaaaaacattaatattattgaaaacttgaccaaactgaggtgtaatctaaccagtagacaaatggcattatatgt

SEQ ID NO: 389711 - DNA, 515 bp, Homo sapiens
ctttttaaaacttctggtgctatgctgcagctgtttcatttatgttgttttcctgaactcatcgagttgttttctgtgctctcttctagtttgctgagcatccttaaagcaattattttgaattatttgttagacaattcataggtcttaatttctttgaggtcatttactggaaaattattgtgtttctttggcggtattatgtttcctcatttatgtgtttcttgtagacttgtgctgatatctgtgcattttagagagcagtcacattttccatactctacaaaagggttttgatggggaaagatcttcacatatgggtggccatgagggtrctggctgggttggggtatcagagttagttccatctctgggaaaggcacagtgggataatctatttgcagctctttcacttgaagtcagccttggtgaagaccatgggagtcctcagcaaccaagactgtgggtctccacagcagcagcaaggactgttgaagtctttattgagaaagtcg

SEQ ID NO: 389712 - DNA, 550 bp, Homo sapiens
ctgatgcccaggcatatgggaaatgatcattgctctggggtttgaggcatggacaaaccatgctcccaccacatgtgtcaaccatggttctgtggtccaatgtgaggagcacctgttacagcagctatggcactaatgtccaaagtgcagaagtgtggggtagctgtgaagacagagtctgaatcgtaggcacacactaagtgactatgattctgaggttcagtgtgtgcacatggttgtgggtggtggtgggtctgaccccagagtggtacagcagatactgtttctctggaagctacagtagcagctctttgtctggtgtgggggacatgcaatggtgtatactccagaaaattctatcaactgggatcagcatcagcagagactacaagtatccttgcttgaaaaagttgaggatttctgtggtatyggtgagggctactgaggtcctttgattgtccttttttttcttggcgggggaaaattttgccaaggagatccctcttgaggcaaagttatgccagagtaggggatgaggcaagacacttct

SEQ ID NO: 389713 - DNA, 529 bp, Homo sapiens
cacgagggaaaacctatgcaatatatctaatttcaaacatattataatttcctgtaaactgccctccttctcgaggctttggaaagctggtccaccttggaggtccttttcttcttattcattgctgatctcattcatctctgttcatgcgagatttttcatacagtaggactgaaataaagaagatgtgaattaattaggtctcttatkatttctgattatagagcaattagaaggttatatatactgaaaaactgaggttaaccaaatatgcaaaacagggaattaaatgagtagagtggtgtgtgtgtttgtgtattggactattgacacatttaaaatgtagaaatatatgaattgaagttggaaattattgatgatgtatttttttctgaggcaagcatataacagaataccatgtgtggtgtgattttattgtataacatgttactatattacaagtgacacttacggagtgcttcctacttactgggagctattctaaaattgattcgtggtaacttaatac

SEQ ID NO: 389714 - DNA, 584 bp, Homo sapiens
acacagacacaggcttgcatggtttgcatctccaggcagaggctgaaagtgggaggactraggctttcctgtcagacggtgaagatataggcaggagcaaagtaggaaggatggggcttcaaagctgtcagcagtcagacatcaaaacatagagtcagactccttattacccacgtgttacagcaagactgagcctgccagctaagagctggtgtggcagcccggcacagttctatgtgatgcagcttccttctatctttctgctgttctattctcagcatcactcttccttttctagggtcactgtatgatgcacaatggctcctgaaactttagcctttttatccacatcccaggcagctacaaagaggaagaagaaaaagtctaaaaagtggctttccccagctctctgtccctcatttgcaaaacttcctggaagttcctccaaataatgtgggctcacatcttgctgcgtggccatgacttatgagagacggctaggagccacaagggagaatgggaaagacaggcttttagctaagcacagtgccaaccctcgtgatataggagtttggtgagggagg

SEQ ID NO: 389715 - DNA, 584 bp, Homo sapiens
acacagacacaggcttgcatggtttgcatctccaggcagaggctgaaagtgggaggactaaggctttcctrtcagacggtgaagatataggcaggagcaaagtaggaaggatggggcttcaaagctgtcagcagtcagacatcaaaacatagagtcagactccttattacccacgtgttacagcaagactgagcctgccagctaagagctggtgtggcagcccggcacagttctatgtgatgcagcttccttctatctttctgctgttctattctcagcatcactcttccttttctagggtcactgtatgatgcacaatggctcctgaaactttagcctttttatccacatcccaggcagctacaaagaggaagaagaaaaagtctaaaaagtggctttccccagctctctgtccctcatttgcaaaacttcctggaagttcctccaaataatgtgggctcacatcttgctgcgtggccatgacttatgagagacggctaggagccacaagggagaatgggaaagacaggcttttagctaagcacagtgccaaccctcgtgatataggagtttggtgagggagg

SEQ ID NO: 389716 - DNA, 584 bp, Homo sapiens
acacagacacaggcttgcatggtttgcatctccaggcagaggctgaaagtgggaggactaaggctttcctgtcagacggtgaagatataggcaggagcaaagtaggaaggatggggcttcaaagctgtcagcagtcagacatcaaaacatagagtcagactccttattacccacgtgttacagcaagactgagcctgccagctaagagctggygtggcagcccggcacagttctatgtgatgcagcttccttctatctttctgctgttctattctcagcatcactcttccttttctagggtcactgtatgatgcacaatggctcctgaaactttagcctttttatccacatcccaggcagctacaaagaggaagaagaaaaagtctaaaaagtggctttccccagctctctgtccctcatttgcaaaacttcctggaagttcctccaaataatgtgggctcacatcttgctgcgtggccatgacttatgagagacggctaggagccacaagggagaatgggaaagacaggcttttagctaagcacagtgccaaccctcgtgatataggagtttggtgagggagg

SEQ ID NO: 389717 - DNA, 630 bp, Homo sapiens
agccccctgtgattcaaaatcattaagattctacaactgtgctaactattacagcacatttacatgagagagaagtctatgaagaaggaggagatggtggagagataggcaagttggagaaagaaatcaacattcattgagcaataattgttctgtgtctaaagccatgagctaggcatactcggtgcttcattgactcctcccatatgcaatgtggratgccaacatcactattctttcaaatggcagaggtgacactcagagaggctgaggtcacaggccaaccctcaaccagctaagatttcagctgaggaactggaagatagatataagatgagggacatcagatcagccttccaaaataaagaggtaacaagagaggtgttgggggagggtgttctcaagatgtgggaactgccagctgctgaagccatagcagtcccctgttcactctcgctaatacctgtccctaaaaatccatacacagtaggtgtatgtcaacatttataatgctcagagaccgtcagaggtatacaggtttttgtcttgttttgttttggttttgatttttaatgaacagctgggtttattttcttcagaagagattatcaaagcctttctcgaggcctg

SEQ ID NO: 389718 - DNA, 287 bp, Homo sapiens
ataataaatgaaaaacactggcatctctatcaatcactcagaaaataaatgagggttaaaatgtctgccacttcctagataaaaggaaaaattaattaaaacaaaatgcagatcacaaccaaacttccacacgttcctgtgtgcatgccatgagaatcttcactggaacattaaagaaggaggaaaaacaatgtacaactcctgtttaaaacttttcaggctaaatatcataascaaatacacatgtttgtaattcattaagagaaaacaagctagttttaaataat

SEQ ID NO: 389719 - DNA, 553 bp, Homo sapiens
tctctggcttctcaaaatgttaggcatatttgtgttggtactatgctttatctgttgtacaaatgctacatcaaatgtcaatgctcagacagatatgagcatttgctgtaagtggtttgtggccagagracagggtctttgaaacgataacaaatacagatattggtctctgaccccagttcctgacacagagctcttaaaacttgtaattttctgagtgacaggaacatctgacacttctaaatcccttcgaattttctcgttgataggagtgtcttttgttctactgaagcaattggtggtgggctcttggatgggggaatggggaggaagctggtcaccacaaagaccaagccataattagaagcttgggactttcaggtcctcatctactctatcctccaggaaggaaagaggggctagagattgagttactattgttcaatcatgcctacatgaaaaaccgtccataaaaatctctgaactatggggcttacagagcctctgggttggcaacccaattgcatgctgggagggtggtacaacccaactc

SEQ ID NO: 389720 - DNA, 553 bp, Homo sapiens
tctctggcttctcaaaatgttaggcatatttgtgttggtactatgctttatctgttgtacaaatgctacatcaaatgtcaatgctcagacagatatgagcatttgctgtaagtggtttgtggccagagaacagggtctttgaaacgataacaaatacagatattggtctctgaccccagttcctgacacagagctcttaaaacttgtaattttctgagtgacaggaacatctgacacttctaaatcccttcgaattttctcgttgataggagtgtcttttgttctactgaagcaattggtggtgggctcttggatgggggaatggggaggaagctggtcaccacaaagaccaagccataattagaagcttgggactttcaggtcctcatctactctatcctccaggaaggaaagaggggctagagattgagttactattgttcaatcatgcctacatgaaaaaccgtccataaaaatctctgaacyatggggcttacagagcctctgggttggcaacccaattgcatgctgggagggtggtacaacccaactc

SEQ ID NO: 389721 - DNA, 610 bp, Homo sapiens
aaatgttaacatatgcaaatcatgagtcattaagataattcaaagaaatagtcttttcaatgactatgtcttgttttctctcaattatctgtcatttcatrcattttgccttgaataattgcttcaattcttgctaacatgaatatatagagaagtgtgactacaaggtatctctagatgatgttcgccaggagttcaatagtactcaaattatgttaacctaacccagacccttccaatgattgttttgcattcggttaatttattctttgctgtgtctccacttaagtgtaactccctactgcttcattaacaactgcagctgtatcacgacccgagcatgttagcttaatggaagaatctatgaaaaacggaacagtttctggttggcctggaagtgaggtacctctgaaattcattcactcagttgttcactcatgccacgaaaacataagcacaaatgcctcatttttggtatctccaaaagtagaccctgagataaaaaggatgtaagtgcagattgattatttgggagataattccaggaagcacaatgagagagtgaggaaagtgaagaaagcaaatcagggaagggaaaaatgtcaacaaa

SEQ ID NO: 389722 - DNA, 598 bp, Homo sapiens
aaggtgcctgacaaatagtaagacttcggtagttgttacatattaaattcttatttttgttgctattattagcatcttccaagcattcatccacctagttctgatatcagctgcaccctacttttcctctggggaaaacagctcttttccctcttcttgtaattcttgagttttgggtgggccatgtgatggttaatattgagtctcagcttgattgaaggatgcaaagtattgttcctgggtgtgtctgtgagagtgttgtcaaagcagattaacatttgagtcagagaactaggagaccctcaatctggttgggcaccatctaatcagctgccagcrcagctaggacaaaagcaggcagggaaatgtggaaggattagactggctgagtcttctggcctccatctttctcccacgctggatacttcctgcctcaatcactggactccaggattttcagcttttggactcttcgacctacctataccagcggtttgccaggggctctcggatttttggccacagactgaaggctacactgtcggcttccctacttacaaggttttgggacttggactggctcccttgctcctcagct

SEQ ID NO: 389723 - DNA, 598 bp, Homo sapiens
aaggtgcctgacaaatagtaagacttcggtagttgttacatattaaattcttatttttgttgctattattagcatcttccaagcattcatccacctagttctgatatcagctgcaccctacttttcctctggggaaaacagctcttttccctcttcttgtaattcttgagttttgggtgggccatgtgatggttaatattgagtctcagcttgattgaaggatgcaaagtattgttcctgggtgtgtctgtgagagtgttgtcaaagcagattaacatttgagtcagagaactaggagaccctcaatctggttgggcaccatctaatcagctgccagcgcagctaggacaaaagcaggcagggaaatgtggaaggattagactggctgagtcttctggcctccatctttctcccacrctggatacttcctgcctcaatcactggactccaggattttcagcttttggactcttcgacctacctataccagcggtttgccaggggctctcggatttttggccacagactgaaggctacactgtcggcttccctacttacaaggttttgggacttggactggctcccttgctcctcagct

SEQ ID NO: 389724 - DNA, 600 bp, Homo sapiens
ccagtattttaggatttggggagatgaccatatcaataatcaaataatccaaaacattaatcaaagtatatttaatagttattmcaaagcccatgaatatttttgtaacatatcaaagtaaatattattaaataaaagatttttaattacagattttgtcttgcagattgaaattatttaatttgaagcatctcatctgtctctacagagctacatgtaatccagtgttagcattcaattttgttttgttttgttttgtttatttgagatggggtcttgctctgttgcccaggctggagtgcagtggcgcaatctcggctcactgcaagctccgcctcccaggttcacaccattctcctgcctcagcctcccgagtagctgggactacaggcacctgccaccgtggccggctaattttttgcatttttagtagagacggagtttcaccgtggtctcgatctcctcacctcatgatctgcctgcctcggcctcccaaagtgctgggattacaggcgtgactggccagcattcaattttccctagatgtccaatcatttgagatcatcgttcccatttgtatgtaacagtgtaattataatg

SEQ ID NO: 389725 - DNA, 600 bp, Homo sapiens
ccagtattttaggatttggggagatgaccatatcaataatcaaataatccaaaacattaatcaaagtatatttaatagttattccaaagcccatgaatatttttgtaacatatcaaagtaaatattattaaataaaagatttttaattacagattttgtcttgcagattgaaattatttaatttgaagcatctcatctgtctctacagagctacatgtaatccagtgttagcattcaattttgttttgttttgttttgtttatttgagatggggtcttgctctgttgcccaggctggagtgcagtggcgcaatctcggctcactgcaagctcygcctcccaggttcacaccattctcctgcctcagcctcccgagtagctgggactacaggcacctgccaccgtggccggctaattttttgcatttttagtagagacggagtttcaccgtggtctcgatctcctcacctcatgatctgcctgcctcggcctcccaaagtgctgggattacaggcgtgactggccagcattcaattttccctagatgtccaatcatttgagatcatcgttcccatttgtatgtaacagtgtaattataatg

SEQ ID NO: 389726 - DNA, 598 bp, Homo sapiens
aacattaatcaaagtatatttaatagttattccaaagcccatgaatatttttgtaacatatcaaagtaaatattattaaataaaagatttttaattacagattttgtcttgcagattgaaattatttaatttgaagcatctcatctgtctctacagagctacatgtaatccagtgttagcattcaattttgttttgttttgttttgtttatttgagatggggtcttgctctgttgcccaggctggagtgcagtggcgcaatctcggctcactgcaagctccgcctcccaggttcacaccattctcctgcctcagcctcccgagtagctgggactacaggcacctgccaccgtggccggctaattttttgcatttttagtagagacggagtttcaccgtggtctcgatctmctcacctcatgatctgcctgcctcggcctcccaaagtgctgggattacaggcgtgactggccagcattcaattttccctagatgtccaatcatttgagatcatcgttcccatttgtatgtaacagtgtaattataatgactatgtttccaaaatctccttctcattgtctctggacgctccagtcgac

SEQ ID NO: 389727 - DNA, 598 bp, Homo sapiens
aacattaatcaaagtatatttaatagttattccaaagcccatgaatatttttgtaacatatcaaagtaaatattattaaataaaagatttttaattacagattttgtcttgcagattgaaattatttaatttgaagcatctcatctgtctctacagagctacatgtaatccagtgttagcattcaattttgttttgttttgttttgtttatttgagatggggtcttgctctgttgcccaggctggagtgcagtggcgcaatctcggctcactgcaagctccgcctcccaggttcacaccattctcctgcctcagcctcccgagtagctgggactacaggcacctgccaccgtggccggctaattttttgcatttttagtagagacggagtttcaccgtggtctcgatctcctcacctcatgatctgcctgcctcggcctcccaaagtgctgggattacaggsgtgactggccagcattcaattttccctagatgtccaatcatttgagatcatcgttcccatttgtatgtaacagtgtaattataatgactatgtttccaaaatctccttctcattgtctctggacgctccagtcgac

SEQ ID NO: 389728 - DNA, 540 bp, Homo sapiens
agcactattcataatagtaaagatgcggaatcaacctaaatgcccatcagtgacagattggataaagaacatgtgatacatataagccatggaatactatgcagccataaaaagagtgacatcatgtcttttgtagaaacatgaatggagctggaggccataatccttagcaaactaaactaaygcaggaacagaaaactaaatactgcatgttcttacttataagtgggaactaaatgatatgagcttatgaacacaatgaaataacaagcacagggtctacttgagtggggagggtgggaagagaggagcagaaaagatagctattggatactggccttaatacctgggtaatgaaataacatgtacaacaaaccctcatgacagaggtttacctatataacaaatcttcacatgtacccccaaacctaaaataaaagttaaaaaaataaggtgctgtaaacattcatgcacatgcttttgtgtggacacttgcttttaattatttgagaataaaattgatattttaccgtatggtaa

SEQ ID NO: 389729 - DNA, 578 bp, Homo sapiens
taccaagtatgcctgctgattaaaaagcacagtgtttcaatactggtacaccaatgtcatagcagcattattcataatagccaaaaagtggaagcaatcccaatgcccatcaacagatgaatggataaacaatatatctacacatacgatggcatatataatggagtagtattcagctctatataggaatgaagtacgaatacattctacattatggataaaccttgaaaacattttactaagtggaataagccagaaataaaagcacaaatgttacaaatattgtgtgattccaattctctgaggtacctagaataggcaaatccatagagaaagaaactagaatataggctaccaaggctgggagaagggtagcatggggagttattatgtaatggggatggagcttttgtgttggatgacaaaaacattttggagatggatggtagtaatgattgcacarcactgtgaatgtacttaatgacacttcatttgtaaactttaaaaaggggttaattggtacttttacattatatatattttaccacaatataaaagaagaaacaaacaaaaacacc

SEQ ID NO: 389730 - DNA, 577 bp, Homo sapiens
gactctctcaaaaaatcaatcagtcaattaatctaacaatcaaggtgtgttgagaaaattttatgtgactgaggaccaagaaaggctggaggaagttagctgctgttctgtgttataggtcttatgtccaaaagtgtgctagtaaatgtttaacaactggttctwtgttaagtctcgaaatcgacgagacaataaatcacgacctgatttggagtatttgccagtttccatggtgtaaatactctcaccatcactgacttcaagccaccaacgtaacagcactaaatgttgggttgagaagaaatgtgatgtgaactccaccatatagtattcccatcgtgcagataaaataagcataaataaacacagtgcaataatcataaaatctagtaaaaataattaggaaatgagtattgcatatttattatattttttattattatttaattataagtttacattatttaatttgggataatagatgtttttaacaaccaacttgcaaaataccagaaaatttaacagtcagttcttgcaagtttgagcaaaccagcttccagctcactcctgctcaggc

SEQ ID NO: 389731 - DNA, 445 bp, Homo sapiens
tgagtttgatggagaaagaatagtgactctgggctttgcaacatggagattatcaatgacaccctagccttgtgctacatttaatatgctgatttacaccttgaatgagagcatctcaccctttcaggaattagtaatgctgaatattgactttgacaatgttcccctttgtgtggctttcctctctttcacagctgtaatgatacyacaagatactgaatatttgcacctttattttttaaaatgctaccaatggcacattttaaaccaaatttgaaattacttagtataaatgataaaatcaaagaattaaaatttggacttgctttatatcagagttaattattagtttatacagtcaataaccttttttttcagaatatgtttacaggagttttcaaatgtgtagaagaatgattttcttttgaaaattaaccatactttg

SEQ ID NO: 389732 - DNA, 430 bp, Homo sapiens
aatcacgtttcttgcccagcccaaatcttgaaaggctgctttattactttgctttcaatcttttmtttttattttttttttaaccatgatacatatgtggacaaaagcaaaaaccagaataaaaatgtaaagaaaaaaaagaaattctttcccgaacaaaggttttctgaagtgtttcttcagagtgggtttttaaaaaatttctccaaggacaagaggccaacctcacaaaatagcaaataaatacatttttcccctctttgcatagttcctgaccttgaataaatgctgatcctttcagaaaatggatttgctgtggagttgagagggctataatgtgtcagttttacctcgagagccacctggattcttctcagagaagcacaggtcagaattctccttccctctacaagctggagaaggggaaagg

SEQ ID NO: 389733 - DNA, 581 bp, Homo sapiens
ttacctgtttttattttatttgtctgattgttagagtaggtagcacaagctgtgctcataccatgtcatcatgcctagtgggaacacaattccatctctagaagtggaggaaaagattgtgactgcttctgttttgtgatcattgtagttggcacttgccactgactagtcattttggttatacagggacacagaatgaaaaatgttcagtatgactaaatatctgtctagtctcctgtatcaacaattgcctcattytctttaaaattgccatttctggattttatttttattttctatcatttttatccgacatggtttccaaccatccaatggcctttgggttacatttcatggaactcctgggatgctccattgaccacacaccagacgacccttgctttaatgtttttagcactgtgccttcgcagtgtgataaaggaagatacgtttatggcatcttcattacctcaaattgcagcctatttgtcttattttaagtttaaatacaatataataacacaatggatttaaaatgaggaatgaaagctgaccactgacacaagccatagtttgtgacc

SEQ ID NO: 389734 - DNA, 543 bp, Homo sapiens
tatcccaggagcttataacttaaagtataataataattaaaacagaaaaagaagaaatgcagaatctcggcgcctccccaaacccattraattagagtctgcattttaacaagatccgtaggtgatttatatgcgcattagagtttaagaagcactggtcttgaaggcatttttctttttacactttgccttctatttgtcaatttcccaatgcagttatgatggcagtatagcaccacttcccctcacccccctccaaatcaaaatggttttcgaagcagaaatcatttagaccttgaaggagaaagtggggagggggaagaggttgcatttggaactcaatgttggataaccatgatttttaaaaatactacatttgtccatttaaaaattctaaacagccttgtctccagatgtcataattcaaacagatcgctttatctctttacctatattctagagaaatagatgtgtattttaaatgtatgtgtacctggcttccttaatgaaagttttactgaaaaaaaattttgttcctaattc

SEQ ID NO: 389735 - DNA, 445 bp, Homo sapiens
ttatatgtagattcatatgcatgtatgtattcatatttgtatatatttctatatatgtacatgcatgtatacttattcaggtacgtatacatatatgtgtatatatagtatttgcattcacctgcttgtgtatgtttgtgtgcacatatacaggggtgtaaatatgtagatgtatgtgtctctatgccatatagatgctagtgtttttgcattcatgcttgtgtctgcrcttgttatttttcctttttaagtcggaaccttgcagttataaaccaagcataagggatgctgcagaaacataaggagggtgagccatggtgttcagaggaaagaactggcttccttctcctgagcaagactgaagagcgagccagggggaggaagccttggcacattctacctcagagcctttggcttccctaagactgaagttgcttagatgatc

SEQ ID NO: 389736 - DNA, 530 bp, Homo sapiens
gttttctcaaagtgtggtctgcctgaagacctattaaaatacaaatgtctgagccccaggatcaactgactcaaccaaatgggtcccacaaatctgcattttaacttacaccccagataatttttaaataccttggatttaattttctaggtgatttttttttttttgagacagagtctcactctgtcacccaggctggagtgcagtggcaaaatctcagctcaccacaacctcagcctcctgagttctagcaattctcctgcctctacctcccgagtagctgggactacaggtgcacaccacaatgccaggctgattattttatttttagtagagasggggtttcaccatcttggccaggctggtctcgaactcctgtcctcatgatctgcccgcctcggcctcccaaagagttgggattacaggcatgaaccaccacgcccagcctaggtgattcttaaacaaaaatcataaatcaaggaacgctgaaatatcctggagacccaagaaaataagacatagcagggaag

SEQ ID NO: 389737 - DNA, 547 bp, Homo sapiens
ctgcaagctttgagtaagtctcataactgcaatggtttatattgtttttcatgcctacatagcatgagaaatttattacaagctaacagcatcttatattttcttagtacttattgtctcttgactagacttcataggaattaattttaaaagagctttctttgagaaagatgtcaagtgatttattcaaattccctgtccatgtgctctatactaccttaaatttacaaaagtttcaaatgtagagaaaaccacatttaaaatttgacagggaaaacagcaaaatgatatttgacgaagttttatcatgacattaattcatggatgatttctcaaatactgataatgggtcacagaggggactrtaagatttgggaaattatgactcctgccctcaaggaagttaccaaagagcaggttctaataacaaggactcacatttataagaacacagagtgagctccaggcatgggaatgcccttggtctcccttaaacctcacggcagatattatatcctgtgcaaagactgaggctcagagaggctaa

SEQ ID NO: 389738 - DNA, 620 bp, Homo sapiens
tctcttgggcctaatcctcaggagtgctatttggagatatttggtccaaggcattttagtttctaagattagtttggtgatacgctttttgagagtttgtttcattctttctacctttccagagaaggaggatgccaaggggcataataatcccatttaatttgtaaaccttccataatttcccttaacacccttaaggtaaagtggctcccattgtctgaatcaatattttccaccaggccaaatctaggtacaatctgttctaatattattttgaccacatttctggcagtggctgttggaaggggaaagtcttccacccagccagaaaggagatctaygatcaccagtaaatactttagtcttccaactttgggcatttctgtgaaatctacttgaatgctttgaaatcgtcttagtccaggaggtcttcctcccatggcctgttttctaatcacctttttcttcatcttttgacaagttacacaagttccatatgcttatttagtgagggtataaattcctatacacacataatttctaagtattgcattacacagaggctggggtccccagtgactccctttgtataatatagacattagttctttcatcagggg

SEQ ID NO: 389739 - DNA, 579 bp, Homo sapiens
tattttctctttaactggtttacaagtcatcaatgaagagacaccactatgtaaaattcatttatctgaatccaatagtattttcagtttgccatacattcccaataaaacataatcatccctagtatagaaaacgttgtcaccaaacaaactcaaatttctatggaggactagtggagtgrgttagtactaccaggggctccctcaaactgaagaccacaaatggcatgtaaagggagaaactaatatttcgcacaggcagattgtcgcattagagcatgtgaacagattgccaggcagtgtaggctaggttaagctacggtgacaatctcaaagttttagtggcttataaaaataaaggtttattatttacttacatgtcctttgtaggtcatcaagatacttttgttcatcacagtcactcaaggacctgctgcagaaaagacttaatcttgacccagtctttcctaagtactaaggcagggggaaatggacacaggcatgggaaagtaaatatgacaacacaggcactagttcttaatatttctcccccaaagtgacacacattacttacagtta

SEQ ID NO: 389740 - DNA, 579 bp, Homo sapiens
tattttctctttaactggtttacaagtcatcaatgaagagacaccactatgtaaaattcatttatctgaatccaatagtattttcagtttgccatacattcccaataaaacataatcatccctagtatagaaaacgttgtcaccaaacaaactcaaatttctatggaggactagtggagtgagttagtactaccaggggctccctcaaactgaagaccacaaatggcatgtaaagggagaaactaatatttcgcacaggcagattgtcgcattagagcatgtgaacagattgccaggcagtgtaggctaggttaagctacggtgacaatctcaaagttttagtggcttayaaaaataaaggtttattatttacttacatgtcctttgtaggtcatcaagatacttttgttcatcacagtcactcaaggacctgctgcagaaaagacttaatcttgacccagtctttcctaagtactaaggcagggggaaatggacacaggcatgggaaagtaaatatgacaacacaggcactagttcttaatatttctcccccaaagtgacacacattacttacagtta

SEQ ID NO: 389741 - DNA, 399 bp, Homo sapiens
atttctagtttgtatgcattcaggtgttcatactagtctctgggtttttttttttttcaatgtatttcctgtggggccagtgatttctgattgtgtttatatgtatcttctttccttttttaaattaractagctaattgtatataaatcttatttattctttcaaaaaaccaaattttggttttgtttatattttgggtggattttttgcatcttaattgcatttagttcatctctagttatttattttcttctgctaccttcatagttggtttgctcttgtttttctagttcctctaggtgtgatgttaggttgttagtttgaaatctttctaatttgttgatgtgggtattgagtgctataaactttcctcttaataaacttaagtttattattat

SEQ ID NO: 389742 - DNA, 399 bp, Homo sapiens
atttctagtttgtatgcattcaggtgttcatactagtctctgggtttttttttttttcaatgtatttcctgtggggccagtgatttctgattgtgtttatatgtatcttctttccttttttaaattaaactagctaattgtatataaatcttatttattctttcaaaaaaccaaattttggttttgtttatattttgkgtggattttttgcatcttaattgcatttagttcatctctagttatttattttcttctgctaccttcatagttggtttgctcttgtttttctagttcctctaggtgtgatgttaggttgttagtttgaaatctttctaatttgttgatgtgggtattgagtgctataaactttcctcttaataaacttaagtttattattat

SEQ ID NO: 389743 - DNA, 328 bp, Homo sapiens
tgcatttagttcatctctagttatttattttcttctgctaccttcatagttggtttgctcttgtttttctagttcctctaggtgtgatgttaggttgttagtttgaratctttctaatttgttgatgtgggtattgagtgctataaactttcctcttaataaacttaagtttattattattaactgcttaataaagcagttaactgttttaactgtgtcccaaagattctgatctttgtttttattagtttcaaaaaatttcttgatttatactgtaattttattatttacccaaaagtcattcatgacccagttgtttaatttttat

SEQ ID NO: 389744 - DNA, 581 bp, Homo sapiens
caaatttgataggacttattttgtcactgaacatatggtctgtcttggagaatgtttcattgtactgctaagaaaaatctgtattctgtagctattgtgatattatcttgctatattgatctctttataattgtgtaatggaattctttttcttttctttttaccattcttgacttaaagtctcttttttctaagtatagctatgcctgattattttggtttgaatttgcatgcaatatctttttacatctctacactttcagcttatgcatatctttattggtgttacgagtttcttgaatacagcattaatttggtctttcactttcattcagtcactctgtctgttaattggaaaatttaatccaagcaaactttggtttagaatcaaggttgttattgataagtaagggtgtactacygctactgtgttacttgttttttaaatcctttcttttatttttctctcttactaccttccttggtgttaagcaatgttatctagtcatatgttttgatttcatgttatttattttaagtgtatctgttagaagtttttgatttgtggttacacaaggctt

SEQ ID NO: 389745 - DNA, 414 bp, Homo sapiens
  misc_feature (1)...(414): n = A,T,C or G
nnnnttcgtttgagatgaggtctcactctgttgtccaggctggagcacagtggcatgattatggctcatggcagtcctgaattactgggctgggattacaagcatgagctgccacacccagctcaaattctttaaacattggaattatgtcaagtatctgttctgaccacaatggaataaaaccaaaaatcaataacagaaggaatgttggaaactgtacaaattcataaagrttaaataacatgctcctgaacaataaatgtgtcaataaataaattaaaaatgaaatataaaattctttgagacaaatgaaagtggaaatacaacatatcaatacctatgggatagagcaaaagtgattctaagaggaaagtttatagcaaacagaaacctatatcaaaaaagtagaaagac

SEQ ID NO: 389746 - DNA, 414 bp, Homo sapiens
  misc_feature (1)...(414): n = A,T,C or G
nnnnttcgtttgagatgaggtctcactctgttgtccaggctggagcacagtggcatgattatggctcatggcagtcctgaattactgggctgggattacaagcatgagctgccacacccagctcaaattctttaaacattggaattatgtcaagtatctgttctgaccacaatggaataaaaccaaaaatcaataacagaaggaatgttggaaactgtacaaattcataaagattaaataacatgctcctgaacaataaatgtgtcaataaataaattaaaaatgaaatataaaattctttgagacaaatgaaagtggaaatacaacatatcaawacctatgggatagagcaaaagtgattctaagaggaaagtttatagcaaacagaaacctatatcaaaaaagtagaaagac

SEQ ID NO: 389747 - DNA, 582 bp, Homo sapiens
cttcacccatgagctgatgaaatccattatatagtattttcattttgaatatttcttgttttctgaaggtctgaataaatcttaaattgagtaaatcaggaggtactaagcttcatggtggttaagaaaagagggaagaagtatttaagtctacaaaatgtatgtgtttaaaataattataaatgatattttatagagaataatttgaagaaaatataaygatcttatcactaaattcataaaagtataaattgtggattatgtttttatatttttgatgactttgaatacccaagaatagagaaataaagtccttgctttcagaaataggtgtagcatgatgcttttcagattaagaaaagtagtataatatttctgcctctcccttagttctgttgtgcctatatctcatacttctggctgtgttaatatccatgggttggacatgctactttactgtcagtcctatatatccccaagatattgtgttaacatttaaggacctgcaataggtacacaacttaacgactgaaacatttgtagttttatttatatagtctatctcaattaaatccaaaaaag

SEQ ID NO: 389748 - DNA, 582 bp, Homo sapiens
cttcacccatgagctgatgaaatccattatatagtattttcattttgaatatttcttgttttctgaaggtctgaataaatcttaaattgagtaaatcaggaggtactaagcttcatggtggttaagaaaagagggaagaagtatttaagtctacaaaatgtatgtgtttaaaataattataaatgatattttatagagaataatttgaagaaaatataatgatcttatcactaaattcataaaagtataaattgtggattatgtttttatatttttgatgactttgaatacccaagaatagagaaataaagtccttgctttcagaaataggtgtagcatgatgcttttcagattaagaaaagtagtataatatttctgcctctcccttagttctgttgtgcctatatctcatacttctggctgtgttaatatccatgggttggacatgctactttactgtcagtcctatatatccccaagatattgtgttaacatttaaggacctgcaataggtacacaacttaaygactgaaacatttgtagttttatttatatagtctatctcaattaaatccaaaaaag

SEQ ID NO: 389749 - DNA, 590 bp, Homo sapiens
aagcccaaatcggttaagtaaattgtacaaatttaagtaggtgtcatatctagaatttaaactctggttggctgctccaaaaccgcttttctttttactatggtaaaagatgttcctagaatgatgcaggttatataagagtaaccagcttgtaatgcagcacatctccattgaaattctggcacagtcaagtgtaataccttctcaggcacttaatcgttttcagccactctttctttctctgtagaaaggtgtgggttgtggggccaggcacggtggctcacacctgtaatcccagcactttgggaggccaaggcgggtggatcacaaagtcaggagttcgagaccagcctgaccaatatgatgaaacccygtctctactaaaaatacaaaaataagccaggtgtggtgacgtgtgcctgtagtcccagctactcgggagactgaggcaggagaatcgcttgaacccgggaggcggaggttgcagtgagctgagatcgtgccactgcactccagcctgggtgacagagtaagactctgtctcaaaagaaacaaaaaacaaaaaacagaaaggtgtgggttgtgatgag

SEQ ID NO: 389750 - DNA, 548 bp, Homo sapiens
agcagttacaaattgtcctgaaacagatgaaaaatagcaaaacagaaatagaatttagttaaaggaaacaaatcgaaatgatagatctgaaaaataacgtaagataaatttttaaagcttgctagattggctcagtagtagaatggagatggcagagaatagaatcgttaagttccaatctgaatactgatttacagataggaagcagttattccaatctgaataacggagagaaaatagactgaaaaaaacatatgaatagagtctcaaggacctgtagaataataaaccatccaacatttatgwcattagagaggtaggttgaaagagcattaaaaaataatgatgtttaaaactttccaaatctggcaaaatatataagcccacagattcaaaacactgacatgtgtttacatggaaaatcccaagaaatctacaaaccaaataaacaaaacttctaaaactagtaaatgaggttagccaggccacatgacacatatcaaggcatgaaaatcaatagcatttctactaacaatgagcaggtagaa

SEQ ID NO: 389751 - DNA, 548 bp, Homo sapiens
agcagttacaaattgtcctgaaacagatgaaaaatagcaaaacagaaatagaatttagttaaaggaaacaaatcgaaatgatagatctgaaaaataacgtaagataaatttttaaagcttgctagattggctcagtagtagaatggagatggcagagaatagaatcgttaagttccaatctgaatactgatttacagataggaagcagttattccaatctgaataacggagagaaaatagactgaaaaaaacatatgaatagagtctcaaggacctgtagaataataaaccatccaacatttatgacattagaraggtaggttgaaagagcattaaaaaataatgatgtttaaaactttccaaatctggcaaaatatataagcccacagattcaaaacactgacatgtgtttacatggaaaatcccaagaaatctacaaaccaaataaacaaaacttctaaaactagtaaatgaggttagccaggccacatgacacatatcaaggcatgaaaatcaatagcatttctactaacaatgagcaggtagaa

SEQ ID NO: 389752 - DNA, 580 bp, Homo sapiens
gaggctgggcatgattgctcatgtctgtaatcccagcactttgagaggccgaggtaggaggatcacttgaggccaggagttcaacaccagcctgggcaacacagtgagaccttatctttattttcaaaaagaaaaagttatatattgaattcaaccactatatcttagccactatgctaagaactggggttttatagttaccaacatagatgtcatctttactatagtttatagggaagataaacacatacatatacctacaaagctgattgtacataccatgtgagaatgatgatagggagagccactggtgaacccatagaaatattatttaacccaatgagatgaaggaaagatagtgtatttattagtccgttttcacacggctgataaagacatactgagactgggcaatttataaaagaaaggggtttaaytggactcacagttccaggtggctgggaaggtctcacaatcacagcggaaggcaagcaggaacaagccacatcttacgtggatggtggcaggctaaaaaaagagtgtgcttgtgcagggacactccaccttataaagttataaa

SEQ ID NO: 389753 - DNA, 567 bp, Homo sapiens
tgacagacatcaagtacttaacagggtaatagaatatcacaaggcaagtggaggcagggcgagatcacaagaccacaggaccaaggtgaaattaaaattgctaatgaacwttcgggcaccattgtcattgataacatcttatcaggagacagggttttgagatcaactggtctgaccaaaatttattaggtgggaatttcctcttcctaataagcctgggagcgctatgggagactggagtctatttcatctctgcagcctcgaccataagagacaggcgcacctaggggggctgtttataagcctatacctccaggcacgtattctcttcctcaaggatgttccatgctgagaaaaagaattcagcgatatttctcccatttgcttttgaaagaagagaaatatggctctgttctgcccggctcactggcagtcagagtttaaggttatctctcttgtttcctaaacattgctgttatcttgttcttttttcaaggtgcccacatttcatattgctcaaacacacatgctgtacaatttgtgcagttaatgcaattattacagggt

SEQ ID NO: 389754 - DNA, 603 bp, Homo sapiens
actgaacactaatattaccttctctgaaccttttctggaaactggtgatctaccataccctatatctttgtctacatgttactacaaaagcatttatgcttttacaagatgatcaycttttctatacacagtcaattggttcatgggttcagggactattttctgtgatgtgaaatccaaagcagaaaacagcctttaattaatgaacaaacaacaacaataaaaaatgtaatatataaaggtaagagatggagagagataattaacttggttgttgccaaatactagagctggacccagtcctttgtttttgagccccatgctgtagcaattaaaccagaatctctcagtatggaactcacacactagtatttttcaaaatcttgccacattagtctccaggacagccagttttgagaaccatgtttctagatagttgctgagccccaagtgcatttgcaatgtggggcttgaaagacaatttcagtatctatccattaaattactctgggttaatgtagtttgtctgccagaattttagaacacatcatgagtgtcacccagagacatggcaaagcaaatcatattttaaaaaagcagaaa

SEQ ID NO: 389755 - DNA, 603 bp, Homo sapiens
actgaacactaatattaccttctctgaaccttttctggaaactggtgatctaccataccctatatctttgtctacatgttactacaaaagcatttatgcttttacaagatgatcatcttttctayacacagtcaattggttcatgggttcagggactattttctgtgatgtgaaatccaaagcagaaaacagcctttaattaatgaacaaacaacaacaataaaaaatgtaatatataaaggtaagagatggagagagataattaacttggttgttgccaaatactagagctggacccagtcctttgtttttgagccccatgctgtagcaattaaaccagaatctctcagtatggaactcacacactagtatttttcaaaatcttgccacattagtctccaggacagccagttttgagaaccatgtttctagatagttgctgagccccaagtgcatttgcaatgtggggcttgaaagacaatttcagtatctatccattaaattactctgggttaatgtagtttgtctgccagaattttagaacacatcatgagtgtcacccagagacatggcaaagcaaatcatattttaaaaaagcagaaa

SEQ ID NO: 389756 - DNA, 567 bp, Homo sapiens
tgacagacatcaagtacttaacagggtaatagaatatcacaaggcaagtggaggcagggcgagatcacaagaccacaggaccaaggtgaaattaaaattgctaatgaactttcgggcaccattgtcattgataacatcttatcaggagacagsgttttgagatcaactggtctgaccaaaatttattaggtgggaatttcctcttcctaataagcctgggagcgctatgggagactggagtctatttcatctctgcagcctcgaccataagagacaggcgcacctaggggggctgtttataagcctatacctccaggcacgtattctcttcctcaaggatgttccatgctgagaaaaagaattcagcgatatttctcccatttgcttttgaaagaagagaaatatggctctgttctgcccggctcactggcagtcagagtttaaggttatctctcttgtttcctaaacattgctgttatcttgttcttttttcaaggtgcccacatttcatattgctcaaacacacatgctgtacaatttgtgcagttaatgcaattattacagggt

SEQ ID NO: 389757 - DNA, 567 bp, Homo sapiens
tgacagacatcaagtacttaacagggtaatagaatatcacaaggcaagtggaggcagggcgagatcacaagaccacaggaccaaggtgaaattaaaattgctaatgaactttcgggcaccattgtcattgataacatcttatcaggagacagggttttgagatcaactggtctgaccaaaatttattaggtgggaatttcctcttcctaataagcctgggagcgctatgggagactggagtctatttcatctctgcagcctcgaccataagagacaggcgcacctaggggggctgtttataagcctatacctccaggcacgtattctcttcctcaaggatgttccatgctgagaaaaagaattcagcgatatttctcccatttgcttttgaaagaagagaaatatggctctgttctgcccggctcactggcagtcagagtttaaggttatctctcttgtttcctaaacatwgctgttatcttgttcttttttcaaggtgcccacatttcatattgctcaaacacacatgctgtacaatttgtgcagttaatgcaattattacagggt

SEQ ID NO: 389758 - DNA, 521 bp, Homo sapiens
aatttctaagcagcaaagcattcaagatgtggtctggctgtttctaacagtttaccatcaggtactggagcaaagaagtgatttaaagttggaacttaaatataaaagggaagcaaagtttaaacatttggaaaattcagaacctggccatgtggctaaaaagggaaacgcattttcaagagagaaatatatgcaggttgcagagcagcaacttgttagagagattagcatgactaaaagggaaccaagtgctaatatccaagacaatgaggaaaagwtctagcaggcatttgagaaatctctatggtagaccctcccatcaaaggttcagaggcccaggcagaaaaaattgtttagtggagcaggctcatggccctgctgccctgtgcaacctctggacattgttccccaaatcctggcctctccagctgctagagttcaaagagcctctggcatagcttgagccattgctttggaggggataagccataagtcttggcagcatccatgtggtgttaagt

SEQ ID NO: 389759 - DNA, 590 bp, Homo sapiens
ttgttgaacaaagttcattttacagtaccaaggtcaaataaattacttgaatgctatctgttaaaatacagaaataatttgatttgtgactttttgtcttctccaggataagggaagagaaatgaagagaagttgtgaaattgaattgagctaaatatcgttagagattctggaacgggattctatgaaggtgrtgactgcacagtagctcccttccctccattacctacttatttgtgtcagtgtctcctccctgtgttcctaagaactctttcctgaaattcttaggcccactgttgcctgtgtgtatgtgagatgttggtttggacaacaaatgcagagccatgtatcatttgggcttgatcatctttgtaagccaggacttgcatagcacagataacaagaacttgaccttcatgcccctctgtctaggagagtcctagtagatttgggtgttaaaaatcttcctccaactgcctcagaaggagacaggtgactcccctgcttttattctacagtcctctcagaatacctaccaatgtcttataatgacccgcacagtttggcagttcagacctcatctctcattc

SEQ ID NO: 389760 - DNA, 580 bp, Homo sapiens
ttatctgtatttcatcctgcttcttccatggggatctctcaattgactgaaacccctcttctcaaactcctgctaacaatatgctctaccaactgtatacatctttttttttattatactttaagttttagggtacatgtgcacaacatgcaggtttgttacatatatacatctctttcttatcatcatgatcctgactatgctccaaaactcttgaaaaacaaaaaaatagaaagcaaaacaaaaactgtgttgtcatttattcttgaaaacaaagaaatgaacaaaaaggatgaaccaatctctaactttaagamaagattataatattcatgcagagttcgggcacataaaatgctgtatagactaagcaaccctaatccaaaagtccaaaatctgaaatgctcaaaaatccaaaactttcagcaccaacatgatgtcacaagtgaaagatgatgaggacactgttaaaactgcaaagtgcctatagatgacatggtgaaaatatgtgatgggtttactgaaggactctaagagcattcattcatcacagaataagaaattgtgtcagtctgtaaaa

SEQ ID NO: 389761 - DNA, 580 bp, Homo sapiens
ttatctgtatttcatcctgcttcttccatggggatctctcaattgactgaaacccctcttctcaaactcctgctaacaatatgctctaccaactgtatacatctttttttttattatactttaagttttagggtacatgtgcacaacatgcaggtttgttacatatatacatctctttcttatcatcatgatcctgactatgctccaaaactcttgaaaaacaaaaaaatagaaagcaaaacaaaaactgtgttgtcatttattcttgaaaacaaagaaatgaacaaaaaggatgaaccaatctctaactttaagaaaagattataatattcatgcagagttcgggcacataaaatgctgtatagactaagcawccctaatccaaaagtccaaaatctgaaatgctcaaaaatccaaaactttcagcaccaacatgatgtcacaagtgaaagatgatgaggacactgttaaaactgcaaagtgcctatagatgacatggtgaaaatatgtgatgggtttactgaaggactctaagagcattcattcatcacagaataagaaattgtgtcagtctgtaaaa

SEQ ID NO: 389762 - DNA, 580 bp, Homo sapiens
ttatctgtatttcatcctgcttcttccatggggatctctcaattgactgaaacccctcttctcaaactcctgctaacaatatgctctaccaactgtatacatctttttttttattatactttaagttttagggtacatgtgcacaacatgcaggtttgttacatatatacatctctttcttatcatcatgatcctgactatgctccaaaactcttgaaaaacaaaaaaatagaaagcaaaacaaaaactgtgttgtcatttattcttgaaaacaaagaaatgaacaaaaaggatgaaccaatctctaactttaagaaaagattataatattcatgcagagttcgggcacataaaatgctgtatagactaagcaaccctaatccaaaagtccaaaatctgaaatgctcaaaaatccaaaactttcagcaccaacatgatgtcacaagtgaaagatgatgaggacactgttaaaactgcaaagtgcctataratgacatggtgaaaatatgtgatgggtttactgaaggactctaagagcattcattcatcacagaataagaaattgtgtcagtctgtaaaa

SEQ ID NO: 389763 - DNA, 393 bp, Homo sapiens
tttcaacttgttgtttcattttgtgttttaactttatgttttggacatatttccaagttagaacatttagagctacaatgttttaaactgtatattattccacctttgaatataccatacattatgtaaccaattcccaatcaatggctacagagctgtatccatgttttctacattgtaaacaatcctactttaaacatctttgacagagatttttatttgtacacttgggagcatgttttgctggataaattccagttaagtaaatgaacatttgtaaatctgaacagctttaaccctaaaacagcttcaccaattcacatttccactaaaagtttgtaaaattatattttcctcaytgcattttcaacaacacctaaagttatcagactt

SEQ ID NO: 389764 - DNA, 543 bp, Homo sapiens
catacacacactatatatacatccagaagcctggtctttgtcttattcccacagtgtcctcctcttttggctgccaataactcccttaaagacagtagatcatatattgttattaaatcatattctgcaggatatttactttgaattcaaagaccaaaaggtaaattaaaaatccagaacaataaatctgtaagggtgaaatgacaagtaaatgctcttattttatgttagaacatcatctctttcctttcccaccttcaatttaaaccaaatctgcttctaagcccagccaaattgcaaacactagtaaggaaatgaaattartacattagaacctaaaaagcctccagcaatttcaatgggcagactgtcagcttattaactgagttctcattttatttcttgaagtttaatttactagacttaaaaacctttagttataaaaatgaggaaacttcacaggtacctgcagccttaaagcatgcacatgatgtgtctacgaggtatctttgaagagaaaattagattttaaaataaaagcat

SEQ ID NO: 389765 - DNA, 650 bp, Homo sapiens
agttttctcaaggtcttgttctttttgcctgcacaatagagataagatcttttatacactgcaacgtttggctgcatcaaattcgataataagcgagaaaatactttgtaaaattaaagctgtctgcaagctgggtgtgtagatagctgttttcttaaaatgtacatttatctttcttctgccctatgattcctcatctctgcctgccaccctctgcccccaccatgtgcataatggaattctgtcagaattgttagactaaggtgatttccatccagagagcagctcaaagtcagctccctatggtaaacactgtgggtatgaaatgctgtcagtcctatggagtgaatgtctgaatcatgacagctcatacttcttaactgcttcaatctctgactttctggctaagaattacctctccactggccacagcctatatgaaggaaattgctcttgtgtagttgttcagaattaggcagcagaaaagcaaatatcactaccctgcttaggtaagccataaaatgggatttagcccttcaacctattgtaaaattagaagacmaataaaacagagatcacaggatgcatttcacagaagtaaaagataatggaacatatggtaaactgaacaaatagtggatggcaacagt

SEQ ID NO: 389766 - DNA, 532 bp, Homo sapiens
ttagtcggtcagggaggtgaatttgagactgagctcccatctgctcagctgcagcacccgattgaagccttcttccctggcaatactcatctcagtgattggctttctgtgcagcaagcagcaggacctagaccaaacccctggtgttttggtaacattctgaggagccatgggcatccccaagtgtgcctcctgtcagcctcaaacaggcagggaggagagcagaaaggtgtcaaggtggcagcactgccagccttgctgccgtgtgagctcagcccctcttctgtttggcccactctgagttctcacaggacaggattttggggtagatccagtttggaagcatctcgcccctcttccagccttttcccaatggtgtgtctgtattattctgctagagctgccataactaagaacagttgtccttcagtatcctggaggattaactgcaggacccccccggcaaataccasatctgtggaaggctcaggtccctgataaaaaatggtgtagtatttgcatataacctgca

SEQ ID NO: 389767 - DNA, 521 bp, Homo sapiens
ccacccacttggaaggcctgcaagattgcagtgccctctgcccctggagttaagggaggtggtaggaagtaagaggcaggttaggcacagcrataaggatagaaggagaggtgagtcttttctgggtaacaactttcaattttcactgtgtagcttgaaaactctcaggggtcattctacctctggcaaatgtacaaattcacagactctcaaggtgctcattactgtaaaaccttctaaatcgcaactttgaagctaaagggcgtatggaattttccagagtgaagatcttttggagcagagcatgttccaaaacatctctaggagtgctttaaagggagaaaaaagacaaatgttctttttcagtcctgacgagccatctgtggtctgaagtgatttacatctgactttttttcaagtttgtaaatttttgcactggcttgacagtctcttgttcttgtcacccctggattcccttaacataggctgactggcatgctgaaaggaaagtgctccttctt

SEQ ID NO: 389768 - DNA, 521 bp, Homo sapiens
ccacccacttggaaggcctgcaagattgcagtgccctctgcccctggagttaagggaggtggtaggaagtaagaggcaggttaggcacagcaataaggatagaaggagaggtgagtcttttctgggtaacaactttcaattttcactgtgtagcttgaaaactctcaggggtcattctacctctggcaaatgtacaaattcacagactctcaaggtgctcattactgtaaaaccttctaaatcgcaactttgaagctaaagggcgtatggaattttccagagtgaagatcttttggagcagagcatgttccaaaacatctctaggagtgctttaaagggagaaaaaagacaaatgttctttttcagtcctgacgagccatctgyggtctgaagtgatttacatctgactttttttcaagtttgtaaatttttgcactggcttgacagtctcttgttcttgtcacccctggattcccttaacataggctgactggcatgctgaaaggaaagtgctccttctt

SEQ ID NO: 389769 - DNA, 584 bp, Homo sapiens
aagttgctaaagacaaggacattttgtttgtttcctgtatcctcagaaaacatgccaatggagtgaagactccatgaagaaataaaataaaagggtgagctttaagacattagtatgttaaggaaaggattgccagagtgtgcaggaaggctccactgacggggggaagctgacctagtcacaaagggtggggagcagtgagacagacagctgtaaatggggcaagcactcaggtaaggaggatggggtgacttgtctataaaggcaacactgaaactggcctactttccccatagaacagatgtttatggtatttttkaataaacatagaaattgaccatcccagtctcaaagcttgaaacttacatttgtcatatccaagttcctttcttaggaaacgaaccatcatgtctctcagattgtatcaaggagctgaaactcaccagaccccacagcaagtggacaatgacatgccagacccttcacctatcatgatgaaaggtagaggctttgttcttttcttctcactggagagatttagtttcaactgaaaggcataaatccagttcctatggcttctcttc

SEQ ID NO: 389770 - DNA, 568 bp, Homo sapiens
gaggttgctacctgccctgtgtccaagcccggacagctggcatttctgagcagaggaggagcacagagaagtggtgctttgggaaggttgatcccatagatctcattgaagacatgaaccttgccttcaaggcttcaaaggctggtttggatataaatcattcacacaggaaaacatagcaacacaagatggtaagtaagttccaggtgaatgacacsgagagggaagcccctataaagattgtgggtgatgagataatataggtgagagaggaggcatggaagaagtgagttctgggattggtttgattctggccttgactgtggctttaggcaaacagaatattatttgtttacatttaagatgaatttctaggggaagcccatgcaaaatagagtgtaaatatcatataatgctgccttttcctacataatgtaacactatgctttttgggaaaaaaatgatttgtttctgtatctaattcccctagctaggccagggatagccagccctcttgaagacattaaaagccagtaaaacctagttaaaaggtgtgcatcacactgat

SEQ ID NO: 389771 - DNA, 550 bp, Homo sapiens
cgggtcacttccctgagcagctttgaactggcacaatcgtatggagttaatttttttttcttggcttttctagttagcctgaatgaaccagaaggccctttgggtgtgtcgagggtaagtcaatacaataacactttttaatggcattcaattgtacttgaaacctgacaaccaaaactgggtcagcatgaaggcctcccagtcaccctggtgacttcgactcagaagacacagtaggtatcccagttccaaaatgggtacattgttttaacctcacataaattttcacaaaaatattacttaaaacaacaatttcctttgtgccataaaagattttaaattattgatgagtagtttcagtccataraaaactgcctaaattagcagtaaaacaaattagaaataattgtgtgagctatgacaacgttctaaatatagaacacacaggtagattttcctagttacttcttaaagttatcaggacctttgtaaaattggaaatattacagtgccttttcactagcatttttgataatcagatttaataaga

SEQ ID NO: 389772 - DNA, 550 bp, Homo sapiens
cgggtcacttccctgagcagctttgaactggcacaatcgtatggagttaatttttttttcttggcttttctagttagcctgaatgaaccagaaggccctttgggtgtgtcgagggtaagtcaatacaataacactttttaatggcattcaattgtacttgaaacctgacaaccaaaactgggtcagcatgaaggcctcccagtcaccctggtgacttcgactcagaagacacagtaggtatcccagttccaaaatgggtacattgttttaacctcacataaattttcacaaaaatattacttaaaacaacaatttcctttgtgccataaaagattttaaattattgatgagtagtttcagtccataaaaaactgcctaaattagcagtaaaacaaattagaaataattgtgtgagctatgacaacgttctaaatatagaacacacagstagattttcctagttacttcttaaagttatcaggacctttgtaaaattggaaatattacagtgccttttcactagcatttttgataatcagatttaataaga

SEQ ID NO: 389773 - DNA, 633 bp, Homo sapiens
tgcatgtatttaaaaagaagaaaactctaaaattagtaatctaaactttcaccttaaaaaactataaaatttttaaaaaagtaaatgcaaaataagtgggaaaaaaagaaataataaaaatcaataaaattaaaaacagaaaaaaaacaatagagaaagtcaataaaaacaaaagctggttctttgaaaagaccaataaaattgatagacctctaaccagggtaaccaagaaagtagacgacgttaagtcactaacattaaaaatgaagaagccatcactactgatcccacagacattaaaaggataataaawgctattactaacaactctttacccacagattttatcacttacatgaaatggacctacttcttaaaaagatacaagctaccaaactcacataggaaaaattgataacctaaacaggttcaatttttaaaatatatctattttaaaaatgagatttattccaggtaagcaaggatggttaaacatttaaaactcgattaatctaatccaccatatcaacaggctagacaagaaaaatcatatgatcatatcaatagatgcataaaaagcatttgacaaaatttaacacccattcgttatgatgaaaaattatcagcaaacta

SEQ ID NO: 389774 - DNA, 593 bp, Homo sapiens
ccatgccctaattacaccaggtctggataccctacacctgagagcctgctgaattattcaaatgtgccaatcctacatgcttagcctgccttagccatttttcgtcacagaaaccacaataaagcctcttgttatattttcctccctctttctgcttcctgaccaaccttagcacttcctcgtgtggtgccttcatgatgtggtgtgccctctcctcttgggaatgatgagtgacaaactatcttttcaatggcagtcatctccttatgtgctatgctcaccgtatttgaataataataaaacctgtcaggcctctgagcccaagctaagccatcagatcccctgtgacctgcactatacatccagatggcctgaagcaactgaagatccacaaaaagaagtgaaaatagccttaactgatgacattccaccattgtgatttgtttctgccccaccctaactgatcaatgtactttgtartctcccccacccttaagaaggttctttgtaattctccccaccctggagaatgtactgtgtgagatccaccccctgcccacaaaacattgctcctaactccaccgcctatccca

SEQ ID NO: 389775 - DNA, 593 bp, Homo sapiens
ccatgccctaattacaccaggtctggataccctacacctgagagcctgctgaattattcaaatgtgccaatcctacatgcttagcctgccttagccatttttcgtcacagaaaccacaataaagcctcttgttatattttcctccctctttctgcttcctgaccaaccttagcacttcctcgtgtggtgccttcatgatgtggtgtgccctctcctcttgggaatgatgagtgacaaactatcttttcaatggcagtcatctccttatgtgctatgctcaccgtatttgaataataataaaacctgtcaggcctctgagcccaagctaagccatcagatcccctgtgacctgcactatacatccagatggcctgaagcaactgaagatccacaaaaagaagtgaaaatagccttaactgatgacattccaccattgtgatttgtttctgccccaccctaactgatcaatgtactttgtaatctcccccacccttaagaaggttctttgtaattctccccaccctggagaatgtactgtgtgagatccamcccctgcccacaaaacattgctcctaactccaccgcctatccca

SEQ ID NO: 389776 - DNA, 588 bp, Homo sapiens
tgcatcacttatatagagttgagatacatgtgatgctatattgtttatagacacatctgaggtaaaactctaagaaaaattaaagatgtgataagcatagcattcacaatagtggtggccattgctragaagagagagtgtggggactgaggaaggtctgcaaggcatagtgttctgttaattaccctgggacgtgagcacatacatgattatttactctcagtttttaaaccttatgtatatactacatacagatattcaattaaatattttataataaaaaaatgaaattaataacaaaagacttccaggttttcgttttgaggagctagatggtgtcaccattatgataatataatcctgaccacaaaattacatcgattccccaatgggagatacacgtgtgtggttccctaaggacaaacatttttgtcatgggaatatccaccaagagaatggctacaaaccagaaaccttatcttatttgggtcagacataagctctaaccccacaaccccatgtttattatagtcactgaattttctaggaaaacaatggtttagcagcatatactctgaagagcattca

SEQ ID NO: 389777 - DNA, 594 bp, Homo sapiens
tgctaggctgctgtcacctctcactgccaccacatcagtgggcccttcttacttaaaaggtgtccgacagctaacctgaggactgactattctgttaacagatctgccttagatgcctaaggcatccctgcctttgaagagctgaggttcgctccatcctaagcccgccaaggcctcttccagcttctgtgtttccacgcacaggcacctgacgcacttgggccatgacaggtgaggtgctgttttaaagaagcctcctaattcttgaaaagcactgatggaaagacatagcctctttgtggattgtgctatgtttgatgggagtgcatacctgaggccacagttttgacaccaggaaaggagggaacctgaggtacagcagtcacaggaggcatgcaggacctgccaggagcattgcagagaagtggagccggagcctgacgccctgggacttccctccactctattcyttgccatgggcatggccaatggtcttctagtgtgggcagggaaagtatccgcactgatcatctgaaggatgcaaaatcagcacaatcacaaaaaggcttcatggaaggactcatcattcagcaa

SEQ ID NO: 389778 - DNA, 582 bp, Homo sapiens
gggtgactgaggagagtttaatgcagatttactgtcagagataatggcagaattttagaaatcaacaagttgtcattcataattgccaaaagttagaagcaactcctgtcattgatagatgggataaacaaaatggggtctatccatacagtggaatgttactcagccttaaaaaggaagtaaattctgatgcatgctgcaatatagatgagccttgaggatattgtgctaagtaaaagccagtcacaaagggaaagattctgtatgattccacttatatgaggtccctgagcagacaacttcataaagacagaaygtagaatggtggttactaggggttggtggggagaggagagtggggagcaatttaccaggtgcagagcattagctttgcaagatgaaaagagttctggagattggttgtgaatatatgtggccctactaactgtgcacttaaaaatgactgtgatgataaattttgtgttatgtgaattttaccacaactttttaaaaacaaaaaactaatgagcaataatgcggttccccaaagctctcaacagccttggaggagcaagatgaagg

SEQ ID NO: 389779 - DNA, 436 bp, Homo sapiens
tatataaatatctgtccacactgcccaaaacgatttacagactcaatgtgctccttctcaaaaataccagtgacattcacagaaatagaaaaaaaatgtcctaaaatttgtatggaactgcaaaagacccaaatagccaaagcaatctagagcaaaaaaacagagatagtgaactgaaaaggggttaagtccaccggttgatttaagtggctcagcttagggaagaggagagttaatgaaagtaggatgaggagtcagatggagacttccttaaggagaattctaagtgtctttcagggttttttggtgaggttgctgtcactgtcaattttagctaattttagttcaaaacacagggttttgtttgggcgttaaaatgttttattcatactactctcaygtttaaaagtcatcagtaggtgaaatgaaatgaaac

SEQ ID NO: 389780 - DNA, 268 bp, Homo sapiens
gtgactgaacaatgggaaagttgtcagaatcaaactggagtcactaatgttaaggtaaccctgacaaacagaaccagggaatgccatgaagaggtctcacactggcatgcctgataacgaaaaagactctgcataaaccacaaccttgcacaaagaccatcacaaccttatatacaaatgcttctgcaagtacttcccagcagcttcctgtccaacctaggactggcaccaaccytgttactaatctctgtagccaagaataattatt

SEQ ID NO: 389781 - DNA, 561 bp, Homo sapiens
tgctgaattttcctttgttgcaaagaccatatgtaatctttatccttttcccatcaaataaaaacctacaaatttaaaaatgagctcaatttgtgtttcaagctgttctccatgaactctgaatcaacttgctgaattaagaggagaaaacaagtatttccaccagttgtgttctctgccatttaatgggtatcaatttccaaagggagcatccctttgtatccattcaacattaaagcttgcttacaaggagtcatgaaaacattcacggaaaatgcatattatgaaaaaattatgcagggatttcaatttctggcaccaacgcatacttgtactaacttgttatgacatgtctaatgaggatcactttgaaaaagcccataataaagcaacatgaattctgctaaaattgaagcaagaataagcataaaacttacagtgaaccttcagaggaagaatggtgaaacattgatgctttatttatggggataatgacccaaagacatcagcaatttacaaacggataacttgttttaaraagggatgtggcaatgttgaaga

SEQ ID NO: 389782 - DNA, 594 bp, Homo sapiens
agaatgataacatctgcttattatgagagtattttgagaaagttaactgaagcttttgcagagaaacacccaggaaagcttcaccagagtcctcctccaccacagcaatgctcctgctccttcctctaatcaaacatgggcaattttatgagagttttgatgggaaatcaataggcatctactctacagtcctgatttggctccttctgacttctgtttcccaaacttaaaagaatctttaaaaagcacccatttttcttcacttaaaatataaaaataaactgcattgacatggttaaattcccaggactttcatttgtttagggatggactgcatggctggtattttgccttacgaaaatgtcttgaatttgatggagcttacgtgaagaaataaagtttttttttaatttttatcttttaattttatttttccacaaactttttgaagtcccctcatatctcaaaactatggttgagaacataaactaaactaagaataaatacataaccactacatcaaaaatagtgagaatctagaattagcwcttggagggggggaaaaaaagcaatatgtccatatgtattacacat

SEQ ID NO: 389783 - DNA, 475 bp, Homo sapiens
gcaatttgaatattaaaaaaggtaatacttgcaatggattgaaagacattacatatgatttaatacaggagagtttataatcatactaaaaaaagaaaaattcagctcattaatcaaccttggatacatgcagagaaccaattaatttttttaggactgattttttaaaaattagggagaagaaatggagcaattatcaggccttccctataaaatctgtttatctgagtrtccaaatagttaatgaaagaaaagtatctttctggaattatctcatgagtaaataactgaggtgagatagactatccatttgcaatactaactactaatgaattaaaggatctaggcaaataatttcaatggttgataagcatcaccaaaaaaagagacaattaggtattacctgcctctcgatggaaggacaccattgcaaagtagcatggtcaagaaaaagaacaaaatcaagactaagtct

SEQ ID NO: 389784 - DNA, 291 bp, Homo sapiens
aaattgcttgtaaaagcccccatgaaattctatcagctgacatgaaaatagcattccattaattttgatagaattcatatccctttccttcccgcctcacaacagacattgcaatggagagaacatgcacgtatccctcctatctgcatttttccttatttcacatctgtagaaagagggggcttttargcagatctctgaataatgactctgaaagtacttatgaaatagtcctaaaataaaataaaaacttctgttaattcagagcaaaaggtagttgtttctgtaaac

SEQ ID NO: 389785 - DNA, 548 bp, Homo sapiens
atcaagtagtgtaaaacaatcaccatttatctaccatgggccattattctgggctgggcttggctggggctgcctgatgtaggatgatcttagctgggatggctcatttctgccccatgtrgcctgtcaccctccagcagacgaccccaagcttgatcacatagtgattacacactggtggcagcaacctgtgggagacagtgaatgtgtataaggcctcttgaggccgaggcttggaactgtcacgatgtcacttctgcccattctattaatcagagcaagtcacaaacccagcccagatttaatggctggagaaataacctctgcctcttggcagtatgggccaagaacagtaactggaaacatgttttgccaattaccatcatcatccagagctagtatttggtactccagctgatgtaacatggtgggagaccgggcaagagaaacagaaagaggcccctttcccctcaatagactgtgggagaaccagggtgggatctgtctgataatatccctttgtttcctcattctgagaacaaaggcct

SEQ ID NO: 389786 - DNA, 548 bp, Homo sapiens
atcaagtagtgtaaaacaatcaccatttatctaccatgggccattattctgggctgggcttggctggggctgcctgatgtaggatgatcttagctgggatggctcatttctgccccatgtagcctgtcaccctccagcagacgaccccaagcttgatcacatagtgattacacactggtggcagcaacctgtgggagacagtgaatgtgtataaggcctcttgaggccgaggcttggaactgtcacgatgtcacttctgcccattctattaatcagagcaagtcacaaacccagcccagatttaatggctggagaaataacctctgcctcttggcagtatgggccaagaacagtaactggaaacatgttttgccaattaccatcatcatccagagctagtatttggtactccagctgatgyaacatggtgggagaccgggcaagagaaacagaaagaggcccctttcccctcaatagactgtgggagaaccagggtgggatctgtctgataatatccctttgtttcctcattctgagaacaaaggcct

SEQ ID NO: 389787 - DNA, 583 bp, Homo sapiens
cctttggtatttgtcctcccctgatgcattttggtaaaaaacacttggagtttcagcctgacacttgggcacctaattggagactgcatctcctagattcccttgtatctgtgttcatgtgattgaattcaggccagtgaaatgaattgcargtgatgtgtgtaacttctacattatctccttaaagagaaagcttcttggctgggcacggtggctcacgcctgtaatcccagcactttgggaggccgaggcgggcagatcacgagatcaggagatcgagaccaccctggctaacacggtgaaaccccatttctactaaaaatacaaaaaattagccgggcacggtggcgggcgcctgtagtcctagctacttaggaggctgaggcaggagaatggcgtgaactcgggaagcggagtttgcagtcagccaagatcgcgccactgcaccccagcctgggcgatagagtgagactccgtctcaaaaaaaaaaaaagagagagagagagagagaaagcttcttgccctggactctctctcttccagcttcctctgcctgaaaaatggtaactgctggtaccatctt

SEQ ID NO: 389788 - DNA, 590 bp, Homo sapiens
actttgtacagtcataaaaataattgaattgaaagatgatgccagagagttcacccaaaaatatggcacagacagccaaagtttaaagttatgtaagaacaattgagaaagatggagaataattggagaggctacaacttacagcacatggaagttgcagagaargagagtaaataaaaaaataataaaagaatgatggttaagaactttccagaatggtagaaagaccaaactcttaggctgaaagtgtattctgagtgaagttgcagaatgtccaaataaagaaaatatttttttttaaattatactttaagttctagggtacgtgtgcacaacatgcaggtttgttacatatgtatacatgtgccatgttggtgtgctgcacccattaactggtcatttacattaggtatatctcctaatactgtccctccccccaagaaaatcttaaaggcaatcagagagaagaattagattatctaacaatgaagcacagttagactgatggtaattttctcatgagccacaatgaagtcagagatagtaataacaacagctaacacttaaatggtactatgtcccaagcataa

SEQ ID NO: 389789 - DNA, 590 bp, Homo sapiens
actttgtacagtcataaaaataattgaattgaaagatgatgccagagagttcacccaaaaatatggcacagacagccaaagtttaaagttatgtaagaacaattgagaaagatggagaataattggagaggctacaacttacagcacatggaagttgcagagaaggagagtaaataaaaaaataataaaagaatgatggttaagaactttccagaatggtagaaagaccaaactcttaggctgaaagtgtattctgagtgaagttgcagaatgtccaaataaagaaaatatttttttttaaattatactttaagttctagggtacgtgtgcacaacatgcaggtttgttacatatgtatacatgtgccatgttggtgtgctgcacccattaactggtcatttacattaggtatatctcctaatactrtccctccccccaagaaaatcttaaaggcaatcagagagaagaattagattatctaacaatgaagcacagttagactgatggtaattttctcatgagccacaatgaagtcagagatagtaataacaacagctaacacttaaatggtactatgtcccaagcataa

SEQ ID NO: 389790 - DNA, 558 bp, Homo sapiens
caactattcagtactggagttcctgtctaaggcaaagctggaaaataaataagcagcttaatacttggaagagaagaggtgagactttttatatgcaggcaatacaattatctgcatagaaatccctcctcccaaaccccaggaatattcactgtcagattattcaaatgaatatgtgagttaaacaagattgctggatgcaaaatcaacattttaaaaatggttatgtttttatatgctctaaattcagaattttaattgaaaaatatctcatcataccattacatgtcacatcctccaatcatcatgaaaaacaagaaaagaacatggcacctgcagactaaagcttgaaaaatcccaataaagatgttctctctctctctctctctctttttttttttaatcagattgcttcatttgcctgtgcctgagccaaygattgtggtgcagagagagataggatctgtgattaacagtctttggtaaaacagatgaatgaggcaaggaaggaacaattatctccaaataggtggggatcttcagtagcaaacgtgtttt

SEQ ID NO: 389791 - DNA, 513 bp, Homo sapiens
ctctcactccatcaagcatggaaacagttgctcacacattgtagmtcataggcgtcataggcatcatcctgggaatttgttttagaaatacagattccctggatcctcccttggagagtctgacttttaataggtttggggcaagatgcttggatctgtgcttttaaaagccccatgacgtaaggcattgctgaagcgagtttggaaaacagtttgggtgaatatattgtcaaacctcaaatcaagatactcatctgacaagctcaagtatttttatgacaaaaagccacaggacattttaaatgtgtagggacttggaaatcccaggatgtgtggttctcctgcacttggtgacggggctccattttggaggtcatatggtgtgatggctaagagcatgggcttggagtctgacaagggtttgaatcctggttcactcactcattgtgggactttgaacaatataacctctctgaaccttcgcttcctcatctgttaaacagaagtaaaaat

SEQ ID NO: 389792 - DNA, 575 bp, Homo sapiens
gtcacatggcattctgccagggaggtgggaactctcagctcaagcagtaggtgaaaagccctctcttgtttaagcttcagtttccataatttttgacaggatctcatgggaagaatttagtggcagaaataacttagcrgagatcatcccttcctggggtgggagtcttagtggcagttaccagcagaaaagctaatggggtaacccgagaaatcttcctggaggaggagatgttggctgaatcatcgatcagctcatatcactgagccaaatgcttgtcattggctttgggggggcaacgtagggcccacagttcccctcatcatcctcagagttgacactccccagtgcctcacagagatgatttcagggttcaggaattatgactcccaacccccttgggtccacttcccctattatcatgcaggccatctccccggtcttggcttaccctgtgaccacactgcattttccttccacatgccctgacacacgttttgaaatgccagggttctcatgagtccagcctgccaggagcaaggcttgccaaagctgtgtcccagccaagcgggtgg

SEQ ID NO: 389793 - DNA, 575 bp, Homo sapiens
gtcacatggcattctgccagggaggtgggaactctcagctcaagcagtaggtgaaaagccctctcttgtttaagcttcagtttccataatttttgacaggatctcatgggaagaatttagtggcagaaataacttagcggagatcatcccttcctggggtgggagtcttagtggcagttaccagcagaaaagctaatggggtaacccgagaaatcttcctggaggaggagatgttggctgaatcatcgatcagctcatatcactgagccaaatgcttgtcattggctttgggggggcaacgtaggrcccacagttcccctcatcatcctcagagttgacactccccagtgcctcacagagatgatttcagggttcaggaattatgactcccaacccccttgggtccacttcccctattatcatgcaggccatctccccggtcttggcttaccctgtgaccacactgcattttccttccacatgccctgacacacgttttgaaatgccagggttctcatgagtccagcctgccaggagcaaggcttgccaaagctgtgtcccagccaagcgggtgg

SEQ ID NO: 389794 - DNA, 501 bp, Homo sapiens
attaattcattgatttctcctagagattaattcattcattcatgtattcatcatagaggtgctgggtgtctgctacatgccaggcattgtaccaggtgcaatgaattttgaaacaagcaaaaatagacccttactcccaggagttttatyatccactgggaggggcatgcaggtaaatagaacccagaagtcaacttgaacttcagatttgtatttgcatgtgttttctctgcttttgcccgtttcaacttgcacacagaaatccttctctttagagttccgcatcagacaaatgtgtctgtaagcaatatagactttatgggcagcttcgcaggggaaacaagaaaaggtaatatggtacccagcacatcaatgggccatcgggtcaaacaaccagtcagatgtttctgttcttccaaagtaaaggtgtccgaactctctcttggaggagccccaccttcaatagttccctctctccccttcccagaacctccttcagaa

SEQ ID NO: 389795 - DNA, 501 bp, Homo sapiens
attaattcattgatttctcctagagattaattcattcattcatgtattcatcatagaggtgctgggtgtctgctacatgccaggcattgtaccaggtgcaatgaattttgaaacaagcaaaaatagacccttactcccaggagttttatcatccactgggaggggcatgcaggtaaatagaacccagaagtcaacttgaacttcagatttgtatttgcatgtgttttctctgcttttgcccgtttcaacttgcacacagaaatccttctctttagagttccgcatcagacaaatgtgtctgtaagcaatatagactttatgggcagcttcgcaggggaaacaagaaaaggtaatatggtacccagcacatcaatgggccatcgggtcaaacaaccagtcagatgtttctgttcttccaaagtaaaggtgtccraactctctcttggaggagccccaccttcaatagttccctctctccccttcccagaacctccttcagaa

SEQ ID NO: 389796 - DNA, 536 bp, Homo sapiens
taaaactatgtctctgaaacacagctctaatgcataaagttatctgaagccagggattcctgccttatcattcggttaacagtagccagagctgagtgagaaatttacrccgtgtcagtcacgagaggaagtcctccccgaagctctagaaataaggtatttgcattggccccattttagagataaggaagcagacttaggtaaaggtcatctcactagtaagtggaagtcagattcaagcccgagctgtctgagttcagagtccacacaatcatcactttctcccacttcttgggaaaaaacacaggtgttgataccacggcttgccaaggaaaaagcaagcaaccgtcctgttgaagaatgaattcattcagtactaaatggtaagtgcgtccttcctgtaacttctaacgcattgcttgcagctaccagctttcagaggagttggattccaaaagttcatttaaaagcaatttcccagtctccttcctcagtgcttccctacggtactttgtacacacctctcctattgcgct

SEQ ID NO: 389797 - DNA, 610 bp, Homo sapiens
aattgcaaaaatactgaaccaatctaaatgcccatcagccaacaagtggataaagaaaatgtggtatatataccatggaacactactcagccataaaaagagatgaaataatggattttgcagcaacttggatggagctggaggccattgttctaagtgaagtaactcaggaatggaaaaccaaattctcacttacaagtgggagctaagttgtgaggacgcaaaggcataagaatgatataaagaactttggggactccgggtgaagggtgggagcggggtgagggacaaatgactatgtattaggtacagtgtaaactgcttggatgaagggcacaccaaaatctcagaatcaccattaaaaaacttatccatgtaaccaaaagccatttgcacccaaaaactattgagataaacatttttaaaaatttaagcagtaagtataataataatttgaaaagatctggaagtctttgatccacgcggaatagcrtataaactctttttttcagaaagctgtttgtcagcaaacatcgttatgtccccttccaatgttatcaagaacctaaaacatgtaagatgcacatagtttcaaataaaatcaataaac

SEQ ID NO: 389798 - DNA, 579 bp, Homo sapiens
tgcctcctggggttcaagtaattcttgtgcctcarcctcccaagtagctgggattacaggcatgtgccatcacacccagctaattttttttttgtctttttaacaaaaatggggttttgggttttgttggtcaggctggtttcaaactcctgacctcaagtgatctgcctgccttggcttcccaaagtgctgggattacagacgtgagccaccgcgcccagcctcatctgatttttttgtttcatggatcttcacatccaagaaaccacagctgaaaagctatattcaaggagtagaccagggatgcctcatcctcactaatgcctgtttgaactgatgttgtcctaaactttgagctgattcctttttttttttttttggagctgattccatatggaatgagaatttgagggaggagtgaattttgcacatgagagtacatagtagataatctccaaatatgtccactatcaattgcttccctccttgcatacaaataccactccctatcaataaatgtagattatttccactgggctggccttgtgatttgtgttgaccaatacaatagcgcagaag

SEQ ID NO: 389799 - DNA, 428 bp, Homo sapiens
agagtaggagtggatagaatctagagtctgaagagggggctctaaagccagctctgttacctactagatcagcggtcctccacctttttgacactagggaccacctggtagaagacaatttttccatagactgggggcggggaggggaggaaggaaactgttccacctcagatcatcaggcactagttagattctcacaaagacttcacaacctagatccctcatatgtgcagttccctatagggttcacgctcctatcagaatctaataccactgctgatctgatgggaggcagagctcaggtggtaatgcttgctcacctactgctcaccygctgtgtggcctggtttctaacaggccatggaccatatgggtctgcagcctggggttaggggccccctgtgaataatagtagagcaatgagtccc

SEQ ID NO: 389800 - DNA, 421 bp, Homo sapiens
agagcaagactccatctcaaaaataataataataataataataataataccctttgctttcttcatagagtgattcagtctacacattcatatcttsatttattcaacaaatgtttgttaagtaccttctaaatgccagtcattttactctttagtaagtatggagagataatagaagaatccttgctctttagaatacagatgcagaaataggaaaaagcaatatgattagtgatatacagaaatattgaccaaattttgtaagaccacaaaggagaattgcttgaatttcggagatccaagctattctcctagagaaatcaaggaaagctgtttttccgataagaaaatggagctcaaagagatttggtctaagaatttgagttagcattaaaaccagttgtgtctgcaaaatccctgt

SEQ ID NO: 389801 - DNA, 483 bp, Homo sapiens
gtgccctggtgaggactctgtgtgagarctctgaccccacaattcccttccatactgccctagcagaggttctccatgagggccccatccctgcagcaaacttctgcctggacatccaggtgtttccatacatcctctgaaatctaggcaaaggttcccaaacctcagttcttgacttctgggcatccacagggtcaacacacatggaagctaacaaagacttggggcttgcatgctttgaaatcatggcctgagctgtaccttggctccttttagccatggctgaagcagctgggatacagggtaccaagaccctaggctgcacacagcaggtgggccctgatggcccataaaacaattctttttctctcttaggcctccaagcctgtgatggtgggggctaccatgaaggtctctgacatgacctggagacattttccacattgtcttggtgattaacatttagctccttgttacttatgt

SEQ ID NO: 389802 - DNA, 483 bp, Homo sapiens
gtgccctggtgaggactctgtgtgagagctctgaccccacaattcccttccatactgccctagcagaggttctccatgagggccccatccctgcagcaaacttctgcctggacatccaggtgtttccatacatcctctgaaatctaggcaaaggttcccaaacctcagttcttgacttctgggcatccacagggtcaacacacatrgaagctaacaaagacttggggcttgcatgctttgaaatcatggcctgagctgtaccttggctccttttagccatggctgaagcagctgggatacagggtaccaagaccctaggctgcacacagcaggtgggccctgatggcccataaaacaattctttttctctcttaggcctccaagcctgtgatggtgggggctaccatgaaggtctctgacatgacctggagacattttccacattgtcttggtgattaacatttagctccttgttacttatgt

SEQ ID NO: 389803 - DNA, 483 bp, Homo sapiens
gtgccctggtgaggactctgtgtgagagctctgaccccacaattcccttccatactgccctagcagaggttctccatgagggccccatccctgcagcaaacttctgcctggacatccaggtgtttccatacatcctctgaaatctaggcaaaggttcccaaacctcagttcttgacttctgggcatccacagggtcaacacacatggaagctracaaagacttggggcttgcatgctttgaaatcatggcctgagctgtaccttggctccttttagccatggctgaagcagctgggatacagggtaccaagaccctaggctgcacacagcaggtgggccctgatggcccataaaacaattctttttctctcttaggcctccaagcctgtgatggtgggggctaccatgaaggtctctgacatgacctggagacattttccacattgtcttggtgattaacatttagctccttgttacttatgt

SEQ ID NO: 389804 - DNA, 581 bp, Homo sapiens
agctgtaccttggctccttttagccatggctgaagcagctgggatacagggtaccaagaccctaggctgcacacagcaggtgggccctgatggcccataaaacaattctttttctctcttaggcctccaagcctgtgatggtgggggctaccatgaaggtctctgacatgacctggagacattttccacattgtmttggtgattaacatttagctccttgttacttatgtaaatttctgcaacaggcttgaatttatccccagaaaaaatatatatcttttttcctatcacattaccaggctgcaaactttccaagcttttgttctctgcttcttcttgaatgtttagcccctaggaactttcttctgccagataccctaaatcatctttctcaaattcaaagctccacagatctctagggcaggggcaaaattccaccaatctctttgttaagcatagcaagagtgacctttactacagttcccaagaagttcctcatctccatctgagaccacctcagcctggacttcattgtccaaatcactaacagcattttgataaaagccattcaccaagtctat

SEQ ID NO: 389805 - DNA, 581 bp, Homo sapiens
agctgtaccttggctccttttagccatggctgaagcagctgggatacagggtaccaagaccctaggctgcacacagcaggtgggccctgatggcccataaaacaattctttttctctcttaggcctccaagcctgtgatggtgggggctaccatgaaggtctctgacatgacctggagacattttccacattgtcttggtgattaacattyagctccttgttacttatgtaaatttctgcaacaggcttgaatttatccccagaaaaaatatatatcttttttcctatcacattaccaggctgcaaactttccaagcttttgttctctgcttcttcttgaatgtttagcccctaggaactttcttctgccagataccctaaatcatctttctcaaattcaaagctccacagatctctagggcaggggcaaaattccaccaatctctttgttaagcatagcaagagtgacctttactacagttcccaagaagttcctcatctccatctgagaccacctcagcctggacttcattgtccaaatcactaacagcattttgataaaagccattcaccaagtctat

SEQ ID NO: 389806 - DNA, 581 bp, Homo sapiens
agctgtaccttggctccttttagccatggctgaagcagctgggatacagggtaccaagaccctaggctgcacacagcaggtgggccctgatggcccataaaacaattctttttctctcttaggcctccaagcctgtgatggtgggggctaccatgaaggtctctgacatgacctggagacattttccacattgtcttggtgattaacatttagctccttgttacttatgtaaatttctgcaacaggcttgaatttatccccagaaaaaatatatatctttttycctatcacattaccaggctgcaaactttccaagcttttgttctctgcttcttcttgaatgtttagcccctaggaactttcttctgccagataccctaaatcatctttctcaaattcaaagctccacagatctctagggcaggggcaaaattccaccaatctctttgttaagcatagcaagagtgacctttactacagttcccaagaagttcctcatctccatctgagaccacctcagcctggacttcattgtccaaatcactaacagcattttgataaaagccattcaccaagtctat

SEQ ID NO: 389807 - DNA, 467 bp, Homo sapiens
cttcatagaggaaattcaaaaaacaatataaaatagaagaaaacaattcctagttattttggaaattgtattatgtgttgcaaaacaatgacaataaatgtacttaaataaatcaccaacttaataaatcatcttcagttgaatccttagttttctcatgcaaagtctagtgttcytacagagccagaacagtgcacaaggaacaagacagggagataaaataaatgctagcttagttttatatgaagcagcaattgggaatattaactgttctcatgtttaaatatttgcttttggcaaaatccaaacaagctcactatttgttagattagtaggtatagagtcaatgtggcagtaggtctggagtggggcacatgtattttgtagattcaaagatgttgtcaattttaaaacattaattttatattaaatttggagagaataccaccttattgagtgcatgccaa

SEQ ID NO: 389808 - DNA, 576 bp, Homo sapiens
tgcggggagggacagagtttccctctgttacccaggctggagtgcaatggcatggtctcagcacactgcaacctctgcctcctggattcaagcgattctcctgcctcagcctcctgagtagctgggattatgggagcctgccataccacccagctaatttttatatttttagtagagactgggtttctcactgttggccaagctggtttcagactccygacctcaggtgatctgcctgccttcacctcccaaagtgctgggattacaggcatgagctaccgtgcctggcccaaataaataaattttaaatcactcttaagcaacctactggaatgatattatcaaacatctatcaggtacacttaggatgagagataggaagacaaacatgcttataactcatcagctctcaatataattagattttggttaacctgtaataagaacattgtactgcattaattcatctttgttttcttttttcttatgtcttcggtaggaatttattttgaaaaagctgtacacgacttgcttgtgttagaggatcattgtggtcaaaggttataggaggcaaag

SEQ ID NO: 389809 - DNA, 576 bp, Homo sapiens
tgcggggagggacagagtttccctctgttacccaggctggagtgcaatggcatggtctcagcacactgcaacctctgcctcctggattcaagcgattctcctgcctcagcctcctgagtagctgggattatgggagcctgccataccacccagctaatttttatatttttagtagagactgggtttctcactgttggccaagctggtttcagactcccgacctcaggtgatctgcctgccttcacctcccaaagtgctgggattacaggcatgagctaccgtgcctggcccaaataaataaattttaaatcactcttaagcaacctactggaatgatattatcaaacatctatcaggtacacttaggatgagagataggaaracaaacatgcttataactcatcagctctcaatataattagattttggttaacctgtaataagaacattgtactgcattaattcatctttgttttcttttttcttatgtcttcggtaggaatttattttgaaaaagctgtacacgacttgcttgtgttagaggatcattgtggtcaaaggttataggaggcaaag

SEQ ID NO: 389810 - DNA, 568 bp, Homo sapiens
tataaggcaatgataatttatttggctcatccagaaagctttagcaagactgataacaacccccagggaagaactcatgaactccatactgcccaacagaatctttttcttggcttctccttcttttttgtcactcctccwcttttgcttttctccaccctatgctacctcctaataaaattccttgcttgaattctgtccaatgcaaggctcacaaaaataagttaaacagatctttccagacaactagtggtttctactatcctggaatttcactgcaatacagtacatttctatcacgctaccttttaatgaaatctttaccctgaatactcaaaaagtcatcttctgtatgagcatgtctgcttttagtagacataaatggctagcctctgtgactgttttctttttaacaataaaagaagaaacaaacacaatggacaattattaaacaatggacaattgattacaattaaacaatggacaattgattagaaaaagcttgcttgctaactgagtaattctttgacacacagttttcatctcattttattatgttaaaaaatag

SEQ ID NO: 389811 - DNA, 584 bp, Homo sapiens
tggattataacatgaaggaatgaatttttcactttcctgttacgccattgcctttatttcccatccagaattatagaggagttgtaaggcaattaagggtgttacacagggcttttgggtgcagcactggaattttaaaacaggtttattggcaatttttgataagtaatatactgtaatataccttttaaactctacatrgactttaaaatcttttatggaaaattctcaagtttccataataaaaaaacgctgtgctttctttggggaatatttttgggataaataacttagttcaattttcatggaaaaaatacctaaatagtagtattgctgttcaaattttgtcacatttctttttgtgggtcttttgaagtaaatcaacaggtttatgtaaacattatgatttggcttctcctagatgttagaaagaagcagtgtgtaagtagtgacgtacttgggctttacgtaaagaaattgtgccattttttcaagccagatatagcttctgtatcaacaaatggaacacaaatctttagtctaggacttagagtgggggaaaaagggaaaaaacaactataaca

SEQ ID NO: 389812 - DNA, 584 bp, Homo sapiens
tggattataacatgaaggaatgaatttttcactttcctgttacgccattgcctttatttcccatccagaattatagaggagttgtaaggcaattaagggtgttacacagggcttttgggtgcagcactggaattttaaaacaggtttattggcaatttttgataagtaatatactgtaatataccttttaaactctacatggactttaaaatcttttatggaaaattctcaagtttccataataaaaaaacgctgtgctttctttggggaatatttttgggawaaataacttagttcaattttcatggaaaaaatacctaaatagtagtattgctgttcaaattttgtcacatttctttttgtgggtcttttgaagtaaatcaacaggtttatgtaaacattatgatttggcttctcctagatgttagaaagaagcagtgtgtaagtagtgacgtacttgggctttacgtaaagaaattgtgccattttttcaagccagatatagcttctgtatcaacaaatggaacacaaatctttagtctaggacttagagtgggggaaaaagggaaaaaacaactataaca

SEQ ID NO: 389813 - DNA, 614 bp, Homo sapiens
cagctacataagaaagagccactctaattagtrcagctgattcctatgttgagctgctaacatcgatctgtttgaaagtctctttttgtgcatttacacacaagttcttaagcaatgatgacagcagtaccctaaatattaaaaaagaaagaaagaaagaaaagaaaaaagaaagaaaaaagcatgtagaaaagtcgggtagagtttattccatggcatagtcattttaaagtaggtagtttttgagaagaaggtggttttttttgttgttgtttgtttgtttttgttgttgttgttattgttgatttgtttgcttgtttggagaaaccagcaaagtagaactccaaagtccatcttttagcagtgtacctcagggttttcaattcagacacaatgtatatgggttgacactttccagatcattgaatgcaaatcattaaaaagaactatatgtagccaggaaataagaaaacattttatggctctctagaagacagactgggtgtctgcttctgcatgcccttttcttttctttccttttttctttttttttcttaatctctaggataatgctgacatcattgcttaaagttctgaatgtgactgagaataat

SEQ ID NO: 389814 - DNA, 614 bp, Homo sapiens
cagctacataagaaagagccactctaattagtgcagctgattcctatgttgagctgctaacatcgatctgtttgaaagtctctttttgtgcatttacacacaagttcttaagcaatgatgacagcagtaccctaaatattaaaaaagaaagaaagaaagaaaagaaaaaagaaagaaaaaagcatgtagaaaagtcgggtagagtttattccatggcatagtcattttaaagyaggtagtttttgagaagaaggtggttttttttgttgttgtttgtttgtttttgttgttgttgttattgttgatttgtttgcttgtttggagaaaccagcaaagtagaactccaaagtccatcttttagcagtgtacctcagggttttcaattcagacacaatgtatatgggttgacactttccagatcattgaatgcaaatcattaaaaagaactatatgtagccaggaaataagaaaacattttatggctctctagaagacagactgggtgtctgcttctgcatgcccttttcttttctttccttttttctttttttttcttaatctctaggataatgctgacatcattgcttaaagttctgaatgtgactgagaataat

SEQ ID NO: 389815 - DNA, 572 bp, Homo sapiens
ggtcattttaagaatttattatttgaaacttaaaacactactccttaactatctgatgtaatgagtactcttttgattataattgacaaaaacacacacattcaaacaagcttaatcaacaaagaaatttattcactcatgyagtagaaaacctcagggggtgctctctgtacaagcctggctgctctcatgccctgcaatggtaatgtaagaattttgcctctctcattctatatttgttctattattttccgtgttgactttgttttcagtctgacttttctacacgtttggaaagatggctgttagcagctccaggccaatatagcatgcaattccagatctgagaaaagcaaaattctttcttttccaccatttatactaatcccttaaaagagtttttgggtcctatctgggacatgtacctttctgaggtacactttgacctctcttcttaaacctccaaatttttctgccctttctctctcagctaatattcttgtttttcattttacagggaaaatgaaagcagccaaaagagaatttcctgatgctcccaccatcaaatccat

SEQ ID NO: 389816 - DNA, 572 bp, Homo sapiens
ggtcattttaagaatttattatttgaaacttaaaacactactccttaactatctgatgtaatgagtactcttttgattataattgacaaaaacacacacattcaaacaagcttaatcaacaaagaaatttattcactcatgtagtagaaaacctcagggggtgctctctgtacaagcctggctgctctcatgccctgcaatggtaatgtaagaattttgcctctcycattctatatttgttctattattttccgtgttgactttgttttcagtctgacttttctacacgtttggaaagatggctgttagcagctccaggccaatatagcatgcaattccagatctgagaaaagcaaaattctttcttttccaccatttatactaatcccttaaaagagtttttgggtcctatctgggacatgtacctttctgaggtacactttgacctctcttcttaaacctccaaatttttctgccctttctctctcagctaatattcttgtttttcattttacagggaaaatgaaagcagccaaaagagaatttcctgatgctcccaccatcaaatccat

SEQ ID NO: 389817 - DNA, 572 bp, Homo sapiens
ggtcattttaagaatttattatttgaaacttaaaacactactccttaactatctgatgtaatgagtactcttttgattataattgacaaaaacacacacattcaaacaagcttaatcaacaaagaaatttattcactcatgtagtagaaaacctcagggggtgctctctgtacaagcctggctgctctcatgccctgcaatggtaatgtaagaattttgcctctctcattctatatttgttctattattttccgtgttgactttgttttcagtctgacttttctacacgtttggaaagatggctgttagcagctccaggccaatatagcatgcaattccagatctgagaaaagcaaaattctttcttttccaccatttatactaatcccttaaaagagtttttgggtcctayctgggacatgtacctttctgaggtacactttgacctctcttcttaaacctccaaatttttctgccctttctctctcagctaatattcttgtttttcattttacagggaaaatgaaagcagccaaaagagaatttcctgatgctcccaccatcaaatccat

SEQ ID NO: 389818 - DNA, 602 bp, Homo sapiens
tgcacttcattgctcctcaatttttctgcctttctccaacacaatacctgrtactgccctactttctattctcttgtatccttattttttcctaattgagagagaacagtgatggtaattaaacaattgagtgaaaaccaattcctgcgatagtgctagatgcttaataggtaacatcttctgctcgagttactgagacttcacctactttgaagctactgatctcaaagaagcttaaggaataattatggaggagataattttaggtaaatttgaatttataaggaaatgttgtccaggaaaattatagggtccattttttaccaggcttgagacatatttggtacagagagtattagggagtggttagtcagaatggctgctttggaaaatgaatttaactgtaaaaagtctgttgagtacatataacagtggaataaaatggtgggggaggggaaagatcagttcatatgatacattttgacttcaaatttctcgtctctgaggattaagaaggtaccagtgaaaaaaggtttgattttcaaagagaagcagccaatgtcccatgacaccattaataaaaaaaaatagataacacttta

SEQ ID NO: 389819 - DNA, 602 bp, Homo sapiens
tgcacttcattgctcctcaatttttctgcctttctccaacacaatacctgatactgccctactttctattctcttgtatccttattttttcctaattgagagagaacagtgatgrtaattaaacaattgagtgaaaaccaattcctgcgatagtgctagatgcttaataggtaacatcttctgctcgagttactgagacttcacctactttgaagctactgatctcaaagaagcttaaggaataattatggaggagataattttaggtaaatttgaatttataaggaaatgttgtccaggaaaattatagggtccattttttaccaggcttgagacatatttggtacagagagtattagggagtggttagtcagaatggctgctttggaaaatgaatttaactgtaaaaagtctgttgagtacatataacagtggaataaaatggtgggggaggggaaagatcagttcatatgatacattttgacttcaaatttctcgtctctgaggattaagaaggtaccagtgaaaaaaggtttgattttcaaagagaagcagccaatgtcccatgacaccattaataaaaaaaaatagataacacttta

SEQ ID NO: 389820 - DNA, 602 bp, Homo sapiens
tgcacttcattgctcctcaatttttctgcctttctccaacacaatacctgatactgccctactttctattctcttgtatccttattttttcctaattgagagagaacagtgatggtaattaaacaattgagtgaaaaccaattcctgcgatagtgctagatgcttaataggtaacatcttctgctcgagttactgagacttcacctactttgaagctactgatctcaaagaagcttaaggaataattatggaggagataattttaggtaaatttgaatttataaggaaatgttgtccaggaaaattatagggtccattttttaccaggcttgagacatatttggtacagagagtattagggagtggttagtcagaatggctgctttggaaaatgaatttaactgtaaaaagtctgttgagtacatataacagtggaatwaaatggtgggggaggggaaagatcagttcatatgatacattttgacttcaaatttctcgtctctgaggattaagaaggtaccagtgaaaaaaggtttgattttcaaagagaagcagccaatgtcccatgacaccattaataaaaaaaaatagataacacttta

SEQ ID NO: 389821 - DNA, 627 bp, Homo sapiens
gagagggaacagaagagaaatggggcataaaaatatgtgaagaacaatacaaaacatacttaaaaacttccaaaatttgacaaagaatattaacttgcacatccaaaaagatctatgactcccaagtaggataaactcaaagagattcacatttttaaaaaattataattaaacaatcaraagaaaatgacaaagaaagaatctgaaaacaaaaagagaggagcaactcatcatgtgcaaaagagtctgaataatttttcactgatttttcattagaaaccatggaaaccagaggcagtgagatgacatttttaaagttttgaaagtaaatgactatcaacgaataatttcataaccaacaaaactatacttcaaaaatgaaaaagaagtgaaaatattctcacttattctctgaaaccaaaactgacagaatctcttactagcaaagtttccatgcaagaaatattaaaagaggtatttcaatatgaaataaaattacacttgacaatatctagagtccatataaacaaatgcagaacaatagaaaaagcaaaaattagaaatatatgaaagacaatgtaaatgtattttttgtaactattttcttttctcctacctgattcaaaa

SEQ ID NO: 389822 - DNA, 627 bp, Homo sapiens
gagagggaacagaagagaaatggggcataaaaatatgtgaagaacaatacaaaacatacttaaaaacttccaaaatttgacaaagaatattaacttgcacatccaaaaagatctatgactcccaagtaggataaactcaaagagattcacatttttaaaaaattataattaaacaatcaaaagaaaatgacaaagaaagaatctgaaaacaaaaagagaggagcaactcatcatgtgcaaaagagtctgaataatttttcactgatttttcattagaaaccatggaaaccagaggcagtgagatgacatttttaaagttttgaaagtaaatgactatcaacgaataatttcataaccaacaaaactatacttcaaaaatgaaaaagaagtgaaaatattctcacttattctctgaaaccaaaactgacagaatctcttactagcaaagtttccatgcaagaaatattaaaagaggtatttcaatatgaaataaaattacacttgacaatatctagagtccatataaacaaatgcagaacaatagaaaaagcaaaaattagaaatatatgaaakacaatgtaaatgtattttttgtaactattttcttttctcctacctgattcaaaa

SEQ ID NO: 389823 - DNA, 600 bp, Homo sapiens
actattttcttttctcctacctgattcaaaaataaactgcataaagcaatggttataagtaatacaatgaataaagatgtaatgaataaagatgaatacartgaattcatacattgaataaagatgtaatatgtatagtaatacaacaaaggaagaaggagagaacaatgctatttagaatcaaaatttttgtatgctattaaaattaagttgatagtaaatctaactagattttcaaaaattaagatactacttgtagcccatcaggcaaccctaagaaaataacttacaaactataataaaatcagtgataaggggattaatacagtgcattaaaaatatctattgactaaagaaaaggcaatcttagaaaaatagagaaataaaaaagcagaagacatatagaaaacaactggtaaactggcaaacataaattctatatatcagtaattacattaaatgtatatagattaaaaactccatttaaaatagagtttgcagatgggtttagaaaaaacataatccaactatctgttttattcagcagacacactttatattcaaagacacaaacagtttgaatacaaatgactgaataag

SEQ ID NO: 389824 - DNA, 600 bp, Homo sapiens
actattttcttttctcctacctgattcaaaaataaactgcataaagcaatggttataagtaatacaatgaataaagatgtaatgaataaagatgaatacaatgaattcatacattgaataaagatgtaatatgtatagtaatacaacaaaggaagaaggagagaacaatgctatttagaatcaaaatttttgtatgctattaaaattaagttgatagtaaatctaactagattttcaaaaattaagatactacttgtagcccatcaggcaaccctaagaaaataacttacaaactataataaaatcagtgataaggggattaatacagtgcattaaaaatatctattgactaaagaaaaggcaatcttagaaaaatagagaaataaaaaagcagaagacatatagaaaacaactggtaaactggcaaacataaattctatatatcagtaattacattaaatgtatatagattamaaactccatttaaaatagagtttgcagatgggtttagaaaaaacataatccaactatctgttttattcagcagacacactttatattcaaagacacaaacagtttgaatacaaatgactgaataag

SEQ ID NO: 389825 - DNA, 619 bp, Homo sapiens
tagatggctttactgatacattctaccaaatgtttaraagagtttacactaattcttcacaaacacactcaaaaaatagaacaggagggattattttccaactctttttataagactagtaaaaccagacaaatacgtcacaagtaaaacaaattaagaatccctatttttttttcccaaggcggcagattagaggcttttatgatgcctcagccacttggaagtagtaaaatagtgcataaagatcaactctgtgagctttaattcaagaagaaaatgggaaaccatcagaattgtgaagggcactccagatcttgtggaggagaaagaacactgacagacagtccccatgatggtatctgtctggtaaacatgattgaagctccaggaggatatgagagaagcagagatcctccctatgtgactcatttttccagtgggaactcaagcgacccaggtcgagaaacagcactgtctttctcccaagccctagagccagcatggggagaggcttggagatgttgtgagggaaagacactgggaaaagctgcagacattttcccagacctgggaccaagaacagcataccatttttaatccaggcatacaaagtcaggca

SEQ ID NO: 389826 - DNA, 619 bp, Homo sapiens
tagatggctttactgatacattctaccaaatgtttagaagagtttacactaattcttcacaaacacactcaaaaaatagaacaggagggattattttccaactctttttataagactagtaaaaccagacaaatacgtcacaagtaaaacaaattaagaatccctatttttttttcccaaggcggcagattagaggcttttatgatgcctcagccacttggaagtagtaaaatagtgcataaagatcaactctgtgagctttaattcaagaagaaaatgggaaaccatcagaattgtgaagggcactccagatcttgtggaggagaaagaacactgacagacagtccccatgatggtatctgtctggtaaacatgattgaagctccaggaggatatgagagaagcagagakcctccctatgtgactcatttttccagtgggaactcaagcgacccaggtcgagaaacagcactgtctttctcccaagccctagagccagcatggggagaggcttggagatgttgtgagggaaagacactgggaaaagctgcagacattttcccagacctgggaccaagaacagcataccatttttaatccaggcatacaaagtcaggca

SEQ ID NO: 389827 - DNA, 528 bp, Homo sapiens
gagagaagcagagatcctccctatgtgactcatttttccagtgggaactcaagcgacccaggtcgagaaacagcactgtctttctcccaagccctagagccagcatggggagaggcttgragatgttgtgagggaaagacactgggaaaagctgcagacattttcccagacctgggaccaagaacagcataccatttttaatccaggcatacaaagtcaggcattctttggcaacttggcagcatgaccactcaggaattttattcttgaggcagagattgggggggcctgctctagagtgggataagggcctccacaaccagagctatggaaagcacatccagagcggacactgaaattgtgctttcccttgtcacaagcctggggcaggaggagtgctgctacagctgcagtttcttctggatggtgagatttgcagccaaggccagcctagtgacctggaattggtctgtgtgtgccatttctagatgtctccatctgctctaccaagataatagtgcagtgagg

SEQ ID NO: 389828 - DNA, 528 bp, Homo sapiens
gagagaagcagagatcctccctatgtgactcatttttccagtgggaactcaagcgacccaggtcgagaaacagcactgtctttctcccaagccctagagccagcatggggagaggcttggagatgttgtgagggaaagacactgggaaaarctgcagacattttcccagacctgggaccaagaacagcataccatttttaatccaggcatacaaagtcaggcattctttggcaacttggcagcatgaccactcaggaattttattcttgaggcagagattgggggggcctgctctagagtgggataagggcctccacaaccagagctatggaaagcacatccagagcggacactgaaattgtgctttcccttgtcacaagcctggggcaggaggagtgctgctacagctgcagtttcttctggatggtgagatttgcagccaaggccagcctagtgacctggaattggtctgtgtgtgccatttctagatgtctccatctgctctaccaagataatagtgcagtgagg

SEQ ID NO: 389829 - DNA, 528 bp, Homo sapiens
gagagaagcagagatcctccctatgtgactcatttttccagtgggaactcaagcgacccaggtcgagaaacagcactgtctttctcccaagccctagagccagcatggggagaggcttggagatgttgtgagggaaagacactgggaaaagctgcagacattttcccagacctgggaccaagaacagcataccatttttaatccaggcatacaaagtcaggcattctttggcaacttggcagcatgaccactcaggaattttattcttgaggcagagattgggggggcctgctctagagtgggataagggcctccacaaccagagctatggaaagcacatccagagmggacactgaaattgtgctttcccttgtcacaagcctggggcaggaggagtgctgctacagctgcagtttcttctggatggtgagatttgcagccaaggccagcctagtgacctggaattggtctgtgtgtgccatttctagatgtctccatctgctctaccaagataatagtgcagtgagg

SEQ ID NO: 389830 - DNA, 560 bp, Homo sapiens
cagagatcctggtgcagtggggctttctctgctccatacccaggcaggcctccagacatttactcacttgaatcagcagcctgactcaccactattctttccgttcagagctactggtgcagggaggccttctctrcttcatgcctgggcagatctccaggcagttaaagcacctgttcttctggttcagcagccggagccacccaaccttcctggacgtagatcatggtacagaatggccctctctactccacactcaggcagacctccagacattcagagcaccaacttgcctggatcagcagcttgatatgccccactcttcctggttagaggtcttggtgcaggggcctttgctgctacatgctcaggtagatctccaggcattccaagcttctgcttgcctggttcagcagcctgaatcaccccacctcttctgtgcagagatcttggtgcagttggtttccctactcctaattcaggaaggtgggtgttctcaatgcctggagaacttcccacaatcctgttgtattagtctgttctcaggctgctaataaaga

SEQ ID NO: 389831 - DNA, 560 bp, Homo sapiens
cagagatcctggtgcagtggggctttctctgctccatacccaggcaggcctccagacatttactcacttgaatcagcagcctgactcaccactattctttccgttcagagctactggtgcagggaggccttctctgcttcatgcctgggcagatctccaggcagttaaagcacctgttcttctggttcagcagccggagccacccaaccttcctggacgtagatsatggtacagaatggccctctctactccacactcaggcagacctccagacattcagagcaccaacttgcctggatcagcagcttgatatgccccactcttcctggttagaggtcttggtgcaggggcctttgctgctacatgctcaggtagatctccaggcattccaagcttctgcttgcctggttcagcagcctgaatcaccccacctcttctgtgcagagatcttggtgcagttggtttccctactcctaattcaggaaggtgggtgttctcaatgcctggagaacttcccacaatcctgttgtattagtctgttctcaggctgctaataaaga

SEQ ID NO: 389832 - DNA, 560 bp, Homo sapiens
cagagatcctggtgcagtggggctttctctgctccatacccaggcaggcctccagacatttactcacttgaatcagcagcctgactcaccactattctttccgttcagagctactggtgcagggaggccttctctgcttcatgcctgggcagatctccaggcagttaaagcacctgttcttctggttcagcagccggagccacccaaccttcctggacgtagatcatggtacagaatggccctctctactccacactcaggcagacctccagacattcagagcaccaacttgcctggatcagcagcttgatatgccccactcttcctggktagaggtcttggtgcaggggcctttgctgctacatgctcaggtagatctccaggcattccaagcttctgcttgcctggttcagcagcctgaatcaccccacctcttctgtgcagagatcttggtgcagttggtttccctactcctaattcaggaaggtgggtgttctcaatgcctggagaacttcccacaatcctgttgtattagtctgttctcaggctgctaataaaga

SEQ ID NO: 389833 - DNA, 560 bp, Homo sapiens
cagagatcctggtgcagtggggctttctctgctccatacccaggcaggcctccagacatttactcacttgaatcagcagcctgactcaccactattctttccgttcagagctactggtgcagggaggccttctctgcttcatgcctgggcagatctccaggcagttaaagcacctgttcttctggttcagcagccggagccacccaaccttcctggacgtagatcatggtacagaatggccctctctactccacactcaggcagacctccagacattcagagcaccaacttgcctggatcagcagcttgatatgccccactcttcctggttagaggtcttggtgcaggggcctttgctgctacatgctcaggtagatctccaggcattccaagcttctgcttgcctggttcagcagcctgaatcaccccacctcttctgtgcagagatcttggtgcagttggtttccctactcctaattcaggaaggtgggtgttctsaatgcctggagaacttcccacaatcctgttgtattagtctgttctcaggctgctaataaaga

SEQ ID NO: 389834 - DNA, 584 bp, Homo sapiens
agtcaaatcttaaagctccaaaatgatctcctttgtcttcatgtctcacatcgaggtctcactgatgcaagaggtaggcgcccatgaccttgggcagctctgcccctgtgtctttacagggtacagctccctttctggctgctttcatgagctggcattgagtgtctgcagcttttccaggtgcatggtgcatgttgtcagtggatctaccattctggagtccggacgatggtggccctcttmccacagctccaccaggcagtgccccagagggtgcttgactccacatttcccttccactctgcgctaacagaagttttccatgaggactctgcccctgcagcacacctctgcctggacatccagacatttccacaaattctctgaaatctatgtggaggttctcatatctcaattcttgatttctgtgtacctggaggcccaatgccacatgtaagctgccaaggcttgagactttcaccctctgaagcaatgacctgatctatacactggctcctcttagccacagctgggatgcaggggagcaagtttggagagtgctcaaagcagcaaggccctggacc

SEQ ID NO: 389835 - DNA, 565 bp, Homo sapiens
acaaacatataaaaaattctccacatcactaatcatcagagaaatgcaaatcactgcaatgaggttccatctcacatcagtcagaatggatattattaaaacatcaaaaaataacagatgctggcaaggctatggagaaaagggaatgcttgmacactttcagtggaaatctaaattagttcagccactgtggaaagtagtttggagcttttttaaagactttaaaagggaactacaatttgacccagcaatcccattactggttatgtatctaaaagaaaacaaattgttttagcaagaatacataggctctcatatgtgcttcgcagtcctattcacaatagcagccatgaaatcaacctaggtgcccattaatggtggaatggataaagaaaacatggcaaatatacatgatggaacactacacagccataaaaagaacaaaatcatgtcctttgcagcaacacagatgtagctggaggccattatcctaagcagattaatgcagtaacagaaaactaaatacagtcttttctcaattataaattggagctaaatattaggt

SEQ ID NO: 389836 - DNA, 565 bp, Homo sapiens
acaaacatataaaaaattctccacatcactaatcatcagagaaatgcaaatcactgcaatgaggttccatctcacatcagtcagaatggatattattaaaacatcaaaaaataacagatgctggcaaggctatggagaaaagggaatgcttgcacactttcagtggaaatctaaattagttcagccactrtggaaagtagtttggagcttttttaaagactttaaaagggaactacaatttgacccagcaatcccattactggttatgtatctaaaagaaaacaaattgttttagcaagaatacataggctctcatatgtgcttcgcagtcctattcacaatagcagccatgaaatcaacctaggtgcccattaatggtggaatggataaagaaaacatggcaaatatacatgatggaacactacacagccataaaaagaacaaaatcatgtcctttgcagcaacacagatgtagctggaggccattatcctaagcagattaatgcagtaacagaaaactaaatacagtcttttctcaattataaattggagctaaatattaggt

SEQ ID NO: 389837 - DNA, 565 bp, Homo sapiens
acaaacatataaaaaattctccacatcactaatcatcagagaaatgcaaatcactgcaatgaggttccatctcacatcagtcagaatggatattattaaaacatcaaaaaataacagatgctggcaaggctatggagaaaagggaatgcttgcacactttcagtggaaatctaaattagttcagccactgtggaaagtagtttggagmttttttaaagactttaaaagggaactacaatttgacccagcaatcccattactggttatgtatctaaaagaaaacaaattgttttagcaagaatacataggctctcatatgtgcttcgcagtcctattcacaatagcagccatgaaatcaacctaggtgcccattaatggtggaatggataaagaaaacatggcaaatatacatgatggaacactacacagccataaaaagaacaaaatcatgtcctttgcagcaacacagatgtagctggaggccattatcctaagcagattaatgcagtaacagaaaactaaatacagtcttttctcaattataaattggagctaaatattaggt

SEQ ID NO: 389838 - DNA, 565 bp, Homo sapiens
acaaacatataaaaaattctccacatcactaatcatcagagaaatgcaaatcactgcaatgaggttccatctcacatcagtcagaatggatattattaaaacatcaaaaaataacagatgctggcaaggctatggagaaaagggaatgcttgcacactttcagtggaaatctaaattagttcagccactgtggaaagtagtttggagcttttttaaagactttaaaagggaactacaatttgacccagcaatcccattactggttatgtatctaaaagaaaacaaattgttttagcaagaatacataggctctcatatgtgcytcgcagtcctattcacaatagcagccatgaaatcaacctaggtgcccattaatggtggaatggataaagaaaacatggcaaatatacatgatggaacactacacagccataaaaagaacaaaatcatgtcctttgcagcaacacagatgtagctggaggccattatcctaagcagattaatgcagtaacagaaaactaaatacagtcttttctcaattataaattggagctaaatattaggt

SEQ ID NO: 389839 - DNA, 611 bp, Homo sapiens
ttacacaggtcagcctataaaactactgcataatttctatctgtaaattaaaatagaaaagaaataagattgaagtaaatatgataatagtaaatttcatgtctaagtgtgctaaactagctggcctttcctattcttgaataaaattattctggttgccataatgcatcscgaagcttacctagatgaggagaaattcaaagtattccaaagtctgccctcatgaatagatcaagccttgggggaaaccagtgatctcttggcaacaggaccagaaggtacataatctcttgttttgattatatttcatctgctgaaaaattgcttatccctctgagatttatcttagagataactgaaagtaattttgtgaccttcacattgtccgtatttaagttagataattgaaaatttggtgaggatcccaaaacctcaagtatgtatggagattaagatttccaactctgaagaaaaactgtcaggttcaaatcttggtcctgttcacctctgatgactaactctgtggttacaaaacccacttgcctccctttatccatctgaaaaaaaaattggtatgactacatagtttggcaagtgggggctaactgagc

SEQ ID NO: 389840 - DNA, 611 bp, Homo sapiens
ttacacaggtcagcctataaaactactgcataatttctatctgtaaattaaaatagaaaagaaataagattgaagtaaatatgataatagtaaatttcatgtctaagtgtgctaaactagctggcctttcctattcttgaataaaattattctggttgccataatgcatcgcgaagcttacctagatgaggagaaattcraagtattccaaagtctgccctcatgaatagatcaagccttgggggaaaccagtgatctcttggcaacaggaccagaaggtacataatctcttgttttgattatatttcatctgctgaaaaattgcttatccctctgagatttatcttagagataactgaaagtaattttgtgaccttcacattgtccgtatttaagttagataattgaaaatttggtgaggatcccaaaacctcaagtatgtatggagattaagatttccaactctgaagaaaaactgtcaggttcaaatcttggtcctgttcacctctgatgactaactctgtggttacaaaacccacttgcctccctttatccatctgaaaaaaaaattggtatgactacatagtttggcaagtgggggctaactgagc

SEQ ID NO: 389841 - DNA, 611 bp, Homo sapiens
ttacacaggtcagcctataaaactactgcataatttctatctgtaaattaaaatagaaaagaaataagattgaagtaaatatgataatagtaaatttcatgtctaagtgtgctaaactagctggcctttcctattcttgaataaaattattctggttgccataatgcatcgcgaagcttacctagatgaggagaaattcaaagtattccaaagtctgccctcatgaatagatcaagccttgggggaaaccagtgatctcttggcaacaggaccagaaggtacrtaatctcttgttttgattatatttcatctgctgaaaaattgcttatccctctgagatttatcttagagataactgaaagtaattttgtgaccttcacattgtccgtatttaagttagataattgaaaatttggtgaggatcccaaaacctcaagtatgtatggagattaagatttccaactctgaagaaaaactgtcaggttcaaatcttggtcctgttcacctctgatgactaactctgtggttacaaaacccacttgcctccctttatccatctgaaaaaaaaattggtatgactacatagtttggcaagtgggggctaactgagc

SEQ ID NO: 389842 - DNA, 611 bp, Homo sapiens
ttacacaggtcagcctataaaactactgcataatttctatctgtaaattaaaatagaaaagaaataagattgaagtaaatatgataatagtaaatttcatgtctaagtgtgctaaactagctggcctttcctattcttgaataaaattattctggttgccataatgcatcgcgaagcttacctagatgaggagaaattcaaagtattccaaagtctgccctcatgaatagatcaagccttgggggaaaccagtgatctcttggcaacaggaccagaaggtacataatctcttgttttgattatatttcatctgctgaaaaattgcttatcyctctgagatttatcttagagataactgaaagtaattttgtgaccttcacattgtccgtatttaagttagataattgaaaatttggtgaggatcccaaaacctcaagtatgtatggagattaagatttccaactctgaagaaaaactgtcaggttcaaatcttggtcctgttcacctctgatgactaactctgtggttacaaaacccacttgcctccctttatccatctgaaaaaaaaattggtatgactacatagtttggcaagtgggggctaactgagc

SEQ ID NO: 389843 - DNA, 550 bp, Homo sapiens
tattactggttaccattattattaagagtgttaataataattactacagcaatcttttctagacaagggaaagtgaagcaactaattaaccctcaatgaaaaaaaggtttttttcactgctaaagactattaactctgacatgagttttagaatagttttgctttctctctctttrcctgtattttctttattttttattctaatgtttttgatttacccaaggattttggtgctaggttgtggttctggtaggctgatcaaagttcataccacaggcagttaattttacccagatgactcctggtttctttcttttttaaataaatcatatccactgccgaggttgatatgaggacttctctccattggcaagtagcattgtagccacaatctgttattaaagcttgaaacaaaatggtgattactagtgtttatggccaaattttgttcatgcctgcccactgaatttgtttgggtaccaggaaattatggactgtgtgattcgaattaggataagagattaaaccctgggagccattcttgagcaaa

SEQ ID NO: 389844 - DNA, 550 bp, Homo sapiens
tattactggttaccattattattaagagtgttaataataattactacagcaatcttttctagacaagggaaagtgaagcaactaattaaccctcaatgaaaaaaaggtttttttcactgctaaagactattaactctgacatgagttttagaatagttttgctttctctctctttacctgtattttctttattttttattctaatgtttttgatttacccaaggattttggtgctagrttgtggttctggtaggctgatcaaagttcataccacaggcagttaattttacccagatgactcctggtttctttcttttttaaataaatcatatccactgccgaggttgatatgaggacttctctccattggcaagtagcattgtagccacaatctgttattaaagcttgaaacaaaatggtgattactagtgtttatggccaaattttgttcatgcctgcccactgaatttgtttgggtaccaggaaattatggactgtgtgattcgaattaggataagagattaaaccctgggagccattcttgagcaaa

SEQ ID NO: 389845 - DNA, 550 bp, Homo sapiens
tattactggttaccattattattaagagtgttaataataattactacagcaatcttttctagacaagggaaagtgaagcaactaattaaccctcaatgaaaaaaaggtttttttcactgctaaagactattaactctgacatgagttttagaatagttttgctttctctctctttacctgtattttctttattttttattctaatgtttttgatttacccaaggattttggtgctaggttgtggttctggtaggctgatcaaagttcataccacaggcagttaattttacccagatgactcctggtttctttcttttttaaataaatcatatccactgccgaggttgatatgaggacttctctccattggcaagtagcattgtagccacaatctgttattaaagcttgaaacaaaatggtgattactagtgtttatggccaaattttgttcatgcctgcccactgaatttgtttggrtaccaggaaattatggactgtgtgattcgaattaggataagagattaaaccctgggagccattcttgagcaaa

SEQ ID NO: 389846 - DNA, 522 bp, Homo sapiens
tggcaagtagcattgtagccacaatctgttattaaagcttgaaacaaaatggtgattactagtgtttatggccaaattttgttcatgcctgcccactgaatttgtttgggtaccaggaaattatggactgtgtgattcgaattaggataagagattaaaccctgggagccattcttgagcaaagactgtgctgttaaaaaaaaatggaaaatatctttttaaccaagtcagtgaaattagcttagtcatgaggattscaagtgagctttctgaagttgagatgtaaacacagtgccaaaaagtttcatcaggagactggggagagatgctgattcttattatgtgagagatttgtaatgctaacttaatcttctgacgaaccccttaatttcccatttttaactattctagatgcttgtctcaggaaatggaagaagtctcttcaataatgttaccagagacatgccatgtcatttctatcttctcaatacaactacttagttccttttttctttcattttt

SEQ ID NO: 389847 - DNA, 522 bp, Homo sapiens
tggcaagtagcattgtagccacaatctgttattaaagcttgaaacaaaatggtgattactagtgtttatggccaaattttgttcatgcctgcccactgaatttgtttgggtaccaggaaattatggactgtgtgattcgaattaggataagagattaaaccctgggagccattcttgagcaaagactgtgctgttaaaaaaaaatggaaaatatctttttaaccaagtcagtgaaattagcttagtcatgaggattgcaagtgagctttctgaagttgagatgtaaacacagtgccaaaaagtttcatcaggagactggggagagatgctgattcttattatgtgagagatttgtaatgctaacttaatcttctgacgaaccccttaatttcccatttttaactattctagatgcttgtctcaggaaatggaagaagtctcttcaataatgttaccagagacatgccatgtcatttctatcttctcaatrcaactacttagttccttttttctttcattttt

SEQ ID NO: 389848 - DNA, 567 bp, Homo sapiens
ggccaatccctgcctagtgtaggcccaggtggtataatgcctcataacacaccccattccctgggcaaagacattgtgaatggtgggattagtatcctcctgtgacatgtgacatcctcctgtgacctactcactatgatttggatggttcccctcaaatttgggctagagtgtcagtgagtggattaactcaggacaattccagttctttcyatgtaccttcctttcatcatgagggatatgaagaaaacattagatcatgttggatgctgtttgtctgttggttggttggttggttgggtttaacaataagagcacgtatctagtcttctagttttgtaaggctgccataataatttacatccaagctggtgacttaaaacaacagatatttattctctcacagttgtagaaaccagaagtttggaatcaaagtgtcagaggaccatgttccttccaaaagccctagggaaaaaatttaattcttccttgcctcttccagcttttggtggccccaggcattgcttgactgatggcagcataactccagtctctacttttgtcttc

SEQ ID NO: 389849 - DNA, 567 bp, Homo sapiens
ggccaatccctgcctagtgtaggcccaggtggtataatgcctcataacacaccccattccctgggcaaagacattgtgaatggtgggattagtatcctcctgtgacatgtgacatcctcctgtgacctactcactatgatttggatggttcccctcaaatttgggctagagtgtcagtgagtggattaactcaggacaattccagttctttccatgtaccttcctttcatcatgagggatatgaagaaaacattagatcatgttggatgctgtttgtctgttggttggttggttggttgggtttaacaataagagcacgtatctagtcttctagttttgtaaggctgccataataatttacatccaagctggtgrcttaaaacaacagatatttattctctcacagttgtagaaaccagaagtttggaatcaaagtgtcagaggaccatgttccttccaaaagccctagggaaaaaatttaattcttccttgcctcttccagcttttggtggccccaggcattgcttgactgatggcagcataactccagtctctacttttgtcttc

SEQ ID NO: 389850 - DNA, 567 bp, Homo sapiens
ggccaatccctgcctagtgtaggcccaggtggtataatgcctcataacacaccccattccctgggcaaagacattgtgaatggtgggattagtatcctcctgtgacatgtgacatcctcctgtgacctactcactatgatttggatggttcccctcaaatttgggctagagtgtcagtgagtggattaactcaggacaattccagttctttccatgtaccttcctttcatcatgagggatatgaagaaaacattagatcatgttggatgctgtttgtctgttggttggttggttggttgggtttaacaataagagcacgtatctagtcttctagttttgtaaggctgccataataatttacatccaagctggtgacttaaaacaacagatatttattctctcacagttgtagaaaccagaagtttggaatcaaagtgtcagaggaccatgttccttccaaaagccctagggaaaaawtttaattcttccttgcctcttccagcttttggtggccccaggcattgcttgactgatggcagcataactccagtctctacttttgtcttc

SEQ ID NO: 389851 - DNA, 513 bp, Homo sapiens
ctgcaatttagattatgacaatggtgttcttattttatgcattttcacatgctccaaatctccttctgtatctctttctaaaattttgctgagagtccatcytttctgaccaaaggtgatttcattctccactaaagtagttgttaaaaatatcttctggtagataaggaaaaagtggctcatgtataccactggaattctacacagccataaaaaagaaccaaattaggttatttgcagcaaaatggatgcatatggaggccattatcctaagcaagataacatggaaatagaaccaaatactgcatgttctcacttataagcaggagctaactattgtgtattcatggtcataatggtggaaaggatagtcactgcggactactagaggatggaaagagggtgagaggcaagggccaaaaaactattttttggatcttatgcccactacctcggtgaaagattgattcatactctaaacctcaacatcactcaatatacctttgcagctaa

SEQ ID NO: 389852 - DNA, 513 bp, Homo sapiens
ctgcaatttagattatgacaatggtgttcttattttatgcattttcacatgctccaaatctccttctgtatctctttctaaaattttgctgagagtccatcttttctgaccaaaggtkatttcattctccactaaagtagttgttaaaaatatcttctggtagataaggaaaaagtggctcatgtataccactggaattctacacagccataaaaaagaaccaaattaggttatttgcagcaaaatggatgcatatggaggccattatcctaagcaagataacatggaaatagaaccaaatactgcatgttctcacttataagcaggagctaactattgtgtattcatggtcataatggtggaaaggatagtcactgcggactactagaggatggaaagagggtgagaggcaagggccaaaaaactattttttggatcttatgcccactacctcggtgaaagattgattcatactctaaacctcaacatcactcaatatacctttgcagctaa

SEQ ID NO: 389853 - DNA, 513 bp, Homo sapiens
ctgcaatttagattatgacaatggtgttcttattttatgcattttcacatgctccaaatctccttctgtatctctttctaaaattttgctgagagtccatcttttctgaccaaaggtgatttcattctccactaaagtagttrttaaaaatatcttctggtagataaggaaaaagtggctcatgtataccactggaattctacacagccataaaaaagaaccaaattaggttatttgcagcaaaatggatgcatatggaggccattatcctaagcaagataacatggaaatagaaccaaatactgcatgttctcacttataagcaggagctaactattgtgtattcatggtcataatggtggaaaggatagtcactgcggactactagaggatggaaagagggtgagaggcaagggccaaaaaactattttttggatcttatgcccactacctcggtgaaagattgattcatactctaaacctcaacatcactcaatatacctttgcagctaa

SEQ ID NO: 389854 - DNA, 513 bp, Homo sapiens
ctgcaatttagattatgacaatggtgttcttattttatgcattttcacatgctccaaatctccttctgtatctctttctaaaattttgctgagagtccatcttttctgaccaaaggtgatttcattctccactaaagtagttgttaaaaatatcttctggtagataaggaaaaagtggctcatgtataccactggaattctacacagccataaaaaagaaccaaattaggttatttgcagcaaaatggatgcatatggaggccattatcctaagcaagataacatggaaayagaaccaaatactgcatgttctcacttataagcaggagctaactattgtgtattcatggtcataatggtggaaaggatagtcactgcggactactagaggatggaaagagggtgagaggcaagggccaaaaaactattttttggatcttatgcccactacctcggtgaaagattgattcatactctaaacctcaacatcactcaatatacctttgcagctaa

SEQ ID NO: 389855 - DNA, 554 bp, Homo sapiens
atttttgttggtttatattgaccccttatttagcaaaattcctgaaatgatcacattaatgggaaaatatagttttcagttccwagaaaggtttgcttggtttatgtttaaaaacaaatgattcaacggctcttttcacagacttgatggtgatttgggagaaaatccagaaattggtgacctatcatgagttcataattaggcccattatttctgataaaacatttcagtagcattaaaatgctaagctgaactaagatgttcatgaaatgtattcaaataaacaaacccaatttaaagatgattgtataaaaatatcttacttgataatataaatgcaaaatttgtgaatgtttatttatagttcctgtaatttggggaaattaaagtcacttgggaacaatatttacttcactagcaaccaaaggagtacgattgaaaaataatgacttgaaaataaaataaaagtaaaaaaggacttcatttcttttcacacagtctgaaagagtgagtgcacaagcttttctctgcccaactcctctttgtccacaagg

SEQ ID NO: 389856 - DNA, 554 bp, Homo sapiens
atttttgttggtttatattgaccccttatttagcaaaattcctgaaatgatcacattaatgggaaaatatagttttcagttcctagaaaggtttgcttgrtttatgtttaaaaacaaatgattcaacggctcttttcacagacttgatggtgatttgggagaaaatccagaaattggtgacctatcatgagttcataattaggcccattatttctgataaaacatttcagtagcattaaaatgctaagctgaactaagatgttcatgaaatgtattcaaataaacaaacccaatttaaagatgattgtataaaaatatcttacttgataatataaatgcaaaatttgtgaatgtttatttatagttcctgtaatttggggaaattaaagtcacttgggaacaatatttacttcactagcaaccaaaggagtacgattgaaaaataatgacttgaaaataaaataaaagtaaaaaaggacttcatttcttttcacacagtctgaaagagtgagtgcacaagcttttctctgcccaactcctctttgtccacaagg

SEQ ID NO: 389857 - DNA, 554 bp, Homo sapiens
atttttgttggtttatattgaccccttatttagcaaaattcctgaaatgatcacattaatgggaaaatatagttttcagttcctagaaaggtttgcttggtttatgtttaaaaacaaatgattcaacggctcttttcacagacttgatggtgatttgggagaaaatccagaaattggtgacctatyatgagttcataattaggcccattatttctgataaaacatttcagtagcattaaaatgctaagctgaactaagatgttcatgaaatgtattcaaataaacaaacccaatttaaagatgattgtataaaaatatcttacttgataatataaatgcaaaatttgtgaatgtttatttatagttcctgtaatttggggaaattaaagtcacttgggaacaatatttacttcactagcaaccaaaggagtacgattgaaaaataatgacttgaaaataaaataaaagtaaaaaaggacttcatttcttttcacacagtctgaaagagtgagtgcacaagcttttctctgcccaactcctctttgtccacaagg

SEQ ID NO: 389858 - DNA, 534 bp, Homo sapiens
tttgcttggtttatgtttaaaaacaaatgattcaacggctcttttcacagacttgatggtgatttgggagaaaatccagaaattggtgacctatcatgagttcataattaggcccattatttstgataaaacatttcagtagcattaaaatgctaagctgaactaagatgttcatgaaatgtattcaaataaacaaacccaatttaaagatgattgtataaaaatatcttacttgataatataaatgcaaaatttgtgaatgtttatttatagttcctgtaatttggggaaattaaagtcacttgggaacaatatttacttcactagcaaccaaaggagtacgattgaaaaataatgacttgaaaataaaataaaagtaaaaaaggacttcatttcttttcacacagtctgaaagagtgagtgcacaagcttttctctgcccaactcctctttgtccacaaggaattttcagaattcctccgtgtctgtcttataatttcattccttgctcatataagcaagttggttcagaaa

SEQ ID NO: 389859 - DNA, 534 bp, Homo sapiens
tttgcttggtttatgtttaaaaacaaatgattcaacggctcttttcacagacttgatggtgatttgggagaaaatccagaaattggtgacctatcatgagttcataattaggcccattatttctgataaaacatttcagtagcattaaaatgctaagctgaactaagatgttcatgaaatgtattcaaataaacaaacccaayttaaagatgattgtataaaaatatcttacttgataatataaatgcaaaatttgtgaatgtttatttatagttcctgtaatttggggaaattaaagtcacttgggaacaatatttacttcactagcaaccaaaggagtacgattgaaaaataatgacttgaaaataaaataaaagtaaaaaaggacttcatttcttttcacacagtctgaaagagtgagtgcacaagcttttctctgcccaactcctctttgtccacaaggaattttcagaattcctccgtgtctgtcttataatttcattccttgctcatataagcaagttggttcagaaa

SEQ ID NO: 389860 - DNA, 616 bp, Homo sapiens
cattaatgggaaaatatagttttcagttcctagaaaggtttgcttggtttatgtttaaaaacaaatgattcaacggctcttttcacagacttgatggtgatttgggagaaaatccagaaattggtgacctatcatgagttcataattaggcccattatttctgataaaacatttcagtagcattaaaatgctaagctgaactaagatgttcatgaaatgtattcaaataaacaaacccaatttaaagatgattgtataaaaatatcttacttgataatataaatgcaaaatttgtgaatgtttatttatagttcctgtaatttggggaaattaaagtcacttgggaacaatatttacttcactagcaaccaaaggagtacrattgaaaaataatgacttgaaaataaaataaaagtaaaaaaggacttcatttcttttcacacagtctgaaagagtgagtgcacaagcttttctctgcccaactcctctttgtccacaaggaattttcagaattcctccgtgtctgtcttataatttcattccttgctcatataagcaagttggttcagaaaccctaagactgttataccatcagttgggttagtttaaaataacc

SEQ ID NO: 389861 - DNA, 520 bp, Homo sapiens
gattttcaaactttagttttctcatcttagagtttgaagtaattttatttgtcagctgccagaaaataaaaagaacacataaggtagcagactaatatctacattgacctactgtagagccagaaggacccatttatttagcaagagacttctttactgtgtctagttcaggttcccggaaagatgggacaattygtagtaacactcattccttctgctaagggtcatgagataggtttagacatatggtcccattttgatgatgttttaaactttgtttattttacataccctgtgatagagccaatcaatgtaggggcctaaacgtcggtatagcctgtaattttgacagatgcccagattgtggtattgacaaataggacagatgtcccgaggggcatatgtgtagaaatagatgacatttcacagagaatttactaattcaatataaagctgaaacaacatgtggtagtagttgaacccatatatagaatacatttggggaaatttttctcacata

SEQ ID NO: 389862 - DNA, 520 bp, Homo sapiens
gattttcaaactttagttttctcatcttagagtttgaagtaattttatttgtcagctgccagaaaataaaaagaacacataaggtagcagactaatatctacattgacctactgtagagccagaaggacccatttatttagcaagagacttctttactgtgtctagttcaggttcccggaaagatgggacaattcgtagtaacactcattccttctgctaagggtcatragataggtttagacatatggtcccattttgatgatgttttaaactttgtttattttacataccctgtgatagagccaatcaatgtaggggcctaaacgtcggtatagcctgtaattttgacagatgcccagattgtggtattgacaaataggacagatgtcccgaggggcatatgtgtagaaatagatgacatttcacagagaatttactaattcaatataaagctgaaacaacatgtggtagtagttgaacccatatatagaatacatttggggaaatttttctcacata

SEQ ID NO: 389863 - DNA, 520 bp, Homo sapiens
gattttcaaactttagttttctcatcttagagtttgaagtaattttatttgtcagctgccagaaaataaaaagaacacataaggtagcagactaatatctacattgacctactgtagagccagaaggacccatttatttagcaagagacttctttactgtgtctagttcaggttcccggaaagatgggacaattcgtagtaacactcattccttctgctaagggtcatgagataggtttagacatatggtcccattttgatgatgttttaaactttgtttattttacataccctgtgatagagccaatcaatgtaggggcctaaacgtcggtatagcctgtaattttgacagatgcccagattgtggtattgacaaataggacagatgtcccgaggggcatatgtgtagaaatagatgacatttcacagagaatttactaattcaatataawgctgaaacaacatgtggtagtagttgaacccatatatagaatacatttggggaaatttttctcacata

SEQ ID NO: 389864 - DNA, 564 bp, Homo sapiens
cctgttcattttaccactttcagaatagaaaattctggatctggtgaaaattgatcattttccttttgttttaattcaaggtatagactcrtgtctaaagacatggttaactgtttaaggagaatagaagatgaagaagggttaaatgacaagcaagttttaaaagtctgatatcaactaatttttaggcaaggaagatttaaaaatttcactgtgatttgagtgagaggccccttactttttatatcacattgtaagtttaaagaagaagagaataaaaacatcatggctaaatcacctgaaatgacttcaaattttctacaaatgataaacatatccaatgtgataattataattcaaggcccattttaatctgaccctaaattttccttcccattctaataatcaataagctaatcaataagctcataacatcctacagattctgcacacacacatgcacacacacacagagaaacacagtcacttcttcaaacacattgttttttcatttttcttcgcctttcatctatttatttattagagtgcccacctccaaggtaa

SEQ ID NO: 389865 - DNA, 564 bp, Homo sapiens
cctgttcattttaccactttcagaatagaaaattctggatctggtgaaaattgatcattttccttttgttttaattcaaggtatagactcatgtctaaagacatggttaactgtttaaggagaatagaagatgaagaagggttaaatgacaagcaagttttaaaagtctgatatcaactaatttttaggcaaggaagatttaaaaatttcactgtgatttgagtgagaggccccttactttttatatyacattgtaagtttaaagaagaagagaataaaaacatcatggctaaatcacctgaaatgacttcaaattttctacaaatgataaacatatccaatgtgataattataattcaaggcccattttaatctgaccctaaattttccttcccattctaataatcaataagctaatcaataagctcataacatcctacagattctgcacacacacatgcacacacacacagagaaacacagtcacttcttcaaacacattgttttttcatttttcttcgcctttcatctatttatttattagagtgcccacctccaaggtaa

SEQ ID NO: 389866 - DNA, 564 bp, Homo sapiens
cctgttcattttaccactttcagaatagaaaattctggatctggtgaaaattgatcattttccttttgttttaattcaaggtatagactcatgtctaaagacatggttaactgtttaaggagaatagaagatgaagaagggttaaatgacaagcaagttttaaaagtctgatatcaactaatttttaggcaaggaagatttaaaaatttcactgtgatttgagtgagaggccccttactttttatatcacattgtaagtttaaagaagaagagaataaaaacatcatggctaaatcacctgaaatgacttcaaattttctacaaatgataaacatatccaatgtgataattataattcaaggcccattttaatctgaccctaaattttcyttcccattctaataatcaataagctaatcaataagctcataacatcctacagattctgcacacacacatgcacacacacacagagaaacacagtcacttcttcaaacacattgttttttcatttttcttcgcctttcatctatttatttattagagtgcccacctccaaggtaa

SEQ ID NO: 389867 - DNA, 564 bp, Homo sapiens
cctgttcattttaccactttcagaatagaaaattctggatctggtgaaaattgatcattttccttttgttttaattcaaggtatagactcatgtctaaagacatggttaactgtttaaggagaatagaagatgaagaagggttaaatgacaagcaagttttaaaagtctgatatcaactaatttttaggcaaggaagatttaaaaatttcactgtgatttgagtgagaggccccttactttttatatcacattgtaagtttaaagaagaagagaataaaaacatcatggctaaatcacctgaaatgacttcaaattttctacaaatgataaacatatccaatgtgataattataattcaaggcccattttaatctgaccctaaattttccttcccattctaataatcaataagctaatcaataagctcataacatcctacagattctgcacacacacatgcacacacacacagagaaacacagtcacttcttcaaacacattgttttttcatttttcttygcctttcatctatttatttattagagtgcccacctccaaggtaa

SEQ ID NO: 389868 - DNA, 541 bp, Homo sapiens
tgtcttgggggtttattgtacagattatttcatcaccctggtattaagcctaatacccattagttatttttcctgatcctctccctctaccctctagcctgtgaaaagccccatggatgttgttaccctctgtgtccatrtgtgctcatcatttagctcccacttataagtgagaacatgtggtatttggttttctgtctctacattagttggctaaggataatggcctccagctccataatgtccctaaaaaggacatgatctcattctttttacggctgcatagtattccatgatgaatatgtaccatattttctttatccagtctatcactgatgggcatttagattgattccatgtctttgctttgtgaatagtactgcaatgaagatatgcatgcatgtgtctttataatagagtaatttatattcctttgggtattgataaggtttggctgttaccccacccaaatctcatcttgaattatagctcccgtaattcccatgtgtcatgagagggacccagtgggagataattgaat

SEQ ID NO: 389869 - DNA, 541 bp, Homo sapiens
tgtcttgggggtttattgtacagattatttcatcaccctggtattaagcctaatacccattagttatttttcctgatcctctccctctaccctctagcctgtgaaaagccccatggatgttgttaccctctgtgtccatgtgtgctcatcatttagctcccacttataagtgagaacatgtggtatttggttttctgtctctrcattagttggctaaggataatggcctccagctccataatgtccctaaaaaggacatgatctcattctttttacggctgcatagtattccatgatgaatatgtaccatattttctttatccagtctatcactgatgggcatttagattgattccatgtctttgctttgtgaatagtactgcaatgaagatatgcatgcatgtgtctttataatagagtaatttatattcctttgggtattgataaggtttggctgttaccccacccaaatctcatcttgaattatagctcccgtaattcccatgtgtcatgagagggacccagtgggagataattgaat

SEQ ID NO: 389870 - DNA, 541 bp, Homo sapiens
tgtcttgggggtttattgtacagattatttcatcaccctggtattaagcctaatacccattagttatttttcctgatcctctccctctaccctctagcctgtgaaaagccccatggatgttgttaccctctgtgtccatgtgtgctcatcatttagctcccacttataagtgagaacatgtggtatttggttttctgtctctacattagttggctaaggataatggcctccagctccataatgtccctaaaaaggacatgatctcattctttttacggctgcatagtattccatgatgaatatgtaccatattttctttatccagtctatcactgatgggcatttagattgattccatgtctttgctttgtgaatagtactgcaatgaagatatgmatgcatgtgtctttataatagagtaatttatattcctttgggtattgataaggtttggctgttaccccacccaaatctcatcttgaattatagctcccgtaattcccatgtgtcatgagagggacccagtgggagataattgaat

SEQ ID NO: 389871 - DNA, 541 bp, Homo sapiens
tgtcttgggggtttattgtacagattatttcatcaccctggtattaagcctaatacccattagttatttttcctgatcctctccctctaccctctagcctgtgaaaagccccatggatgttgttaccctctgtgtccatgtgtgctcatcatttagctcccacttataagtgagaacatgtggtatttggttttctgtctctacattagttggctaaggataatggcctccagctccataatgtccctaaaaaggacatgatctcattctttttacggctgcatagtattccatgatgaatatgtaccatattttctttatccagtctatcactgatgggcatttagattgattccatgtctttgctttgtgaatagtactgcaatgaagatatgcatgcatgtgtctttataatagagtaatttatattcctttgggtattgataaggtttggctgttaccccacccaaayctcatcttgaattatagctcccgtaattcccatgtgtcatgagagggacccagtgggagataattgaat

SEQ ID NO: 389872 - DNA, 528 bp, Homo sapiens
ttttcctgatcctctccctctaccctctagcctgtgaaaagccccatggatgttgttaccctctgtgtccatgtgtgctcatcatttagctcccacttataagtgagaacatgtggtatttggttttctgtctctacattagttggctaaggataatggcctccagctccataatgtccctaaaaaggacatgatctcattctttttacggctgcatagtattccatgatgaatatgtaccatattttctttatccagtctatcactgatgggcatttagattgattccatgtctttgctttgtgaatagtactgcaatgaagatatgcatgcatgtgtctttataatagagtaatttatattcctttgggtattgataaggtttggctgttaccccacccaaatctcatcttgaattatagctcccgtaattcccatgtktcatgagagggacccagtgggagataattgaatcatgggggcaggtctttcccatgctcttctcctgatagggaatagatctcatga

SEQ ID NO: 389873 - DNA, 614 bp, Homo sapiens
ttagtagtagcttgtgtttaattaactcaaaaagactttagacttggccatgaaaaaaacttgtatcttttccacttactgctcactgctaattcatttctctttctcttttctttattgatatatatggttggggacgttaagggcaggagaggaatgaaagggcctgtaatgtaaatgtgaaaggtacattttatgtgctttattcatgataaaaagaacaaatgaaaagagcaagttttcatttgtcatgaataaagcatataaatgtatcatgaataaagcacatttcatttatcatgaataaaacacataaaatgtaaaaaatcaattttttgtaatgaagcattgttaaacgccatgaatagttgagaatgttcaagtcattaatgacaaaacatatctttagttggtgtattaggctgttcttgcattgctataaatacataactgagactgagtaatttataaagaaaagaggttgaataggttcatggttctgcaggctgtataggaagcacaatgacttctgtttctggggaagcctcaggaagcttccaatcmcaatggaaggcaaatagggagcaagcacattacatggtgagaacaggagc

SEQ ID NO: 389874 - DNA, 609 bp, Homo sapiens
ggccttaatagaaaactgccttcaaactcaaactgmagcatcaactcttacctgggtcttcagcctgctagcctatccttcagattttggaattgctagctcccacaattttgtaacctaattccttaaaatctctctctctctttctctctccagaattatcaataggctatatgtgcctatatatatacatatacatacacatatgtatatatacatctgtgtatatataaacacgtgtatatacatacacatacacatctgtatatatatgtgtgtgtgtatatatatgtttctgtttctctggatgatattaatacaccagtcaaaatgttagctgcattataaatataaatggttctaaatgcctcttctaggcaaaattattatcactcaatgattgtactttcttcaatttttgtataagcacactgaattcttatatattttgggagaatgatgctatattttctttatattcattagcaggttagtgtgaattaatttgtcctatcactttgattcaagtgttggccaggagaattggttaaattactactaagtggttagaaaaagctggatatacaaaatgattccttaggagaaaga

SEQ ID NO: 389875 - DNA, 524 bp, Homo sapiens
gtggttctgcagctgacacattggggtcttgttttcttacggtttaaatgggaagtcaatcttgaaggtctccaatgatctttattctgcaggggttacatgaatgtggattgattactggagttgatctaagaatgtttacaggtgtgcaatctgtcctgatgagagtggaattagaaaggctaaggccaaatgtgtgtacrtgcgtgtaggtttatatttgagaaataggcaaaccagtggcataaactacattacaatcagaaggcattgctgggagatgtaagaatcatttttatcagataaggcagctcaggaaagtgaaaaagaatgtgttttcccctggggaataaggctgagatgattccactagtgggccctgctcttgcctctctctcctgtacttcacattggcagagcctttgaagataaaggcaagaaggagacatttctcagccactccacaaagacagtaacatcaagccatatgaaaggaaaataatttagtgggaatcacacacatt

SEQ ID NO: 389876 - DNA, 524 bp, Homo sapiens
gtggttctgcagctgacacattggggtcttgttttcttacggtttaaatgggaagtcaatcttgaaggtctccaatgatctttattctgcaggggttacatgaatgtggattgattactggagttgatctaagaatgtttacaggtgtgcaatctgtcctgatgagagtggaattagaaaggctaaggccaaatgtgtgtacatgygtgtaggtttatatttgagaaataggcaaaccagtggcataaactacattacaatcagaaggcattgctgggagatgtaagaatcatttttatcagataaggcagctcaggaaagtgaaaaagaatgtgttttcccctggggaataaggctgagatgattccactagtgggccctgctcttgcctctctctcctgtacttcacattggcagagcctttgaagataaaggcaagaaggagacatttctcagccactccacaaagacagtaacatcaagccatatgaaaggaaaataatttagtgggaatcacacacatt

SEQ ID NO: 389877 - DNA, 524 bp, Homo sapiens
gtggttctgcagctgacacattggggtcttgttttcttacggtttaaatgggaagtcaatcttgaaggtctccaatgatctttattctgcaggggttacatgaatgtggattgattactggagttgatctaagaatgtttacaggtgtgcaatctgtcctgatgagagtggaattagaaaggctaaggccaaatgtgtgtacatgcgtgtaggtttatatttgagaaataggcaaaccagtggcataaactacattacaatcagaaggcattgctgggagatgtaagaatcatttttatcagataaggcagctcaggaaagtgaaaaagaatgtgttttcccctggggaataaggctgagatgawtccactagtgggccctgctcttgcctctctctcctgtacttcacattggcagagcctttgaagataaaggcaagaaggagacatttctcagccactccacaaagacagtaacatcaagccatatgaaaggaaaataatttagtgggaatcacacacatt

SEQ ID NO: 389878 - DNA, 524 bp, Homo sapiens
gtggttctgcagctgacacattggggtcttgttttcttacggtttaaatgggaagtcaatcttgaaggtctccaatgatctttattctgcaggggttacatgaatgtggattgattactggagttgatctaagaatgtttacaggtgtgcaatctgtcctgatgagagtggaattagaaaggctaaggccaaatgtgtgtacatgcgtgtaggtttatatttgagaaataggcaaaccagtggcataaactacattacaatcagaaggcattgctgggagatgtaagaatcatttttatcagataaggcagctcaggaaagtgaaaaagaatgtgttttcccctggggaataaggctgagatgattccactagtgggccctgctcttgcctctctctcctgtacttcacattggcagagsctttgaagataaaggcaagaaggagacatttctcagccactccacaaagacagtaacatcaagccatatgaaaggaaaataatttagtgggaatcacacacatt

SEQ ID NO: 389879 - DNA, 587 bp, Homo sapiens
agcataaggactagtctatctagtctcactgatgagacctcaaatgcacaggcaacaaaagttaaaacagacaaacaagaatatatcgaactaaaactccctgcataaataacaaaggaaacaacaacgtgaggaaactatctgtagattaggagaaaatatttgcaaactatgcatctgacaagggactaatrcccagaatatatgaggaactcaaacaactcaacaacaacaacaacaacaaaaaacaatccattaaaacacaggcatttctgagtagacatttctcaaaaaaaagacatacaaatgatcaacaagtatataaaaaatccgtcacaaatcatcagggaaatgcagattaaagccacaatgagataacatctcaccccagttagaatggctactatcaaaaagaccccccaaaaaatttgtgcagagaaaagggaattcttatatactgttaatgggatataaattcatacagccataatggaaaacagtagagttttctcaaaacactatgtataaaatttccatattatccagcaatcttactattgaatatttatccaaagaaaagaaaatca

SEQ ID NO: 389880 - DNA, 582 bp, Homo sapiens
ataacaattaaagaaattgtatttgtaataaaattattttcacaaagggtagtccaagcccagatggcttcattggtgarttctaccaaatgtttatgaaatggtaatatcaatccttcacaaactattcaaaaataaaattaaattaaaaggtagagcaagcacttcccaacttattctgtgaggccaaaattaccttaataccaaaaccaaacaaagccatcataggaaaataaactacacactaaaataccttatgaatataaatgcaagatttctaaacaaaatattagcaaactacatccagcaatatatagaaaagaactgattattttccatgaccaaggatttgtcctgggaatacaagcttgttttaacattcaaaaataagtcagggtaaaataccatctcaatacaataaaggacaaaaaaatacatgatagatacagaaaaagcatttgacaaaatcacacactatttaaaacaaaaaagtaaaaaaaaaaaaaaagacccaggaagctggttatagaaggaaactagctcaaccaaataaaggttatttacaaaagccccaagccttat

SEQ ID NO: 389881 - DNA, 582 bp, Homo sapiens
ataacaattaaagaaattgtatttgtaataaaattattttcacaaagggtagtccaagcccagatggcttcattggtgaattctaccaaatgtttatgaaatggtaatatcaatccttcacaaactattcaaaaataaaattaaattaaaaggtagagcaagcayttcccaacttattctgtgaggccaaaattaccttaataccaaaaccaaacaaagccatcataggaaaataaactacacactaaaataccttatgaatataaatgcaagatttctaaacaaaatattagcaaactacatccagcaatatatagaaaagaactgattattttccatgaccaaggatttgtcctgggaatacaagcttgttttaacattcaaaaataagtcagggtaaaataccatctcaatacaataaaggacaaaaaaatacatgatagatacagaaaaagcatttgacaaaatcacacactatttaaaacaaaaaagtaaaaaaaaaaaaaaagacccaggaagctggttatagaaggaaactagctcaaccaaataaaggttatttacaaaagccccaagccttat

SEQ ID NO: 389882 - DNA, 582 bp, Homo sapiens
ataacaattaaagaaattgtatttgtaataaaattattttcacaaagggtagtccaagcccagatggcttcattggtgaattctaccaaatgtttatgaaatggtaatatcaatccttcacaaactattcaaaaataaaattaaattaaaaggtagagcaagcacttcccaacttattctgtgaggccaaaattaccttaataccaaaaccaaacaaagccatcataggaaaataaactacacactaaaataccttatgaatataaatgcaagatttctaaacaaaatattagcaaactacatccagcaatatatagaaaagaactgattattttccatgaccaaggatttgtcctgggaatacaagcttgttttaacattcaaaaataagtcagggtaaaataccatctcratacaataaaggacaaaaaaatacatgatagatacagaaaaagcatttgacaaaatcacacactatttaaaacaaaaaagtaaaaaaaaaaaaaaagacccaggaagctggttatagaaggaaactagctcaaccaaataaaggttatttacaaaagccccaagccttat

SEQ ID NO: 389883 - DNA, 587 bp, Homo sapiens
agcataaggactagtctatctagtctcactgatgagacctcaaatgcacaggcaacaaaagttaaaacagacaaacaagaatatatcgaactaaaactccctgcataaataacaaaggaaacaacaacgtgaggaaactatctgtagattaggagaaaatatttgcaaactatgcatctgacaagggactaatgcccagaatatatgaggaactcaaacaactcaacaacaacaacaacaacaaaaaacaatccattaaaacacaggcatttctgagtagacatttctcaaaaaaaagacatacaaatgatcaacaagtatataaaaaatccrtcacaaatcatcagggaaatgcagattaaagccacaatgagataacatctcaccccagttagaatggctactatcaaaaagaccccccaaaaaatttgtgcagagaaaagggaattcttatatactgttaatgggatataaattcatacagccataatggaaaacagtagagttttctcaaaacactatgtataaaatttccatattatccagcaatcttactattgaatatttatccaaagaaaagaaaatca

SEQ ID NO: 389884 - DNA, 587 bp, Homo sapiens
agcataaggactagtctatctagtctcactgatgagacctcaaatgcacaggcaacaaaagttaaaacagacaaacaagaatatatcgaactaaaactccctgcataaataacaaaggaaacaacaacgtgaggaaactatctgtagattaggagaaaatatttgcaaactatgcatctgacaagggactaatgcccagaatatatgaggaactcaaacaactcaacaacaacaacaacaacaaaaaacaatccattaaaacacaggcatttctgagtagacatttctcaaaaaaaagacatacaaatgatcaacaagtatataaaaaatccgtcacaaatcatcagggaaatgcagattaaagccacaatgagataacatctcaccccagttagaatggctactatcaaaaagaccccccaaaaaatttgtgcagagaaaagggaattcttatatactgttaatgggatataaattcatacagccataatggaaaacagtagagttttctcaaaacactatgtatmaaatttccatattatccagcaatcttactattgaatatttatccaaagaaaagaaaatca

SEQ ID NO: 389885 - DNA, 438 bp, Homo sapiens
tgggatataaattcatacagccataatggaaaacagtagagttttctcaaaacactatgtataaawtttccatattatccagcaatcttactattgaatatttatccaaagaaaagaaaatcagcttatcaaagatatatctgaactcccatgtttattgaagtgctattcacaatgaacaagatacagaatcaacctaaatgtctatcaacagatgaatgaagaaaatgtggtatatatatatatatatacacaatggaatactattcagccataaaaagaatgaaatactttcatttgtggcaacagggataagcctaaaggacattatgttgagtaaagtaactcaggcacagaaagatttatactgaatgttctcatatgtaagaagtgaaagaagttgaacacatagaagtggagagaattgtgtttattaga

SEQ ID NO: 389886 - DNA, 438 bp, Homo sapiens
tgggatataaattcatacagccataatggaaaacagtagagttttctcaaaacactatgtataaaatttccatattatccagcaatcttactattgaatatttatccaaagaaaagaaaatcagcttatcaaagatatatctgaactcccatgtttattgaagtgctattcacaatgamcaagatacagaatcaacctaaatgtctatcaacagatgaatgaagaaaatgtggtatatatatatatatatacacaatggaatactattcagccataaaaagaatgaaatactttcatttgtggcaacagggataagcctaaaggacattatgttgagtaaagtaactcaggcacagaaagatttatactgaatgttctcatatgtaagaagtgaaagaagttgaacacatagaagtggagagaattgtgtttattaga

SEQ ID NO: 389887 - DNA, 505 bp, Homo sapiens
atgtctcaatatgtccaacaccactagacaactagacccctagaaattttactgaggtagaaggtccctgaattttagtcagatttatttcccatcctctggtatgcaaatatcttaccaataagtccaggatgtttgctacttcttgctcactgggtccaatcagcataatgtcattaatgtaacaaaccagtgtgatatgttygtggaagtgaaaagtgatcaaagtctctttgaataagattatgatccaaagtcagagagttcatatacccctgagatagaacagtaaaggtatatttcctgtaaaggtatatttacattgccagctgaaggcaaattgcttccaatggacatgaatggagaaaaaggagtttgccaagttaatggctgcatgcaagataccagcagacgtgttaatttgctcaagtaatgaaaccacatctggtagagctgctgcaattggagtcaccatttggttaagcttacaataatccactatcat

SEQ ID NO: 389888 - DNA, 505 bp, Homo sapiens
atgtctcaatatgtccaacaccactagacaactagacccctagaaattttactgaggtagaaggtccctgaattttagtcagatttatttcccatcctctggtatgcaaatatcttaccaataagtccaggatgtttgctacttcttgctcactgggtccaatcagcataatgtcattaatgtaacaaaccagtgtgatatgttcgtggaagtgaaaagtgatcaaagtctctttgaataagattatgatccaaagtcagagagttcatatacccctgagatagaacagtaaaggtatatttcctgtaaaggtatatttacattgccagctgaaggcaaattgcttccaatggacawgaatggagaaaaaggagtttgccaagttaatggctgcatgcaagataccagcagacgtgttaatttgctcaagtaatgaaaccacatctggtagagctgctgcaattggagtcaccatttggttaagcttacaataatccactatcat

SEQ ID NO: 389889 - DNA, 505 bp, Homo sapiens
atgtctcaatatgtccaacaccactagacaactagacccctagaaattttactgaggtagaaggtccctgaattttagtcagatttatttcccatcctctggtatgcaaatatcttaccaataagtccaggatgtttgctacttcttgctcactgggtccaatcagcataatgtcattaatgtaacaaaccagtgtgatatgttcgtggaagtgaaaagtgatcaaagtctctttgaataagattatgatccaaagtcagagagttcatatacccctgagatagaacagtaaaggtatatttcctgtaaaggtatatttacattgccagctgaaggcaaattgcttccaatggacatgaatggagaaaaaggagtttgccaagttaatggctgcatgcaagataccagcagacgtgttaatttgctcaagtaatraaaccacatctggtagagctgctgcaattggagtcaccatttggttaagcttacaataatccactatcat

SEQ ID NO: 389890 - DNA, 438 bp, Homo sapiens
tgggatataaattcatacagccataatggaaaacagtagagttttctcaaaacactatgtataaaatttccatattatccagcaatcttactattgaatatttatccaaagaaaagaaaatcagcttatcaaagatatatctgaactcccatgtttattgaagtgctattcacaatgaacaagatacagaatcaacctaaatgtctatcaacagatgaatgaagaaaatgtggtatatatatatatatatacacaatggaatactattcagccataaaaagaatgaaatactttcatttgtggcaacagggataagcctaaaggacattatgttgagtaaagtaactcaggcacagaaagatttatactgaatgttctcatatgtaagaastgaaagaagttgaacacatagaagtggagagaattgtgtttattaga

SEQ ID NO: 389891 - DNA, 615 bp, Homo sapiens
aattggaaaatagaattacaggaataggaccatcatgaaatgatttttttaatttattaccattcagagcatctatacttgtttgtcacacattcagaagaatggaagaaaggagggtagagaatgagtcatatgcattgaaaattattattcagttttaaaatgagtgcccaaaactatagacactgtacgaccctgaatttgaatattttacatttcattcttctattaaaattcatttcattgagaacaaaaagaaaacaagaaaaaataagaagataagcatcttcagagaaacaactatagcccgaaaccaaaaactgagaagcaaaccttccaaatactgttatatttcaactaaaacaaggagtgatcagagtgagtgctttcacatgtataatcagtacgtgttcaggatggtcattttttccagatatcattgccgctactctgggagatgtaactcaaaaactatttttcttaaaattgttagattttatggaataatgtgaccatgatattaataaaagtaggaaagtcactatagagtaastcagtgttgtctaaccataaaatggaaagtatttgaagttgtgagagaattcaggctgatgt

SEQ ID NO: 389892 - DNA, 558 bp, Homo sapiens
tgagtgctttcacatgtataatcagtacgtgttcaggatggtcattttttccagatatcattgccgctactctgggagatgtaactcaaaaactatttttcttaaaattgttagattttatggaataatgtgaccatgatattaataaaagtaggaaagtcactatagagtaactcagtgttgtctaaccataaaatggaaagwatttgaagttgtgagagaattcaggctgatgtactctgttcatttcatatactctgagttccaaacagaatgaagctcacagaagtggaaaggagcaaaagagaaaagaattaaccagcatgtgataatatagagattagaaatgtagatttagaaacctaggaatctaaatctgagccacattacctttagaaaagtgaatgctgataggaggagaaacaattatccagtacttagggagtaagaaaatagtgtgacggtattccattacaaaaacatggatttaaaaaaagatacaaattgcaatgccaccccactcctgccccagaggatcccttagctaatacctggatc

SEQ ID NO: 389893 - DNA, 594 bp, Homo sapiens
atactattagagtagagtccttagcattttggggtctaatcatattaaacagccattctagaaatgctaaaaacaacagaagaactccattattaatattctgttcctctagaaccactcctgataccaaactctgtgttagtcaaggttctctagagagacagaactaataggatctatatatagaaagggagggagtttattatgttgyagtaactcacatgatcacaaggtcccacaataggccatctacaagctgaggagaaaggaagccagtccaagtcccaaagctgaagaacttggagttcgatgttccagggcaggaagcatccagcacaggggaaagatgtatgctaggaggctaagccagtctaggctttttacgtttttctgcctgcttcatatcctggccacactggcagttgatcagactgtgtccacccagattaagggtgggcttgcctttcccagcccactgactcaaatgttaatctcctttggcaagacccttacagacccacccaagatcgatactttgcatccttcaatccaatccagttgacacttaatattaaccgttacactgtagcttct

SEQ ID NO: 389894 - DNA, 594 bp, Homo sapiens
atactattagagtagagtccttagcattttggggtctaatcatattaaacagccattctagaaatgctaaaaacaacagaagaactccattattaatattctgttcctctagaaccactcctgataccaaactctgtgttagtcaaggttctctagagagacagaactaataggatctatatatagaaagggagggagtttattatgttgtagtaactcacatgatcacaaggtcccacaataggccatctacaagctgaggagaaaggaagccagtccaagtcccaaagctgaagaacttggagttcgatgttccagggcaggaagcatccagcacaggggaaagatgtaygctaggaggctaagccagtctaggctttttacgtttttctgcctgcttcatatcctggccacactggcagttgatcagactgtgtccacccagattaagggtgggcttgcctttcccagcccactgactcaaatgttaatctcctttggcaagacccttacagacccacccaagatcgatactttgcatccttcaatccaatccagttgacacttaatattaaccgttacactgtagcttct

SEQ ID NO: 389895 - DNA, 594 bp, Homo sapiens
atactattagagtagagtccttagcattttggggtctaatcatattaaacagccattctagaaatgctaaaaacaacagaagaactccattattaatattctgttcctctagaaccactcctgataccaaactctgtgttagtcaaggttctctagagagacagaactaataggatctatatatagaaagggagggagtttattatgttgtagtaactcacatgatcacaaggtcccacaataggccatctacaagctgaggagaaaggaagccagtccaagtcccaaagctgaagaacttggagttcgatgttccagggcaggaagcatccagcacaggggaaagatgtatgctaggaggctaagccagtctaggctttttacgtttttctgcctgcttcatatcctggccacactggcagttgatcagactgtgtccacccagattaagggtgggcttgcctttcccagcccactgactcaaatgttaatctcctttggcaagacccttacagacccacccaagatcratactttgcatccttcaatccaatccagttgacacttaatattaaccgttacactgtagcttct

SEQ ID NO: 389896 - DNA, 594 bp, Homo sapiens
atactattagagtagagtccttagcattttggggtctaatcatattaaacagccattctagaaatgctaaaaacaacagaagaactccattattaatattctgttcctctagaaccactcctgataccaaactctgtgttagtcaaggttctctagagagacagaactaataggatctatatatagaaagggagggagtttattatgttgtagtaactcacatgatcacaaggtcccacaataggccatctacaagctgaggagaaaggaagccagtccaagtcccaaagctgaagaacttggagttcgatgttccagggcaggaagcatccagcacaggggaaagatgtatgctaggaggctaagccagtctaggctttttacgtttttctgcctgcttcatatcctggccacactggcagttgatcagactgtgtccacccagattaagggtgggcttgcctttcccagcccactgactcaaatgttaatctcctttggcaagacccttacagacccacccaagatcgatactttgcatccttcaatccaatcmagttgacacttaatattaaccgttacactgtagcttct

SEQ ID NO: 389897 - DNA, 541 bp, Homo sapiens
tgctagtgagttagtagtggtagtagtgagggttttcactcccatttctactccttaattcctagacccacgaatrctggctgtaggagaaacaggatcatatatcagatgctgatacagaacatacacagccttctggaaaccctttccccattctatctcaacaaatgttcttgctttaacaagaacatgctgaaagacttggagtttaatttccgttacaattcagccattcacaggatgagattctgcatttcactttctgcaatctcaactctgtggacaccaaaaataagagttatcttcagatgacaataagtcctcaggtcacttatgcttgtgggaatttaaatcctaagctcatccttttctttcaccactttgtccagtgacattaggagcaaacggccaaccttgttatatttgttagttttccaaaactgttcaaaagcatcatctacacagtcattcagttccttgctttttataagtggcatccaaggcagatattttgtatatctctattaccagattatgtcat

SEQ ID NO: 389898 - DNA, 541 bp, Homo sapiens
tgctagtgagttagtagtggtagtagtgagggttttcactcccatttctactccttaattcctagacccacgaatgctggctgtaggagaaacaggatcatatatcagatgctgatacagaacatacacagccttctggaaaccctttccccattctmtctcaacaaatgttcttgctttaacaagaacatgctgaaagacttggagtttaatttccgttacaattcagccattcacaggatgagattctgcatttcactttctgcaatctcaactctgtggacaccaaaaataagagttatcttcagatgacaataagtcctcaggtcacttatgcttgtgggaatttaaatcctaagctcatccttttctttcaccactttgtccagtgacattaggagcaaacggccaaccttgttatatttgttagttttccaaaactgttcaaaagcatcatctacacagtcattcagttccttgctttttataagtggcatccaaggcagatattttgtatatctctattaccagattatgtcat

SEQ ID NO: 389899 - DNA, 541 bp, Homo sapiens
tgctagtgagttagtagtggtagtagtgagggttttcactcccatttctactccttaattcctagacccacgaatgctggctgtaggagaaacaggatcatatatcagatgctgatacagaacatacacagccttctggaaaccctttccccattctatctcaacaaatgttcttgctttaacaagaacatgctgaaagacttggagtttaatttccgttacaattcagccattcacaggatgagattctgcatttcactttctgcaatctcaactctgtggacaccaaaaataagagttatcttcagatgacaataagtcctcaggtcacttatgcttgtgggaatttaaatcctaagctcatccttttctttcaccactttgtccagtgacattaggagcaaacrgccaaccttgttatatttgttagttttccaaaactgttcaaaagcatcatctacacagtcattcagttccttgctttttataagtggcatccaaggcagatattttgtatatctctattaccagattatgtcat

SEQ ID NO: 389900 - DNA, 541 bp, Homo sapiens
tgctagtgagttagtagtggtagtagtgagggttttcactcccatttctactccttaattcctagacccacgaatgctggctgtaggagaaacaggatcatatatcagatgctgatacagaacatacacagccttctggaaaccctttccccattctatctcaacaaatgttcttgctttaacaagaacatgctgaaagacttggagtttaatttccgttacaattcagccattcacaggatgagattctgcatttcactttctgcaatctcaactctgtggacaccaaaaataagagttatcttcagatgacaataagtcctcaggtcacttatgcttgtgggaatttaaatcctaagctcatccttttctttcaccactttgtccagtgacattaggagcaaacggccaaccttrttatatttgttagttttccaaaactgttcaaaagcatcatctacacagtcattcagttccttgctttttataagtggcatccaaggcagatattttgtatatctctattaccagattatgtcat

SEQ ID NO: 389901 - DNA, 600 bp, Homo sapiens
aaccacaaaaagattctgtgaaagcttagatgttactaaaattaaaaacttcagccctgtgaaagtcactgttaggataatttttaaaaagtaatagactgggaaaaaatttgcaagacatgcatctgataaaaggtttgtatccaaaatatacaataaacacttaagactcaacaataagaaaacaatcacatttgaaagttggcaaaagattaaatagacacctcatcaaagaagatacacagatagaaaataaaaatggtcaacatcatttgttactagaacattgcaaattaaaacaattaggaaccactacttatttattagaattgctaaaatctaaaaatctgataatacttaatactgagaagaatgcagagtaacaggaactttcattcttttctggtggaaatgaaaaaccgtacagattccttggaaggcaacttttcaatttmtttcttttttttttttttttctgggacagagtctcactctgtcacccagtctggagtgcagtggcacaatcttggctcactgcaagctctgcctcccaggttcatgccattctcctgcctcagcctcccaagcttttcaatttct

SEQ ID NO: 389902 - DNA, 579 bp, Homo sapiens
gcccagaccaatgtcctggagtgtttcccaaaagtatacttctagtgtcatagttttatatcttagatttaagtctttaagtcattttgatttgatttttgtatatggtaagaaataaggggttagtttcattcttctgcatatggttatctggtttcctagcaccatttattatagagactgtccttttcccattgtgtatttctagcatccttgtcaaaaatgaattggctcatttgcataaatgttgtaatgcgtgatttacatctgggttctctatagactatttcattagtctatgtttctggttttstttgtttgtttgtttgtttttgagatggagtctcgccctgtcgcccaggttggagtgcaatggtgtgatctcagctcactgcaacctccacctcccaggctcaagagattctcctgcctcagactccctagtagctgggattacaggtgtgcgccaccacactaattttttttatctttagtagagacagggtttcaccatgttggccaggtctcaaactcctgacctcgtcatccaccctcccaaagtgctgggattacatgcgt

SEQ ID NO: 389903 - DNA, 579 bp, Homo sapiens
gcccagaccaatgtcctggagtgtttcccaaaagtatacttctagtgtcatagttttatatcttagatttaagtctttaagtcattttgatttgatttttgtatatggtaagaaataaggggttagtttcattcttctgcatatggttatctggtttcctagcaccatttattatagagactgtccttttcccattgtgtatttctagcatccttgtcaaaaatgaattggctcatttgcataaatgttgtaatgcgtgatttacatctgggttctctatagactatttcattagtctatgtttctggttttgtttgtttgtttgtttgtttttgagatggagtctcgccctgtcgcccaggttggagtgcaatggtgtgatctcagctcactgcaacctccacctcccaggctcaagagattctcctgcctcagactccctagtagctgggattacaggtgtgcrccaccacactaattttttttatctttagtagagacagggtttcaccatgttggccaggtctcaaactcctgacctcgtcatccaccctcccaaagtgctgggattacatgcgt

SEQ ID NO: 389904 - DNA, 550 bp, Homo sapiens
atactgctctgtagtattctctttttgtgtgtccttgtctggtttgggtatcaaaattatgttggcctggtagaaggagttgggaagtactcaytctactttaactttttaaaagagtttgagaagaattggtataatctcttttttaaatatttggtagaattcaacaataaagccataaggtcttcctttgatgggaaaatttttattatgacttcaatctaataaaggtactgataatattattcactattggtttgttgaggttttctatttcttcatggttcaaacttgtaggttgcatgggttcaggaatttattcatttcttctaagttttcaatttattaatttatagatgtttgtaatagtctgtaatgattatttgtatttctgtggtctcagtttttatgactccttttttggtttctgattttatttaggtcttctctctttcttattctggctaaaggtttgttgaatttgtttgtcttttcaaaaaacaacttttttttaattgatcttctgtattatttttagtctaatttttat

SEQ ID NO: 389905 - DNA, 550 bp, Homo sapiens
atactgctctgtagtattctctttttgtgtgtccttgtctggtttgggtatcaaaattatgttggcctggtagaaggagttgggaagtactcattctacttyaactttttaaaagagtttgagaagaattggtataatctcttttttaaatatttggtagaattcaacaataaagccataaggtcttcctttgatgggaaaatttttattatgacttcaatctaataaaggtactgataatattattcactattggtttgttgaggttttctatttcttcatggttcaaacttgtaggttgcatgggttcaggaatttattcatttcttctaagttttcaatttattaatttatagatgtttgtaatagtctgtaatgattatttgtatttctgtggtctcagtttttatgactccttttttggtttctgattttatttaggtcttctctctttcttattctggctaaaggtttgttgaatttgtttgtcttttcaaaaaacaacttttttttaattgatcttctgtattatttttagtctaatttttat

SEQ ID NO: 389906 - DNA, 600 bp, Homo sapiens
ctatattggtgcaggatgatggtaattgcaagaaagggcttaaataaaacagtagaataaaattcaatctgatacaaaaaagtcagaggcaagacaaaaatagtttataaatataaaataaggaatcaaatctaagcttgtgcrtgaataagataaaaaaattatcaaattcatgttcagtctggtaggagtgacctagacaaaacatgaggaagaaagagggactatctcagtaattttatgggattattatgacttttaaaaatatttgatcttttgaacatctcacaggataaaatattgaattaattagaatatttagttgactgaaacacccattttcctactcattttaaaaaactgaattttaatgtgtataagtatagattaatgaacgtatacataaacagagaaagagagagagggaaaaaaacattctctgcatattgtttcttcttgcaagaatgttaagaacaaaggtttttctttatgtctctctccaattaagttaaagatggtggagctgcatactagttgctattataatagcttttgcataacattttattcacagttgggaaaaacaaatgagcaaataaa

SEQ ID NO: 389907 - DNA, 550 bp, Homo sapiens
atactgctctgtagtattctctttttgtgtgtccttgtctggtttgggtatcaaaattatgttggcctggtagaaggagttgggaagtactcattctactttaactttttaaaagagtttgagaagaattggtataatctcttttttaaatatttggtagaattcaacaataaagccataaggtcttcctttgatgggaaaatttttattatgacttcaatctaataaaggtactgataatattattcactattggtttgttgaggttttctatttcttcatggttcaaacttgtaggttgcatgggttcaggaatttattcatttcttctaagttttcaatttattaatttatagawgtttgtaatagtctgtaatgattatttgtatttctgtggtctcagtttttatgactccttttttggtttctgattttatttaggtcttctctctttcttattctggctaaaggtttgttgaatttgtttgtcttttcaaaaaacaacttttttttaattgatcttctgtattatttttagtctaatttttat

SEQ ID NO: 389908 - DNA, 636 bp, Homo sapiens
aactcattaagcaaggtgagtgcycttgttaaaaatcgattttccatagatgtataggtttatttctgaactctcaattttattccattggcctgtatgtttatccatgtgccaggatcatactgatttgattacctggctttgtagcaattgggtagtgtgagttctttcaattttttcttttatttttcaacgtttcccttcatttgccttcaccccagcctatggtagcctctcctctattttatgtccctataatatatattttatataggtggaatcatacaatattaatacttttgtgtctggctcatttcactcagcataatgttttcaaggttaatccaagttttagcatgcatcagaacttcatttctttctattgctgaataatattttattgcagttatatagaatattttgtttatccattcatctgtggatagttacttgggtagctttcaccgtttgacaattatgaataataaatattggtatacaagtacctgcatgagactttgttttccattcttttggtcatatacctaagagagaagttgctgggtcatatgggagttctattattaacatcttggaaaactgccaaacttttctacagcatctgtactattttac

SEQ ID NO: 389909 - DNA, 636 bp, Homo sapiens
aactcattaagcaaggtgagtgcccttgttaaaaatcgattttccatagatgtataggtttatttctgaactctcaattttattccattggcctgtatgtttatccatgtgccaggatcatactgatttgattacctggctttgtagcaattgggtagtgtgagttctttcaattttttcttttatttttcaacgtttcccttcatttgccttcaccccagcctatggtagcctctcctctattttatgtccctataatatatattttatataggtggaatcatacaatattaatacttttgtgtytggctcatttcactcagcataatgttttcaaggttaatccaagttttagcatgcatcagaacttcatttctttctattgctgaataatattttattgcagttatatagaatattttgtttatccattcatctgtggatagttacttgggtagctttcaccgtttgacaattatgaataataaatattggtatacaagtacctgcatgagactttgttttccattcttttggtcatatacctaagagagaagttgctgggtcatatgggagttctattattaacatcttggaaaactgccaaacttttctacagcatctgtactattttac

SEQ ID NO: 389910 - DNA, 636 bp, Homo sapiens
aactcattaagcaaggtgagtgcccttgttaaaaatcgattttccatagatgtataggtttatttctgaactctcaattttattccattggcctgtatgtttatccatgtgccaggatcatactgatttgattacctggctttgtagcaattgggtagtgtgagttctttcaattttttcttttatttttcaacgtttcccttcatttgccttcaccccagcctatggtagcctctcctctattttatgtccctataatatatattttatataggtggaatcatacaatattaatacttttgtgtctggctcatttcactcagcataatgttttcaaggttaatccawgttttagcatgcatcagaacttcatttctttctattgctgaataatattttattgcagttatatagaatattttgtttatccattcatctgtggatagttacttgggtagctttcaccgtttgacaattatgaataataaatattggtatacaagtacctgcatgagactttgttttccattcttttggtcatatacctaagagagaagttgctgggtcatatgggagttctattattaacatcttggaaaactgccaaacttttctacagcatctgtactattttac

SEQ ID NO: 389911 - DNA, 636 bp, Homo sapiens
aactcattaagcaaggtgagtgcccttgttaaaaatcgattttccatagatgtataggtttatttctgaactctcaattttattccattggcctgtatgtttatccatgtgccaggatcatactgatttgattacctggctttgtagcaattgggtagtgtgagttctttcaattttttcttttatttttcaacgtttcccttcatttgccttcaccccagcctatggtagcctctcctctattttatgtccctataatatatattttatataggtggaatcatacaatattaatacttttgtgtctggctcatttcactcagcataatgttttcaaggttaatccaagttttagcatgcatcagaacttcatttctttctattgctgaataatattttattgcagttatatagaatattttgtttatccattcatctgtggatagttacttgggtwgctttcaccgtttgacaattatgaataataaatattggtatacaagtacctgcatgagactttgttttccattcttttggtcatatacctaagagagaagttgctgggtcatatgggagttctattattaacatcttggaaaactgccaaacttttctacagcatctgtactattttac

SEQ ID NO: 389912 - DNA, 590 bp, Homo sapiens
aagtcagaggcaagacaaaaatagtttataaatataaaataaggaatcaaatctaagcttgtgcatgaataagataaaaaaattatcaaattcatgttcagtctggtaggagtgacctagacaaaacatgaggaagaaagagggactatctcagtaattttatgggattattatgacttttaaaaatatttgatcttttgaacatctcacaggataaaatattgaattaattagaatatttagttgactgaaacacccattttcctactcattttaaaaaactgaattttaatgtrtataagtatagattaatgaacgtatacataaacagagaaagagagagagggaaaaaaacattctctgcatattgtttcttcttgcaagaatgttaagaacaaaggtttttctttatgtctctctccaattaagttaaagatggtggagctgcatactagttgctattataatagcttttgcataacattttattcacagttgggaaaaacaaatgagcaaataaacattgagatgtaaaagcagtataccactacctttaatgtaccagtctttattaggtaagagagtgtatt

SEQ ID NO: 389913 - DNA, 590 bp, Homo sapiens
aagtcagaggcaagacaaaaatagtttataaatataaaataaggaatcaaatctaagcttgtgcatgaataagataaaaaaattatcaaattcatgttcagtctggtaggagtgacctagacaaaacatgaggaagaaagagggactatctcagtaattttatgggattattatgacttttaaaaatatttgatcttttgaacatctcacaggataaaatattgaattaattagaatatttagttgactgaaacacccattttcctactcattttaaaaaactgaattttaatgtgtataagtatagattaatgaacgtatacataaacagagaaagagagagagrgaaaaaaacattctctgcatattgtttcttcttgcaagaatgttaagaacaaaggtttttctttatgtctctctccaattaagttaaagatggtggagctgcatactagttgctattataatagcttttgcataacattttattcacagttgggaaaaacaaatgagcaaataaacattgagatgtaaaagcagtataccactacctttaatgtaccagtctttattaggtaagagagtgtatt

SEQ ID NO: 389914 - DNA, 636 bp, Homo sapiens
tctttctggtgggctcatggtctcgctgacttcaggagtgaagctgcaggccttaacggtgagtgttacagctcttaaaggcggcacatctggagttgttcgttccttccggtgggttcctggtctcgctggcctcaggactgaaactgcagaccttccaggtgagtgttacagtgttacagttcataaaggtggtgtccagagttgttcattcctcccatccagagttgytcgaccctgcccgtgggttcatctattttcttggagggagagaattaagttacaagggaatggtgaaccacaacaaatgaaaagttgttttgtgagtagtgtacctttgcatggctgtatttcgaaaggtttgccaaaaaaaaatgaaaaagaatgccaattatttttctctgaaattgtgcctaattatgttatatgatattaaattaatgtttaaagagaatacatagtatgcaaaatacttcacacttcacacatgtcatttttaattcaattgtttaaaaaaataagcacaattgcctctgtttcaccaatgattaaaataagatgaccataatctatggaagctgcccaaagaaaaacaatgatggagtcagatataaatgagtcagactccaaatccca

SEQ ID NO: 389915 - DNA, 636 bp, Homo sapiens
tctttctggtgggctcatggtctcgctgacttcaggagtgaagctgcaggccttaacggtgagtgttacagctcttaaaggcggcacatctggagttgttcgttccttccggtgggttcctggtctcgctggcctcaggactgaaactgcagaccttccaggtgagtgttacagtgttacagttcataaaggtggtgtccagagttgttcattcctcccatccagagttgctcgaccctgcccgtgggttcatctattttcttggagggagagaattaagttacaagggaatggtgaaccacaacaaatgaaaagttgttttgtgagtagtgtacctttgcatggctgtatttcgaaaggtttgccaaaaaaaaatgaaaaagaatgccaattatttttctctraaattgtgcctaattatgttatatgatattaaattaatgtttaaagagaatacatagtatgcaaaatacttcacacttcacacatgtcatttttaattcaattgtttaaaaaaataagcacaattgcctctgtttcaccaatgattaaaataagatgaccataatctatggaagctgcccaaagaaaaacaatgatggagtcagatataaatgagtcagactccaaatccca

SEQ ID NO: 389916 - DNA, 636 bp, Homo sapiens
tctttctggtgggctcatggtctcgctgacttcaggagtgaagctgcaggccttaacggtgagtgttacagctcttaaaggcggcacatctggagttgttcgttccttccggtgggttcctggtctcgctggcctcaggactgaaactgcagaccttccaggtgagtgttacagtgttacagttcataaaggtggtgtccagagttgttcattcctcccatccagagttgctcgaccctgcccgtgggttcatctattttcttggagggagagaattaagttacaagggaatggtgaaccacaacaaatgaaaagttgttttgtgagtagtgtacctttgcatggctgtatttcgaaaggtttgccaaaaaaaaatgaaaaagaatgccaattatttttctctgaaattgtgcctaattatgttatatgatattaaattaatgtttaaagagaatacatagtatgcaaaatacttcacacttcacacatgtcatttttaattsaattgtttaaaaaaataagcacaattgcctctgtttcaccaatgattaaaataagatgaccataatctatggaagctgcccaaagaaaaacaatgatggagtcagatataaatgagtcagactccaaatccca

SEQ ID NO: 389917 - DNA, 636 bp, Homo sapiens
tctttctggtgggctcatggtctcgctgacttcaggagtgaagctgcaggccttaacggtgagtgttacagctcttaaaggcggcacatctggagttgttcgttccttccggtgggttcctggtctcgctggcctcaggactgaaactgcagaccttccaggtgagtgttacagtgttacagttcataaaggtggtgtccagagttgttcattcctcccatccagagttgctcgaccctgcccgtgggttcatctattttcttggagggagagaattaagttacaagggaatggtgaaccacaacaaatgaaaagttgttttgtgagtagtgtacctttgcatggctgtatttcgaaaggtttgccaaaaaaaaatgaaaaagaatgccaattatttttctctgaaattgtgcctaattatgttatatgatattaaattaatgtttaaagagaatacatagtatgcaaaatacttcacacttcacacatgtcatttttaattcaattgtttaaaaaaataagcacarttgcctctgtttcaccaatgattaaaataagatgaccataatctatggaagctgcccaaagaaaaacaatgatggagtcagatataaatgagtcagactccaaatccca

SEQ ID NO: 389918 - DNA, 416 bp, Homo sapiens
agtacagaaaaaaaattccaatgaatatttcattgtgggatgattttacaagccattcattcatgatttacaagcaattcagttccattaacataaattttgaaggaaatakgcatatcacaatgattataagagggcagccttggtggctcacacctgtaatcccagcactttgggaggctgaggcaggcggatcacctgaggtcaggagttcgagaccagcctagcctaaatggcaaaaccccatctctctctgtctctactaaaatacatatatcagaccagaaatggtggcatgctccatagtccccactactcgggaggctgaggctaggagaattgcttgaacccaggaggtggaggtagcagtgagccgagatcttaccactgcactccagcctgggcaacagagttag

SEQ ID NO: 389919 - DNA, 416 bp, Homo sapiens
agtacagaaaaaaaattccaatgaatatttcattgtgggatgattttacaagccattcattcatgatttacaagcaattcagttccattaacataaattttgaaggaaatatgcatatcacaatgattataagagggcagccttggtggctcacacctgtaatcccagcactttgggaggctgaggcaggcrgatcacctgaggtcaggagttcgagaccagcctagcctaaatggcaaaaccccatctctctctgtctctactaaaatacatatatcagaccagaaatggtggcatgctccatagtccccactactcgggaggctgaggctaggagaattgcttgaacccaggaggtggaggtagcagtgagccgagatcttaccactgcactccagcctgggcaacagagttag

SEQ ID NO: 389920 - DNA, 416 bp, Homo sapiens
agtacagaaaaaaaattccaatgaatatttcattgtgggatgattttacaagccattcattcatgatttacaagcaattcagttccattaacataaattttgaaggaaatatgcatatcacaatgattataagagggcagccttggtggctcacacctgtaatcccagcactttgggaggctgaggcaggcggatcacctgaggtcaggagttcgagaccagcctagcctaaatggcaaaaccccatctctctctgtctctactaaaatacatatatcagaccagaaatggtggcatgcwccatagtccccactactcgggaggctgaggctaggagaattgcttgaacccaggaggtggaggtagcagtgagccgagatcttaccactgcactccagcctgggcaacagagttag

SEQ ID NO: 389921 - DNA, 568 bp, Homo sapiens
ctctatcatttagaccctacataacgaactttatcccccactattcttctctatcccccaggacctccacccaaacttatcagcctattagccatttccccagcatgtttcccatatccttccatttctaccttttctccaaagctatttttcctacttgaaatatcctttgccttgctaccctttaactgccccattccctcaacatccacccagtcaagagtactcatttgttagagtccaaccctayctaatccaaaaagaaggaattaacatttacctagaaaaggagtgaagcattgtagttagaggcatgggatctggagccagactgggtttcactcctagttctctgccattccctagttacgtaactcgggtgggttactatgcttcaggtccctcatctgtaaatccggatatatatcataatatatactatgtgagtatttgatattatgagacaaatatggtgtaagaacttgtcatatattacctactttaatcctcccaactactttgagagatattattattcaaattttacagatggcctcttaagactcaa

SEQ ID NO: 389922 - DNA, 568 bp, Homo sapiens
ctctatcatttagaccctacataacgaactttatcccccactattcttctctatcccccaggacctccacccaaacttatcagcctattagccatttccccagcatgtttcccatatccttccatttctaccttttctccaaagctatttttcctacttgaaatatcctttgccttgctaccctttaactgccccattccctcaacatccacccagtcaagagtactcatttgttagagtccaaccctacctaatccaaaaagaaggaattaacatttacctagaaaaggagtgaagcattgtagttagaggcatgggatctggagccagactgggtttcactcctagttctctgccattccctagttacgtaactcgggtgggttactatgcttcaggtccctcatctgtaaatcsggatatatatcataatatatactatgtgagtatttgatattatgagacaaatatggtgtaagaacttgtcatatattacctactttaatcctcccaactactttgagagatattattattcaaattttacagatggcctcttaagactcaa

SEQ ID NO: 389923 - DNA, 465 bp, Homo sapiens
gggacctagagagctactgaagggactgtctttcccaccccagggcaggccaggctggagccaggaatctggggttagggcagcaggcgcagctcagcagcactcttggggagggggactcttggtcacctcccactgttcccctgcccagctgagatgtcaggccagccctgcattggctataggaaagctgctctgctgaaggggcagacaagttgtggatgagggcccagtgccrggcaggaccgatcaagcccaactcacctgccctggctctccaggacttggcaaggctgccaggtgcaggcagggggagagtctgctttcagtcagccaagatgaggggctcttgggggtctctgaccctgcggagccagtggaggaaaggagtggaggcaagagattacagcatcccagagggaggccggggagggggacagagaccccagcccaagcccccacaat

SEQ ID NO: 389924 - DNA, 592 bp, Homo sapiens
gggcccagtggctcatgcctataatgctagcactttgggaggtggaggctcaaggatcacttgagcccgggagttcaagaccaacatgggcaacaaaaaaatattaaaaattagccaggcctggtgccatatgcctctagtctcagctattgagaaggctgagggagaaggatcacttgaacctgggaggtgaaggcttcagtgaaccataattgtgccactgcactccagcctgggtgacagagtaagatcctggcccaataaataaataaataaataaataaataaataaataaagtagtcaaattaatagaaacagaaagtagaaagatgtttgctagggcctggggagaaggagaactgatgacttgtttaataggtatagagtttcagtttttcaagatagaaaasttccagagagtcacaacaatgtggatatgcttaatgatactggactgtacacttaaaaatgattaagatggtatattttatgttatgtgcttttctttttaccgcaatgcaagaatttcatatattataaaattaatacattagcacctgtagaaatgatctctttagtgctcaatggtaa

SEQ ID NO: 389925 - DNA, 523 bp, Homo sapiens
ttatataatttaagagaatttgaagaagtagttagataattatcttggtatcatcttcatgtctgcatatcwtacttggggacaggtatttcctatgaattgacttttaaaatattcttatttgtaagatcacttttttgtacttgtcttatttcttataaatttaatcatagtttcaaaatttttacagcatctacggtattaactgcccaagaatcattttccggttcacttgggcatttacagaataggaacaacagttgtgattccagaggacagactactaaagccaggtttttatatgggtaaggaaacggaaacagtttttaaatgttcatcttctatgtaagtacatctgtgttttttaatgtaattacatgtatctgcatatatgttttcatgtgtgtgataatgtttagcagtagagtagaaatacatattaatattgttctttgaaaaattgggggtattttctttctgtttagagagaacatgccaccacaagatgcagaaataggttacc

SEQ ID NO: 389926 - DNA, 523 bp, Homo sapiens
ttatataatttaagagaatttgaagaagtagttagataattatcttggtatcatcttcatgtctgcatatcatacttggggacargtatttcctatgaattgacttttaaaatattcttatttgtaagatcacttttttgtacttgtcttatttcttataaatttaatcatagtttcaaaatttttacagcatctacggtattaactgcccaagaatcattttccggttcacttgggcatttacagaataggaacaacagttgtgattccagaggacagactactaaagccaggtttttatatgggtaaggaaacggaaacagtttttaaatgttcatcttctatgtaagtacatctgtgttttttaatgtaattacatgtatctgcatatatgttttcatgtgtgtgataatgtttagcagtagagtagaaatacatattaatattgttctttgaaaaattgggggtattttctttctgtttagagagaacatgccaccacaagatgcagaaataggttacc

SEQ ID NO: 389927 - DNA, 604 bp, Homo sapiens
  misc_feature (1)...(604): n = A,T,C or G
actnatataagcatgtacacacatctatagggttcctccaggcctttgaaaaggatataataaaataataaaaattaagcytcattcgctttgtgataaatctgcctcaatattcaataaacaatttgttgaataagtgagtgaataaatgaacaaaataattttccttgcagaaggcggccaaacttttgtgaactgtataacattagcaatgaaagaatgtttggcgaagtccttgggaccctttctttgctgacatatatgatgtttgtttttaatcaatgtcattttagttggaaatgataaatttcctctcacctgattgaaataattggggctgttatttttcctttcagcactttcagcaatccaaaaaaggaggaaataaaattagtccacctggttcgatagagaagaaatgtttcaaatactaagactaacatctatcccttagcaaaggaaggtgaagaagccattcaagataccaacagtggatacacagacttattaaaatgtgtacataaaaactctagtcatgtttaaggtgtaaatggctgacaatagtcattattcatctatcaataatctatcttctgtctgtcat

SEQ ID NO: 389928 - DNA, 604 bp, Homo sapiens
  misc_feature (1)...(604): n = A,T,C or G
actnatataagcatgtacacacatctatagggttcctccaggcctttgaaaaggatataataaaataataaaaattaagcctcattcgctttgtgataaatctgcctcaatattcaataaacaatttgttgaataagtgagtgaataaatgaacaaaataattttccttgcagaaggcggccaaacttttgtgaactgtataacattagcaatgaaagaatgtttggcgaagtccttgggaccctttctttgctgacatatatgatgtttgtttttaatcaatgtcattttagttggaaatgataaatytcctctcacctgattgaaataattggggctgttatttttcctttcagcactttcagcaatccaaaaaaggaggaaataaaattagtccacctggttcgatagagaagaaatgtttcaaatactaagactaacatctatcccttagcaaaggaaggtgaagaagccattcaagataccaacagtggatacacagacttattaaaatgtgtacataaaaactctagtcatgtttaaggtgtaaatggctgacaatagtcattattcatctatcaataatctatcttctgtctgtcat

SEQ ID NO: 389929 - DNA, 522 bp, Homo sapiens
ctctccctgccccctaccccctcaccaatttrtatgtttcaagtggaacttgtgacccctttctggctcaccaggttattctgtcactcctgttatagtaattggtctacaaatgggcatgaagacctagctgggccaagcagagtcagccctgtgactttctggcactactggggaagaggagctttctgctaaagttgttcatctggtagaatataaagcagacactgagaaacactcttgccactatgtggagagaggctgccttaggatgaagttaacacaaaaaaatgcatagttgagagatggtgtgtaagtccattttacgttgctctaaaagaataccacagactgggtaatttttaaagaatagaagtttatttggctcatggttctgaaggctatgaagtccaaaagcttggcatggcacctggtgaggggcctttctgctgtatcaccccaaggtaaaaggtggaagggcaagacagcgcaagagtgagcaatcaagaaaaggttgaactt

SEQ ID NO: 389930 - DNA, 481 bp, Homo sapiens
cagattttaaaaatttaattacaaccaaaattatactctgactagaggtggagagatttgaccattccggtcagcaaatgaattcaaatgtgcaagtttaagtgtatacacattttcagctttggacaagaaaatgtaacaccactgatttcagtcagtagataagataattagtaatttatcaaaataattcataaagaccgtttctgtgatcgtctaaaattcagaccgaagaatgagtgactataagatacatgaaaaatctcatcctttagacaactggatgtgaacagggggagaatccccaaagtcacttaatgattgctttggtctggagaatatcaaggctaatttttaaaaaaaatgtttaaaataaaaacttcataaataaaacatctgggtatggtattaacactttactsagtctaagagttactaggacatagagcacatttgtcttttctccccacccccaagctct

SEQ ID NO: 389931 - DNA, 609 bp, Homo sapiens
tttcacagcctcagtggtctcctgtgtgaaatttgtggcattgatcatgaaaggatgggacctaaagaaacagaatggggatatttgggtagatttggatgaacctgagaacatgaatctttaaattgctttgaatatgcctgttcataaaagcagtctgtcttccctatcagatgacattagtcctttgttgcttgagatactataatgacctcaaccaaggtagttaccttccaaggggatgctgatcccctttatgcctgccttctcccctttcagtgccatcagagctgcaaagagaattagatcgcagcatgccccaggagaacaaatacaaaatctatcctgggaggaggcagttagaatgataggatttggctaattttcatttgcaggaatgtgtaggaataggttctcagsgtgttaaggcagggagaaacatttctttagaatgaactgaaattattgatatagttcttatatattaccaaaaattcttattttgaggacatagctaaacagtgaggagcagctttactggtttttcagttgttcaactgaaacagggactcagtggcagcctatattaaactcagatatatgttagaa

SEQ ID NO: 389932 - DNA, 428 bp, Homo sapiens
ctatttatcaagtattccataagactgctagttctgaatsggatccagagtaagaaaatgatttgtaactatgaactgttgtgcatgctactctgctatttgagatttaagatccaacagattaaatggtgcttggagtgtttggcagaaagcaatcctgtagagacccctgtcaaaccttgatttagaattacagtgcaatcctttcaggttttagagcaaaaccttgacctagtctccaaataaatgttaagaaacagatcttggattgcttttgggtcatggcagagacttgtgtatctgaccacagaatataaaatgatcatgtaaacaactgcccatcatggtctgggtgttatttcataaactaggacatgcacagcagcactccttcatcaagtagaaagtcataaagacacaggtaagag

SEQ ID NO: 389933 - DNA, 600 bp, Homo sapiens
ctgttaataaacagagggacgggataatctgttctgtggatattagcctccttccttagtttccctaaccatcccrtgtttgctcactgggtttataaacaaaatggacaaagtacagtgtagtgtgcttaatggtggctctgggacttataaatgtcaccctatttgaaaagtggagtctttatagatgtgattaagttaaggaccttaagaagagaagataactctgggttctctgggtggaccataaatgccattccaagtgttcttataagagggaaatgccccagcactttgggaggccaaggtgagcggattacctgaggttgggagtttgagaccagcctgaccaacatggagaaatcccatctctactaaaaatacaaaattagctgggcatgatggcacatgcctgtaatcccagctactccagaggctgaggcaggagaatcgcttgaagccgggagctggaggttgctgtgagctgagatcacaccactgcactccagtctgggcaacatgagtgaaactccatctcaaaaaaaaaaaaaaaaaaaaaagagggaaatgctatacctgcaaagaggagatggtgatgtg

SEQ ID NO: 389934 - DNA, 600 bp, Homo sapiens
ctgttaataaacagagggacgggataatctgttctgtggatattagcctccttccttagtttccctaaccatcccgtgtttgctcactgggtttataaacaaaatggacaaagtacagtgtagtgtgcttaatggtggctctgggacttataaatgtcaccctatttgaaaagtggagtctttatagatgtgattaagttaaggaccttaagaagagaagataactctgggttctctgggtggaccataaatgccattccaagtgttcttataagagggaaatgccccagcactttgggaggccaaggtgagyggattacctgaggttgggagtttgagaccagcctgaccaacatggagaaatcccatctctactaaaaatacaaaattagctgggcatgatggcacatgcctgtaatcccagctactccagaggctgaggcaggagaatcgcttgaagccgggagctggaggttgctgtgagctgagatcacaccactgcactccagtctgggcaacatgagtgaaactccatctcaaaaaaaaaaaaaaaaaaaaaagagggaaatgctatacctgcaaagaggagatggtgatgtg

SEQ ID NO: 389935 - DNA, 573 bp, Homo sapiens
ttttgttcacaaagcaacaagtagaagactcatgatattgccttagaactggagcaaaattagccctacagcatgcaatggcccagtctataaaagcttaagagcaaaccttaaaaggatcagtatttatagaaatatgagaaaatccaactgggtcaaatttacraagtctggcatctaattaaaaaattactaggcatttaaagcaggaaaatgtaaatctaaatgaggaagtgggggtggaaatcagtcaattaaaacagatgcagaagtggcacagattacccactaatagacaaacagtaattataactgtattccatatgttccagaaagtagaggaaagtgtaaacatgttaaaaagaaatatggaatatatgagaagaccaaaaacaaatgtatagagatgaaaaatgcaatacctgcaataaaaattatattggataggattaatagcagattacagtctggaaaacaaaatatcctaaacttgaaaacatatcaataataaactatgcaaaataaggcacagagaagcaaagaaacaaaaatacaaagaacttcagtgagttg

SEQ ID NO: 389936 - DNA, 537 bp, Homo sapiens
agccaaaatttgtttaaatatgttgaaaaccataaacaaacaaattgaagaagttcaacagattctaaacacaaaaaacttcatgaaaacaacacctgtgcacattattacattggacaaaactaatgataaagagaaaatattaaaagcaaccagaggaaaagtacaaattagatatagatgaacaatcataagaacagtagacttcttgccagaaacaatgtaagctgggcaacaatggagtgacatctttaacccttttcccatttaggaaaaaaaactacagttgcctgccakcactcatttaattttacataaacatgctttttgaggctgaagcaaatctgactgattttcaatgtgaaaataaaatctaaaaactgctcttggagttatttctaaacgtaactaacatcagaattgtctgaatcatcagtattgtcagttttgaaaaaattggattcatcaaatcaatcttcagccaacaactgtttgagaatgatgttaacatcacacgtagaaatgctgtgttttata

SEQ ID NO: 389937 - DNA, 499 bp, Homo sapiens
  misc_feature (1)...(499): n = A,T,C or G
gtaatttgtaaagaaaagagggccgggcacggtggctcacacctgtaatcctagcactttgtgaggccaaggcagatggatttcttgagctcaggagtttgagaccagcctggctaacatggtgaaaccccgtctctactaaaaataaaaaaatagcagggtgtggtggcacacgcctgtagtcctggctgcttgggaggctgaggcaagagaatcacttgaatccaagaggtggaggttgcagttagccgagatcatgccactgcactccattctgagcgacagagaaagacttcgtctcaacaacaacaacaacaacataaaagaaagaagaaagaggtttaattggctcatggttctgcaggctgyatgaaaagcatggtgccagcatctgctcagtttctgctgagggcctcaggaaatttccaatcatggcagaaggtgatggggagccagcatgtcacatggcaannnnnnnnnnnnnnnnnnnnnnnnnnnn

SEQ ID NO: 389938 - DNA, 499 bp, Homo sapiens
  misc_feature (1)...(499): n = A,T,C or G
gtaatttgtaaagaaaagagggccgggcacggtggctcacacctgtaatcctagcactttgtgaggccaaggcagatggatttcttgagctcaggagtttgagaccagcctggctaacatggtgaaaccccgtctctactaaaaataaaaaaatagcagggtgtggtggcacacgcctgtagtcctggctgcttgggaggctgaggcaagagaatcacttgaatccaagaggtggaggttgcagttagccgagatcatgccactgcactccattctgagcgacagagaaagacttcgtctcaacaacaacaacaacaacataaaagaaagaagaaagaggtttaattggctcatggttctgcaggctgtatgaaaagcatggtgccagcatctgctcrgtttctgctgagggcctcaggaaatttccaatcatggcagaaggtgatggggagccagcatgtcacatggcaannnnnnnnnnnnnnnnnnnnnnnnnnnn

SEQ ID NO: 389939 - DNA, 344 bp, Homo sapiens
tggccaagatctgcctcctgtcttttcagatgcctgtagattaaggatgattcacattgttgagcttgatgcagattattcctctgaggaggatccagggtacaagtcattatagtatagttcaccttgctgctttccattgtcatattatgataattggcagcttaggaattcatacatatattattgggggcccagtttaaaacaatacagttaaaggcaacttctgtaattttaaaagaaaattagtaamtctgaactgacttagatcactttatgacaaaaattaattattattacatctataccttgattaaattaatattctgaaaagaaagaatgtc

SEQ ID NO: 389940 - DNA, 596 bp, Homo sapiens
cttattcatgccaggtaatagggttccagattgggtaagttttatgttctggttcttggtatatgtttagacagcttataaatgtaaataaacattctactcttacaggtggagtgtggacacggtgatatccgtgtgaccgccattcccagctgaaggttatctcatctatgattttcttatacgtgactggcgccccctagtgaatagggacttaagttgacctccacggtagaagaaataccagggaaatacctgaagctgttttaacaatttctccttgtattaagtattatgctgcagttttgcgtgtgtgaatggaagtatgggtagagatctgttctccctaaaaactccaggattccacaatatagaaatagtaatcaaatttttaggtgaagctcgaactaatccgaactttgttagatcatcactgtaaatgaatgggtakttatccactccctaaatgaagagacttgactggatttcttttttttatatagctactagaatctgttacacataatttaggattgagacttgagaaattgtcattccaatccagaaaactttagatttgcaaatatatttgacaa

SEQ ID NO: 389941 - DNA, 608 bp, Homo sapiens
aatggacatagacattgcaatctgctctattaaaattaatttcaacacttattctcctttctcactgataaatatgcaccccaytttcttaaacttgtcctttagctttgtatgccagtttcacatgactattcccaaatgtctccctttcttcctggaaatgacgtggttatgacagatgatccatatagcttagaatggatgttttggataaatgtataaaactccagttagaattcaaatttgtgttctcttgccttgtgcttatttacacttatggttgtttaaacttgtgttacaatactgatgtctctttgtatttgataaacaacaaaacagtagataaacaaggatatatagacccaaagagataagtggcaagcaattattctgagcaaggatacacagaccccaaaagatgagtggtaagcaattattctgagcatctgactaaggaagggctcctcataatactagtggttatgggtgatacctgtgcagatcagaaagaccccacctgtctaggttctttttcttttcataaggttatggctgatgcctaatgtaatcattaatgtattcagggagccgtggaacacacagaagtc

SEQ ID NO: 389942 - DNA, 608 bp, Homo sapiens
aatggacatagacattgcaatctgctctattaaaattaatttcaacacttattctcctttctcactgataaatatgcaccccactttcttaaacttgtcctttagctttgtatgccagtttcacatgactattcccaaatgtctccctttcttcctggaaatgacgtggttatgacagatgatccatatagcttagaatggatgttttggataaatgtataaaactccagttagaattcaaatttgtgttctcttgccttgtgcttatttayacttatggttgtttaaacttgtgttacaatactgatgtctctttgtatttgataaacaacaaaacagtagataaacaaggatatatagacccaaagagataagtggcaagcaattattctgagcaaggatacacagaccccaaaagatgagtggtaagcaattattctgagcatctgactaaggaagggctcctcataatactagtggttatgggtgatacctgtgcagatcagaaagaccccacctgtctaggttctttttcttttcataaggttatggctgatgcctaatgtaatcattaatgtattcagggagccgtggaacacacagaagtc

SEQ ID NO: 389943 - DNA, 574 bp, Homo sapiens
tatggagcatgtaggattggaaccattgttcagtcatggccagtgatgaaagactacccaaaaacattgcatttaagttgaggtgttaaattcgagttaaccagacagagcagaaacgagaaaagcaatcagaggtaatgatgtggaaaagcctggagtcaggagatggctaaattggagtcaaaaaacaaataagcaaaaccagtgtacttgactgatgaatataaccagattgtaaattttaagttacacacaaaaatatatcaaaaaaggatattttttcatatttaaagtgaattactgtatagaaagatgccaagattattaaaacagctacaagtagtgagaacactgctttcatttcaagaataatayatctttataatacaaaaatatttagtcagtaaatattaaaatatttgcttgtgatatttgggataatttttgtactgctctataatctatcacgagggctttgagcaggtgaacattactcctaatttttgcattggtaatatttttcattggtaatagaacaacatatgaatttgttcataatatttaagattgcaac

SEQ ID NO: 389944 - DNA, 544 bp, Homo sapiens
aaacatttttacacatatatcctcacataagctcctaaggaaagagtggccttcttaaataagatcctctattatgttactatgttccattttctttttccygacaaagtctcattctctcgcccaagcaggagtacagtggcgtgatctcagctcactgcaaccttttatctctggggttcagatgattttcatgcatcagcctcctgagtagctgggactagaagtgtgtgccaccacacccagctaatttttgtattcttactagagatggggtttcattaatgttgtccaggtggtctcgaactcctggcctcaagtgatccacctgcttcggcctcccaaagtgctggaattacaggcgtgagacaccacacccgctctctgttatggtcttaatattattccttactttttcttggaacatcactctatcattttttctttatcttgaatataaaagccctttctattaccggtgaaaatccttgaggagaataatgctcaaataataaatacattgaaagtacagtagatagaattg

SEQ ID NO: 389945 - DNA, 544 bp, Homo sapiens
aaacatttttacacatatatcctcacataagctcctaaggaaagagtggccttcttaaataagatcctctattatgttactatgttccattttctttttcccgacaaagtctcattctctcgcccaagcaggagtacagtggcgtgatctcagctcactgcaaccttttatctctggggttcagatgattttcatgcatcagcctcctgagtagctgggactagaagtgtgtgccaccacacccagctaatttttgtattcttactagagatggggtttcattaatgttgtccaggtggtctcraactcctggcctcaagtgatccacctgcttcggcctcccaaagtgctggaattacaggcgtgagacaccacacccgctctctgttatggtcttaatattattccttactttttcttggaacatcactctatcattttttctttatcttgaatataaaagccctttctattaccggtgaaaatccttgaggagaataatgctcaaataataaatacattgaaagtacagtagatagaattg

SEQ ID NO: 389946 - DNA, 544 bp, Homo sapiens
aaacatttttacacatatatcctcacataagctcctaaggaaagagtggccttcttaaataagatcctctattatgttactatgttccattttctttttcccgacaaagtctcattctctcgcccaagcaggagtacagtggcgtgatctcagctcactgcaaccttttatctctggggttcagatgattttcatgcatcagcctcctgagtagctgggactagaagtgtgtgccaccacacccagctaatttttgtattcttactagagatggggtttcattaatgttgtccaggtggtctcgaactcctggcctcaagtgatccacctgcttcggcytcccaaagtgctggaattacaggcgtgagacaccacacccgctctctgttatggtcttaatattattccttactttttcttggaacatcactctatcattttttctttatcttgaatataaaagccctttctattaccggtgaaaatccttgaggagaataatgctcaaataataaatacattgaaagtacagtagatagaattg

SEQ ID NO: 389947 - DNA, 560 bp, Homo sapiens
gctagaatgcctgaaggatatgtaataaaaataaataaataacaacaactctgtgttccaggccaacaaggcacataagacataaaaatggaatgtaaactcttgtcactggtttgaaaggaactgtcagttgtttgattctttaagtgattctgtcacacactggggacccccgtcagtgcagtttcactcctaaactacttttattaaaagtatgtatcatcatgtggccacaaaagcatgctatgacagaatagtaattttttctttctcttatcttcactatcttcatcatagaaaagtgttgtgtttctatggttgcaggaactaattaattctatatcaagcagatatattaatagaaaatactttttgggtattgaaaaacaaagttagtattttaacaaattttaggttgttttgttcttcccatcaacaaaatcccaccatttraaagctattcctgtattattgttttcaacctctccttcttctgtgtttacagaggatctaggccagaatgtgtaacttctgccagattcccatgatgtggattatat

SEQ ID NO: 389948 - DNA, 618 bp, Homo sapiens
gttattcccttatgaactttaaaagtttatttataataatataaatttggaaactaaaataacctaaagctcaagttgcccrtcttaaaatatgggtagttcctttatcaagatggttcatatgaggaagtggtgaaaatgatagggttgacactcaattattaaatatataaaatctagcttttactttaaagaagtacatagtagggaaagtgtgaaatttaacttcaagacagattgtattttttcggaatcttttacacctccgatttgcctttacgttatctgaaacaaagatcaggcttaaaaaacataaatattaaaatattcatccattttgaaggaataagtaaataaaacacatctctctgaaaaattctgggattccatttgacctgaacatgtatcttattactagagaagatggaaaggtggaggggcttggagatgggagaaaaaactaaagtgctatgaatgattatacaacagtgccccctgatgggaagaatggggtctgaaattcagatgagatttcttaccaagtcaattacatgacttattcttcgtttttgcttccatttaaagagatttttgtagcgatgcatcagttttactata

SEQ ID NO: 389949 - DNA, 618 bp, Homo sapiens
gttattcccttatgaactttaaaagtttatttataataatataaatttggaaactaaaataacctaaagctcaagttgcccgtcttaaaatatgggtagttcctttatcaagatggttcatatgaggaagtggtgaaaatgatagggttgacactcaattattaaatatataaaatctagcttttactttaaagaagtacatagtagggaaagtgtgaaatttaacttcaagacagattgtattttttcggaatcttttayacctccgatttgcctttacgttatctgaaacaaagatcaggcttaaaaaacataaatattaaaatattcatccattttgaaggaataagtaaataaaacacatctctctgaaaaattctgggattccatttgacctgaacatgtatcttattactagagaagatggaaaggtggaggggcttggagatgggagaaaaaactaaagtgctatgaatgattatacaacagtgccccctgatgggaagaatggggtctgaaattcagatgagatttcttaccaagtcaattacatgacttattcttcgtttttgcttccatttaaagagatttttgtagcgatgcatcagttttactata

SEQ ID NO: 389950 - DNA, 556 bp, Homo sapiens
caacttctgtttgccaggctataaaactaaagatgtccatcaggccaaaggattcaaaactttataagtagacaataataatcgcaataaattatattgggttgaaataggcatacatataaaactaatatgcttgaaaaatgatgacctgttctggtattattattattaatcctgttatacatgggaagttttcttcaatcaatgattagcaagaaaaatgatcagcrcttagtttttgagataagttttctttatacatctaattttttagaagctatacatagtattcattttcagatctcaacttcttgatgcgttagagttaggaaatggtttctgatccagaagactctcctactgttgtaagaggatatattaaacaataccaatcatatgattcatttgagtaacaaatataattgaatatttagcatcagatataagcaaatataaagctggagtctcacggaatgttcttggttctgaagcctcagcatgcctcacccctgtagcaagtcgtctacaagtgattctatcccaattagttaaattc

SEQ ID NO: 389951 - DNA, 550 bp, Homo sapiens
cactgcaatctctagcagtgattccttcagtctggtggggcaatagaagacttcttgaagaagggcaacatttgcactggacttgagggataggcaggatttggagaaacagagatgtaaagaagaggcatttcagctgcatcaaactaaatgaacaaggcaaaacaaatctataaatactctgaatacttccgctaaaacagtctttaaagygtcattctattattccgtgatgttaaaaaacagtttctcatgttccaactttcttaaaacctctttaccaagtctgaggcactgaacaatctggatccaagcaacctttccactgtcaattctcattagtcccctacagaaaatctatgtttccatcaggctgaattaatccccatccatagagccgggctcaatgtcaccctctgtgcacgtcttcgcttgcatgactccttcttcctgcaatttctacagcacttctctccattctcccattcaccccttaacacatccctgtgtgtccttcacggcctccctcataatttcatgaagttggcct

SEQ ID NO: 389952 - DNA, 517 bp, Homo sapiens
gtagaaaacattaaaaaaaattctataaaattactctgttcattatgaagaagcgaatatcctcaattaaattctcaaacctgactatagcaaagatctgatgagaaatccatgctctcctaggagctcatttaattaactcaagcattgctttcaaagtgcaagttatagtgctgcttgtaaattcacatatattacatgtaaattataagacatttcaaaggagagggactttggtgacagaccaatttacatttctttcttgcctakaagcattttcccccctcacattttacatttagtattgatagacacggattgaggacttccgttttcctagctattgtcaccaagatacacactttctttaaatatggtaattcttcaataaatagaactacttactgatttaaggttgaaatctgagacgggggagctatgaacatgtaaaatttttattagttgactcaaatctggatggataaattggctgttaagtgaaacaggttttgcccca

SEQ ID NO: 389953 - DNA, 547 bp, Homo sapiens
ccctcacattttacatttagtattgatagacacggattgaggacttccgttttcctagctattgtcaccaagatacacactttctttaaatatggtaattmttcaataaatagaactacttactgatttaaggttgaaatctgagacgggggagctatgaacatgtaaaatttttattagttgactcaaatctggatggataaattggctgttaagtgaaacaggttttgccccaagagccagatactgtgcttatggggaaaaagatgagataaacaagcttataaaaaaatgtcttgccctaaatgtaccatgcattttgggaaaatgaaagagacaattctttgtactacagtttagtagtacaaatccaatctgtctatgagttcactcatttagtaacttgaacaaattagtaaaataaatattttcccttaccttgtatttaatatggatctccctgtcattattgccctatttttcaaagttgtccccaataaaattgaaaccagtgaattcagatttgatgtataaacaattgtttttt

SEQ ID NO: 389954 - DNA, 583 bp, Homo sapiens
tcacattttacatttagtattgatagacacggattgaggacttccgttttcctagctattgtcaccaagatacacactttctttaaatatggtaattcttcaataaatagaactacttactgatttaaggttgaaatctgagacgggggagctatgaacatgtaaaatttttattagttgactcaaatctggatggataaattggctgttaagtgaaacaggttttgccccaagagccagatactgtgcttatggggaaaaagatgagataaacaagcttataaaaaaatgtcttgccctaaatgtaccatgcattttgggaaaatgaaagagacaattctttgtactacagtttagtagtacaaatccaatctgtctatgagttcactcatttagtaacttgaacaaattagtaaaataaatattttcccttaccttgtatttaatatggatctccctgtcattattgccctatttttcaaagttgtcmccaataaaattgaaaccagtgaattcagatttgatgtataaacaattgttttttctttgtctttcctcatccttatccttttgaaggtcattt

SEQ ID NO: 389955 - DNA, 580 bp, Homo sapiens
tgggagatacttctatataaacatgcgaaataatttgtaattagcaagactatttttcaatattatttatttttaaattcacaataattgtttctatttatggggcatacagtgatgttttgatacataaaatgtatagtaattagcacaactagcatatcaagattctcaaatatttatcattttttgtttattgggaactttcaatatcttctcttattgaaaatatttggtattttcttgactatagttatgccatagtgttatagaatactataacttattcctccaatctagctgtagttgtgtatcctttaacaaatttctccctatccccctccctgcttcttcctaccattctcaacttctagaattctcggttcyagtctttacttctgtgaatttaactttttctgcatatgagtgggacatgcagtgtttaatttcctcttcctgacttattttacttagcataatatcctctagctcattcatgttaccagaaatgatggggttttattctttttaatagccacatagtattccattgtaaatatataccacattctctttattcgtt

SEQ ID NO: 389956 - DNA, 523 bp, Homo sapiens
tattgtgcaaatatcagagtatacttacacaaacctaggtagtacagcttactacatactyagactataggtatggtatagcctattgcttctaggctaaagacctggacagcatgtacattactgtgtagaatactgtaggcaattataacacaatggtaattaaaacatagaaaagtacactaaaaatatagtattataattgacatgatttggctgtgtccccattcaaatctcaattggaattttatctcccagaattcccaagtgttgaggaagggacccagcaggaggtaattgaatcatgggggctggtctttcccttgctattctcatggtagtgaataagtcacatgagatctgatgggtttatcaggggtttccgcttttgcttcttcctcattttctcttttgcctcccaccataattcagaggccttgccaggcatatggaactataagtccaattaaatttttgtttcccagttttgtatatgaatttatcagcagcgtgaaaacaaact

SEQ ID NO: 389957 - DNA, 523 bp, Homo sapiens
tattgtgcaaatatcagagtatacttacacaaacctaggtagtacagcttactacatactcagactataggtatggtatagcctattgcttctaggctaaagacctggacagcatgtrcattactgtgtagaatactgtaggcaattataacacaatggtaattaaaacatagaaaagtacactaaaaatatagtattataattgacatgatttggctgtgtccccattcaaatctcaattggaattttatctcccagaattcccaagtgttgaggaagggacccagcaggaggtaattgaatcatgggggctggtctttcccttgctattctcatggtagtgaataagtcacatgagatctgatgggtttatcaggggtttccgcttttgcttcttcctcattttctcttttgcctcccaccataattcagaggccttgccaggcatatggaactataagtccaattaaatttttgtttcccagttttgtatatgaatttatcagcagcgtgaaaacaaact

SEQ ID NO: 389958 - DNA, 523 bp, Homo sapiens
tattgtgcaaatatcagagtatacttacacaaacctaggtagtacagcttactacatactcagactataggtatggtatagcctattgcttctaggctaaagacctggacagcatgtacattactgtgtagaatactgtaggcaattataacacaatggtaattaaaacatagaaaagtacactaaaaatatagtattataattgacatgatttggctgtgtccccattcaaatctcaattggaattttatctcccagaattcccaagygttgaggaagggacccagcaggaggtaattgaatcatgggggctggtctttcccttgctattctcatggtagtgaataagtcacatgagatctgatgggtttatcaggggtttccgcttttgcttcttcctcattttctcttttgcctcccaccataattcagaggccttgccaggcatatggaactataagtccaattaaatttttgtttcccagttttgtatatgaatttatcagcagcgtgaaaacaaact

SEQ ID NO: 389959 - DNA, 607 bp, Homo sapiens
acaatcccaattctgtatcttcctgtaatccctcattctgtatgccaccaacaccacaaaacacgcaccaacagatatctttaagtgagcagttacttatctgtaccttccagtgttgctgcaatgattatgtattagttgtacattttaaagtaactaagagtgtaactggattgtttgtaacacaaaagttaaatgcttgaggggatggataccccattttccatgatgtgagtattatgcattgcatgcctgtatcaaaacatctcatgtaccccataaatatatacacctattatgtgtccgcaratttaaattttaaaaatataatgataaatttaaaaaaatctaaggagaaaaatccatttgatagaactagttaaaccacctttatagatggttctcatatttcctcctcccattatgcttattatctacattttctctggctaggacttctaacaactggcctggatttcaaactgtagtcctacaataagcctgtcacctattccctggatgtaggaactgtcacaaagtagtcttaacattcaactcttctccatgtcaaccagacctaacaccacaatactacattcttcttcaa

SEQ ID NO: 389960 - DNA, 562 bp, Homo sapiens
aagtacatcagacatgtcacatgagttattatatgtagacagtatagacagacatgttttgaatcactrtcatgtatctttacttctattatccatgaggaaattcatgacacattttacatgaggtgtgtactggcttggccatgatacagaaactgaaacatgtagtgacatgtattctttgcatatgagttactttaatgacttccccatcagcttatatggaagatagagccttgcaccttggggtacttgacaaggtgatttatgcaataacacttgactctttcacccaaaaccttgagcttcatccccacataaacttccataatcagaaaaaaatgactccttatcaacagagaaaatcaaagtagcctcaacatcttcagaaaataaggagtgaaataggtcattttatgtccagaccactagctgttttgactttcgttgttgtggaagtaattattttcatggaccgatacggtttcgctgtgtccccacccaaatctcatcttgagttgtagttcccataagtgtcgcaagagggacccagtgggacata

SEQ ID NO: 389961 - DNA, 547 bp, Homo sapiens
gcccatcaataacagattgaataaagaaaatgtggtacatatacaccacagaatactacggagccataaaaaaagaatgagaccctgtcttttgtgggaacatgtttggggctggaggctattatccttagcaagctaaagcaggaacagaaaaccaaataccacatgttctcactcataagtgggagctaaatgatgagaactcatgggcacaaagaggagaacaacagacactgggacctacttgagggtggagagtaagaggaagaagaagaacagaaaaaaaataactattgggtactaggcttagtacccgagtgacaaaataatctgtacaacaaatccgcatgacgctagtttacctatataataaacctgcacatatacccctaaacctaaaataaaagtttttttaagtattaggaagttaattagaaattatttgtttttctggagtttgttattttcatgtgtaattacacataatcactttcttratttatacacattgttttgtatttttaaggccccccccaaattgtataat

SEQ ID NO: 389962 - DNA, 564 bp, Homo sapiens
agcaacaggcaccctctgcttttgttaatgcagttcagctgatatgacagacaaaactgaaagagaaggagaatgtgctttatcatctgtagctgaatttcaattttctctttcaagtacagttgaatgcattttctttgcaacccaaagacagaagatcttgattactgttgcaagaataatctcagcctttgtgtgaagaagatagggaaaataaatagtctctctggaagatgtgtcagcttttgaacttacaaaacaagatatattcttggaggtagggaaattaaattaaggtgaaatagtatacmcattaaaatgacaattgaaggcttgttttgtagactatggctggcttcccaaatgtcctatgttagcctcaccccaggggcacagacaacagaaccaggaacaaacagggtcaagacaggtgcaactgtctgggaatacaggtcactcaggccacaggctctgtcatgaactgccagctcttgtaaaataaaggttccaactcctttctccccaccaccaatgtttcaggtcttaagaaagaaaatgaatcga

SEQ ID NO: 389963 - DNA, 600 bp, Homo sapiens
gttaacaggtttatgaagcacaaatgacaaaaagtcatgtactggatatgtggagaaataaaacaaccctagatttctcagtgttcctataaaaagcccaagcctccttcaacatggaaatatattcactatatagtcagaaaatctttaatttcatttctcataaaaacattttcacataccacaaggattaaatctgtagcaatttgtttccctaatgatggagctaactgttctgatccaaaattaaacttagctctcccaaaatcaaaaggttacatactgggatagtttacctagttactcggtgaaagcatagagcagaaaattcctagatatttatattttaaggaagaataagagccagggcttggagacatctctaggtctgtgacacaaagggctatgtggctcctctggagatttttatttacataccaaagtgctggagttaggaatcatgcccattatgtttccaaggatacccttgcagaaagagaggtggacagctgcctccttgcccttaaataagcagagaaaatctgttttttcttgttctyacatgggtagtttggcttcttgagtagaacaactgacctg

SEQ ID NO: 389964 - DNA, 618 bp, Homo sapiens
aacctaacgaatttaaaaatgcaaatcactatcatcattcatgacaaattcttattaattatctcttttgctgttaaaaagargcgactaataaggcaattttatgtcagagctgggcctcacctttacttcaaaagaccattttccacctctttaaaagccatttttctctagcaaaatggcattttctaatggctcaacctaataaaatttagcttttctcaaaacaaatctcaggctcatttcttcatggaagaagcagcatgtgaaagttaagtgcctaacccaggcttccacttatcattgccctcccacgtttttttaagctaatgatattctctaagaaaataaataaataaataaataaataaataaattactatatgcttgtccagctcttgcttactctccagggaagcaagaagcttcaagctccaagaaaatctcgtttttactccttcaaagcaagatatccttatcagagctcttccagccaagctagccctcagaagagtatctgattattattagagcaggcgagtattagattccttccttcactcatagccagaaaacctatactggggccccaggtatccctgaccagcagagttgagc

SEQ ID NO: 389965 - DNA, 618 bp, Homo sapiens
aacctaacgaatttaaaaatgcaaatcactatcatcattcatgacaaattcttattaattatctcttttgctgttaaaaagaagcgactaataaggcaattttatgtcagagctgggcctcacctttacttcaaaagaccattttccacctctttaaaagccatttttctctagcaaaatggcattttctaatggctcaacctaataaaatttrgcttttctcaaaacaaatctcaggctcatttcttcatggaagaagcagcatgtgaaagttaagtgcctaacccaggcttccacttatcattgccctcccacgtttttttaagctaatgatattctctaagaaaataaataaataaataaataaataaataaattactatatgcttgtccagctcttgcttactctccagggaagcaagaagcttcaagctccaagaaaatctcgtttttactccttcaaagcaagatatccttatcagagctcttccagccaagctagccctcagaagagtatctgattattattagagcaggcgagtattagattccttccttcactcatagccagaaaacctatactggggccccaggtatccctgaccagcagagttgagc

SEQ ID NO: 389966 - DNA, 546 bp, Homo sapiens
cttatttatataaaatttaaagaatgtcactaaactcctgtcataaacacacctaaatgtcagatgaattgtcggtactgcctcatgtcccttttcaaactgcccaaaaccaagtttaaaaatgaaagaaataaggacaaatgaataaaataagatttgttgcatgttagcttaaactatttaaagaacagcatttttaagaggaattttgagaatgattgaagtgaaaatctgaaactgacctagtttatataccctttaggaatggaatgaagcttgtatattatgatagccaactactctttccttataatgcacagctgtttgcgtagatttgccgagcctctttgttttgcttttttttcccccaaagtgtcctcagttctctatttctgcccatcagccaagtccaactgctgaaaatgtgactcagaacgctaagaatgagtatttgctgtcctaaatggtcacagaaaycctgctgcggctcaccacttaacatgtgccttatgctcacatttatttcaggtaaaaaaaattgccatc

SEQ ID NO: 389967 - DNA, 572 bp, Homo sapiens
acaagaatgagactcaactcaaataagaacagggacaaatgcagcatcaaggtaataatcagcagaaacagaacagctggtttgccttctgagacgcccaaagacatactcaagctacccatagatgcttttagattccaccaaytggacttttctccttgcttcatgaatattccatgaactattccaattcccaaagaaccgaaatgatcaccataagcctgtgccaggttatcaacaacagtccataggtcacatatagtgatgatgaatcaaactaccagtgagttacccaaaggtctactgaaataccaaatgtcatgtagactctaaagacaattcaaagtgaggagttcaaacacattttaagcaaaggcagtatcatttgaataagtaaatagctttacaagttggaacacatatttgaataagcaaatttcagcttcctgattgaaatctctactgaaattcaaaacttataattcttagaataaatatttctttctagttatacgttgtaacattttgctcttaacatactttttccttcttgatttctttcttcttatttc

SEQ ID NO: 389968 - DNA, 572 bp, Homo sapiens
acaagaatgagactcaactcaaataagaacagggacaaatgcagcatcaaggtaataatcagcagaaacagaacagctggtttgccttctgagacgcccaaagacatactcaagctacccatagatgcttttagattccaccaattgkacttttctccttgcttcatgaatattccatgaactattccaattcccaaagaaccgaaatgatcaccataagcctgtgccaggttatcaacaacagtccataggtcacatatagtgatgatgaatcaaactaccagtgagttacccaaaggtctactgaaataccaaatgtcatgtagactctaaagacaattcaaagtgaggagttcaaacacattttaagcaaaggcagtatcatttgaataagtaaatagctttacaagttggaacacatatttgaataagcaaatttcagcttcctgattgaaatctctactgaaattcaaaacttataattcttagaataaatatttctttctagttatacgttgtaacattttgctcttaacatactttttccttcttgatttctttcttcttatttc

SEQ ID NO: 389969 - DNA, 593 bp, Homo sapiens
ctttgtcataaaatcaatggcactgctcctctctcctaaatttccattacttttatctttatgacacctgtcatgactattatcattttgaggaaaccttcttcacatcaattatgaaacaatacagtagctttctaaagggcaccttgcctctcatctgtccaggaaaatttatttttggaagggcatttattttccagtctgcaaatgggatttagaacacatctggtaggatgtgaggtttctgaatgctggcctcatggtttgtgaataaggccactgcttcctagataactttcttcacatattcttttcagaggtaacagtaaaaacacttatcaacagctaccagaaatcttatggtttattgtacttattagtttttcaggtttttgtctaaatgccagtaaaacatgcttgaactcrggggtgttatatatgcctgtatgttatacacgtctatatttttcttcatataaagaacatttagaaattcacctctttcctaaaactatggtagcctctctctaagcttgtgactgtgtatgaaatctatatatgaatgaaatttaaatatatttatatataaatat

SEQ ID NO: 389970 - DNA, 613 bp, Homo sapiens
tcatggacaacctaactgactgaaagaagaagatggtatgcaactatcatattatatttgaaaaaaaaatgtatttctttcctgtttgtccaatttatcattttactctcttttcttctcttcttgggatattcagcatttggtcatagtttggttcttgaatatattttacctttcattatattttttattgtatcatgtgtgtatgtatgtttccttgccaatgattatatatgctctttaaattttgaggatataccttgttctttttttatgttattcaccatgtatataatattttaggatcaatgataatcagttaattactatccttttctgtaacaagagattcaaaatctgaggattaattaggtgacatttacaatgttctgtatagaggaaaactgcaggataagtaatggttcttcagctttcaggttgatgtcaattttgatttcaattttctccacccaaattcagtgccatatgttaggctacaatttctcattagttcarctgcaccctgcttagaagaatactacaagctgacatgacgaatgctttctacacctgtcagagtctacactggctctgttttgtgaggctgtttttc

SEQ ID NO: 389971 - DNA, 578 bp, Homo sapiens
tggcttcttccaatcacccttttattagctgctcttctttctctttcctctatttctccattttttcactcaccatctacttcatgaaatggtaaggggagaagttatggaaagtaatgatcatctaacattactatagctaagaataagcatagttagggaggacaaattcctgcaaaaatataatagtatattctaaaaactcagacgtgggtatttcagggaacatctgagaaattactgtccttcattagcatggagaatctataattaattatgtatatagttatttattgtggytgtcaatattataagaattttagtggtttactgcacaactttcttcaaatataatcttgttctacaaacaaaataatttgctgaaaagcagtgaaatatttcaatttaatcactctttattggttaatggtttgaattcagatatttatgcaactgttggttgatgctgtttataagtctaatacaacctttttctaattaaattttatttgtattttcatcattaattgaagtgaaaaataaaatatgtcagtattattagatttcataataatgtg

SEQ ID NO: 389972 - DNA, 585 bp, Homo sapiens
tatatgacatatacagaatattatttgcaataaagctaaacaaataacttttacagcagtattcattaactcttaaaatgcaattaagcatgacctcagcttgtwgttctaacaacttgatcttttttctatagatttaaggtttaattatttataagaatgtaccatattttgaaatagaagatttttgattcaaagtttcaaatgtatgcacattatattttagttatgtattttaaaggtttttaaaatcaagatgactacagcttattaataaagttttattttatggaaatgactaattttaagaattttgatccctttaaattttgtacaaatctgcataaagttacataaccaatatattttttcatataccttttcagaatacaaatgccaatttgaacatgagaaaaagaacaaatgctttggttcactctgaatctgatgttggcaacagaactgaggtgggaaaccattcaagcaaatcttccacagttgttcaagaatcttctaaaggcacacctcggtcttacttagcttccagtccaaacccattcagccgtgcaaatgcagctgaaacca

SEQ ID NO: 389973 - DNA, 593 bp, Homo sapiens
atgtaatatctaagagcttttcagttttaatactctctgattctcatagtaaatacaagcatactcttgtaagaaaaacactgaatactttgmaccacaaataagtgtttatggacaaaaatttagttctactgcttgattactttaagttcattgcttgcttcaaactaaggtttccctaccttcaaaaatatatataacatctctccatttagataaagtatattcttccccagggaagactgtattctttaaagacagtagaatattggctatttctcttttctgggatttcctgggcttttattcactaaatgggctcctgcccagtttgggtactgtgctgatttttagatatacagagataaaaatagcccctttccttgcaggtagtcacagtccggaagagatgatagatgcatagacaaaaaattatgggatgtaactaatgcttcagtagaatacagcagggccaaaactagagtgatactcatctcaggcacaaatatatatggggacatcaaaacttcaataatcaagatacctaatatttaagtgaatatttttaaaactcaaaattaatgcaaaagatt

SEQ ID NO: 389974 - DNA, 575 bp, Homo sapiens
tttataaatgtagaagccaatatgacatacatgctgccattaaataataaaaaattaaattgacttttatctcaagataagattaaaattggagggtaaaactgaagaaattgttgaaatttggatggtgcttctttaaagcaagagatttagagagtcagagctttttatcccaggtttcaatctttatttcaggaaaattttctgcaattttgtctaagttaattttttttttttaagaaatgccaattatgtcaaatcccttttgtctctatacaatagtccccaactgttttggcaacaggcacgggtgagggtgggggaatggttttcagatgaaattgttccatctcagatcatcaggcattagtcgattctcataaggagcggacaaccttgcatgccctcctatgagaatctaatgccgcygctaatctgacaggaggcagagctcaggcgataatgctcaatgggtgccactcacctcctgttgtgctgcccaattcctaacaggtcatggataagtactggtcagtggcccaggggttggggaccactgctctgtaactatttac

SEQ ID NO: 389975 - DNA, 632 bp, Homo sapiens
caggcattaagaaggaggtaaaacaggcagtggtagtcacctgactcctctcccagcatacccctccagggttttttcttctgtggactgtttttcttttatcctatgctctttttttctgtgtccctacatccttgagaactattaatatctgctttttgggtgggactttctgttatgcacatatactctaaagtagtaaataaatgtatcattttctctagattttttaactttaaatcctcactattgttatagaatgaaaaatatattcctttcaaccacatttgaggcattagtctgctggttaatttgatttagggctcaaacattagagaagtccatttctgtttccttgaacttgcatgaaggaagttgctgagaagtctccaagcatattaggcaaaccttggccagaaccttccatttgaggttgggtacmggtgagtggtgactcatgaaggtagctggtataaaaaagagagttatctcaaccacatgggttgagaaaagtttaaagactcattctctaccactattggaaaacaggtagctaggcccttgtcatgtgctttacgatgcttccttttcaactttgtttcttaaaaattattttaatcagatatcatttg

SEQ ID NO: 389976 - DNA, 564 bp, Homo sapiens
atatataataaaattgcataaaatacacaacacattctgcatctttgtttctttggcttattaacttgccaaatatgctcaytcactacttttttacccaaagcttgtaaagtaaatgttgatattttcgcaaaggcttaggcctatgtttttaaaaagagttttaaaatgtgttttacattgtatggtatataatgttttctttctagtattttgttgtctccaaaatctctatagtgagaatgcattgtttgactgaaaagtcaaaagaacaaaattcaaatataaagattaatttagaatctaagtaatagttcatgaaagtttaacatttataatggttcacataccatgagttattgtgtcgtaaaaaactgcctatcctaagactaataaaaacaataagttgttgtaagataaagttcagagttctgtaacaatttcatatcactttttggaacaatttaatggcatttgaaaggtgagaaaaattttaacattgaattgacacacaaaattttactagaacccaaaacatttaataaacatttaattttctatccc

SEQ ID NO: 389977 - DNA, 564 bp, Homo sapiens
atatataataaaattgcataaaatacacaacacattctgcatctttgtttctttggcttattaacttgccaaatatgctcattcactacttttttacccaaagcttgtaaagtaaatgttgatattttcgcaaaggcttaggcctatgtttttaaaaagagttttaaaatgtgttttacattgtatggtatataatgttttctttctagtattttgttgtctccaaaatctctatagtgagaatgcattgtttgactgaaaagtcaaaagaacaaaattcaaatataawgattaatttagaatctaagtaatagttcatgaaagtttaacatttataatggttcacataccatgagttattgtgtcgtaaaaaactgcctatcctaagactaataaaaacaataagttgttgtaagataaagttcagagttctgtaacaatttcatatcactttttggaacaatttaatggcatttgaaaggtgagaaaaattttaacattgaattgacacacaaaattttactagaacccaaaacatttaataaacatttaattttctatccc

SEQ ID NO: 389978 - DNA, 564 bp, Homo sapiens
atatataataaaattgcataaaatacacaacacattctgcatctttgtttctttggcttattaacttgccaaatatgctcattcactacttttttacccaaagcttgtaaagtaaatgttgatattttcgcaaaggcttaggcctatgtttttaaaaagagttttaaaatgtgttttacattgtatggtatataatgttttctttctagtattttgttgtctccaaaatctctatagtgagaatgcattgtttgactgaaaagtcaaaagaacaaaattcaaatataaagattaatttagaatctaagtaatagttcatgaaagtttaacatttataatggttcacataycatgagttattgtgtcgtaaaaaactgcctatcctaagactaataaaaacaataagttgttgtaagataaagttcagagttctgtaacaatttcatatcactttttggaacaatttaatggcatttgaaaggtgagaaaaattttaacattgaattgacacacaaaattttactagaacccaaaacatttaataaacatttaattttctatccc

SEQ ID NO: 389979 - DNA, 564 bp, Homo sapiens
atatataataaaattgcataaaatacacaacacattctgcatctttgtttctttggcttattaacttgccaaatatgctcattcactacttttttacccaaagcttgtaaagtaaatgttgatattttcgcaaaggcttaggcctatgtttttaaaaagagttttaaaatgtgttttacattgtatggtatataatgttttctttctagtattttgttgtctccaaaatctctatagtgagaatgcattgtttgactgaaaagtcaaaagaacaaaattcaaatataaagattaatttagaatctaagtaatagttcatgaaagtttaacatttataatggttcacataccatgagttaytgtgtcgtaaaaaactgcctatcctaagactaataaaaacaataagttgttgtaagataaagttcagagttctgtaacaatttcatatcactttttggaacaatttaatggcatttgaaaggtgagaaaaattttaacattgaattgacacacaaaattttactagaacccaaaacatttaataaacatttaattttctatccc

SEQ ID NO: 389980 - DNA, 521 bp, Homo sapiens
ttgaacaaatcatcagagttccgactagaacctaattggtgtttggttccaaggtatgggaattacttagctcattgatccatcatatgaaaatttccacatgcatcattactaatttgaaagacgcttttcccccttggagccaataattaatgtttccaaagatctattgggaatgcttatctttgctcagtaaaacagtaaagatatggagcttagtgttccctttcatgtcacaagggaactaatatttgtccccctccattttaatttatgtatcctttctctccataccccaccttctgcctctctctctctctctctctctgtctctctctgtctctctctctctctctcwcacacacacacacacacacacattttctctttccccccccactctctctccagccgtcctttccccctacctaaagcagtcaacctctggaagtaagtcaactccattctgaaaaagaagagtgtcgcaagaagtgaaagtgattttgaccagaggtcgcttg

SEQ ID NO: 389981 - DNA, 547 bp, Homo sapiens
aacacacttatgagatagattggcaatattatgaccatgtaaaagaaaggaagaaaagaacatgttcattgccttctccagcttatttaattgataacaaagttggaactataataaaaaaatgatctgagtttaaagctctcctccagggctcccagctgctacaaatagccactgcctacgcaaggcccaaaactcatgaccagggtgtctttcagattcattcatgtttgataatttttacttttaatttattcattcactwattcaacacatgattaaataaatattgagtctgtggtctttttcaatgtaccaagttatgctatgtgcttggataaaaaagagattgacatagttttttctctcgttgaagtttgggtctagtggaagtatagtaattatcaagtatattcagtacttactacatataaagtgccgggcttactattttttttaaatttattcctcgtaattctacaatgtagtaggtagaaacttatacaggagagctatattatcatgtcagatgcaatatatacatcta

SEQ ID NO: 389982 - DNA, 450 bp, Homo sapiens
gggtctttaagctctgtttattcctatgtatcttttttggagctattgaaaatgaattgttttcttgatttccttttggatagttcactattagtgtacacaaatactactaaattttgcaggctgatttttgtatcgtgcaactttattgaatttattagttctaacagcattttggtggagacttcaaggttttctgtatataacatcatgccatcttcaaacagggatgatttgatgtcttcttttccaatttggatgcctttgyttctttctcttgcctaattgcactggctaggattttcagtgctatgttgaataagtggtgaaagtgggcattcttgtcttgttcttcatcttagagaaaaagttctcaacttttccctgtgcagtataatgtcagctgtgggatggtcatatatgggttttattgtgtggaggcacatacct

SEQ ID NO: 389983 - DNA, 682 bp, Homo sapiens
acatggcttcaaattcttggatagaaaagaaaagcctagtattaatctaatacaataccatataccaaacacaataaaaaataggtagaaattccctgcagcaagaccagaattaataagaaagattgaagaaatgataacatcaatatgattttatttcaaatgtttatattttgaactcctcaaattaaaaaatcattttagatgatgacatatgctaattatacctttcaacaataaagagaaaatgatagctcagtttgagcatttacctgtttgaaggatattgcataaggaatgaaggttggataaatacacaactactttccatagtggaactgtttaccaatgatttattatgatggtgattgagaaatctttatattaagtttaattatccaaatctgaatctgaatgtatgtgccagtgtcaaatgaaaggcaagaactgaggttgaaaacrtagataaatgatattttttctcaggtgaaaccaaagtttggaagttgttaaaatatttttatcaattaaggttcacatatgaagagctgtgattttttataaataaaattatattactttaaaaaatttataatgagagttctcttactgcccaggaaacttgagtctcttaggcatacaatgtttgggctctgatatctgaagacattggagatagact

SEQ ID NO: 389984 - DNA, 579 bp, Homo sapiens
ctttctttatccttgatattcacattgttttctttttgaagcttataaaccaataaaattcatttggcatgtttttcctgtcagcagtatgttttactttagaaaacaaacaaatacattctttgtagctgtaataagctttaaaaaattgcaaaatggcactagtaagaactttgatggaaatttttatctcaatcagcacaagcttgccctatctttaattgatttgataaaatcagtatatcmaaatcatgtttgcatatttatatactatgcttgaaaactttaaatgtatgtaaagtttataatgctaattagttatacacacttgttacagagacaggtattagtcgagagtctggctcctctttaggacactacattaatattcttaactattttgcagggtgaaaataactatggatttatatgaagtgtacatgtaaaaagtacaagtacagtttaatctgcaacgtctctacactgcctgcaacatatatgaccctctacctttcaaaatacaaataagtcataagtatatatgttttctctccaagaaaatactaagttgacatagaa

SEQ ID NO: 389985 - DNA, 579 bp, Homo sapiens
ctttctttatccttgatattcacattgttttctttttgaagcttataaaccaataaaattcatttggcatgtttttcctgtcagcagtatgttttactttagaaaacaaacaaatacattctttgtagctgtaataagctttaaaaaattgcaaaatggcactagtaagaactttgatggaaatttttatctcaatcagcacaagcttgccctatctttaattgatttgataaaatcagtatatccaaatcatgtttgcatatttatatactatgcttgaaaactttaaatgtatgtaaagtttataatgctaattagttatacacacttgttacagagacaggtattagtcgagagtctggctcctctttaggacactacattaatattcttaactattttgcagggtgaaaataactatggatttatatgaagtgtacatgtaaaaagtacaagtacagtttaatctgcaacgtctctacactgcstgcaacatatatgaccctctacctttcaaaatacaaataagtcataagtatatatgttttctctccaagaaaatactaagttgacatagaa

SEQ ID NO: 389986 - DNA, 516 bp, Homo sapiens
tctgctaatcaaagagctactgaagcctccagtgtgaagatgagcacaaaattaaagcagaaacccatctctctattactcttgaatgtggcagctccggaatcccagtgcccagggctcatatttggagtacctttggacatattttagttcatcagaagtcttcgtttgtagtgttagtttagatgaattggtaaaattgaaagtgtatgaaatagtaatattttgcttcttctatcatcatttatcttcattcccaaattctaaaacacttatctttcatggaaraagtagactttcatgctaattattctgagatgtaaatgtgcaagagcacatgggatcaagtatatcctgagagatgttccttgattcctagtaagtaaacgtcatacttctcttgaacatgttcatccccattctgctttatttttgtttttagcattccctgttcattgacattacatatttatctatttgtttaatagataagagggtttaattgtaccctccttt

SEQ ID NO: 389987 - DNA, 516 bp, Homo sapiens
tctgctaatcaaagagctactgaagcctccagtgtgaagatgagcacaaaattaaagcagaaacccatctctctattactcttgaatgtggcagctccggaatcccagtgcccagggctcatatttggagtacctttggacatattttagttcatcagaagtcttcgtttgtagtgttagtttagatgaattggtaaaattgaaagtgtatgaaatagtaatattttgcttcttctatcatcatttatcttcattcccaaattctaaaacacttatctttcatggaagaagtagactttcatgctaattattctgagatgtaaatgtgcaagagcacatgggatcaagtatatcctgagagatgttccttgattcctagtaagtaaaygtcatacttctcttgaacatgttcatccccattctgctttatttttgtttttagcattccctgttcattgacattacatatttatctatttgtttaatagataagagggtttaattgtaccctccttt

SEQ ID NO: 389988 - DNA, 532 bp, Homo sapiens
ttgtattgtaactgataagtgtcatggaggagtgtgccaggaaaataaagtgcmttctaattttaaggttcctggctccaatcacagaatggctgagctagagaattgctttctggttttgcaaacaatcataggactgtaccttacaacctacctcagcagtaagtaatactacttataagcatttttgagtaactactctctggagctctttacaacaattgagctctcagcataaatgtgaatcttgtcatagagtgatgtaatatccaactaaattctctattctaaaagttcctagaatacccagtaggcagtattttgtttttgttttgttaaattttgtttttccgtcaagataagaaaatagagagggaaagaagggaaacagtgtttccatggctagtacaaaaataataaatcctctttcctaaactgttactgaagaaatttgaggatagtgtgttcttgggtcgagaggtaggctagaaaggcaattgcatacacaggacatcccttcaatttccagaag

SEQ ID NO: 389989 - DNA, 532 bp, Homo sapiens
ttgtattgtaactgataagtgtcatggaggagtgtgccaggaaaataaagtgccttctaattttaaggttcctggctccaatcacagaatggctgagctagagaattgctttctggttttgcaaacaatcataggactgtaccttacaacctacctcagcagtaagtaatactacttataagcatttttgagtaactactctctggagctctttacaacaattgagctctcagcataaatgtgaatcytgtcatagagtgatgtaatatccaactaaattctctattctaaaagttcctagaatacccagtaggcagtattttgtttttgttttgttaaattttgtttttccgtcaagataagaaaatagagagggaaagaagggaaacagtgtttccatggctagtacaaaaataataaatcctctttcctaaactgttactgaagaaatttgaggatagtgtgttcttgggtcgagaggtaggctagaaaggcaattgcatacacaggacatcccttcaatttccagaag

SEQ ID NO: 389990 - DNA, 614 bp, Homo sapiens
atattaagaagagtaaacatcactcaaagactttacctcctcttcttggaaaagggttagtgcattttttgttgtaagcagggtagtcatatcattttaagtggaatcatgaccttgttagtgcctttatttggatattaagtgtggtttaagtatatgtgtatggataccaagttcataagtggtgaaattgtgatggttaattgtatgtgtcaacttcactaggctacaatgtatccagatatctgatcaaacattatttcttggtgtttctgtgagggtgtttctagaagagattagtacttaaataatggatgtggagggartaaagcagatgaccctcctcaatgtgaatgggcatcttttaacttattgagggcctgaacagaacaaaagtggaaaaacttcaaaattgctgtcctcagcctacctgcttgagctggaacactgatattctcctgcccttagcagtcctggttcttagatcttcagatatggattggagtctatatcatcagccctctctctcttaggccttagaactacactacgggccttcctgtgtctccagcttgcaaatggcatatggtgggatttcttaggctccataattg

SEQ ID NO: 389991 - DNA, 488 bp, Homo sapiens
tgttgatttgtaatcttctacaggagaactgatttgtgagtagatcacacaaataaacaactttacatagcaaagtcatggattgatagagctcacctacttgcctcttactgttgttgttgttgttgttgttgttgttgttgttgttgttgtttgagacgaagaaatcttgctcttttgcccaggctggagtgcaatggcatgatcttggctcactgcaacctccgcctcccgggttcaagtgattcgcctgtctcagcctcccaagtagctgggattacagccaggaatcaccacacccgrcccctcttactgttgattggtacgcacccagatgtgtcctttagtgtgtgtcctaggtccatccaggtcaatggctgttgatttaaacgagacatgaacacattaacctagcatctgtgttttaaatatgacattcatttctggcacaaataacaaatttaatccatagttagcaattggttgca

SEQ ID NO: 389992 - DNA, 554 bp, Homo sapiens
tttgaatccaactatatggcttcttgaaaagataaaacaatgtagacagtaaraagatcagtggttaccagggctcaggatgggggtgcaggagagggaggaatgaataggtgggatacagggaattttggggacagtgaaactattccttattctaccaggacactgtaatggcagacacaagtaactgtacattagtcaaaacccaaacagaatatatagcacaaagagtgaactctgatgtaaactatagacattggtgaggctcatcaataaaatgagtcaatgggaacatatgttgtggagcatatttttgttttaattgtggagcatatttttaaatacttatttgtcatctgcatatcatctttggtgaggtgtctgctcagatcttttactcattattaattacttgttgttttatgtattagatttgtatgctgtttaacaagttaccaaaaacttagcagcttaatacaccacatatttattatttcacagtttccattttattgatgtagtacaaaaaaaagtactacattaatgcaagatgt

SEQ ID NO: 389993 - DNA, 569 bp, Homo sapiens
acctggcttttcttattagtttgcctggatgtgagacagaagggaagagaggtgggacttaaaagttgtcactagtagaaagtaaaaaaatagagccatgctctctattactctctctattatctatctgtttatctatctatctatctatctatctatctatctatctatcatctatgtctctatctttatcatcatcatcatcatctaatttatttattttactagctcagtttccattttaaaattgtgtaggtggaaaccataataaataaccttgaaagatatttttattcgtgaaagaatcatttaattgaatccttctcatcatgtatttataagtagtcacccattttactgaaaaaatagagtaacacatttattgttggtggcctactgaagaattccatttctagtaagacttgaaatatgagctttccctcagaggaakctatgggacatttggagccaaaaagtttcctgggagcaaattcaatttaaactgatgacctatttctctttgagctttagtgtgatcagaaccatcctgatagtttgaaatagttctg

SEQ ID NO: 389994 - DNA, 586 bp, Homo sapiens
atggtttgaattaaaatgttatattcaaataggaaaaactgttagaatttaaaaataattaggtatagttctatatgttattagtggataattcctatgacaggtaattaattggagaaaaaaaccaagatacaaaataaaatgtatttgtgtacaggccaagtgttagttatggtgggtagagtgaaggagaaatccttctgtcagtcattctgtcagtcaataaataaatattatattctgagttcctggtgccactgtttaaagtgcatacattgttatcaaggaacaatttaggctaaaaaacaaacaaaaagaaaaacatacacaacaataccttcccaaactgtgtctgtggataacctttaatttaaacacgatcatattgtttacatatattacttgtataaatcatgtcactgaagtggtctrcaggacccaaatgtgtatgtagttcaatcacattgattgatcatattcatcataaagttgcgtgcctaacttaaattaacaggagtaacagaagatgacacatgacaaagaatacaaagttgaatatctcttcatatgcccagattagagtctt

SEQ ID NO: 389995 - DNA, 586 bp, Homo sapiens
atggtttgaattaaaatgttatattcaaataggaaaaactgttagaatttaaaaataattaggtatagttctatatgttattagtggataattcctatgacaggtaattaattggagaaaaaaaccaagatacaaaataaaatgtatttgtgtacaggccaagtgttagttatggtgggtagagtgaaggagaaatccttctgtcagtcattctgtcagtcaataaataaatattatattctgagttcctggtgccactgtttaaagtgcatacattgttatcaaggaacaatttaggctaaaaaacaaacaaaaagaaaaacatacacaacaataccttcccaaactgtgtctgtggataacctttaatttaaacacgatcatattgtttacatatattacttgtataaatcatgtcactgaagtggtctgcaggacccaaatgtgtatgtagttcaatcacattgattgatcatattcatcataaagytgcgtgcctaacttaaattaacaggagtaacagaagatgacacatgacaaagaatacaaagttgaatatctcttcatatgcccagattagagtctt

SEQ ID NO: 389996 - DNA, 418 bp, Homo sapiens
gttacacaatttctgataaaaaaaatcaatacatgatgtcatgatgtattatgtagttagaaaaatgtaaagttaatttttggtagtttggaaatcctggtttctaaattatgaagacaattaaacaaaaaataattgtttctttacatatttttaggaaagcggataaaatgagctttactgtttatgaaattagastagcatttttcctacaaatgtttataaattaattattttaaaatatttatactcatttatgttaactcatgatttttaaagtccaattcaacttttaaaagttttgcttaagtctaatcttactttacaaacacctcaattaaataagcatttactgacactgaagtattatagtagtctgtgatgaaatgaggtaaagctgaatagactttagttctgt

SEQ ID NO: 389997 - DNA, 514 bp, Homo sapiens
gtgcaaatgcatacattgtccttggtgtctcagataaaagcattctcacaatgagtgagcctgtatataacccattatacttatattttattctccttccaaattgcctactaattgtttctaaattgcttgaagacagagaacccatattttctaaactttaggaataagccttgtcttcagcatacttgcatttctttaaaacatttgtattatgtatgaattgtaaatgagacaatataaataaaagtggtttaaacaatatatcattatctgcctgatctttattctagagtggcttcatctttaacattgccatagccaagatggctgatgaggtccagtctacctgtaagtgtggagaatagaaatgagacaagggatcaaaacagccagtatcatgtgttattatcttaaggagccttccccagggtactactcaacaactttcccatgaatctcyatggccatgactagttaggagggaagttggggattcagtcttttagctgga

SEQ ID NO: 389998 - DNA, 611 bp, Homo sapiens
gcagggccatgcttcctttagaggctctagaagagattctgttccttgccttttctggtttctgggggctcacagcattcctggacttgagacagcatcactcccatctctgcttctgtgtttcacaatgctgcctcctcttttgtctgtcaaatctccctaaataagggaatgaagagactatgtattatagtctggatattcaaggttctgctacggtggcaaaccatcttaaaatattagtagattaaaartacttaggttcatttcctattctttcaaaatgtccgtttattgtagataatgagttcttcatattgtatctctttaggaatacaagctgttggaaatttcagtcaatggcagaatgaaagattttagggcattgcattttgtttcttaaagaattccacctggtagtgacacacattttattgggcaaagcaaattatatgtctacactcaatatcagaaaggagtgaaagtgtaaactactatataccaactgtgtaactggaagaagtaaactaaaaatattggttaatagcactaatagacatcacaccaggattgacttgaagattcatgagatattttgcacagaatttgaa

SEQ ID NO: 389999 - DNA, 611 bp, Homo sapiens
gcagggccatgcttcctttagaggctctagaagagattctgttccttgccttttctggtttctgggggctcacagcattcctggacttgagacagcatcactcccatctctgcttctgtgtttcacaatgctgcctcctcttttgtctgtcaaatctccctaaataagggaatgaagagactatgtattatagtctggatattcaaggttctgctacggtggcaaaccatcttaaaatattagtagattaaaaatacttaggttcatttcctattctttcaaaatgtccgtttattgtagataatgagttcttcatattgtatctctttaggaatacaagctgttggaaatttcagtcaatggcagaatgaaagattttagggcattgcattttgtttcttaaagaattccacctggtagtgacacacattttattgggcaaagcaaattatatgtctacactcaatatcagaaaggagtgaaagtgtaaactactatataccaactgtgtaactggaagaagtaaactaaaaatattggtkaatagcactaatagacatcacaccaggattgacttgaagattcatgagatattttgcacagaatttgaa

SEQ ID NO: 390000 - DNA, 575 bp, Homo sapiens
actaatttgttccttttatggttgtttttttattgtgtttacatgttgttctttttttttwaaattttctttttcctttgttttgcaacttgttcatttttttgattctgtcaaccactgtttttagtctgtttagttattggtgattcttctttttaaaaattttaagctactttaaatatcataattacaacagtgatgccagaaaatttctctgttttttaatgatttattttattcccaacagctttctgtataaggtgatcacatgtgtcagtttgcctgaaataatttctgcttatgcctgtttccctcaaaagcatcccagtttggaaaagtagggagctcaccaaacatctgaaagttctagactttcagacttggctgtgatgtctaaagacactattaacaactaagacaatgtaacaaagaccccactgccaccacaactgggtaaatccattgttcctgacttgctgaagctgagaatcagacactgttgctagcacctattctgctgcagtcactaaaagcctgagtgtcttactaagcgctcttttcagaatggtttccct

SEQ ID NO: 390001 - DNA, 575 bp, Homo sapiens
actaatttgttccttttatggttgtttttttattgtgtttacatgttgttctttttttttaaaattttctttttcctttgttttgcaacttgttcatttttttgattctgtcaaccactgtttttagtctgtttagttattggtgattcttctttttaaaaattttaagctactttaaatatcataattacaacagtgatgccagaaaatttctctgttttttaatgatttattttattcccaacagctttctgtataaggtgatcayatgtgtcagtttgcctgaaataatttctgcttatgcctgtttccctcaaaagcatcccagtttggaaaagtagggagctcaccaaacatctgaaagttctagactttcagacttggctgtgatgtctaaagacactattaacaactaagacaatgtaacaaagaccccactgccaccacaactgggtaaatccattgttcctgacttgctgaagctgagaatcagacactgttgctagcacctattctgctgcagtcactaaaagcctgagtgtcttactaagcgctcttttcagaatggtttccct

SEQ ID NO: 390002 - DNA, 575 bp, Homo sapiens
actaatttgttccttttatggttgtttttttattgtgtttacatgttgttctttttttttaaaattttctttttcctttgttttgcaacttgttcatttttttgattctgtcaaccactgtttttagtctgtttagttattggtgattcttctttttaaaaattttaagctactttaaatatcataattacaacagtgatgccagaaaatttctctgttttttaatgatttattttattcccaacagctttctgtataaggtgatcacatgtgtcagtttgcctgaaataatttctgcttatgcctgtttccctcaaaagcatyccagtttggaaaagtagggagctcaccaaacatctgaaagttctagactttcagacttggctgtgatgtctaaagacactattaacaactaagacaatgtaacaaagaccccactgccaccacaactgggtaaatccattgttcctgacttgctgaagctgagaatcagacactgttgctagcacctattctgctgcagtcactaaaagcctgagtgtcttactaagcgctcttttcagaatggtttccct

SEQ ID NO: 390003 - DNA, 546 bp, Homo sapiens
tacctttgtataaatctaggtatgaatactagaagcccttaagataaaaggattaaaagtttgtacttaaacatcaaagaaaacctgattttgatatmtctgtctctctctctctcaacgtgtgtgtgtgtgtgtgtgtgtgtgtgtgtgtgtctgtgtgggttttgagacagagtctcgctctgtcgcccaggctgaagtgcagtggtgtgatctcggctcactgcaacctcagcctccgaggctcaagcgattctcctgcctcagcctaccgagtagctgggattacgggagtctgccaccatgcctggcaaatttttgtatttttagtagagagacagggtttcaccatgttggcgaggctggtctcaaacttctgacctcaggtgatccgcccacctcagcttccctaagtgctaggattatagatgtgagccaccacacctggccctgtgtgtgtttttttatgaaacattgcatggtgctaaatatcctcttcctttgttttaacttttataagacagggcgtatacatttcctgttgct

SEQ ID NO: 390004 - DNA, 539 bp, Homo sapiens
taagggacttttacacaaagttaaggggctttttatacaaggaaaacaaagaaaaattcctgttatttatgttgccagattctgtaaaattagagaactgagactaaaatgatatctattaataaaacgcaattgaagacatactcaaaatgtataaatgcatgtctcttttaactatattgatggaatatagaatgggtgtagagcagggtaggtttatagtttttcatattagtaaaatgaggtatttcctatttgcatggtttctaatttctccaaaaattagaatttgaggtcgtattttagagtcattggaaggagaagcagtgaatggttggaagttttcagttggagagtytgaatgtttgtgagacagggcaaagtgagagattctcatatttgtaatagagatcctgagtagggttcagtacacatttgaagtaggtgatgaccatcaaagtgagtcagctggccctgttttatgacttgctggctgggcatcagttgacatcttggttccaagcggaaagaaaattaag

SEQ ID NO: 390005 - DNA, 539 bp, Homo sapiens
taagggacttttacacaaagttaaggggctttttatacaaggaaaacaaagaaaaattcctgttatttatgttgccagattctgtaaaattagagaactgagactaaaatgatatctattaataaaacgcaattgaagacatactcaaaatgtataaatgcatgtctcttttaactatattgatggaatatagaatgggtgtagagcagggtaggtttatagtttttcatattagtaaaatgaggtatttcctatttgcatggtttctaatttctccaaaaattagaatttgaggtcgtattttagagtcattggaaggagaagcagtgaatggttggaagttttcagttggagagtttgaatgtttgtgagacagggcaaagtgagagattctcatatttgtaatagrgatcctgagtagggttcagtacacatttgaagtaggtgatgaccatcaaagtgagtcagctggccctgttttatgacttgctggctgggcatcagttgacatcttggttccaagcggaaagaaaattaag

SEQ ID NO: 390006 - DNA, 529 bp, Homo sapiens
tattcctgattaaaatcagtgtagctagccattctctgagagtatagcttccatttaaatcctcatttggccaaacagttccttgatcttgtggaatttgaaactggatttatttaaccaggacaagtcaaagsagaacttgaacagatctgaacagacattatattgaagttccgtagcttgaagggaatggagtttattttcagttgcttagtaaagattccagaggagtttgacatcagtggtagcaaaatgtttggcaaacttaagattagggccatattaaagttttttccattgcataatggaaaaagcatggactgtgaagttagacctgggttcaaattcttggtagagacattggctgtgaaacctctgaaacagcttttctgaaagatatatagactttctgaaatttagtgtccatatctgtaaattgcagtttccttctgttgatttgatgaaataacatatgcaaagcatttagcacattaatgcacgaagacattattttagcagtcttagtagt

SEQ ID NO: 390007 - DNA, 572 bp, Homo sapiens
cctgtctttggcaagaatcaccctactcttgatgtctccagttagtarttttccatccactgacctcatcactgctcattgactataaatcctcagttgtatttgctgtgttagttgagcccagtttctttcccttattgggtgatggtcttaacatatacagtcctgagtaaagtcttctttactgctttaacaagtgtcagaatggtttttcctttaatacttcctagtttacatgctggtagaataatgtttggtagggaaaaatcagcatgctccttgttatggactgaatgtgtcctcccaaaattcttaggttgaaatcctaaccccgatgtgatgcttttaggaggtggggcttttgggagataattaggtaatgagggtgaaaccctcatgaatgggattgtgtcattaaaagaaaccccagagagctctctttctgccacatagaagacagcagtctgcatcttggaagagggccctcaacactgatctctcagacttccagcttccaaaacagaaataaatttgtttataagccacccagtctatattttgttatagcatcc

SEQ ID NO: 390008 - DNA, 572 bp, Homo sapiens
cctgtctttggcaagaatcaccctactcttgatgtctccagttagtaattttccatccactgacctcatcactgctcattgactataaatcctcagttgtatttgctgtgttagttgagcccagtttctttcccttattgggtgatggtcttaacatatacagtcctgagtaaagtcttctttactgctttaacaagtgtcagaatggtttttcctttaatacttcctagtttacatgctggtagaataatgtttggtagggaaaaatcagcatrctccttgttatggactgaatgtgtcctcccaaaattcttaggttgaaatcctaaccccgatgtgatgcttttaggaggtggggcttttgggagataattaggtaatgagggtgaaaccctcatgaatgggattgtgtcattaaaagaaaccccagagagctctctttctgccacatagaagacagcagtctgcatcttggaagagggccctcaacactgatctctcagacttccagcttccaaaacagaaataaatttgtttataagccacccagtctatattttgttatagcatcc

SEQ ID NO: 390009 - DNA, 572 bp, Homo sapiens
cctgtctttggcaagaatcaccctactcttgatgtctccagttagtaattttccatccactgacctcatcactgctcattgactataaatcctcagttgtatttgctgtgttagttgagcccagtttctttcccttattgggtgatggtcttaacatatacagtcctgagtaaagtcttctttactgctttaacaagtgtcagaatggtttttcctttaatacttcctagtttacatgctggtagaataatgtttggtagggaaaaatcagcatgctccttgttatggactgaatgtgtcctcccaaaattcttaggttgaaatcctaaccccratgtgatgcttttaggaggtggggcttttgggagataattaggtaatgagggtgaaaccctcatgaatgggattgtgtcattaaaagaaaccccagagagctctctttctgccacatagaagacagcagtctgcatcttggaagagggccctcaacactgatctctcagacttccagcttccaaaacagaaataaatttgtttataagccacccagtctatattttgttatagcatcc

SEQ ID NO: 390010 - DNA, 560 bp, Homo sapiens
ttatagaagttcagagtatagcaatggagtaaataacttattttctttttcaattcactctttgaaatgagtgaatagtattagcggctatgtttggcttccttcagtaaaagcagaagctagagacttattttccttattcataagttctaaatttacctactggggaaggagttgtatgggaacctgtaatagtttagggcttgcccaaagatggggtatgtgtacgtctatgaaggaatccaaaatcttacctaacaagcggaaagttttctaggtagttagtattcaagtagttctgtggtctcaaagatttagatcctcttccaaagagtctaaacctgttacccagacayaagaatttcataaataaaatattttaagtggaacaacacagctccattttaatgtagtctagtgacgtggtaactgctttaaaaagaagagcaataataatagttgctcctatccacctcagtggcagctttgaagctattcatagatgagatgacagacttaaaatagattgaaacttgttcaggaaaaaaaaaaaagataaa

SEQ ID NO: 390011 - DNA, 642 bp, Homo sapiens
ctgacacatacacataagaagacggaaagactgaaagatggaattaagatgttttcgaaggtacacaaaatattttgtaaagtaaatgtaaatagaatacatattcaagtaaatgactgcaggtattattttaagaaagtcacagcagaaacaatgattatttaaaacttggctctggaagaaattctcttcacctagctctccctaaatatggatattcatactaaataatggtcccaaagtccctataaaaactcagagggcaggaagaccagcaaacagtatgtgtactgattaaacattaggaaagacttaacaataattgcaaatttatttggaggatttctttaaatagataaaatacaaaattcatttcatcacatgcaagagcaggcagaactgtacttttatcctacctacatagttggaatgtaatatgttaggatggtgactctgtggggtaaggctacccagctctttaagggccagagaaaactggtttttggtttatgctggrttaaaaacaaaaaagaaaaaagacagctctggctctaattatactcgggatttctcattccataataacttacaaaaaaaaagcattgtgcaaagttccattttatatcaggacacaaaaagggg

SEQ ID NO: 390012 - DNA, 606 bp, Homo sapiens
tttaaaaacatgcttgacacatagccagacatagtggcacatggctgtagtcctagctacttgggaggctggggcttgatcccaggaggtaaagggcagcttggataacatagygagaccctgtttcaaacaaaacaaatgttttgtttgaaatgcttgacaactaattatgttgattacctatgatttggagaaatccatgctataacaatgaatagtcaagcgttcactctggagtaatccaacactttgctgtattccatatgaaaataaaacatgcctttgaatttttacaaggatgcagccagcttttgtttgaatctgtgaaatggcaagtttggggctggactaggactgtatcagggaaagaagctgtttggcatgttttttttttctgtagtgttgagcattgctgcttgttgggcagctcaaaggacaagatattcaaagatctccctgccagcaggtgcctccaacgccacacttgagaagtggatatgcgtgagccaagtcctggcagccacactcaccagccacgtagtccttggggacatcaccagactcctcgtgcttctgcttcctcaccagtaatgagttttaaatggg

SEQ ID NO: 390013 - DNA, 606 bp, Homo sapiens
tttaaaaacatgcttgacacatagccagacatagtggcacatggctgtagtcctagctacttgggaggctggggcttgatcccaggaggtaaagggcagcttggataacatagcgagaccctgtttcaaacaaaacaaatgttttgtttgaaatgcttgacaactaattatgttgattacctatgatttggagaaatccatgctataacaatgaatagtcaagcgttcactctggagtaatccaacactttgctgtattccatatgaaaataaaacatgcctttgaatttttacaaggatgcagccagcttttgtttgaatctgtgaaatggcaagtttggggytggactaggactgtatcagggaaagaagctgtttggcatgttttttttttctgtagtgttgagcattgctgcttgttgggcagctcaaaggacaagatattcaaagatctccctgccagcaggtgcctccaacgccacacttgagaagtggatatgcgtgagccaagtcctggcagccacactcaccagccacgtagtccttggggacatcaccagactcctcgtgcttctgcttcctcaccagtaatgagttttaaatggg

SEQ ID NO: 390014 - DNA, 606 bp, Homo sapiens
tttaaaaacatgcttgacacatagccagacatagtggcacatggctgtagtcctagctacttgggaggctggggcttgatcccaggaggtaaagggcagcttggataacatagcgagaccctgtttcaaacaaaacaaatgttttgtttgaaatgcttgacaactaattatgttgattacctatgatttggagaaatccatgctataacaatgaatagtcaagcgttcactctggagtaatccaacactttgctgtattccatatgaaaataaaacatgcctttgaatttttacaaggatgcagccagcttttgtttgaatctgtgaaatggcaagtttggggctggactaggactgtatcagggaaagaagctgtttggcatgttttttttttctgtagtgttgagcattgctgcttgttgggcagctcaaaggacaagatattcaaagatctccctgccagcaggtgcctccaacgccacacttgrgaagtggatatgcgtgagccaagtcctggcagccacactcaccagccacgtagtccttggggacatcaccagactcctcgtgcttctgcttcctcaccagtaatgagttttaaatggg

SEQ ID NO: 390015 - DNA, 648 bp, Homo sapiens
ttgccagtgggattggtatatccttttttacaaggttctggtcaaatcttaaataaattctgaagaacaataaacccttcaggaactttygctctatgtgcaatgtgtctgtaaagcagcaaccagtaggcatagagcatttgacataatttcttgcattgttgggaaccttccttctccctcgtgcattcctgctttggacaatatgataggagttttcattcttttgaaagcattgggaaaagtagctttagcccctctcagccctgttcacttttccctgagggactagtcatgatttagctgcctggtgaagtggggagtttctccaggctcatgggaaactctgctcttcctgtcccttcttcttcggatctccccccgagggtgggtgtgttttgcccacctcctgtcttgtgggtggcagtcatgatggggttaggagccagctctgcttccagggccaggtctcaaatcctagctctcactttgttccagtgtagagacatagcagatgcagatgatgcagctgttttgctctgtgtgtgtgctctgaggagccaacccttccttgagtgagatgtaccaagtgttagacctagggaaaaacattagagagtctgcctgtgccacagttaactcctactc

SEQ ID NO: 390016 - DNA, 648 bp, Homo sapiens
ttgccagtgggattggtatatccttttttacaaggttctggtcaaatcttaaataaattctgaagaacaataaacccttcaggaactttcgctctatgtgcaatgtgtctgtaaagcagcaaccagtaggcatagagcatttgacataatttcttgcattgttgggaaccttccttctccctcgtgcattcctgctttggacaatatgataggagttttcattcttttgaaagcattgggaaaagtagctttagcccctctcagccctgttcacttttccctgagggactagtcatgatttagctgcctggtgaagtggggagtttctccaggctcatgggaaactctgctcttcctgtcccttcttcttcggatctccccccgagggtgggtgtgttttgcccacctcctgtcttgtgggtggcagtcatgatggggttaggasccagctctgcttccagggccaggtctcaaatcctagctctcactttgttccagtgtagagacatagcagatgcagatgatgcagctgttttgctctgtgtgtgtgctctgaggagccaacccttccttgagtgagatgtaccaagtgttagacctagggaaaaacattagagagtctgcctgtgccacagttaactcctactc

SEQ ID NO: 390017 - DNA, 515 bp, Homo sapiens
caatgacgactgctatctctgaaccccagatctctgcagatctcaccactccctaatgcctcccaactctgaacaccctgagtcctccttgggcctcagtctggctctctcctgtattccaatccctgggttgacctgttttgccaacctgcaggaactcacagagatccattctctcttctgtggactctgaaggtagatgggtgagccccaccaccagctgtcaaaagcttctgggtttattggccaagaatgaaaattaacttggagcatgctaggaagggaaaccaatagtgccctgctctgaacccagcaatgtgtccacaagcacctggggtaaggctagaaagggcatccaagtgtggtggcagcagcgctccaggccttccttctcargcaacgttctctctggcatctgtcttggggtttccagggtccccagtcagctttctccctcttggcaacagctccctgaactacagaccagctggagcagagagagtaccgagctgttt

SEQ ID NO: 390018 - DNA, 535 bp, Homo sapiens
atacacgatggaatacatatatatatgtatgtacgtatatgtacacacacacattttctttatctgttcatttgttgatggtcacttagcttgattctgtgtcttagctattgggaatagtgcagaaatacacatgaagtgcagacatctctttcatatactggttttctttcacttgtggggggattagtggatcctgcggtatttctgyttttagttttttgaggaacctccacactgttttccataatggccatattaatgtaatttcccactgacagtgtataagagttcccctttctctgcatgcttgccaacgtttgttatttttttgtctttttgatcaggatatctcattgtggttttgatttgcattttcctaatgattagcaatgttgagcatttttcatatacctgttggccatttggttttcttcttttgagaaatgtctattagatcatttgcccttttattttttttgaatatgagagtcttgctttgttgcccaggctggacttgaactcctgggctcga

SEQ ID NO: 390019 - DNA, 505 bp, Homo sapiens
aattccaggagagggcaggaggctaacctgggggattttattgcccagggaaggatgatatgacactaagtggtgaaatggcayggcttctctctctgttggtttatccctgatttgggtggagcctgtcctggaatggccttctcagaaaagaaatgctcacttccagcattacctctcacaagcaggctttgtctgctgcatgctgcatatacccttatatgcatatacccttataatgttatacgccttttttccatatgtttctagatcagtggctgtctatctctacattgggcactcaataataaaagaaggtatctgattgtgtgtcctcacagcccccaggctgagaatttctgcccaaggctcagtggtgatctttcctcaggagaccttcagttcagtgaataaatgaatgacataataaactttatcctatgtaccaataaatagatacacctgctatggacccataaaaattagaaattaaaaatctaagaaa

SEQ ID NO: 390020 - DNA, 576 bp, Homo sapiens
tgtgtgtagacatagagcacgcagagggagaaacagtgggagggacggggagcagggaactgggggtgagtgtaccacaaatgtatatgygtgcaattttggtggtaagaaagtggatgggattgttctgacttttggaagaacatggagtccaagacctagttatcctatgattcattattctggctttgtctggactggggtgggagagagtctagacaacatgccctgtggggctcagtagcagatgacccaattgtgggaagcagaatgagaaagtgactagagaattacacctgtcagacccccttccctctcagcttttggtaaaagctgaaatgaggaggaagtagcaccttcctatggcattccttactctcctgctctcaggctcagctcctttctgacagaacactgatctggaaagtctgcaggtccagtcatcactgttctccccaagaggtgagggagtgggctcttctcctcacccgggccctagcctggtctcagctcacctgggctcacctaggttgtgctgcaccttcaggtcctatggccccagtactggaagatgca

SEQ ID NO: 390021 - DNA, 576 bp, Homo sapiens
tgtgtgtagacatagagcacgcagagggagaaacagtgggagggacggggagcagggaactgggggtgagtgtaccacaaatgtatatgcgtgcaattttggtggtaagaaagtggatgggattgttctgacttttggaagaacatggagtccaagacctagttatcctatgattcattattctggctttgtctggactggggtgggagagagtctagacaacatgccctgtggggctcagtagcagatgacccaattgtgggaagcagaatgagaaagtgactagagaattacacctgtcagacccccttccctctcagcttttggtaaaagctgaaatgaggaggaagtagcaccttcctatggcattccttactctcctgctctcaggctcagctcctytctgacagaacactgatctggaaagtctgcaggtccagtcatcactgttctccccaagaggtgagggagtgggctcttctcctcacccgggccctagcctggtctcagctcacctgggctcacctaggttgtgctgcaccttcaggtcctatggccccagtactggaagatgca

SEQ ID NO: 390022 - DNA, 613 bp, Homo sapiens
tactttgaactgaagcaatattgcctttaaaagctaatcatgaaatcctccatgaggatattgtgaaaggattaaaatgagaactattcggattagaaagtgaaaggrataaaaaacaaataaaacaaaacaggacagacaggaagttgataagaagagaaggagtccttctgcatacagaacatactggatcctttattcctggtctggagagcatcctggaatgaagcctgtacagagggctaaacagaagagagaatccttggcttctgccaagaggttgctcttacttttaactttgtgttttccatagttctgactcagagtgacctgtattcaaagccctgttgccccaacttactaactgtgatcttgtcaaggtgatatatgaggacacttctgaaaatgaaaggggatgctattagcaatttcaactggggaacagacaatgagattctagaatctcattactttatggtcattgttttcataagaaaaatgaaaaatacttgtatttttagtggtacttaacaacaatagtggcattgaacagtgttcagtacttattgtaagactgtgttcagttctttatatgctcactgtaattctatgg

SEQ ID NO: 390023 - DNA, 613 bp, Homo sapiens
tactttgaactgaagcaatattgcctttaaaagctaatcatgaaatcctccatgaggatattgtgaaaggattaaaatgagaactattcggattagaaagtgaaaggaataaaaaacaaataaaacaaaacaggacagacaggaagttgataagaagagaaggagtccttctgcatacagaacatactggatcctttattcctggtctggagagcatcctggaatgaagcctgtacagagggctaaacagaagagagaatccttggcttctgccaagaggttgctcttacttttaactttgtgttttccatagttctgactcagagtgacctgtattcaaagccctgttgccccaacttactaactgtgatcttgtcaaggtgatatatgaggacacttctgaaaatgaaaggggatgctattagcaatttcaactggggaacagacaatgagattctagaatctcattactttatggtcattgttttcataagaaaaatgaaaaatacttgtatttttagtggtacttaacaacratagtggcattgaacagtgttcagtacttattgtaagactgtgttcagttctttatatgctcactgtaattctatgg

SEQ ID NO: 390024 - DNA, 334 bp, Homo sapiens
gtcaccaactagcatgaaatctaaggaaagacagcctctcccaaagatagacaggatgtgagcactggttcacctgtaacagagcaaaggaggaagacagggccaacattcaacccagtaagcagcatccagctaaaatgcctgaagaatcacaaaggctgactgggctagtgtgagaccacgaaacacttgcagacacaaggttgctcagacacyttagcagttcttccccataagcctccatcaggaactcatgaaacaggtttagagcagggtaaggacagagagacagagagaggctttccttatggttcgggggtgaagaagggagagg

SEQ ID NO: 390025 - DNA, 334 bp, Homo sapiens
gtcaccaactagcatgaaatctaaggaaagacagcctctcccaaagatagacaggatgtgagcactggttcacctgtaacagagcaaaggaggaagacagggccaacattcaacccagtaagcagcatccagctaaaatgcctgaagaatcacaaaggctgactgggctagtgtgagaccacgaaacacttgcagacacaaggttgctcagacaccttagcagttcttccccataagcctccatcaggaactcatgaaacaggtttrgagcagggtaaggacagagagacagagagaggctttccttatggttcgggggtgaagaagggagagg

SEQ ID NO: 390026 - DNA, 194 bp, Homo sapiens
tttcaaaagccagcatcccttcagtctccattatgcggagactcacacagcctcctttctccaaacagcacagaaggtcacagggacacggggcaacagaggcagctctttcaggctgggagaacagccttcctccctgtctcaacccaaccagagaaccccrgctttctttttaagccatagaaatgaagatg

SEQ ID NO: 390027 - DNA, 622 bp, Homo sapiens
tgtctaccaaaaaagaccccacagcttacattatacttaatggagaaagacttaatgtccccttaatattagcagcaaggcaaggatgtccactctcacactctccactcctattcaacatcataaggaaggtacagctggtacagtaagtcaagaaaaaaataaaaggtctacagcttggaaaggaagaaataacactttattctcagatgatttggactgtacagaaaaagtgaatgtatttaaaaagctactagaactaataagtgagtttagcaaggtttcacaatatgtgatcaatatacaaaaatcaattgtatttgtacacactagcaatgaacaactgaattttttacttaaagaaaaattttccttttagagacagggtcttgctgtgttgcctaggctggtctcaaactcctggcctcaagtgatccttccaccttggtcccccaaaatgctgggattactggcatgagccactgtgcctgaccttcaaaaatattttttatgccatttaaaatagcacyaaaattttaaaaagtatttaagtatacagctcacaaaacctatgcaggattcgtatgctggaaactacaaaacactgataaagaaaccaaag

SEQ ID NO: 390028 - DNA, 564 bp, Homo sapiens
ttctttaaatcttctgaatacaaatcctttgttctttgttttgagatatatcctccctttttgtggcttgtccatcaattttcttratggtatctttttcttttgatgggtgctggttttcaattttgataaagtctaatataacaatattttaatgtctttctgtctcccacttaagaaatccttgtctacaaatagtaaaaatattctcccatgttttcttgtagaagctttatggatttagctgttatgtttaggtctgtgatccaccttgagtgaattattgcatatggtgtgaggtaggggttaaagttcaattttttttcatatgaatatcctgttgtcccatcaccatttattgaaaagattttcctttttcccactgaattgcctggtgacttagttgagaatcaatggaccatataggcataggtacatttttggaatctatgttccattccattgatcttatttgactatctttatgccaacatcacactgtccttcagtattgcagctttataagtaacccttgaaatcaggtggtttaagttttctaacata

SEQ ID NO: 390029 - DNA, 600 bp, Homo sapiens
atctttcaccataaagttttgatttttaaaaaatgacatttgaccatataatatggcttttatacttactgggggtagattccaaatcaaataaagaaataaagcttcactcatccattttrccaataaatattcaaataaccactaaaagaaaggcaataataattattacttatccaataggcagatcaaactattagcttcgtgaaggttagaatgtcttattggctggatttgaacaacccttaacagattttcatacccacataggactctcatagcagcattttaaaagactcattatgagaggacccacagatcctctgaaggaagtggactgctcctgtaggacccaggagacaccccaaatactgtgagtgtcccaactttggaagtgggaaagggagaccctcatttcccaaacacacacccccactggagaagctgaagccacagcaagacctgctcaaggagagtctgagctcagacacacctagccctgcccccaccggatggtctttccctatccaccctggtagctgaagacaaagagcatataatcttggaagttctagggccccgcccaccgcctgtccctct

SEQ ID NO: 390030 - DNA, 608 bp, Homo sapiens
caagacctatggactttacatatgtaatggtatggtacatatgtaatggtacattacccatcagtccaacataatggctgaaaacttttcaaaaacaataagacaccaaaccacagatccaagaaactcagagataaataccaccaactctgctccccaaagaagcctagacacataatattcaaatttttgaaaatccacttaaagagaaaatcttgaagtcagtaaaaaaaaaaaaaaaagacacatatagagagaggaagataagaaaaatgcaaacttctcgtcagaaactatcaaaccatacaatatctttaataggccaaagcagtgggggagaagtcaaacaataaacttatatccagcaaaaatgtcatgcaaaaatgaaggaaagataaatatttttcagacaraaactgaaaggattcattactagcagatcattaaaaatgtaaaaagaagttctacagaaagtagggatacaatagcaaattagaaatgtgagtctacacaaaaaagatatatagaaaggcttaaactaaagacaatgtaatattcacagttttctattttaaaaaccactctaaaaggtagagaacagtttaaag

SEQ ID NO: 390031 - DNA, 622 bp, Homo sapiens
tgaagggagtctgtcatgaacctaaggaggtaaacagaagccagagcacttgaggctacacaggccatggtgaggactttgaaatatttttcaaatgcatgaggaattcattaggcatctgaaccagagaagtaagatgatttgatttatatgactgctttgtagagggaggagcaaaagtatgaggaggtgggggtcattttaacctttcgacttgtgccaccttcatctaaacaatactctaacctcagtggctacttctagttccttcagaaaacaaaagcatttcagaagattgtagcacatgctgtttgccttgtctcagattctcctttgcacctttcttccttaaggaagcaacttacacatcatgtatgtgttgactcattctgtggcagcaccagtgaaataaagtttaacatcattattcttttacagagcaccatattctcgttcttcatcactattttaattctgttttctgtgwttgtgtctgtgtattctttttaactatccattttctcaataaactctaagccctgtgagagcacacaccatgcttctctcgtattaccagtgcagattgataatgggtgctctgtaaatgtctcctaaataccta

SEQ ID NO: 390032 - DNA, 609 bp, Homo sapiens
tgaggaaaactccataattaacccccaatgccctgagccccacatccttccatttaagaaaccccagtggaaagagaacttttttattcaaagcacactcaataaatcaggaaagaacttgcatggttyttgcttaagttagatggttattgtatttaatgaactggactaataagtactgatcaatcctgggtcatgtgccccaattgctgaggattttttttttttttttttttttttgaaacagaatcttgctctgtcactcgcgctggagtgcagtggcacgatctcagctcactgcaacctccaccccctgggttgaagcaattctcctgcctcagcttcccgaatagctgagactacaggcacgggccaccacgcctgggtaatttttttttttttttttttttttgtatttttagtagagagggggttttgccatgttgaccaggctggtctcaaagtcctgacctcaagtggtctcccaaagtgctaggattacaggcgtaagccaccgtgcctggccaatatttctaaaagaattacaatgaacacagaatatgtagataggtggaaagagagaacaactacagttgtacaaagaatcca

SEQ ID NO: 390033 - DNA, 609 bp, Homo sapiens
tgaggaaaactccataattaacccccaatgccctgagccccacatccttccatttaagaaaccccagtggaaagagaacttttttattcaaagcacactcaataaatcaggaaagaacttgcatggtttttgcttaagttagatggttattgtatytaatgaactggactaataagtactgatcaatcctgggtcatgtgccccaattgctgaggattttttttttttttttttttttttgaaacagaatcttgctctgtcactcgcgctggagtgcagtggcacgatctcagctcactgcaacctccaccccctgggttgaagcaattctcctgcctcagcttcccgaatagctgagactacaggcacgggccaccacgcctgggtaatttttttttttttttttttttttgtatttttagtagagagggggttttgccatgttgaccaggctggtctcaaagtcctgacctcaagtggtctcccaaagtgctaggattacaggcgtaagccaccgtgcctggccaatatttctaaaagaattacaatgaacacagaatatgtagataggtggaaagagagaacaactacagttgtacaaagaatcca

SEQ ID NO: 390034 - DNA, 555 bp, Homo sapiens
ttaatgtttttgagcctgatggtcttaaacaggagaaggtgagagagtctctgatcttcaaagtagcagaaagcrgggggcacaggctctgctcacaacaaggtactaacatgtgttatcaattttagctgaagttcaaaaggatagaacttgttcttagcaaatgtttgatatttctgccatcacaccattagtcaaataatgttcagactccaagaacaccttccattggccacttttcacctagcgaaatagaaggaattatattggatgagattaatgtattttgtcttgcattattttcaggaaattttaaaaaattaccatgtaacttaagtgtaactttgcattattgaggaatgtcatgggcagaacgttaagatgattttcataattaaaacttatctgtagtggcatgagtatccactttcactaaaagcttagccattggcttccagttgcctgtttccctgcatgtacggtaaggacacatttctggaataagaggtcatcatttagtaacaatgccaaattctagttattttctgtttgttt

SEQ ID NO: 390035 - DNA, 593 bp, Homo sapiens
aaactattttaattttaattttttattagcacatcatacatagaaaatatgtattcctgataaaggtatgtaaacagcccccaaacaaacacaaacaaacccacaaatgtcacatttaatagtaaaactttaaaagcatttcttttcgagaraaaacaaaaagcctgttgttattattatttcaattcaatattgtacaggaaatcttaaacctttttttttgacttttacaaataaatcagctcctttatttgcattattttgagcactctgataatgacagtcttcactgatatttttgaaatcctgttttttgttaaataagcttttccaattaggcaagcaaataaataaaagaaagcttggaaaggagaaaaaaacaaaactttttatgaaatcaaacaacatattaagagtattatatacattcattccacttactgtatgccttacattattgtgcttactgcatgactcagctctaactagcataatggacagtaaattagttgttatctttgaagatgttaaatttcgtttcaagttaagcataaataaatataaatatttttcaagcagctgaaagtaaagca

SEQ ID NO: 390036 - DNA, 538 bp, Homo sapiens
  misc_feature (1)...(538): n = A,T,C or G
taatgatgaagcacacagtaaattaatcaagatgattattgtgttgaagagagttttttaaaatataattttattttgagtttatttaggtaacaaacacctgtaagtacttatgtgccagggagtggtctaagttctttacaaatactgacttattcacattctgaacttcgattgcttggtcaagcataaatctaggttaaatcaataaaagttgatttgtgatacctcttttaattctaatacatgtcatgtcacatctgcttcargttgttttgttgcagatgattaattaacctgccatagttgatataaaatgtcaatatttaagcaattttcttttttatatataatttcaaaatccttccaaattatttggaagtaaaatttgctgtaaatggtatgctacttctgcttggtattgaaatagaataacatcaaaatgtttcacagaaatgcatattccatttcagaacagaaatactatgagaaattctgnnnnnnnnnnnnnnnnnnnnnnnnnnnnnnnnnnnnnnnn

SEQ ID NO: 390037 - DNA, 642 bp, Homo sapiens
acatgttcccttgaacattcaacaaataatctaatttggaaacaccaaataccacaaggaaaaagtagtacttttgttctattttctgacagatttccacaccagtgatttatggacgtatgttaagtttaggattcttatctgaagccaagaaaaaaacctttatatttttgaagcctatcatcctcaatgatggaagccaaacccttggaatgttgctaaaatcaaggatgagagaatacagaatgtcatgtactatcaagaacttattgactttcatatggttctcatttattctcatacatggcaaattgaaagccttgggaggaagccaatacaaattgttacagataacactatctaaatttaactgccataggtatgcttcatataataaatatatatttcatatcagcaactcagcaaggcaaaaattgaaacagactctagtcaaaattcatttggacacaatccttcagagaagactcaatttgccaatataattatttatyttggtctggagagcccttaatactcaattttatgtttctgactctagagattttatacacacacacatatatatacacattcatatatacacataaaatactctgatggaagttagagcattgaaatcat

SEQ ID NO: 390038 - DNA, 553 bp, Homo sapiens
tccccactctggtgaaggagtctatttgttgttggtattgacagtgtgagaggcagatgtagaaacaagattgacagactttgtatttaaaggtgtaagtttcataaatggrtacatagaaaaatgaacacgtttaaattaatgatgtaaacatgttaatattcccaaatacaaatataagtctgtacagtgacttgcttttttaaaaagcattgaagtggaatttgcataccatgaaattcacccattttaagtgtataatatgttgatttttgacaaattttaaaatcttgctagcatcaacacagtctagttttaaaacccgttcctcactccagaatgttcccttgtgcccttttgcagtccctcactccacattccagccccaaacaatcactgatctgctttttatctctgtagattttccttttctagatatttcatgaaaatgcaataataaataatgtataaatcattaaagatttatagcaaatgtagttttgttacccttttttcatgtttctcaaattgtttgtacaaggaaaaattattt

SEQ ID NO: 390039 - DNA, 553 bp, Homo sapiens
tccccactctggtgaaggagtctatttgttgttggtattgacagtgtgagaggcagatgtagaaacaagattgacagactttgtatttaaaggtgtaagtttcataaatggatacatagaaaaatgaacacgtttaaattaatgatgtaaacatgttaatattcccaaatacaaatataagtctgtacagtgacttgcttttttaaaaagcattgaagtggaatttgcataccatgaaattcacccattttaagtgtatartatgttgatttttgacaaattttaaaatcttgctagcatcaacacagtctagttttaaaacccgttcctcactccagaatgttcccttgtgcccttttgcagtccctcactccacattccagccccaaacaatcactgatctgctttttatctctgtagattttccttttctagatatttcatgaaaatgcaataataaataatgtataaatcattaaagatttatagcaaatgtagttttgttacccttttttcatgtttctcaaattgtttgtacaaggaaaaattattt

SEQ ID NO: 390040 - DNA, 611 bp, Homo sapiens
tttaagaagtattttactcccagactcataaaacaagcctacagccaggcacagtggcacacacctgtaatcccagcactttgggaggctgaggtggtggatcacttgaggtcaggagttcaagascagcctgggcaacagagtgagactcaaacgctaaaataaaaaataaaaataaaataaaataaaataaaataaaataaaaattagctggacgtggggcaccggcctgtagtcccagctactcaggaggatcgcttgaacccaggagttcaaggttacagtgagccatgccggcgctactgcactccagcctgggtgacagtgaaaccctgtctcaaaaaacaaacaaaagcaagcctacaacactacttttttagttctgaagcactctaaagtacattttagattaataatttccaaaccaagaaaatgaaagcctaaattaattataagacctcaaacagaaaaaaatcttttaaaacaatcaataccatggaattcacatacattctatttggtcaatgcagagacatagatctttgttctgaagttcaaatttaaatgcaaggcttcagagccagaaaacatctaaaattatacccatgact

SEQ ID NO: 390041 - DNA, 410 bp, Homo sapiens
aaagccacaaacacaatccaaataatggaggggccacttctgtttgaaggatcaaacattcttcactgtactgtcccaactatagttggtaaggatcactctggtaataggaagcctgtcttgatggtctctcactatcagtgtcaaaaccagagagaaaagacagaatgctttttcaatgtaactcaatgcagcatcaaaatcttataacaggctctgcctcttcctttaagctcaaaatctggaaagctcaccaaccagcacctccccaycctcatgccacaggaagagcacaggtctgccaacaaggagggggaggccacagcagaaaagagtgacaattctgaagacactcataacaactcatactgatcaaaggtatacctcacctataaatgaacagataacca

SEQ ID NO: 390042 - DNA, 623 bp, Homo sapiens
gtgtatgtgtgtttatatgtatatctatgtctagaaagagagagagagagagtcttgttatgttgcccaggctgatctcaaactcctgagctcaagcaatcttctcaccttggccttgaaagtgctgggattacaggtgtgaaccactgtgcccagcctcagccttaactcttaaaacatcttcaaaccaatgttsttccgttctaatttttaagaatagatgtgttttaacctactacaacttattttgacaaaaattgaagttaagactcaaacttcctcaaatggccagttctcctaaaactatttatagaataatctatcttttcactagtaagttaaaacaccaccttttccttatactaaattctcatttgcatgactctggttttaaacttccattacctttatctgtctggcccagggctagtccacaatattttatttaatatctggttgaaagagtttatactttattattttttattatttactcttctaaacaaattttagagtcattttgtcaagtgccaaaaataaatctgctggaatttctactgaaatttgtatatatacacatacatacacaatttatatatataaaatacaaaatgtgtatatat

SEQ ID NO: 390043 - DNA, 544 bp, Homo sapiens
gagcctctcttcatgaaggtagaggtcgggcgargagctctcctcccgggtaacaggcctttttttttttttttttttttttttctgagacaggatctggcagtatcgcgcaggttggagtgcggtggcgcgatcacggctcactgcaaactcaacctccagggctgggctcaagcctcagcctccccagaagctgggaccacaggcacacgccttcatgcctggctttttttttttttctttccaagagactggatgtcgctaggtttcccaggctaacagaggcatttttacagtgtccagccaagtgctaggcaccaaaggacttccataaactaatccccatcacctccgccctttgggggaatctgacccgtgttcaccttgctctctgccctctcacagccagcatcacagtctggaaatgttctggcacacagtaggtgctcagaatgggaatgcagaatgatggagggtgggacaaagggccgcttctgaggaacgggcatccagctggagggcctggcttatgggcaggaagcag

SEQ ID NO: 390044 - DNA, 536 bp, Homo sapiens
aagagccgcgcttgtgaagacgcagtgcccagttagtttgcgccagcctctgagttcagctcagaacacagatgatctcattgattcctcacgtcaaccttgggaaatctgggtaccctgggacgtccacacatgaggaccgaggctcagggacatcaagggactggcctggtcccagaaacagggagtaaaatgggaagtaaactcagtcccacgtctgcctgactccagagtttgggccactgaaccatgcgrctgccatcttggagttctttgagctgtgaagtgctgtgcatcgtgtgattctgtgtcccttttgtgcaggtaccaggatttctatgcattcgacctgtcaggagccactcgagtccttgaatggattgatgacaaaggtggtatacctttctagccctgaaggagagggaatctcactcctgagctgggtttcaggagctaagcctagagggacccaacccactcttctgggcacctgagagtcacttgtagcaatttgatgccccatcagcactaatatt

SEQ ID NO: 390045 - DNA, 509 bp, Homo sapiens
tgtaagttaactgctaagaatttgtcagaagtgcagacataacatcaagaacttgtcatggatagtacaaaaaggtctctaagggcttgatggaggcctgtaaattgacttcctatgaaagagagtgtaagaagtgaaaatgtaaagcatgactggagagccagagtgatgaagccagggtccctttctccagatcctttgtaacagtgttatgtgatctcttctagaagatcgttctgaaagataatgccaacttggaacctaggaaacyatccagtgggtttctgcagcttaggtggttcaaatcctcatcagcacctttgttttctctgcctcagtttgctaacaatgatgttctcagtagctgtaattgctgtctttgaatacgtaagcatttttttttagatgacagggatatatgtgcatttttattttaccaagtgttagaatttttactctgcttttgtgggctctgggttagctacttggttgtttagatgtaaaatgat

SEQ ID NO: 390046 - DNA, 561 bp, Homo sapiens
taagccaagagctctactttataacttgggaacgcacaaatatttacagttgtagggaagggagccaatggctgctggagggtcctagaattggaagggagctgagagcttgtctagcccagcctcatattcactataggaatgccctccacagagcccttggcagtggtcacccagcctccccttcctggtccctgtgatgggaaggaaggtcatcttcctctgagaaagtgctttctgttgatcttatcgttggaaagtttttctgacattgagccagaactgcctcccagtaactttgcccttggttttggatgggtctctagggcctcacagcttgggtatcttctttcccacgacagcaygttaaaggctagaactcagcctccctgtctgccttccgttgtctgttcttcctcagttcctttgttcttttcttgggggccttcattcattggtccctcatcactggggtcacctttccttgccatgtccaacacatcctagttggtcaatgtctgtcttaacatacgatacccccaaattcatcacagcactaca

SEQ ID NO: 390047 - DNA, 580 bp, Homo sapiens
aaagtagtgtgcaggagaagctcatacgggttcatgaacggactggtaaaatttcaggaatttcgtgagctggttgtcaaacagttattaaaaattaacttaggcaaatttacaattaaatacattataacaaaaacaaagctaatgaatgccaaaaattcatcacttcctatttatcccatctttcaattacctatgctgttgaggttgtttacatctattgtatatgtatggcagaaataccatatsaaggtgcgctactgagcatctctgttcaacacctcctgcagtaactcatgttggtggcttgaaatcagcgatggtgggaatatttacatcaaacaaattgacaaatgctacaaatcagagcctgattattgttttgttgatagtctagagttaagaaaataatggagaaaatgttaatgtagattatacttaaaagtatgttgtgctggtagcctttaattgtaaatagcatgaaaaagaattgaggacatattcttccaatattcaaaaactattctttaattcagcaaataagtcacttgtgtcattgccaaatgaatgaaattcatgc

SEQ ID NO: 390048 - DNA, 576 bp, Homo sapiens
gcgttggcgcacacaggcattctgacatggagcccggcgttcctttttgtctatttattatattcttttatagggcttcatgagccactttaaagcttataggatgctttggggaattcaataatttagtagttcttcaccrctgaacatgatgtattttttaaatgttatttaaataagcaatatttgtggaataatttgacttccattctgggctcgcggttcctcctctcccaaccaaatgcaatatttaagttggcaccgagaccattctttaagaaattgggaaggaaggtctgggagactgggagggttctttaggatgagagagcagtttcttccttctaggtctgtgtactcggagagtccaagtttgatgttgtttgaaagtgtgaggcagcacccaaggtctgacatcatactgtaactgtcaggaaggttataagcccccatctccctgcatgctgcgggtgtctattgctccccagcctccactcagatgtggagggcttcaagagagactcctgggtgaacatgaataacttcctctgcatccaatgcatttaatacagtggt

SEQ ID NO: 390049 - DNA, 576 bp, Homo sapiens
gcgttggcgcacacaggcattctgacatggagcccggcgttcctttttgtctatttattatattcttttatagggcttcatgagccactttaaagcttataggatgctttggggaattcaataatttagtagttcttcaccactgaacatgatgtattttttaaatgttatttaaataagcaatatttgtggaataatttgacttccattctgggctcgcggttcctcctctcccaaccaaatgcaatatttaagttggcaccgaraccattctttaagaaattgggaaggaaggtctgggagactgggagggttctttaggatgagagagcagtttcttccttctaggtctgtgtactcggagagtccaagtttgatgttgtttgaaagtgtgaggcagcacccaaggtctgacatcatactgtaactgtcaggaaggttataagcccccatctccctgcatgctgcgggtgtctattgctccccagcctccactcagatgtggagggcttcaagagagactcctgggtgaacatgaataacttcctctgcatccaatgcatttaatacagtggt

SEQ ID NO: 390050 - DNA, 583 bp, Homo sapiens
tttgtcttgcatcttggataccaggtcagccacaacaggatagggcaccagtcagagtcctgaggccaccattctgggtcttagctaaacaccctgggccagaaggaaacccacagccttgaagaaaakgacccaagcatagcagcattcattacctgctaattggcaagtccttgggccatgaataatcagcagaaatacccaggtattacatggggggcttttgttgagcttgagacttgctggcttcaggtgaaactcaatacattgtcagctgtgttgactatgaggcaaagcttctgcttaagaaaaggagagggaaaaggaaagggaagtttgtcttgcaccttagataccagcacagccacaagggagtacagcgatcaacagactcttgaggtcgctgataccaggacttgattctgtgatagcatttctggaccttctctgaaccagaggagtgcctattgccctgaagagtgagcggcaagccaggcagcatgcactacaagctgacttaagagtccttggaccttaagggaatattgtggtggtctggcagtactcctcttggcctggttga

SEQ ID NO: 390051 - DNA, 559 bp, Homo sapiens
ggggctgaaaaatataattggtgtactgaagaatgtatcagagtcctttaatagcagaattgatcaagcagaagaaagaattagtgatcttgaagattggttaactgaaaatacacagtcagaggagacaaaagaaaaaaaaaaaccaatgaagcacttctacagggtctagaaaatagcctcaaaaggacaaatctaaaagctattgaccttaaagaggagatagaaaatgagatgggatagaaagtttattcaaagggataataataacagaacttcccaaacctagagaaagttatcaatatccaagtacaaggaggttacagaacaccaagcagatttaaatcaaacaagactacctcaagacatttaataagcaaactctcaaaggtcagggataataaaaggattctaaaagcagaaggagaaaaaaaattaaataacatgtaaagaagctccaatacatttggmagcagacttttcagtgaaaaccttacaatctatgagaaagtggcatgacatatttaaagtgctgaagaaaaaaaaaaaacaactttta

SEQ ID NO: 390052 - DNA, 513 bp, Homo sapiens
aaattttttgggctgatggaaatgttctatatcttaactgtatcatatatataatcatgtttatattatatgtgattgccaaaattataacactggacatattacaatagaagtaaatgttactacatgtaaaatatacctcaacaaacccgtctttaaaaaatgtagtgccacaacaggctgctacagactaggctgatagttgccattaattgcccacaaagaaatactgagtttctactataagcaggtgaatctcagaacagagtatataaaagaaaggaaatagtttaaaaatactgtagactctatcagtgccttatcatatcttctgggcacccactttatttctataggccaatggcttcctattcaaagcaacagcagatctttgagggtttgctaaggccactggaggccactctattgaygcacatggcaggaatgaaatatcaggagttgaccattccacaggacagctctcaaccaatgatttaccagagttagtgggta

SEQ ID NO: 390053 - DNA, 607 bp, Homo sapiens
agctctgctgttaaccatcatgcaatactgcttcaaagaggaattgatgaaaaaaatattgttcataattatgtactgtgtgtaggactctgttctgagtactacagacataaagaagaatataacaggctttgaagtatggttaggggaacaagaagtctgtaaagagaataaacaagaataaaagagaagagatatctgtactctcatgctcattgcagcattattcacaatagccaaaatataaaatcaacctaagtgttcattaccagatgaatgaatgaagaaaatatgattatctatctatctatctatctatctatctatctatctatctatcatctatctrtctatctatctatctatctatctatctatctatctatcatctatctatctatatctatctatccacctacctatctatccaatggcatactaatcagcctttaaaagaaagaaaaacctgtcatttgtgacaacatggatgaacctggaagaggacattatactactgaaagaagccaggtacagaaagacaaatactgcatgatcttgcttatatgtagaatcttaaaaagtcaaattcatagaagtagagagtaga

SEQ ID NO: 390054 - DNA, 629 bp, Homo sapiens
ttggcacaagtacagtgaggggggtacaccttgcataagaggaaattgagaaaaagccactcccttaattctgaaacatatggtgtgatctcaacaaggcacaaatgcagaattcagcagttgtctctcaaaataactcagaataggataaaaggctgaagaaagagaacagttcccatgtgtgaggtcagttcaagaaggtgtctctgtccctagactctgatgagtgggaaaactgtgaatcctcaggatcccctaggccaaagacaggcaagtctccactgccccaggttgaaaccactctcaggaactggtatagaagaaagatggggtcarccatggccccagagtatagacacagaagacaagatgagtggaccccagagccagagagtcccctgctcttcagaggtggggtttagagggtcatcagagactaactcactccactccgtggtgacaggactgtccaggctagggtgcttcacttggcaggtgtagatgtctccctgctggtggctcatttccagcatcactgggatctggaaggtctagtctcattatgaatcatgttggtggacacaaccccagctatttcctcctttccattcaggaaccatcagacttga

SEQ ID NO: 390055 - DNA, 629 bp, Homo sapiens
ttggcacaagtacagtgaggggggtacaccttgcataagaggaaattgagaaaaagccactcccttaattctgaaacatatggtgtgatctcaacaaggcacaaatgcagaattcagcagttgtctctcaaaataactcagaataggataaaaggctgaagaaagagaacagttcccatgtgtgaggtcagttcaagaaggtgtctctgtccctagactctgatgagtgggaaaactgtgaatcctcaggatcccctaggccaaagacaggcaagtctccactgccccaggttgaaaccactctcaggaactggtatagaagaaagatggggtcaaccatggccccagagtatagacacagaagacaagatgagtggaccccagagccagagagtcccctgctcttcagaggtggggtttagagggtcatcagagactaactcactccactccgtggtgacaggactgtccaggctagggtgcttcacttggcaggtgtagatgtctccctgctggtggctcatttccagcatcactgggatctggaaggtctagtctcaytatgaatcatgttggtggacacaaccccagctatttcctcctttccattcaggaaccatcagacttga

SEQ ID NO: 390056 - DNA, 553 bp, Homo sapiens
taagtattatttgtctctcagtcatgacatctggcttagaaaccttttcagacttgcccaagtcgaagcaagtggttgtcctctgtatttccatagcacctcgcacacacatgttaccatctctgcttaaatggatattgtcttagaaagatcttaccaaagtaccacaatccacccaatcattgtattctctgtctcagcctcttatttttggccttaaatcacaattatttatgtatgtgtatgttgatgtgtctgcctgtcttgctaacatgaaagacattttttctctcctgctcacttctgtgccataaagcttagaagaatgyttggtgtagagtgggtactcaatacctggttattgagtgaatgaacatacaatggatgaatggatttgaattcatctttttatttcttaaaaggaatgtcggatgcataagggactactgtttatagtttcgaatcctcactacctaccatcgtgcttggcataagataggggagcaacaaatattagcaaacagttttatttaaatgacactataattcaaag

SEQ ID NO: 390057 - DNA, 585 bp, Homo sapiens
cttaaacatgttggaaaacctggagaaaatggataaattcctggacttatgcaacttaccaagattgaacaaggaagaaagagggaacataaacagaacaatgagtaataagattgaaccagtaataaaaaatctcccaacaaagaaaagctcagtraactggctttactgctgaattttaccaaaattataaggaaaaactaacactaattcttcttaaactattctaaaatattaaagaggaaggaatcctttctaaatcattctatgagcaagacatacctggacactaagaccagacaaggacacacaataaaatactacaggcacatatccctgatgaacataggcacaaaattcctcaacaaaatactagcaaacagaatctaacaacacatcaaaaagataatacaccaaaatcaaatgagatttgtcctagggatgcaaggatagtttgatatatgcgaattaatagatgtgatgcatcatatcaacagaatgaaggacaaaaccatattgaccatctcaatagatgcagaaaaagtatttgataaaattcaacaatgtttcataataaaaactctt

SEQ ID NO: 390058 - DNA, 585 bp, Homo sapiens
cttaaacatgttggaaaacctggagaaaatggataaattcctggacttatgcaacttaccaagattgaacaaggaagaaagagggaacataaacagaacaatgagtaataagattgaaccagtaataaaaaatctcccaacaaagaaaagctcagtgaactggctttactgctgaattttaccaaaattataaggaaaaactaacactaattcttcttaaactattctaaaatattaaagaggaaggaatcctttctaaatcattctatgagcaagacatacctggacactaagaccagacaaggacacacaataaaakactacaggcacatatccctgatgaacataggcacaaaattcctcaacaaaatactagcaaacagaatctaacaacacatcaaaaagataatacaccaaaatcaaatgagatttgtcctagggatgcaaggatagtttgatatatgcgaattaatagatgtgatgcatcatatcaacagaatgaaggacaaaaccatattgaccatctcaatagatgcagaaaaagtatttgataaaattcaacaatgtttcataataaaaactctt

SEQ ID NO: 390059 - DNA, 519 bp, Homo sapiens
gttcaaagttctgtaatgcttaaggttcttgcctagccacgccaaagaattggcgtggcagcagaccacggcgagtgatggagacacggaccgagagagagaaaaagctgtaggctttgttgagaagagtgacagtacaaagcttccacagtatggaaggggtcctgaacgggtagccggagatagattatacatgccttttaaactctttaaggcaggaaatacgtgtggtgggaagatgttaccagagcgagaaacaaagacaattaaccatttgtgacatgtgttagatcttgaggaaaaccggaattgcaacttaggttttatctmtcttatgaccttgcagtggcatggcaaaggagacaggatctcataggactttacaaagtatgtttacaaggaattggaattgggagcatagataaggtccgctggtcacagcaaatcgggcagttaacattccttttactttagtttcggggaaaggggaagggagagagggagagaggacacagggaa

SEQ ID NO: 390060 - DNA, 630 bp, Homo sapiens
acatgaacacgttctgaacttgacaagtaagtttgttcttcttagatctgtggcagttatgacattgaaatgtggcctgaacttactagactagtttccttgaagtcttagaaatgacattaaacaacagaaacaacgggtggtgaactattcttgtaagtttttctgtcactggtccagattkttcctctgcctcatttaccagacacacatctttctgagcctccaggattgttattagggcaccttgccgtttataggacatttggcttccgtgttttaatacctgagcaaatgttcagtatgaaccaacaattttatttcccttagggaagttctatcctttaaagtgttaccagttttcattttagaaaatcaaaaacaattttttttcattatgtaactcttcttgaaattgaacaagataatgtatggtaaagtgtagacccagatttatacttcaagttctcaagtctgttccataaaagtattaagttatatttttactctatggcaaagaagaaaatatttaatttttccttcactggaatagaagcaaactagaaacttattttctgctatgtcagtgtaaagtggtgattttataaatatgccttttttcttggacta

SEQ ID NO: 390061 - DNA, 535 bp, Homo sapiens
tagctcatatgtgaggcaagccttgacccttgctgaagtgcattggataatgagttatttaaagaaatgtcacacagctttgaytgagtaatgcccccttgctaaaaaaaaatctataattaatctccattttttcagaatatactaaggcttcttaatttggtatgcaagacactcatgatttccaagtgtattttcaactatttatcatcaggaaagctacattattgctaaaaagaactccagacttacttagttattgcgtatgtgcccagtgcttccctatcttcattaaaaacatgctttatttctcccacacttctgttttcttaaggtctaaagatggtgcatcttttataactcagtttaaattatgtatcctctatattgtctgccctaataaagtcagtaaaaaaataatttcttcactggggggaatctcaagactctggattttctgtgtcattttagaataaaaaatttcattttttatcttgtatttatcattttgatattttttattaatgctttcctt

SEQ ID NO: 390062 - DNA, 535 bp, Homo sapiens
tagctcatatgtgaggcaagccttgacccttgctgaagtgcattggataatgagttatttaaagaaatgtcacacagctttgactgagtaatgcccccttgctaaaaaaaaatctataattaatctccattttttcagaatatactaargcttcttaatttggtatgcaagacactcatgatttccaagtgtattttcaactatttatcatcaggaaagctacattattgctaaaaagaactccagacttacttagttattgcgtatgtgcccagtgcttccctatcttcattaaaaacatgctttatttctcccacacttctgttttcttaaggtctaaagatggtgcatcttttataactcagtttaaattatgtatcctctatattgtctgccctaataaagtcagtaaaaaaataatttcttcactggggggaatctcaagactctggattttctgtgtcattttagaataaaaaatttcattttttatcttgtatttatcattttgatattttttattaatgctttcctt

SEQ ID NO: 390063 - DNA, 535 bp, Homo sapiens
tagctcatatgtgaggcaagccttgacccttgctgaagtgcattggataatgagttatttaaagaaatgtcacacagctttgactgagtaatgcccccttgctaaaaaaaaatctataattaatctccattttttcagaatatactaaggcttcttaatttggtatgcaagacactcatgatttccaagtgtattttcaactatttatcatcargaaagctacattattgctaaaaagaactccagacttacttagttattgcgtatgtgcccagtgcttccctatcttcattaaaaacatgctttatttctcccacacttctgttttcttaaggtctaaagatggtgcatcttttataactcagtttaaattatgtatcctctatattgtctgccctaataaagtcagtaaaaaaataatttcttcactggggggaatctcaagactctggattttctgtgtcattttagaataaaaaatttcattttttatcttgtatttatcattttgatattttttattaatgctttcctt

SEQ ID NO: 390064 - DNA, 535 bp, Homo sapiens
tagctcatatgtgaggcaagccttgacccttgctgaagtgcattggataatgagttatttaaagaaatgtcacacagctttgactgagtaatgcccccttgctaaaaaaaaatctataattaatctccattttttcagaatatactaaggcttcttaatttggtatgcaagacactcatgatttccaagtgtattttcaactatttatcatcaggaaagctacattattgctaaaaagaactccagacttacttagttattgcgtatgtgcccagtgcttccctatcttcattaaaaacatgctttatttctcccacacttctgttttcttaargtctaaagatggtgcatcttttataactcagtttaaattatgtatcctctatattgtctgccctaataaagtcagtaaaaaaataatttcttcactggggggaatctcaagactctggattttctgtgtcattttagaataaaaaatttcattttttatcttgtatttatcattttgatattttttattaatgctttcctt

SEQ ID NO: 390065 - DNA, 638 bp, Homo sapiens
agtgatgccatgtgacttctgatgctggattatgaaagaccacacagctgttgccttacattccagaacacttgcttttggagccatgtaaggtgttcaacaaccctgataccaccatgatggggagaccacaggtaagcatcctcactgacagtttcagctgagtcattcttcggagatcccagtcagggccataactggagaaagcatctaggaattggattgtccagctgttctgtccccttgtcattcaagtcaccgctggtcattatgccacctgcactgaagccacaaacattacagaaagaagaaagactttcatgtttcacccattmtcgattcttcacacacaaaatttgtgaacataataaagtagtttttgctttttattgctaaatttgggggaaagaatagagttgttatgcagcaatatataactaaaatggaggtccacataaggcaaaaacctcacagaactcttctctatgctgggcagctgcccttttccaaaccccagcagtttactaaagggtaaaacagggtctggatatcagagggagatgacaggcacatctgagagcagaagtatagcactaaaaacctggtatgcatgaaaatgtatctactaaatcttaatg

SEQ ID NO: 390066 - DNA, 581 bp, Homo sapiens
agcaagtgcactatctcagacatttgataggttctagaggagtacttattatgaagaaaatgcaataggatggcatttgctcatgctattattgcattgaagaaagacaatgaagtctgggtgtggtggctcacgcccacaatcccagctctttgggaggctgaggcaggtggatcacctgaggccaggagttcaagaccagcctggccaacatggtgaaaccctatctctactaaaaatacaaaaattagccaggcgtagtggcacccacctctaatcccagctattcaataggctgaggcaggagaattgcttggaactgggaggcggaggttgcagtgagccgaaacaccctactgcactccagcctgggtgacagagtgagactctctctcaaaaaaaaaaagaaaaaaaaaaagacaatgaggttctyatctgctgatattagaggcaaaaaatggtcagaatcagatttaagacttattagcaaagcagagctccaaagacagtcatcacatcaactctggcaattgtgctatgtaaaaattagggcccaagttgagaaagagtgaaattttaaa

SEQ ID NO: 390067 - DNA, 581 bp, Homo sapiens
agcaagtgcactatctcagacatttgataggttctagaggagtacttattatgaagaaaatgcaataggatggcatttgctcatgctattattgcattgaagaaagacaatgaagtctgggtgtggtggctcacgcccacaatcccagctctttgggaggctgaggcaggtggatcacctgaggccaggagttcaagaccagcctggccaacatggtgaaaccctatctctactaaaaatacaaaaattagccaggcgtagtggcacccacctctaatcccagctattcaataggctgaggcaggagaattgcttggaactgggaggcggaggttgcagtgagccgaaacaccctactgcactccagcctgggtgacagagtgagactctctctcaaaaaaaaaaagaaaaaaaaaaagacaatgaggttcttatctgctgatatyagaggcaaaaaatggtcagaatcagatttaagacttattagcaaagcagagctccaaagacagtcatcacatcaactctggcaattgtgctatgtaaaaattagggcccaagttgagaaagagtgaaattttaaa

SEQ ID NO: 390068 - DNA, 496 bp, Homo sapiens
ctacactataaaaatttatggaaacttatttattagaaaaatattggcaagaaatatattaaaacaaataattctccacataactttttctaatgattttgtgaatttatgccttaccttattcttaagtagatttggtgagttcagctcactgtaacatttttatatattatttctaatttttactctaattcagccatgtggaaattaattttattcttgyctgttttcaagtataacaaatgtctctgaggggttaaataacttgttgaaattcacccaagggcctaagtcatactcaaaactataaaagtagttttgttcagtgattagaagtgatttctacttacatttttcaaagtttcaaaaatatggttatgttgattttatagtgaaaataagtttgtaaaataaggaaaaatggactcatgagatattcaatacatattcatgaattttcaagtggataaaacacagaacaattgtcattcaagtt

SEQ ID NO: 390069 - DNA, 623 bp, Homo sapiens
aaaggtaagtactagacagtctaaatcagattcatttctgttatttaagtgactggaaattattaatttagtaaatggaacaaatatctcttgcataatgtcatgtacaaaagcgtgtgttggagtttaagtggtcctcataactattactcttccccctaaatgaaggtcagaactaacagagagataggcataagagttacacatatggagatccagatatcacattcattaccaataaatccagtgttgaaaaatatgagttagaatgagtgctaatgtagctagctagtgtttttccccataattagagaaccaagtaaggggacaaagagaaaccaaatgtgttactcaaatggaagatygagtcgcatggaaacataagaaaggaaagatggtcccttccaaacactttgccctgagcacttacacatgatcaaaaacctacaagacataaccacctcatgagatatagttagtgctatgagtgaggaaaattatagctcattaattgactaatatgtttgtttcctacctacattgaaaagttttggtgacataaatcttcaaattttaagcatattttagaaataatgagtaaagaaataatgagtaaaatcgaa

SEQ ID NO: 390070 - DNA, 550 bp, Homo sapiens
ggggggcaggtgcggtggctcatgcctgtaatcccagcactttgggaggccaagctgggtgtatcacctgaggtcaggagttcaagaccagcctgaccaacatggagaaaccccatctctactaaaaatacaaaattagccgggcatggtggtgcatgcctgtaatcccagctcctcaggaggctgagactggagaattgcttgaacccgggaggtggargtggtggtgagctgagattgtgccactgcactccagcctggacaacaagagcaaaactccatctcaaaaaaaaaaaaaaaaaagaagcataactgaaaacaatcaaattttctttaacagaagaataaacaaattgttgttcattcatacaataaaatactattgtaaaccaaaaataaaattctaaggtcccccaaccatctgaatggattccctcctcagccagggtgctctacaatttaacctgaaagactggttggagccatgatggaaagtgggggtcaaacatgcctcattatcataccacggcagcattaacattaacagaga

SEQ ID NO: 390071 - DNA, 550 bp, Homo sapiens
ggggggcaggtgcggtggctcatgcctgtaatcccagcactttgggaggccaagctgggtgtatcacctgaggtcaggagttcaagaccagcctgaccaacatggagaaaccccatctctactaaaaatacaaaattagccgggcatggtggtgcatgcctgtaatcccagctcctcaggaggctgagactggagaattgcttgaacccgggaggtggaagtggtggtgagctgagattgtgccacygcactccagcctggacaacaagagcaaaactccatctcaaaaaaaaaaaaaaaaaagaagcataactgaaaacaatcaaattttctttaacagaagaataaacaaattgttgttcattcatacaataaaatactattgtaaaccaaaaataaaattctaaggtcccccaaccatctgaatggattccctcctcagccagggtgctctacaatttaacctgaaagactggttggagccatgatggaaagtgggggtcaaacatgcctcattatcataccacggcagcattaacattaacagaga

SEQ ID NO: 390072 - DNA, 550 bp, Homo sapiens
ggggggcaggtgcggtggctcatgcctgtaatcccagcactttgggaggccaagctgggtgtatcacctgaggtcaggagttcaagaccagcctgaccaacatggagaaaccccatctctactaaaaatacaaaattagccgggcatggtggtgcatgcctgtaatcccagctcctcaggaggctgagactggagaattgcttgaacccgggaggtggaagtggtggtgagctgagattgtgccactgcactccagcctggacaacaagagcaaaactccatctcaaaaaaaaaaaaaaaaaagaagcataactgaaaacaatcaaattttctttaacagaagaataaacaaattgttgttcattcatacaataaaatactattgtaaaccaaaaataaaattctaaggtcccccaaccatctgaatggattccctcctcagccagggtgctctacaatttaacctgaaagactggttggagccatgatggaaagtgggggtcaaacatgcctcattatcataccmcggcagcattaacattaacagaga

SEQ ID NO: 390073 - DNA, 495 bp, Homo sapiens
cagtgtttgccttatttgaacacagttcaaacacttggcagtgtaagagtggttgaagtatggctactgggattggccaagactcagctactgttacaggtgcctacttccaagttaggttttcaatcttgtctacctataaattaggttgcagttcatccagaaggactcaaatataggagtatggagtgctcaggccacatttagttcactttaacaattccctccttttggtcactttctcaattttaagagattgaccaaaactttagccattgatgttaactattaccattgcaaatgtacttatttggtcttcaaacccacwgggaaagagtagaacagtgagttttgttaaggtaggaacaaggactgagtaaagggtaactcccttatgctggaacgtcctgtttacaggagaaaaacaaaacctggtctgttctaggatctatgtgttttcttaaagaattagtttgattatggcatatttagcac

SEQ ID NO: 390074 - DNA, 297 bp, Homo sapiens
acctaaagagtctgtttacagagatgtagctagggttaaaaaaataagagagagagagagagagatgcagaggaacaaagacatcaaccacggaagccataaagggacaagagaaaagatagyattaccagagctaagtgagttctggagctgcaaggaaaggtcacataacaggagttctagttatggagagatgcagcccctggcagaagcacagaaccaaagcagagggaatcggggaagaaataacccattctcctctccacctaacttgaaccctacaggagcctcccactg

SEQ ID NO: 390075 - DNA, 297 bp, Homo sapiens
acctaaagagtctgtttacagagatgtagctagggttaaaaaaataagagagagagagagagagatgcagaggaacaaagacatcaaccacggaagccataaagggacaagagaaaagatagtattaccagagctaagtgagttctggagctgcaaggaaaggtcacataacaggagttctagttatggagagatgcagcccctggcagaagcacagaaccaaagcagagggaatcggggragaaataacccattctcctctccacctaacttgaaccctacaggagcctcccactg

SEQ ID NO: 390076 - DNA, 297 bp, Homo sapiens
acctaaagagtctgtttacagagatgtagctagggttaaaaaaataagagagagagagagagagatgcagaggaacaaagacatcaaccacggaagccataaagggacaagagaaaagatagtattaccagagctaagtgagttctggagctgcaaggaaaggtcacataacaggagttctagttatggagagatgcagcccctggcagaagcacagaaccaaagcagagggaatcggggaaraaataacccattctcctctccacctaacttgaaccctacaggagcctcccactg

SEQ ID NO: 390077 - DNA, 595 bp, Homo sapiens
tttagggctcactcagataacgcaggatgatctcctctcaaatttctttctttcttcttctttttttttttttttttttttttgagacagagtcttgctctgtcacccaggctggagtgcaatggtgcgatcttggctcaccgcaacctccacctcctgtgttcaagtgattctccctgcctcagcctctcgagtagctgggattacaggcgccaccaccatgcccggctaacttttgtatttttggtagagacggggttttcatcatgttggccaggctggtctcgaactcctgacctcaggtgaatccacttgyctcggtctctcaaagtgctgcgattacagacgtgagccactgcgcccagcctcaaatttcttaaatacatcagcaatgccctacttcaaaggaggtcaggctccatggattaagacacggacatgcctttagaaggcattattggcctaccacagagtgggtatataaatatcaaaacattaagaaaagtaaactccaaatagtgggtatctttgaagacaaatgaaggagtagtaatctattttgcaaaaaaaaaaaaaagtatattattctgagtag

SEQ ID NO: 390078 - DNA, 604 bp, Homo sapiens
ttaattcaccacaatcaagtaggcgttctttctgggttacaagtttggttcaaaacacacaaatcaataaatgtgattcatgatatgaacataattaaaaacaaaaatgacatgatcatttcaatagatacagaaaaaagcctttgataacaktcaacatccctcttgataaaaaccctcaacaggctaggcatcaaaggaacttacctcaaaataatgagttatctatgacaaaaccacagccaacatcaaactgaatgggaaaaagctggaaacatgagaactggaacaagataagaatgcccactttcaccactcctattcaacatagtactggaagagctagccagagcaatcaggtaaaggaaaaaaaattcaaatagaaaaagaggaagtcaaactatctttctttgctaatgatatgattcaatgcatagaaagccctaaagacccctccaaaaggctgctggaactgagaaatgacttcagtaaagtttcaggttaaagaaaaaatgcaaaaaatcagtaacattttcatacaccaataatattctagctgagagccaaattaagccacaatcccatttacaatagacacacacaa

SEQ ID NO: 390079 - DNA, 559 bp, Homo sapiens
caagaaaacatattttgaaaggattatgaagtaaaggagagactgggcctcttttctggccctagttgtcattgatgatacctatataagtggtttaatattcctgcatatgaacttgtcccagaaacaaaatggacagattctttctgttttactttttcacttaggttgatctatttttcttctttgttgtccaattgaagcaaagtctttaaacttaccaaatttcaaaagagtaaagcaactttcaggaatggtataggcccaaccaaggagcggagatgctataaaagggtagtgcaaccatttgagttaacagcccagaaacaataaggagctgaattctcaggaggacccagaagkgcattcaacatcctggttatggcatgggttttaaaaatcatagttataatacagatttgaatcacactgacagtgcagcttttgacacattaactcttacttctttgtgcctttttttccataaacataacaggaatagcaaaacctgcttctgaatgttgacataaggagtaaacaaaataatgaaggaatgtga

SEQ ID NO: 390080 - DNA, 626 bp, Homo sapiens
gtaaattcttttggcaaaagagtaatgatgtccaatggaagtttaaaaaataaatgctgaacaaagaaaatggtatatatgtggttaaacataaatattgactgtactgcacaatgatattatwtaatataatataatataatataatataatataacattggtgtatgactagaacatatgccccaaagcactttagtagacagataaatggacttaagtgttctaagtttcttgctttgacaataaagaagtaaatgttcaatttattttaagctttaattagttaaggattcatgctataataccttgggtaaccattgtgaaaataattaaaaaatttataactacaaagtcaacagtgtagaaatacagaaataggattaataatttattaatcctaaaagaaaacaagaggggaaaaaaaggaaaaatggtgcaatgaaaaatagtatgatgacagatttaaactcaaatatatctgtaatcatatgtaagtagattaaattctcaaattagattttaaaactatattgcataaatttaagaacacagaaaagtggaagataatataatgaaaaacatattggatgaaaaaactaaccaaataaaagctgatattgctgt

SEQ ID NO: 390081 - DNA, 626 bp, Homo sapiens
gtaaattcttttggcaaaagagtaatgatgtccaatggaagtttaaaaaataaatgctgaacaaagaaaatggtatatatgtggttaaacataaatattgactgtactgcacaatgatattatttaatataatataatataatataatataatataacattggtgtatgactagaacatatgccccaaagcactttagtagacagataaatggacttaagtgttctaagtttcttgytttgacaataaagaagtaaatgttcaatttattttaagctttaattagttaaggattcatgctataataccttgggtaaccattgtgaaaataattaaaaaatttataactacaaagtcaacagtgtagaaatacagaaataggattaataatttattaatcctaaaagaaaacaagaggggaaaaaaaggaaaaatggtgcaatgaaaaatagtatgatgacagatttaaactcaaatatatctgtaatcatatgtaagtagattaaattctcaaattagattttaaaactatattgcataaatttaagaacacagaaaagtggaagataatataatgaaaaacatattggatgaaaaaactaaccaaataaaagctgatattgctgt

SEQ ID NO: 390082 - DNA, 589 bp, Homo sapiens
atttatctttcctaatgttctccctccttccaccctctgccctcaagtaggccacagttgcctgtccttgccctctttgtgtccatgtattttcatcattaagctcccacttataaatgagaacatgyggtatttggttttccgtttctgtattagtttgctaagggtaatggctttcagctctatccatgttcctgcaaaggacatgctctcattcttttttatggctgcatagtattccatggtgtatatgtaccacattttctttatccaatcttccattgatggctacttaggttgattccatatctgtgctattgtgattagtactgcaataaacatgtgcatgtgtctttatagcaagatgacttatattcctttggatatatacctagtaatgagattgctgagtgaaatggcagttctgttttcagctctttgaggagttgccacactgctttccataatggttgaactaatttccattcccaccaagaatgtgtaagaaagtctgttattttttgacagtttaatagtagccattctgactggtgtgagatggtatctcattgtggttttgacttatatt

SEQ ID NO: 390083 - DNA, 513 bp, Homo sapiens
agggaaggtacaggctaagaaaagacctgagaaggttttaacacctcagatgggtcctcggcacagaaaaaacgtaaagcaaatttttaaaaaagaaaaagaaaacagcaaactccaggtaagggggagaatctgatattcagagaaaacacattattagatgtatagtatagtttaagtgtattaaatgtatagttttcaaggaaaaataatcataaggcacacaaagaaataaaaaattattgttcatttaaagaaaaacacctaaaactgtccctgaaaaaaatctaatgacagatatattaaacaaagtcattaaaagtactggcttaaagatgctcaaagaattaaaggaagtcatggagaaaaccagtagcatgatgtatgatcaaaatggaaatagaagtaaagagatagaaaacctaaaaagaaaccaaaaagaaattccggagctgaraagtacaacaactaaaatgaaaaattcagaggattccgaaggcagatatgagcaca

SEQ ID NO: 390084 - DNA, 402 bp, Homo sapiens
tgcacaatgtgcacatgtaccctaaaacttagagtataataaaaaaaaaaaaaaaaaaaaaaagaatggtttttataagttgggacaaaraaaaataagtttttaaaaaaatatatttatttgatccttttataaaaatagccctttttcttttcaacatctgactgtacttttaaattaaaaatagtgcttatctgtgtttcggccttgcaaaatgctaagggacattttttgtgaaagcctggaatggatttactacatcatttgctactggcagcactgagaggaagaggtaataaaaatatatctgtacagcagttctggtggatataattctggggatctcccagctggaaaaaactggcactttgtatcttggactacatgtgaaaagaaacattg

SEQ ID NO: 390085 - DNA, 402 bp, Homo sapiens
tgcacaatgtgcacatgtaccctaaaacttagagtataataaaaaaaaaaaaaaaaaaaaaaagaatggtttttataagttgggacaaaaaaaaataagtttttaaaaraatatatttatttgatccttttataaaaatagccctttttcttttcaacatctgactgtacttttaaattaaaaatagtgcttatctgtgtttcggccttgcaaaatgctaagggacattttttgtgaaagcctggaatggatttactacatcatttgctactggcagcactgagaggaagaggtaataaaaatatatctgtacagcagttctggtggatataattctggggatctcccagctggaaaaaactggcactttgtatcttggactacatgtgaaaagaaacattg

SEQ ID NO: 390086 - DNA, 402 bp, Homo sapiens
tgcacaatgtgcacatgtaccctaaaacttagagtataataaaaaaaaaaaaaaaaaaaaaaagaatggtttttataagttgggacaaaaaaaaataagtttttaaaaaaatatatttatttgatccttttataaraatagccctttttcttttcaacatctgactgtacttttaaattaaaaatagtgcttatctgtgtttcggccttgcaaaatgctaagggacattttttgtgaaagcctggaatggatttactacatcatttgctactggcagcactgagaggaagaggtaataaaaatatatctgtacagcagttctggtggatataattctggggatctcccagctggaaaaaactggcactttgtatcttggactacatgtgaaaagaaacattg

SEQ ID NO: 390087 - DNA, 577 bp, Homo sapiens
ttaaaccactcagtctgtggtattttgtgatggcagttcgagctgactaagacaaataatgacatcattcatgattgttcccgtctaccagtcaccaaaacaagttctaacaagattaaagaataaattcccccaaaaggtaaacttcaagcctaaaaataagaataaattgtaaataaagattaaaaatataactggaggcaatcaaaaaatatatatcttaaggagattgttaaagctatatgaaaaatgtatgctaaaaatctcattggagcactattcataaatctaaataattataaataataactgggctatggttatgttgattaaggtaaatccatatatgttaacataatgtggtaatytgtaaatgtttataaagcattcttagtatattagcaaaacaatttgaagtgtcaaattaaaaattctgaatacaaaattacatgttaagttataattccaagtatgtttgaaaaattacatattaaaataatggaagtaaatgcaacaaactatttgtagtagaattttattttacagcaactcaaaataatgaaacaaatcctttggc

SEQ ID NO: 390088 - DNA, 624 bp, Homo sapiens
ggtatgttatcctttttacatrttgctgaatttgaaatgctgatatttgtttgaaggttttgcatctatattcataagagatattgttctatcgttttcttttggtttgtagatgcctttgtctgaatttattattaggctattaataatttgatagaatgaattggaaaaccttcctttctcttttactttttataagagtttggggggaatggtgtttgttcctctttaaatacttgatagaattcaccagtgaccactggtcttgggattttgtttgtgagaattcttttaattactatttcaatctttatacttgttataggtctatattgattttcaatttctttttatgttagtttcaatagtttgtgttgtctttttaggaacgtatgaatttcatttaaattatctaatttttcagcatgtaattgttaataatattgtttctaaaagtcagtattaatgcccactctttcatttctgattttagtaatgaaacaatttcttatttttctgttggtcaatctagctttggcttcaacatttttgttcacctttcagtgaaccaccttttagctttgcatactttctctaatgcttttatattctcgatatgactta

SEQ ID NO: 390089 - DNA, 581 bp, Homo sapiens
tatcttaattcctcctttacttgtttttttaagacaagatcttgctctgacacccaggtggaagtgcagtggcatgatcctggctcactgcacccttgacctcctgggctcaagcgatcctcccacctcatttaattttttttttttttttttttttagagacaagatcttactatgttggtcaggctggtcttgaactgctgggctcaagtaatcctcctgccttggcctcccaaagtactgggattacaggagtgagccactgcgcctggcccctctcctttacttttaaagaaaattttacctgatataggattcttgatgacagtcttttcctttcagcactttgaatatatcatcctattgcttcctgacccccaggggttctgatgaaacatcagcttgttaagtttatttaraatcacttgtacatgataagtgccttcactcttgctggctttaaaaactttggtaatgaggtgtttaggtttcagtttctttgaatttattttccctttgcagttattgaccttttccaatgtattgattaacatttttcatcagattttggacattttcag

SEQ ID NO: 390090 - DNA, 627 bp, Homo sapiens
ggggatatgagaatagggaaggttaaattgccacaagctggcctacagacattcagctatttttcttgaataagtgctctctagttttctgtaagcctttggttaatttccagagttctgaaaaagtttattctgatgatatttttaagaatattctcattacttttgtgaaggagaatattttctgaggtccttactccaccatttttattgatgtcacttctaataaacttctaatattataccattgctgagttcctggacacagctcaatgtgtggtatacatgcattgttgcatattcttaaatatttcatttaagatttttagatcacattctcatggttttcccattttaattggaggtggaaactaaatcatagcttaaaatagacattgtcctggtatcaatatatatccagtctaattatctagaattgtgggcaattaaaatgaatgttctgaacaatggccattagtactgtaacaaccacacctttaaaaatacagtcatgaattgcttaatgaccrgaatacattctgagaaacgtattgtgaagtgattttgccattgagtgaaaataatagagtatatttacacaaacctagatggtatagcccagtatac

SEQ ID NO: 390091 - DNA, 584 bp, Homo sapiens
tctggctttattttctcttccctgaaggtctgggattcatcaaagtcaggatttaatcacacaggctcaggccagacatactgtgagaacacattccatttgctacttggctctgccaatacacataaatctatcctgtcttaagactgctttgtatcagaggcaaacatccacaaaggagtctctgatcattccaatagggmccctgctgaaatcaccagatgcatctgctagtgggtacttggttctcatccagacccaggttcctgaaataaaattctcaaaacacaaatctctatgctcatggaaattttaatgcaacccatcaaatatattttctttgtgtctttatttattaactgcagtaacttagagagaataaaaaagaaaacctttgtcaacttttaaaaaatcttcaataaaaccagaagatgctgaatttccagatgtcttgaatatttggaggctgcatagagcattgtaagccaggcaatttcttagactaagtctgcagagtgagcaggtagggatatgacaagaattctaggggttggaaatctcccttcctataatatacttgatat

SEQ ID NO: 390092 - DNA, 547 bp, Homo sapiens
tttttgtttctaattgtttcttgtgtatctactaccatcccttgctaaattattgatacgtttcctcaaatctcggcatgatgtcctacattccaaatttttcaatagctgaaaatttcaccttttcagtgccttcatgtttatcttggtaaaaagttgagaaagactataatagagttatttaatcagatktttttcatctaccataatttttgaataaggaaaaacatcaacactttttctccttacttggcaaataatttccataaagactgtaatagagttatttaatcagatttttttcatctaccataatttttgaataaggaaaaatatcaacactttttctccttacttggcaaataatttccatagaaaggaaaaaaacaatcaaaacaggtacaatgttacaaaaccaaaggaccatgtgaggtgaaatttaaaatgagaaatttgtccacattactttgtgcaatgcaactcctgggaaatagtaactcagcacctgagagctaaataattctacaggactaaatatatattctgg

SEQ ID NO: 390093 - DNA, 522 bp, Homo sapiens
attttctggttggaaacctctgtggttggtggcatctttgccccagttcttgtcctgcatccaggaagaatggtgtaggtagacaagtgaagggtgaaaggagaggagctttattaagtgtcagaacagctccgaggagacccatagtgggtagctcctctctgtaggttgttctgtcgagtgttcagctctcagcagaaagggaagccctggagagggttgctcctgtctgtacctggtagttcccagccatctctgcaggtctctgaagcattcagcagagaaagtagctggccctctcattgtctccagctattagcagaaaggatagctcctttctgcatctagtcttccctcctctgtcttctgccctgttstggctgagtcctgggcttttatggatgtcagaggggaggaagtgtatgcccattggtccatgggcagccatgggcgggcccaggaaaaagcaccatgagtttcccctccagtctgcaggactggcagcctagcctgcaggtgggg

SEQ ID NO: 390094 - DNA, 507 bp, Homo sapiens
tgcccagctcctgataaatcctttcttaatcaaagtcttcatcagcagccttacttaccacaatcttcccagatgatctcaagtatccaaagaagttaaaagtagcttctgctgacaaaactgttgggttccctgatattgtgcaataaaaaaattatgctaggtcttccgttagctagctcttctgtaacagtctctttctttgtatgaatcaaaactgatgcaactttttaaagaactattcctagaaactttctcccttcccagtcagaattaatgtattatttatccgtttaaaggactatataagtaggacatggtttgggtatatcacagcacttatggccatttacyttgtggttcagtgatttctgtgtgcttctgacttgtatatactttcagcccttgtagatgtagtggttgtagtttcccaacttaaatctatctttatcatccacctttatccacagttctcctcatgattagcacattgtcaataaatattta

SEQ ID NO: 390095 - DNA, 563 bp, Homo sapiens
tttagccaaagtttgcttgtaggaatacagcctatggccaaagaattaatagctgactcccatttgaatggccaagatttgttctctatttccaatattttatttgtgtgcctgtatgttggacatggacataggcaaatttttacaaaacaaaccagaaaagttcaatagtctttcattctctttcgctaacttcttttaagtatacttcaacaattatcttaatattgtcaccagtagattaagcgtactgttataaacactgtatttctatttattcaaggcttgaattgagctagctgctaataacattttttaattagcattgcaaccatattcacctaccatatttttccctctcctttgatttctgggccattactcactttcacaatttgtatgtgactcaccattctatacctacttttgccttaccttaaaatattttttgatttaatacatttacattttttctccttttgcttttggaattgtattactgtcatgrggggttttcttttcctttttcaagagtttctcaaaattcttgaccaaagccctat

SEQ ID NO: 390096 - DNA, 443 bp, Homo sapiens
gtggtgtaattttaaaagatcactttatttacatcaaacactctatgtttctttttttgtgatagcttgtgcctgacctaattctagtgaacagattgaagaagtgaggagacatcagatagatataaacactttgccaaggagtccccctgcagtgccacaggggcagtaggctcacttattccatatccttggcatttgcagggatagacatacacagggaggcacggggagctcytgaggagcaagggcagatggtcaaaaaaatctggtgggaaaaagttgcagtgccatagaccttctttcttttaatggaaactcagggatggatagtctggccataaactattaatagtacctctgggaaataataatactcaatacggggcccatcaaaactgtttctcaaatttaaaagagccacagggttgcagaacagggac

SEQ ID NO: 390097 - DNA, 443 bp, Homo sapiens
gtggtgtaattttaaaagatcactttatttacatcaaacactctatgtttctttttttgtgatagcttgtgcctgacctaattctagtgaacagattgaagaagtgaggagacatcagatagatataaacactttgccaaggagtccccctgcagtgccacaggggcagtaggctcacttattccatatccttggcatttgcagggatagacatacacagggaggcacggggagctcctgaggagcaaggrcagatggtcaaaaaaatctggtgggaaaaagttgcagtgccatagaccttctttcttttaatggaaactcagggatggatagtctggccataaactattaatagtacctctgggaaataataatactcaatacggggcccatcaaaactgtttctcaaatttaaaagagccacagggttgcagaacagggac

SEQ ID NO: 390098 - DNA, 443 bp, Homo sapiens
gtggtgtaattttaaaagatcactttatttacatcaaacactctatgtttctttttttgtgatagcttgtgcctgacctaattctagtgaacagattgaagaagtgaggagacatcagatagatataaacactttgccaaggagtccccctgcagtgccacaggggcagtaggctcacttattccatatccttggcatttgcagggatagacatacacagggaggcacggggagctcctgaggagcaagggcagatggtcaaaaaaatctggtgggaaaaagttgcagtgccatagaccttctttcttttaatggaaactcagggatggatagtctggccataaactattaatagtacctctgggaaataataatactcaatacrgggcccatcaaaactgtttctcaaatttaaaagagccacagggttgcagaacagggac

SEQ ID NO: 390099 - DNA, 521 bp, Homo sapiens
ctacaaattagagacaacaaaatacgcctagagtaaattaatgtttaattaaaataacaccagaaattaataaatttggaaactaaaactggaagaatgaattcctaaattatgacgctttgactaaagcagacactgaaattaataaattgctaactcacccaatcaagtaaaagagagaagtacaattattcaacataagagaaaataaaatggaaataacctcaaatatgtgatgttttaaaatatgcatacattgtggaatggctaaattgaactaatcagcatatgcattccctcatgcaagcattttttttttgtcatgagaacacttatttacctactctcctagtgattttcaagtattcaatacatcgttattaactatagttaccatgttgtacactagatctcttgaacttcttcctcctaacygaaattttgtatacgttgaccaacatttctccaaccaccaaccagcaattcttcttgataaaaatttttaatgatataggaataaa

SEQ ID NO: 390100 - DNA, 486 bp, Homo sapiens
tatcctaggatctccatgtctttggtgaggctctggtcccagtcctgccctggcctcccctggggccttgaatggctgtagtccttatcttcagctgcgtcctctgcagcaaatggcaggtgccccactgccttgtatggtgactttctatttcatgcatacatgcctggcttccctaaatacatttcaagccctgtaaagacagagatggtatcatgcatatttttatcactccacagatagcacctagcactcaataagtgggctgactactaaaacccaattcaaagcatccagggtgcacagccctaagcctcatgcgaccctcattccactgcaactactcttccagcagagcagagtgtggagggggcccactctggagtccaagagctaaaaattcaggactaaccactgtgaaatgcctgtgaaatgcggcagcyccagagtcactcgaagctctctgtgttctctctggaaaatgag

SEQ ID NO: 390101 - DNA, 526 bp, Homo sapiens
tagcaaaataaaaaggatacactataatactttcctttcccttcatttaagaaaataattttttttctttagatcaaaggaaactactatgagaacacctgaaacaataaaggtttcaataaagaatgttacagcactttgcaaagaaaatgtggtaatgaaaatgcagcttaagggtgaatttggaaaaaaaaaagacagcatattttggctttttattacaggatatttaagagacagcttggcaataaatgttaacatctttctaacggttgrcaatgcagtagtataaagctgaaaactcaccttgacttattgacacagctagttttaagttacattgctcattcccagaggaactgcaccacactgcaaaaaaaaaaaaagtgctgagcttcactcaataaatggaggtaggtgtgagctcccgttacatggtcacattagacatcttcactcaggggaggtaacaagaaagagagggaaagagcaggcaaatcagtgaagaggaagaaaaaaaaaagaa

SEQ ID NO: 390102 - DNA, 551 bp, Homo sapiens
tatatcagtttgtgggaaatcttcctcccagtgtttctgagtctgtcttctcacctgtcaaatgggaataataagagcacttccctcattcagttgacttagatgatgtgaggcttggacacaatagcttaagggaaggcagaacacctaggatgtagtaagtgctcacaacgatgtcttatttccaaagggaaagtcatcaggcttggagttaagaaattgacataagaaatataagaatataatataatataacataatattaaaaactttcggttttctcattcatataatggaatcaaaacacctgcctggctgacctcacagggttgctttgagaatcaaatgagatcctgtaggtgaaaacacagatgaatgagaaaatgcaatgcacatctggaaaattagtaagcaagcctttcaatgtcctctcacctccccacagagtcacattcctttggccacwtggaacttttccttctcattttcttgtatgtaatttaagaaaattccccttccatactatttgagctatgaacaaccccctttgt

SEQ ID NO: 390103 - DNA, 601 bp, Homo sapiens
ctttcctccccatttaattaggaataaatagtaacttctcttagaagcaaaatttattcaaagacctgtgctaacattcttaaatatctgctagccttgataaagaaatcaatgtactttatgttcttagctcccacagtttagcctaaatatttgccctagcatacttatactggtccaagcaagcagtaggtcatagtctgttcctcttccttatttaaaggtgtttttacctttctcagcrttccacaagttacttcctccttcctttgttctcttctacctttgcctcttttaaaaagttctaagttgctagccaatcaggacaaatacaaaatgtaaggtcccgttccagccaatgaaaactggacacagcaatagggtggatgcatcaaggatataaatgaccctgactcctttgttcagtgtactctcgtggcaaaactgctggcaagtgtaccctttctgcagaaagtataaaaatagccttgctgagtaaattaaatttacgttcaagtgctatttctttatggcactgggggacaagcatttcaaacaccaccaatcacagttgaaccgagtatctttcctctctgtgcct

SEQ ID NO: 390104 - DNA, 571 bp, Homo sapiens
gctgatgtggaccttcatctcagcaccccacttcctgggctactgcagcagcagttgggctaaggagacttgggatgtgatgggaccatttgaggtcgagttctaaagagaacagaaacctcctgaagatgacccagagggggctgttgctagaaagaataagaaacctgtttcggctgggtgccgtggctcatgcctgtaatcccagcactttgggaggctgagacaggcaaattacctgaggtcgggagttcaagaccaacctgaccaacatggagaaaccccgtctctaataaaaatacaaaattagccgggcatggtggcgcatgcctgtaatcccccagctactcgggaggccgaggcaggagaatcgcttgaaccagggaggcagaggttgtgaggagtggagatcgtgccattgcactccagcctgggcaacaagagcgaaactccttctcaayaacaacaagaaagaaagaaaaggaaagaaacctgtttcaaaaataacaagagttgttcaggatggagaaatcagaacccatacatgttgctggtgagaatgtaaaatggt

SEQ ID NO: 390105 - DNA, 539 bp, Homo sapiens
tcgacctgaaaagttctgtggcayattgtttctttgctatccacttttttttccctgtttttccccctctttctctcctctactttatctcctagagatctaggtagttcccaaaggaataatgctttacggagtctaatgttgatttattaggtaaaaacagaaaatgacttttttttttacccacaagttccataccaaaaaatgaatgtaaacttcttatgcagtttcacacattgaaaatgcgggttattttaattccattgcatttttcagaattctcaatcgcaatcctctgacaactgttgaagatccgtatctctttaaattactggcattaaaatatctgtaagtactatagtactcttgggagtcatgagatgatttatactctttttaaatttttcatcaaagattaagtattttgcatttaggctaaaatgtcataatttaaattttaactgagttattgaaaaacattattggcaaaggaaaggatgtgtaatggtcaagatagccagcaggggaaagagaacagt

SEQ ID NO: 390106 - DNA, 539 bp, Homo sapiens
tcgacctgaaaagttctgtggcatattgtttctttgctatccacttttttttccctgtttttccccctctttctctcctctactttatctcctagagatctaggtagttcccaaaggaataatgctttacggagtctaatgttgatttattaggtaaaaacagaaaatgacttttttttttacccacaagttccataccaaaaaatgaatgtaaacttcttatgcagtttcacacattgaaaatgcrggttattttaattccattgcatttttcagaattctcaatcgcaatcctctgacaactgttgaagatccgtatctctttaaattactggcattaaaatatctgtaagtactatagtactcttgggagtcatgagatgatttatactctttttaaatttttcatcaaagattaagtattttgcatttaggctaaaatgtcataatttaaattttaactgagttattgaaaaacattattggcaaaggaaaggatgtgtaatggtcaagatagccagcaggggaaagagaacagt

SEQ ID NO: 390107 - DNA, 575 bp, Homo sapiens
taaactggcattctggctacatagatcagtctctttgaactctttgtaccttccaccattagtgtgatttctaaggctgcaagccagacactgcccaagacccagcactggactctggtgagttcttccagctgttgccaccccaggagsctctgggagcccctgggaaccatccagcttgctctctgtctctacatttcagggtgtgggtttcagggcattcacaacattcctgcaacagaagagttttgggaacacccccagcaggatgtgggtgatttgaatgtatgtcagagatgtggttgtaactgagaaatcttaagcctagtgaattttattccacttgacttaaagaaagagcacgtgaaagaaggggatctgaggacatctatgaacagggccccgagggcatgaacttactagtgtttatctgactagtgtttatctgggcctgtctagtctggagaacctgactctggtgtacccaagcttgctttgcagtggctgtagaggtttgctcttttggagggagaagataattcactcctccaacacctgaatgagggtagattaac

SEQ ID NO: 390108 - DNA, 575 bp, Homo sapiens
taaactggcattctggctacatagatcagtctctttgaactctttgtaccttccaccattagtgtgatttctaaggctgcaagccagacactgcccaagacccagcactggactctggtgagttcttccagctgttgccaccccaggagcctctgggagcccctgggaaccatccagcttgctctctgtctctacatttcagggtgtgggtttcagggcattcacaacattcctgcaacagaagagttttgggaacacccccagcaggatgtgggtgatttgaatgtatgtcagagatgtggttgtaactgagaaatcttaagcctagtgaattttattccacttgacttaaakaaagagcacgtgaaagaaggggatctgaggacatctatgaacagggccccgagggcatgaacttactagtgtttatctgactagtgtttatctgggcctgtctagtctggagaacctgactctggtgtacccaagcttgctttgcagtggctgtagaggtttgctcttttggagggagaagataattcactcctccaacacctgaatgagggtagattaac

SEQ ID NO: 390109 - DNA, 575 bp, Homo sapiens
taaactggcattctggctacatagatcagtctctttgaactctttgtaccttccaccattagtgtgatttctaaggctgcaagccagacactgcccaagacccagcactggactctggtgagttcttccagctgttgccaccccaggagcctctgggagcccctgggaaccatccagcttgctctctgtctctacatttcagggtgtgggtttcagggcattcacaacattcctgcaacagaagagttttgggaacacccccagcaggatgtgggtgatttgaatgtatgtcagagatgtggttgtaactgagaaatcttaagcctagtgaattttattccacttgacttaaagaaagagcacgtgaaagaaggggatctgaggacatctatgaacagggccccgagggcatgaacttactagtgtttatmtgactagtgtttatctgggcctgtctagtctggagaacctgactctggtgtacccaagcttgctttgcagtggctgtagaggtttgctcttttggagggagaagataattcactcctccaacacctgaatgagggtagattaac

SEQ ID NO: 390110 - DNA, 347 bp, Homo sapiens
ctttgttctgtaatgtgggctggttacgtattgctttcccttccccacaccccgtgctactttttgtatttttagtacagatggggtttcaccatgttggctaggctggtctcaaactcctgacctcaagtaatctgcccgcctcggcctcccaaagtgctrggattaaaggcgtgagccactgcactggcctggttgggttggttatcttctaaaggtcgctagactgtttccaccttgcctgtagactaaatatcagtttcaacttgtgcagcaagatagtagattgcagcttaggtatttcttaaaggccttatattttctgtttcatggcatttaaaagacgc

SEQ ID NO: 390111 - DNA, 627 bp, Homo sapiens
taaagcaataaatcttgctttgaaattagaccttggatgcacctgtttatttttgttttgttttgttttagactttgagccctaaaggtttgagaaaaagcctttctcaaattcattccccaaaccttggaaccaatattaaccaatgacagctcacaagcaagtgaattctaaacatttttcagttggttttaaaaaggtttaatcactagctaaattaaatattgattttatacctgagtccacaaagacatgagagtattttttcagaagataaggctgtacttcagtttataagaagtacggtgaacagagacaccactaatgcatagatgaagatgactgcctaaagagagacaggggaaggaatttcactggagagagagcagcctatttggcctcacggtgatrcacccaggaaggtcagaatgtgtcctgacgctgtccatggcacccagtagtagcactgtacacataaaggacatccaggatgggacgctagggaatcacaggagccaagaggcaacagcctaacattacaatacctgatactattatttgttccaattatggggcagactggtaataaagagttgagaggttctgagtgttctatggtaaagcact

SEQ ID NO: 390112 - DNA, 627 bp, Homo sapiens
taaagcaataaatcttgctttgaaattagaccttggatgcacctgtttatttttgttttgttttgttttagactttgagccctaaaggtttgagaaaaagcctttctcaaattcattccccaaaccttggaaccaatattaaccaatgacagctcacaagcaagtgaattctaaacatttttcagttggttttaaaaaggtttaatcactagctaaattaaatattgattttatacctgagtccacaaagacatgagagtattttttcagaagataaggctgtacttcagtttataagaagtacggtgaacagagacaccactaatgcatagatgaagatgactgcctaaagagagacaggggaaggaatttcactggagagagagcagcctatttggcctcacggtgatacacycaggaaggtcagaatgtgtcctgacgctgtccatggcacccagtagtagcactgtacacataaaggacatccaggatgggacgctagggaatcacaggagccaagaggcaacagcctaacattacaatacctgatactattatttgttccaattatggggcagactggtaataaagagttgagaggttctgagtgttctatggtaaagcact

SEQ ID NO: 390113 - DNA, 627 bp, Homo sapiens
taaagcaataaatcttgctttgaaattagaccttggatgcacctgtttatttttgttttgttttgttttagactttgagccctaaaggtttgagaaaaagcctttctcaaattcattccccaaaccttggaaccaatattaaccaatgacagctcacaagcaagtgaattctaaacatttttcagttggttttaaaaaggtttaatcactagctaaattaaatattgattttatacctgagtccacaaagacatgagagtattttttcagaagataaggctgtacttcagtttataagaagtacggtgaacagagacaccactaatgcatagatgaagatgactgcctaaagagagacaggggaaggaatttcactggagagagagcagcctatttggcctcacggtgatacacccaggaaggtcagaatgtgtcctgacgctgtccatggcacccagtagtagcactgtacacataaaggacatccaggaygggacgctagggaatcacaggagccaagaggcaacagcctaacattacaatacctgatactattatttgttccaattatggggcagactggtaataaagagttgagaggttctgagtgttctatggtaaagcact

SEQ ID NO: 390114 - DNA, 627 bp, Homo sapiens
taaagcaataaatcttgctttgaaattagaccttggatgcacctgtttatttttgttttgttttgttttagactttgagccctaaaggtttgagaaaaagcctttctcaaattcattccccaaaccttggaaccaatattaaccaatgacagctcacaagcaagtgaattctaaacatttttcagttggttttaaaaaggtttaatcactagctaaattaaatattgattttatacctgagtccacaaagacatgagagtattttttcagaagataaggctgtacttcagtttataagaagtacggtgaacagagacaccactaatgcatagatgaagatgactgcctaaagagagacaggggaaggaatttcactggagagagagcagcctatttggcctcacggtgatacacccaggaaggtcagaatgtgtcctgacgctgtccatggcacccagtagtagcactgtacacataaaggacatccaggatgggacgctagggaatcacaggagccaagaggcaacagcctaacattacaatacctgatactattatttgttccaattatggggcagacwggtaataaagagttgagaggttctgagtgttctatggtaaagcact

SEQ ID NO: 390115 - DNA, 535 bp, Homo sapiens
ctcaaattggtaacattaattatccatcagataagaaatcagggcctcgcctggcatctctgacagcagtaggatgggagctctctggaggtttccagctgcctcgatggcggctggctgtgggtgattcctggaccaggtgctgggagcattctacaagatcacctagggtagtgcctgatgagaatgaggtgttggtaaaatggagctgtctcattgtgcttcgacacttaattgtacactgtctcttcaatgacaaagtgaagccttgagggtaggccccatatctgcacattaaaattcctcaggatctcttactaaactggcatgcagtagccagaaatgtagccggtgaaactttgttgtttagctatttaagtggtgagggaaggagaagaggtcccagaaaaaaatctcccagccattgggaagggaggtgttcrtggtggtggggagaggacttgtgggtggttaagcttattaccctgattaacttggttagcttgttaccctgattaactttatccaagtgttt

SEQ ID NO: 390116 - DNA, 613 bp, Homo sapiens
ttttttggtaaaatgtctattgaaatctttgcccatggtgcagaggttaattttcttataattgagtttggaatttctttatatgttctggttattccaggtccttggattgggtttgtagatcgtttggacagaatcttaacaatagtgaatcattttattcataaacagtttatctctccaattatttatgaactccttaatttctcatagcacatataagtcttgcatgacttttgtcatatttgtttgcagtattttttatcttcgatgctgttgtaaaggctattttttgtttcaatttctgattgttcattgttagcatatagaaatgtaattaaatattgtatctttttttgttttttggggggtttttgtttgtttgtttgttttttgttttagagacagaatctcgctctgtcgcccaggctggagtgcagtggcgcgatcttggcttamtgcaacctccgcctccctcctgcctcagcctcccaagtagctgggattacaggcatgtgccatcatacccagcatttttttttttttttttttttgagacggagtcttgctctgtcgcccaagctggagcgcaatgtcacaatctcagttcact

SEQ ID NO: 390117 - DNA, 483 bp, Homo sapiens
caggtcccttgtatggcctttgtaaaaccaactgagctgcttcagagaagtttaggggacactcagtagggatagtgattgtcagtggtgaggcaaggtcatgaatatttaaaatatacttaccatttgtagatgcagcttagaatacacctcaacagtgctgggggaagatcagtgtgtatttgtacaagtccctcttggtgccagggtcagcttcagggggttctaggtcctggctcagcccattgggagagcaagtaactgcccacactcaggtctctaaacaccccccaggtgttgtsaggtgaggacagagtggggtcttggtgagagccaggaactctggagtctcctggggagtcctgacccatacctagttgccactgcttcattcccatgcagctttcccatcactaaggcttttattcctggaaaactattttgccctatcaaaaacaatccttaggaaccaagatcagagtt

SEQ ID NO: 390118 - DNA, 566 bp, Homo sapiens
agtatcacatttgctttcttttggcaaattccaatttttcttttcagtactggtagtaaccaaggacttcttggcaataagaagacagcatgcagacttatttgaaaacaaatagaaatcatgaatgaggatcttttactacaatctagacttaatgtttctagctgaagttgagagtaagagtgtaagttacccagtctatacctgaattgactgagaaaactttggttatttctacctaacatgaccagtttaaactttaatagtagtcatggagttttggccattctatcatagcacagattagcatttctggtgtacacgtgggtaaaactgaaaaccctaaagttgaagattcaattaactttgctaaggccactaaaaygaccagtgtgtccctcatatgtccttttcagagggaatgccagatcttggcttttgatcctagcataaacactaatttgctgtgcaaccctgggaaaatcacttgatctctctgaacttccactctttttcacttttgaagtgagggtagcagaatagattatcttaaagaggactaagat

SEQ ID NO: 390119 - DNA, 537 bp, Homo sapiens
cagtttgttattatatatgcacactctgggctcaccaacttgaaatagaactttcggtcctattccattgtcctgtaaggatgttacccttgagctccaagatcaagcaataggtaagtttacaatagttgtagaaaactctatctttaaccataagtctgtgaaacttcagaatcatgggagtggcatataataaagcataaaaaggccccatgaagtcattaatttagtctgttcctttgtgattgggcaacaatgactcaratcagaccagttctgtgtcttcattacttgatcgcaaagtgtgtcaaagacctaccctgggtcctgcctaaatactactgtatgtggtttatatcattccttatgaccacctgacactttccttctcctgtgcacataggaagaccatatgtccccatcccccttgcagttgggttagggccatgtggcttagttctggccattagagtttagcagtggtgatatacccattttcagacctaatccttaagagcatccatgagacattccatc

SEQ ID NO: 390120 - DNA, 621 bp, Homo sapiens
tattgtcttattggcgattgtaattgtggttctgaggctggcgttgcccaggatatggcatagtgcaacattctaggaagttgtggggacatttggtattagccttgccattcagatccaggagstgtgtcaacactggggtggtgacatcctcttatctgttcacttaacaagtttccttcctaccccatttactcctcattctttctggaagagatgctattttctgagaaaatgttttgaaacatctgagaattcagtggtagaggctgtggtgggcatcccagatccccgcttcaagaccaaggcatccattgtgctagctgcccagggagaatcagctgctgatggtccacagctggtctttctctagaaccagccctggcagaaggcagtggccttacccaatcttactcccattcttccgggggaccctgcagccaattagttgacttaggaatagaaaagctgggctcccttgctgtaacttggaacagctcagaagggcaacccacctccagagctccccaagggaagaaggaagcttctgttacaaccgcaccacacttcaacttcctcacctgcctcctcctgctttcccttttccctgacaggggttgt

SEQ ID NO: 390121 - DNA, 474 bp, Homo sapiens
gatcaggacgcaaagggcaaaggtttggtcttaagaaaaatttctcatggggttggatcacactgcctggtcaaagatatttttccccaacaatgttttctctcttaagatgactgattttcccagccaaagcttttgctcccgttcggtggtgttcgtctcttgtgagtttgggtgtrgttagctgccttctgccacttcccatcaaggccttcacttttgtaaagctgtcacttctccaggtcttggccttgtggtgtcagcaagatagccccggccggactgcatcagctcctgcctccctgcaccctccccacctaccttccaccccaccctgtgccttccttaggggcttcatcatctctcaaaactgctgggttatgtgtgggccaatgggaaggtatttgttagttgcaaatgttcaaattaacacttattcctgtctctgagtctgcagggaaaatcaagcctgac

SEQ ID NO: 390122 - DNA, 616 bp, Homo sapiens
gaaatgagaaagacaggacagggcaacatgtagagaccaagtcaggaaacaagcgcccagctgtccctccctacacccatcacyacttgagcgctcaccacaccctgagagctgtcagcagtttacacgcactaattctcattacagtccttccaggggggagttttcatctttattttatacaggtggcaactggaccactgtgagagaccgaagaattaccctagaccttttgctagcatgtagaagaacccagaaccaaactcaggcctctcggattccacacttctgctattcaccacaaagctgttattgtgcaagctgcttggtctggtggaaacgttaggagtggagaaatggagttctaaggccaactctgccctgatgggctgccgggtgtccacaggcaggtagcaggtggtaggagtcatctgctgtcatggaacagcccaggcttcagggtcatacacctagagctgcatctcaagtctaccatttaccaattgggtgctcttgggcatatctcttacccttcccaaaattcagcctccccatctccaaaagagcgataaattatatctttaaaagatggtattttttgagacagcatgcgcaa

SEQ ID NO: 390123 - DNA, 616 bp, Homo sapiens
gaaatgagaaagacaggacagggcaacatgtagagaccaagtcaggaaacaagcgcccagctgtccctccctacacccatcactacttgagcgctcaccacaccctgagagctgtcagcagtttacacgcactaattctcattacagtccttccaggggggagttttcatctttattttatacaggtggcaactggaccactgtgagagaccgaagaattaccctagaccttttgctagcatgtagaagaacccagaaccaaactcaggcctctcggattccacacttctgctattcaccacaaagctgttattgtgcaagcygcttggtctggtggaaacgttaggagtggagaaatggagttctaaggccaactctgccctgatgggctgccgggtgtccacaggcaggtagcaggtggtaggagtcatctgctgtcatggaacagcccaggcttcagggtcatacacctagagctgcatctcaagtctaccatttaccaattgggtgctcttgggcatatctcttacccttcccaaaattcagcctccccatctccaaaagagcgataaattatatctttaaaagatggtattttttgagacagcatgcgcaa

SEQ ID NO: 390124 - DNA, 644 bp, Homo sapiens
tggtactgctcttagtcctttgtgaattttaactcatgtaattctcacattgatcctataaagtagatattatcatctctacgtacagatggggaaactgagggccattgaggttaagtaatctgcacacagttgcacagccagtaaggcgtgaatggtatgaaaatcagggtgtttgcgtccagcatggatgccttcaccattctgctgcgccacttcttcagtggcttagggaaacatagtgtcttctctgacttgcaagctcaggcctgctggaaggctaattatactgggaatagtaataaatattgctacgaatcagcttgatcaagttgtgagctgtgttacccaacatccctgaggtttagtttcttcatttgtaaaccaaagaraaaaagacttctaaggtcattttcatcttaaacattcagtgataaaattgacaattagctggtgtagctttagcaaaatttgaaagtcagccttctattttcataacaacattggattttctgttttcattcttgtctctttgcaatccattgtatacatggaacccaagggattgtgtaaaaaatcaaacaaatcagccatcatgttgttctcttggctaatgggttcatatgacttctcaatgctttctg

SEQ ID NO: 390125 - DNA, 557 bp, Homo sapiens
ttaagactcaagctaatatctctttgttctctcacaattgactagtagttcccaaaatattaacatttgtaggcttgttataatatctacaatttattttataatattttgttattttcagtatgatactatatatgtgccagttagtttaacctgtaattctaggagragtccaagaatgcccagactagttggtcagttggctttatatctagaaggcccatacagggcaactacaggtccttcttactgaggtacatctagccacaatcaacactttactcattatcaaactaaatataaaagattagtctttattggtgaactagtgtctggttaatcactataatgaatgtattaatggattccctttggtgaaagtaaaggcattgaagatatgtgtattggctaaaacagttaaacacttcttactcttaaatgaactgtacataagattccattgtggcctatatccatatcttttagcgatggggcccacggttttatccataatcattctgtgtccagacattggattaggaggatttctgactgaa

SEQ ID NO: 390126 - DNA, 553 bp, Homo sapiens
agataattatgacaatgccagtatcagtccctaaatgcatgaccttgaaaaataagctttctrtcttttaaaacatatgtaaagattacatgcattcactgatctggaaggtttctttccttggacacttacatgacgttaattaattaaatttgttggttttcacattgttaacattgagagtttgaaggaatacactttaagcgtgttctaaaacctcaaatatgcacatcaaattgtattagttttttgtcatcaaaattagtaagaagagtgatgcttatttaggccaaatgtaggcagaatatcacatttacctgaataataattgttcagcattcattctgagttatatttcctcaaaatacaattgatgagaatattatttttctttcagacagttatgtacagctgtctctttcagaaactatttttgaaaaactatatactattaaggaataattttacagttcctgacagccatgctttcacaaaaacttcatttgattaacatatatatttatttatttatatttacatccaaggacacttc

SEQ ID NO: 390127 - DNA, 580 bp, Homo sapiens
ttatatacttatatccatgtaatcagacttcattactcaagatgatgttagcatcaacaaactttgactgttacatatgaagtctatattcaatatcatgytgctagattctgaagatcatgtaaattttatatgacatgtttagaaatgtgagtccatttactttactttgtgcaatgattgcattgctgacctggccgagccccaggcaaaactgggaagtaagtaacgccgatgttcatgttttagtccttcactcactccaagcatgaaatgcttctactctcactggggcccttttcatgcacactttctctaggctacatcacctctgtccttatcattctttagaactatattcccctcactgactttatctgattaaactaacatacaatagcatctgagtgagtgagtacagcttaatgtgctttaccaaatttaaaagaagatatataaaacacaatactgcatctgctacaagaagagcagaatctggagcaggtaagtaggagagaaaaccttgagaggtgaggaggggggtgggtaaccaccaagttctgcatttcatcactcccaa

SEQ ID NO: 390128 - DNA, 680 bp, Homo sapiens
ggttttcaaatgtaactatgtttgcagaaattccatacaacccattctttgttgactacacctacattcacccatgttagctgttagctgtaaactgtacctcttcttcttctccatattagcctggctaacagaaggagccttcctgtcccaagtattcaaaagtacatattcaaaaacacagaatgatgtgaaaatataagacacaaagtctattactttctagcttaatatttacttgatgcctttccccggtttcctaggagtctacatggtttctttttggatctgagtatttggttgagtttttggtttcatgaagttttaaaacatgtgtttatattttctggcatttaaaattaaagagaaaagttatcagcttactccaatgaaaagctatttagtaaaaagactgatagcaaaaattcatagtgacacatttcaaaactgtttcaagaaatcatacttttgatctttccaaataccaataaaactagatattctacttcagtcttctataaaactgtttattctcttcataataaatcagyatgtaaattatttattatgaataagttatacactttaggaattttattaactcttgggatattaggaatacatttattcaaaatcaaaatagctgtagcagcatttttttaaatttacacagaatttct

SEQ ID NO: 390129 - DNA, 638 bp, Homo sapiens
gacagttgtcatccactatgttgggcctggagttaacagcagtttcttcataccataacaacaaggttctaatttgttatctaaaaattagctagttccaggaattctctaaacttagatcttcccccatgctcctctatacctgttaatgctttccattcaacatcataatattagttgatacgttcaccttgctttctttcatttataaaattaacactctacatgccatatgagaatactagtgcttttgagaactatattatgtcgactttgaatccctgacactgtttctcacttactagtcttaataataaatgttcagstcatgtaatgattttttcttttttctttgagatggagtcttgctctgttgtccaggctggaatgcagtggtgcaatctcgactcactgcaacctccgcctcctgggttcaagcaattctcctgcctcagcctcccgagtagctgggattacaggcacatgccactgcacccggctcattttttgtatttttagtagagacagggtttcaccatgttgtccagcctggtatcaaactcctgacctcaggtgatccacctgccttggcctcccaaagtgctgggattacaggtgtgagccaccacacccggccc

SEQ ID NO: 390130 - DNA, 532 bp, Homo sapiens
ttatatttaacacttcccatcaagagacggagtctattacctcctcctctgaatctggatatatgtatggtgacttgaattgatcaaaagaaggcagtggaaatgatgtgtgacttgttagcctaagcctcaagaggtcttaatggtgtccactcttatcatcttgaagtgctttattatgtgaggtagctcaggctagccctactgaggatgagagactggcaccagccactagacatgttagtgaggttatacgcaattaaccagccccaagttaagcttccagatggcagcctctttaattataccagatgaaactaactggctgagctcaacctaatagctacgccataacatttaaatcaaataayaatggttgttgttttaagccactaaaattcgaggtgacttgttataaaatagctgatacacaatacaagcactttccaaagtgccctttgcccttactctgatctgttgttgcccattgcacctatcacagctgatgtattatatactttcccatttgatt

SEQ ID NO: 390131 - DNA, 502 bp, Homo sapiens
ttcaaaagaaaaaggccaagtgcaatggctcacacctgtaatcctaacactttgggaggctatggtggacagattacttgaggcaaggagttcgagaccagcctgagcaacatagtgaaatcctgactgtactaaaaatacaaaaattagctgggcatggtggtgcctgcctgtactcccaactacttttgaggttaatgtagaaagatcgcttgaatccaggaggtcaagggtgcagtgagctgagatcatgccactgcataccagcccctgagtgacaaagtgagactctgccaaaaaaaaaaaaaaaaaaaaaagagagagagagagattcaaaaaaattatgtaaaataataccaaactaacacagrcagctatttatattttacacctttttctcctttctttacttttgaaattataattatggtgtggcttggctatacctgactgagtcatgcttttggcatgggatcatgggtcagcttgctttctaagttaa

SEQ ID NO: 390132 - DNA, 464 bp, Homo sapiens
caaagaatgtaatcttcctatcttctaaacactaccattaccaagaaattatcagtggaaaccttccactcagaagaacaccttctttcaaaattatgagtatttaaaataagtgccctgagaagtatagttaaaaagaaccatatacgaaattccacaaaactagtaatttctataaacttctggctttggggaaatatgaagaaggacctcttttgtaagaggccatgaattacacactgcctataaaacaataagatgttaggtaaatgagggaagagtagctgcttcagttgacaagcrttcacagaagaagcactgtcctaaggttccagaacaccctgtatcacccacctggccagccagtcatttgccagactactcactgttttagctgcatggcaactacaccagagagtagcagtggaaaagcaatataagtctgtgcttacttcctcaataat

SEQ ID NO: 390133 - DNA, 555 bp, Homo sapiens
aaaagctatttgttttgagatttcagaragcaaagtacctaaaaaaatggtctaatggacagaaaaaaacttttattctcagagaaaatctcccaaaaacattaaaaaccaatatccttattttcattactaggcaaaagaagaaaaaaaaactgtcatgagaaaaattcctgtgggaaagcttcaagcatcttaaaaatgaggcttataatggaaaagccttctctgtcataattaatatagcatcactaatataaaacccaggctgcttctcctgtctttataactcatttctgactactgcagacccattactataatgtacattacacatatagcacaatatagtttatattattatttaaggtaaaggatgtaaaatgtaagggaattttgacactgatttcttggtgataagaatgcatagctcaagttttctctaagatgtgagcattaataatccacatagatactgaagtagttcaaccactactttaaattttgcttactgattcagtcataaaaccaaggacaccatgcacatttacctgtgag

SEQ ID NO: 390134 - DNA, 569 bp, Homo sapiens
cccttttctcacattcattcagttggacttgctccagagtggctgaaaggaaacatgatgatttatatacccctattgcttcaagaataagaatcatgcctcctaartgtcttttccctttttcctcaataagccccttcccagtttctggacaagacaggttacaggtaggacagcattcaggagtgagagttgtgtgggcagctctgtgccctcttcatctccaaacctgaatgcgtgcagttcctctctttatccagattgacagattatttcatcattccactgaagaccaccatttaaaatagacaataacaccactgggaccccatgtccctgaaagctaatcactgtcactctacaaccaatggtcagcctctttctggttattctgtccaagccgattctttctgccttggagattttccagagctctctaggctatttttctgtttctctggaactgaacccatggggcttcattttctgtgttcttggaatggctttgctctggagatagcccagtgttctctccctcctcaggtcactcacagtggattctgtggttc

SEQ ID NO: 390135 - DNA, 611 bp, Homo sapiens
aagtcacatacacaacttctgcttatatttcttttttttcttttgagacggagtctctctctctcgcccaggctggagtgcagtggcgtgatctcagctcactgcaagctctgcctcccgggttcaggccattctcctgcctcagcctcccgcgtagctgggactacaggtgcctgccaccacgcctggttaatttttttttttttgtatttttggtagagacggggtttcaccgtgttagccaggattgtctcgatctcctgacctcgtgatccgccagcctcggcctcccaaagtgctgggattacaggygtgagccaccatgcctggccgttctgcttatatttcattgactaggcagattaaaatggcagggaggctgggtgctatggtttgaacgtcccctccaaaacgcatgttgaaatttatttgccattttaacagtgttgagagatgggacctttaagaaatgattaagtcattggctgggtgtgatggcttatgtctgcattcccaacactttgggaaagcaaggcaggagatcacttgagcctaggagttttagaccacccagtaggaccccatctctacaaaaaattaaaatgtatgtg

SEQ ID NO: 390136 - DNA, 548 bp, Homo sapiens
agaggccagtgccattttcttgaaattcccagcctccagaaccatgaggcaaataaacatcttttatttataaatcacccagtctgtggtattctgatgtaggtatagaaaattgactaagaaactgggtactgtactttttttgatttgtttgttgtttgtttgttttaaccatgaggctatcttctcaggtaaaaaaaaaaaaaggtcttttattctacagaaaagacaatatcagtggcagtctcagtcttcaattcatagggccagtataactgagcatgatgattctctttctttagagtagctttgaaactctcctgacatcttcttagaggggagaaaaatgccgcagcaatgaggacyccaggtgaattgagttaaataaaatgtccttatattgaatggacattagctttttaagtcaatattttgatagtaggagtgttaagcaatattcagtttcagctacacagttctattttaatgaagcttattcctggctgggtttgcaatatgctaaacattttacaaattatttagcattt

SEQ ID NO: 390137 - DNA, 626 bp, Homo sapiens
tgttttcacaacctctctgcattatgctgtgctaatttcaaaagtagcttttttgtttgtttttttcaaatcaaatatctgtattcttaactgagtttctctcagacctcagtactctatcctttaatggctgtgatcactatgttatgttaccatgactactatctgccatggttttaattttcacataatatttgctgttatgattatgaactagcagctggggagactaatttattacttggctattactgttaaaggtcatgtaactccaacgttctgctaaagcatttgatcacatcctgcgtgctctgccagaaagcctttcttctggcaactcctcaggcttctgtggaatttatcactttttcaaccagggaagttgaagccagtaggtacttatttctggtagctgccaataaagtatctgatttctcaaatgccctctgttcttatacccagcttttctttattcagtagttataagaaatgttgttcataaaaattcagctacctacatagtcaaccctcaactatctgtgrgagactaacttagttctaaatattacttgaaatctcaattaggacacttgactgtgttatttaggtatatggaagaatacatt

SEQ ID NO: 390138 - DNA, 590 bp, Homo sapiens
aaacacaaacattaccctaagcctacccagggtcgggatcgtcagtattactgccttccacctccacagcttgtctcactagaaggtctttaaggacaataacacgcttacagctggcatctcctatacaatatcctcttctggrtatctccacaaatgacttcccgaggctactttatagttaacttttttttaaatagtaaaagtacactctgaaataatgataaacagtacaatatagtaaatacataagccagtagcatagccatttattatcattatgaaatattatgtactgtacataattgtatgtgctctactttatatgaaaggcaataccgtatgtttgtttccaccagcatccctataaacacatactgccttgcactaggatgttatgatggctacagtgtaactaagagattcggattttttagctctattataatattactaggccaccattgtatatgtagtccatcattgaccacaatgttatgctgggcataatggtatacaacattactacggttacattctgcaaaggacctttctattcttaaacaaggttagatgacattagtaaataa

SEQ ID NO: 390139 - DNA, 590 bp, Homo sapiens
aaacacaaacattaccctaagcctacccagggtcgggatcgtcagtattactgccttccacctccacagcttgtctcactagaaggtctttaaggacaataacacgcttacagctggcatctcctatacaatatcctcttctggatatctccacaaatgacttcccgaggctactttatagttaacttttttttaaatagtaaaagtacactctgaaataatgataaacagtacaatatagtaaatacataagccagtagcatagccatttattatcattatgaaatattatgtacygtacataattgtatgtgctctactttatatgaaaggcaataccgtatgtttgtttccaccagcatccctataaacacatactgccttgcactaggatgttatgatggctacagtgtaactaagagattcggattttttagctctattataatattactaggccaccattgtatatgtagtccatcattgaccacaatgttatgctgggcataatggtatacaacattactacggttacattctgcaaaggacctttctattcttaaacaaggttagatgacattagtaaataa

SEQ ID NO: 390140 - DNA, 590 bp, Homo sapiens
aaacacaaacattaccctaagcctacccagggtcgggatcgtcagtattactgccttccacctccacagcttgtctcactagaaggtctttaaggacaataacacgcttacagctggcatctcctatacaatatcctcttctggatatctccacaaatgacttcccgaggctactttatagttaacttttttttaaatagtaaaagtacactctgaaataatgataaacagtacaatatagtaaatacataagccagtagcatagccatttattatcattatgaaatattatgtactgtacataattgtatgtgctctactttatatgaaaggcaataccgtatgtttgtttccaccagcatccctataaacacatactgccttgcactaggatgttatgatggctacagtgtaactaagagattcggattttttagctctattataatattactaggccaccattgtatatgtagtccatcattgaccacaaygttatgctgggcataatggtatacaacattactacggttacattctgcaaaggacctttctattcttaaacaaggttagatgacattagtaaataa

SEQ ID NO: 390141 - DNA, 566 bp, Homo sapiens
cacattttttttttcaagatagtgattagaggcatgcttcagcccttagaaatagaaagatagtgcataaagagaaactctatgagctgtatttcaataaggaaaattggaattcaccagaatcataaagracaccccacatctcaggaggaggatgcaggcaaacagcccctgtgatggcgtccagttgataaaagtgagtgaagccccagtatgtgagacagacagagagccctctgtgactcacttttctcctggggatctgagcaacccagtatgctgagggagtacgttttcttttctcccaagctctggagttgacttgcagagaggcttgggtactctgtgagggaaagacaccaggaaaagctgctgggattttcccagaaccaggagcaagagcaggacgccatttttaatcccggggcatacaaaatcagccattctgtggtgatccagcaggctggtcatgcaggcattttagtctttggccagaaatggagtacgtactctggagtcgggtaggggcctccacagccagaactgtggaaagcagctcagcagta

SEQ ID NO: 390142 - DNA, 566 bp, Homo sapiens
cacattttttttttcaagatagtgattagaggcatgcttcagcccttagaaatagaaagatagtgcataaagagaaactctatgagctgtatttcaataaggaaaattggaattcaccagaatcataaaggacaccccacatctcaggaggaggatgcaggcaaacagcccctgtgatggcgtccagttgataaaagtgagtgaagccccagtatgtgagacagacagagagcyctctgtgactcacttttctcctggggatctgagcaacccagtatgctgagggagtacgttttcttttctcccaagctctggagttgacttgcagagaggcttgggtactctgtgagggaaagacaccaggaaaagctgctgggattttcccagaaccaggagcaagagcaggacgccatttttaatcccggggcatacaaaatcagccattctgtggtgatccagcaggctggtcatgcaggcattttagtctttggccagaaatggagtacgtactctggagtcgggtaggggcctccacagccagaactgtggaaagcagctcagcagta

SEQ ID NO: 390143 - DNA, 566 bp, Homo sapiens
cacattttttttttcaagatagtgattagaggcatgcttcagcccttagaaatagaaagatagtgcataaagagaaactctatgagctgtatttcaataaggaaaattggaattcaccagaatcataaaggacaccccacatctcaggaggaggatgcaggcaaacagcccctgtgatggcgtccagttgataaaagtgagtgaagccccagtatgtgagacagacagagagccctctgtgactcacttttctcctggggatctgagcaacccagtakgctgagggagtacgttttcttttctcccaagctctggagttgacttgcagagaggcttgggtactctgtgagggaaagacaccaggaaaagctgctgggattttcccagaaccaggagcaagagcaggacgccatttttaatcccggggcatacaaaatcagccattctgtggtgatccagcaggctggtcatgcaggcattttagtctttggccagaaatggagtacgtactctggagtcgggtaggggcctccacagccagaactgtggaaagcagctcagcagta

SEQ ID NO: 390144 - DNA, 574 bp, Homo sapiens
caaacttttgtgctacaaatgataacatcaagaaggtaaaagaagaccagctcacagtaaagggaaatgtttgcagataatatatctgataagggacttgctttcagaacacataaagagcacttacaacatgataataaaaagacaaataaccaaattttaaaaatgaacagaagacttgaatagatatttccccaaagaagttatatgaacactgaatacatgaaaagatgttcaacactatgagttatcaggcaaatgcaaatcaaaaccacaatgaaataccatttcacatccactagaatggccaatatcaaaaaacaaaaacaagtattggtgaagatgtaggaaaattggaactattatacattgctagtgagaatgcaaactggtgtgcagccactccataagcagtttgacggttcctcagaaaagtaaacagaattaccatattacccagcaaytcccctcctgggtatatacacaaaagttttgaaaacaagtactcaaatacttgcataaaaatattcacagcagcactatttgcaatagtcacaaggtgaaaacaacccaa

SEQ ID NO: 390145 - DNA, 593 bp, Homo sapiens
ttatacattgctagtgagaatgcaaactggtgtgcagccactccataagcagtttgacggttcctcagaaaagtaaacagaattaccatattacccagcaactcccctcctgggtatatacacaaaagttttgaaaacaagtactcaaatacttgcataaaaatattcacagcagcactatttgcaatagtcacaaggtgaaaacaacccaaatgtggtttatccataaaatggaatattactcaatcatgaaaagaaatgaagtattgacacatgctacaacatgaatgaaacttaaaaatatatcctaagtgaaagaagtcagacataaaacgtcacatattgcatgattctatttttatgtaatatttataataggtaaatccatagagacagaaagcaaactggtggtttccagtgtctgtttagggataaggagasaattgagagagcttgcttaatgggtacagagttttcttttggagtgattaaaatgttttggagctagacagaggtggtagttttacaatattgtgagtatattaaatgccactgactagtacaccttagaatggttccacataaattttatg

SEQ ID NO: 390146 - DNA, 573 bp, Homo sapiens
aacaggacagtactagctcttgtccccattctctgaggaaaatgcttttaaaactaccgtgtattaaatgactactgtgtgccatgcactttgcatatatgatcttacttaattctcacgacacccctgtgggctacctatcaatctcctcattttgcaaatgaagaaacaggggcttggggaggtgaggtatctgagcaagattccacagctagtcagtgattgaggagaaatttgtactcagtttcatctgattctgaatctccggttctttctaatataccagaattcttctgccccttccagtactgccagtctcccagtttctttctgggccatatgggtcaacttttgcaggcttgggactaacagagaaatcatttcttgccctatttgatgcagaaataccaatgccagggacacttctatcagggagaygggagcagtaagatttctgcctaagagctgagaatggggtaagagggagtgggagagaaggatagaggctgtttttctgatctgtaacggtcatgcgttccttaacatccaaactgggagtgggaagagagggca

SEQ ID NO: 390147 - DNA, 487 bp, Homo sapiens
atttcaacaaccatgcatacccatacccacaagcaatctattaataaatatatttgaacaaactaagtccttcacagagctatattctcttcatttcatgtatattaatagtctctgtatatttgttaaaaactgaatttctctctttcatcttcctctgatttggatggaatttgaaaacaaattcctggctttaagaggggtttgttttccccatgcttattgacctagtaaaccctaacaagccatcagaacctyaagaatgatagccaagcagataaaaaccatggtatctactgttgtttgatattaagatggaaatataaatgctaaaaggaagtaagtaaaagtacagtcaggatcggtgttcatataaaaattccacagtgcctggagctcagggcagtgcggtcaatagttatattggtaataacacgtagtgatactattgaaatattgctagtccctacctcacaataattaattt

SEQ ID NO: 390148 - DNA, 555 bp, Homo sapiens
attgcctagtcttggagcctgataattgatgccttctccctaaccccaatctaatctgtcaccagtttctgttttgcctcctatgaatttatcctctttgctttgtttccacacattctagttcaagtatctctcttgtggccctgcagtgggtctcttatctggtctcacccattctggcatctctcctatctattcatactgcaggcagaggaagcatttagaaaaatacacttcttatattacccacttaaaatcctttggtgatgtcttaatctggtcaaagacagctggctcataaggggaaactaggaccaaatcctttttcyttcaaccaattagaccctcacacagaaaacttaaacttagcatatatgagtaagacaaaaaaacttcagatccagtggggaggaaaagcagatggctcctagtccaagggacagaatgggtcacagctcctaacagggctgactgcagccttgggtagtgggggtgttagattgtggcatacgggtggcatatatgggtccctagtcaaggacagagcagtggttt

SEQ ID NO: 390149 - DNA, 508 bp, Homo sapiens
  misc_feature (1)...(508): n = A,T,C or G
nnnnnnnnnnnnnnnnnnnnnnnaaaatctttccctcacttcccctgcacaggaaagacaagtgggtgcatgaagcccaatcaaatcaatttattttgtcaccaaaaattttttcttttttttttttttgaggcagagtctcactttgtcactcaaactggagtgcagtggtgcaatctcagctcactgcagcctcgacttcccaggtgattctcctacctcagcctcctgtgtagctgggactacagttgtgcacctccatgctcaaataattttttgtatttttagtagagacagagtttttccatgtttcccaggctggtctcaaactcctgggctcaagcaattytcctgcttcagcctcccaaagggctgggattattggcttgagccaccacactcggcctgtcatcaaagcttaaaatgctagagcaagaaaacacctgaaagagcacattatttcacacctttgtttctttagataaaggtctgaggctccagagtgggg

SEQ ID NO: 390150 - DNA, 478 bp, Homo sapiens
tcctaggggaagagggagagcaccacatcaagggaacaccctgtagaacaaaaatatatggacagcagtccttgagtcccagatctttccattggtgggaagtttctttcagcagaggcacaatgacaagctggaaacaggagagaaagtctgcacctctatcccaataatcaggcagtcttcatgctcacaaagggtcttggtgaaggggtccttgttcccctccttccaccactgcaggcacagctggggctactcccatggcaagtcagcatggatacaactgtagacagccttcstggaagaattaaggctgattgtatctccacaagaggagcatgccccagtttcaggctcgaacaaggactgtgtcacaatttctctctacttggaacatcaacattcctacacatttaaaaaaaaaaaaggtgtctgtctgacttgaatagctggaacactggacaggagggaggtggat

SEQ ID NO: 390151 - DNA, 521 bp, Homo sapiens
gtgtttttgtttgtttgtttgtttgttatgttcttatctggctttaatatctgggaaatgttggctttgtagaacaaattagagaattgtccatttccttgattttttagaacatttacagtaggattggtaccagttcttctttgtacatctggcagattttggttgtgagcccatgtagtcccgggccccttgttcattggataatttttaattattggttcagtgttaaaacttgttatcattttgcccagggtgtctacttctttccgattcaatcttgggagattgtatgtattaaggaatttattcatttaatctgggttttctggtttgtgagcatagatatggtcatactagtcactaataatatgttgtgtttctgtggtatcaattataatgtctcctttttcatttctgattgtgcttattttaatcttctttcttgttytggttaatttaggtggtggtctaacaatttcgtttaacttttcaaagaaccaacttttcttttaattgat

SEQ ID NO: 390152 - DNA, 589 bp, Homo sapiens
atcacttatatttggtgtaataaatactaataaatgaaaaactcccagtgtaagaaaaagtgtgggattagcaaagggttccctgagaaaattaaaggtaaattgaaatctaaatgcagaattgaagtcttggaagcgttccaggaaagaacagctctgatagtaatcagcatgtgcaaaggtgaaaagactaaagcatattaaatgacctgaaagaagactgaattagaaatgactaatttaatttttaaattcattactttggtttttcaaggaaaaatagtttggaatgggacagcggaagcaaagaaacaacttaggaaaccatctcctagaccagcagagaaggcatggtcactcaaaatgggggtgcagaaagattggggatatagtaagaatgtagtataatatcatatggtaataaattgaatatttatggcataatggaagtaataagattagtgacttccagatttatggtactcaaaacatgcatggagtggtgacttactgtatgtaagaggtgsagaattgaaatttttcagtttaattttagatagttaaatttaaatcacacataagaacattc

SEQ ID NO: 390153 - DNA, 566 bp, Homo sapiens
agatatatgtttatgagacaaagtttgaagccattattttggctcaaaacttagtgcttagaactgattgtacaattattttaaaactgcaacatatatacaaatatactattataaatgtaggataatgtgactactttttagtaatttgatgctaaaacagaaaagcatagtatcagaaatattaatgaatctagaaacattaragaacacttgggaaaatatctatcttttataggttattttaaaaagtcttatgttttttaaaatagagtttaaaactatgttgggattgtgtcatttgattttcattttagtttgttttttccaaaataattggtaattatatatttgaaaaataagatttatttgtgacttaattaacataatcaaagatatagtacatattttctttgtaagatatcaagtttttgatatgtcattcttgtgcctaggtaaattttaatttaaatgggtcaaagctgacagtagagggtcagaaatttcaattcctaactgacataactgcaaatattttattagaatttcaaagataaaaatgtata

SEQ ID NO: 390154 - DNA, 558 bp, Homo sapiens
taggtcagtgtcagtgtttcaactctattaaatggaacatgtttatcattaatatattcaatggtataaagttaatagaaactgattcaagataaattaatctcaaaaayaataatgtaatgtataagaagaaaatggaatgcctacatttgctttttagtaaaaggcaatttttaatataagcaatgggtgtgttctcttaccaatgagtgatcaagccattctctctgcataggacaatctctattcttagtttaatgagtattagttgttttatttcagtaaaccttgcacactttttatttttcataacaatattttgagtccttaagaacatcccaccatttctttttctattattgtaagagtgaccaatccaatttcccagattcaagagtgaatcatttacctagacttggacagtaatattttaaattttatcccttacaaaaatatttatggagtgcctacaatgtgaaaagcagttttttaagatgtttggggtacagtgctgtaaaaagatatgaccactgatctcatgaagattatgtgtattgt

SEQ ID NO: 390155 - DNA, 588 bp, Homo sapiens
gcagtcaagccaaagacttgtagggcctgaattcagtcatttgcctaccagtttgtgatacctgattgtgtgaactgtgacagatagaagaataataatttaaaacatagaaccactgtctcaagacacatagtttaatttgtttcgttaagctttcaagctgataagaaaaatagtctttcatcaagggcataaatccaaggtgaagataaagatatttgttctaaaagcattcttattttagactacaagggtactattataaggttggtctcctcaaaatattcccaatataaaaagagaagtgtgactaaataaggttgtgatgatgctgatattattcattctctctctgacacacacatgcacacacacttttttttttttttttagcacactcatccagttctttctctttgactggtaagatttttctctatgggcctagaaaatctgttcatgtcactgctactataaagtcacrgatgtcaagctattttgtgttttctggatgggcccaatatctgcattgcttatggaacgaagcttctttcattaaagtggctagatgctgccagggcacagtct

SEQ ID NO: 390156 - DNA, 572 bp, Homo sapiens
aatagaacccttgtcttttaaaatatgtaataaacatagaagtagagcaaaaaaaaaaaagatgtgtatagagactgactggaatacatagttatgtttgctacctctatcctctgataggatctaaaagttgtgacattccagtagcaacaagcatatctagggcccagattttgatttctaaagataatttccaataaaagaaaccattactttttgcagaattatttgttctagggcacatacaagacatcttgtagggctacagagtaaagaagttctaaaaaaaaaaaaaaggaggaaaagaaaaggatggggttatatctggggatgtatcaaaaggagacagaaatcaacctgaaagaactctcaagggccagaaatgaaacaagttgaaggacaaaataaataatatattttattatactcctaagaataagatatctatccaatgttcctaccggtatatataaataaataaataaggaacaactgtcttatagaagaaccttaattaataagggtrgaaatataaaggtaagttgaaaatcataattagaaaaccatggtaa

SEQ ID NO: 390157 - DNA, 595 bp, Homo sapiens
aatccattgtttatttatatatagttttgccaaatttcaaggttaaatgcttctctagaaaattagaataaaaattataaaaatctacaaatactattcggtgaagtcacaatatcattaaaaatttggacaggcaaaggatttcaggagtcatttattaatccaaaactcctgttgaaacaacagggaaataaattattttatatattcataaaacaattactgttcgatgtgtaagatatacaatgtgtattataaatatgaaaccatctgattactcagaagtattgtatatcataatataagcagaaacaayaaaacaaaaacacaattaaggtaattttcatgatacagtgtatgatggctgtgaaataataatcaggacgataaatactgaagaattcaatggaaggagaagtgcctgggtcaagcttgtcagggaagcagaggtatagctcaagttagaattttaagaattgtcaagattttttgcatagtaaaattaaaacatacttcaggcaaatgaagagcattattacattctgctccatgctatgaaacagcaaattacatgctccctcatggccaccatcag

SEQ ID NO: 390158 - DNA, 594 bp, Homo sapiens
gttagtgttttagattttggccattctatgaggtatgcagtggtatatccttgttttgatttgcawcttcctaatgatcatcatcttttactattttggacatttatacattttatttggtgaggtgtctattcaggactttggacaatttttaaattgcttcttttctcaaatttttaaatgtttaatttttgtgggtatatagtagatgtatatattttggggatacatgagaggttttgatacaggaatacaatgtgaaataatcacttcattgagaatggagtatccatcctctcaagcatttatctacaaatcaaaacaattgaactcatggacaaagggagtagaaggatggttctcagaggctcaggagggtaatggggagatgcagatggttaatgggtacaaaaatagttagaaagaatgagtaagacatactgtttgttttcttgttattaagttgtatgacttctttatttattttggataattgtcttttaccaggaataccttatacaaatattatttccagtttatcggcttgtcttctaattatttagacatagtcttttgcagatcagaagtttttaa

SEQ ID NO: 390159 - DNA, 594 bp, Homo sapiens
gttagtgttttagattttggccattctatgaggtatgcagtggtatatccttgttttgatttgcaacttcctaatgatcatcatcttttactattttggacatttatacattttatttggtgaggtgtctattcaggactttggacaatttttaaattgcttcttttctcaaatttttaaatgtttaatttttgtgggtatatagtagatgtatatattttggggatacatgagaggttttgatacaggaatacaatgtgaaataatcacttcattgagaatggagtatccatcctctcaagcatttatctacaaatcaaaacaattgaactcatggacaaagggagtagaaggatggttctcagaggctcaggagggtaatggggagatgcagatggttaatgggtacaaaaatagttagaaagaatgagtaagacatactgtttgttttcttgttattaagttgtatgacttctttatwtattttggataattgtcttttaccaggaataccttatacaaatattatttccagtttatcggcttgtcttctaattatttagacatagtcttttgcagatcagaagtttttaa

SEQ ID NO: 390160 - DNA, 433 bp, Homo sapiens
gacttctcagcagaaaccttacaagctagaaggggcttggagtcctatctttagccttcttaaacaaaataatggtcagccaagaattttgtagcctgcaaaactaagctttataaataaaggagagataagtctttttcatacaaacaaaagctaagggaattttccaataccaaaccagcaatacaagaaatgctaaatggagttccaaatcttgaaacagaagcttcatgtgcaccaaaatagaacttcctgaaagcataatactcacagggcctatgaaacaataacacaatgaaaaaataaagtatctaggtaaaaattaacatgtgtagarcagtacctaccatctggatgttaatgttgaatgtaaatggcctaaatgcaacacttaaaagatacagaatagcagaatgaattttaaaaaccacca

SEQ ID NO: 390161 - DNA, 551 bp, Homo sapiens
tttaaaaatgatcacaccagatagctaacagttttcaggttcaacattattatataaataaaatgaggaaacattcataataagttaactttaatcttgggaaaaaaagcaactaggtgattgtgaaccaacatccctcattaaattaattggtttacctaattcttatgtctgctaaatgcagcttattaagctttatgctcttttacatttattacagtaacatcttgtgaattttgtgttatttttctttataatcatcttataaataatttgatcrttgaagaagcttaacctactttgctaaggagaaaaatatcttcaaattgctggttcaacaatataatcttgaaaataatctctgctagggcctagatgatttgcatggacttctggtaatatatcagttagcttggactaccataataaaacaccacagactgtagcttaaacaacagagatttattttctcacagtttagaggctggaagtaccatatcagagtgccagcatgattagattctaatgaaggatctcttgctgggttgcag

SEQ ID NO: 390162 - DNA, 562 bp, Homo sapiens
ttggtcacacattgatgtctgagtggcacttactaaatgctctgagggtcttttattaggaaatgaaagtccagggacacctccagtgtagtatttctagtgcactgttttctacatatcagcaagcaagttgaggttcttggacrctgggttaccagagtaatcatccatttcatctgttctatgtttcaataataagtacttatgaaatattggacagctcaaaatagcaagtagataacctttaagatataagcttgagaactaaagcaactttaagagaatatagttaatatagattaaacattgcataaatagccaagcagcatcaatttggccttctagcaggaaactagcacagaatactacaggctgattgatatcaggatttactctatgtatttaaaaagttttgcttaacaaataaacacactttagattaacatttattaacccacttaggacaataaaaaaagtctaaatattttagggggttacatatcatacataaagcatatgatatttactgataaatacaattgcattaaaaatgtactttttc

SEQ ID NO: 390163 - DNA, 590 bp, Homo sapiens
ttctgaaactataattttatagctgattttgtatcaaaatagctcagaaatgtgatttgtatcatctaaattagctcttgcagtttagtttttcaaaaatgaattttcaacctgatttttcatcaaaaatrttcagaaccttaatttttaatttaaattatctcaaatgcagtgtttcttttataccagatttatagcagatttttattcaagaatagctcagacactaacaatccatgaaagacttggctgattccgactttttggtttccaccttggtgctcagataggtataatttgcattttcatggcttaacgtttatggagtcattcaaaatacatatttgtggttttcccacagagatacttaagttcactggtatactatcataatacagtattgcagaatgatgagattaataacaattatgggtaattcagtgcacttattgatggtattataattttctcctcaagaaatatatatggagtagataaagagtatagcaacctgtataatgaggagaggtcagctaatgaaaccagcaagacctggctcagtggaaagtttttggaattatgtggaccag

SEQ ID NO: 390164 - DNA, 590 bp, Homo sapiens
ttctgaaactataattttatagctgattttgtatcaaaatagctcagaaatgtgatttgtatcatctaaattagctcttgcagtttagtttttcaaaaatgaattttcaacctgatttttcatcaaaaatattcagaaccttaatttttaatttaaattatctcaaatgcagtgtttcttttataccagatttatagcagatttttattcaagaatagctcagacactaacaatccatgaaagacttggctgattccgactttttggtttccacctkggtgctcagataggtataatttgcattttcatggcttaacgtttatggagtcattcaaaatacatatttgtggttttcccacagagatacttaagttcactggtatactatcataatacagtattgcagaatgatgagattaataacaattatgggtaattcagtgcacttattgatggtattataattttctcctcaagaaatatatatggagtagataaagagtatagcaacctgtataatgaggagaggtcagctaatgaaaccagcaagacctggctcagtggaaagtttttggaattatgtggaccag

SEQ ID NO: 390165 - DNA, 654 bp, Homo sapiens
gtgctagcagaaaaaaaaataactcaaaactgtcaattccaaattctttatctgacaaaactgtctttcaaaaatgaagaagaaatagagccttttccagattaacaaaagctgagagagttcatcatcacttgttctgccttayaagaaatgtgaaagggagtccttgaagttaaaactaaagatggactagacagcaagacaaaatcatacaaaaataaagctcattggtaaatataaatatatggacaaatactgaatactgtaatactgtaacagtggtgcattaatcacttttaattctagtataaaagttaaattatttaaaataaccataactataaaacattaataaatatatttttataaagatatgacttatgacatcaaaaacattaagtatgtgagaaagagaagcaacacagtagaggttttgaatgtgtcatggttaatagtgttaacttgactggattgaaggatgcaaagtattgtttctggatgagtctgtgagggtgttagtctcctctgccagaggagattaacatttgagtcagcggactgggagaggaagacccaccctcaatgtgggaaggggacaccatccagtcagctgacagcatggccagaaaaagcaggtggtagaaggtggaataa

SEQ ID NO: 390166 - DNA, 563 bp, Homo sapiens
ttatatttatttatatttgaccaaataattttaactgcattcaaatgactgattagaagttgagataaataattktatgttcatgatgtttaagataaatggaaataaaaacccttttattttcttcctatcttctaaaatattaaactactttgttcattattctctttaatttctctgatgcagggtcatcctaaatttatatatagataagtgatcactaggacaggaaacatagctctgctttcacttatagcaatacagaataatctataaatattaaatattagatgcctctacaaatgtggtctgcagagcaatgtgtgccatcaggaacttgtttttaagaaaacaaccgtgcatgagtaacttcattttaactcatcaattttaattaaattgagtctcctatgtagccaattttttaacttgtgtgctaagtaaatggcagcatatttagctggagttttgattagagtattaataaattgataacattctcttctatgatcaaagcttaaattttctaataactggtgcctaaatgaataaagagtcctaat

SEQ ID NO: 390167 - DNA, 563 bp, Homo sapiens
ttatatttatttatatttgaccaaataattttaactgcattcaaatgactgattagaagttgagataaataattttatgttcatgatgtttaagataaatggaaataaaaacccttttattttcttcctatcttctaaaatattaaactactttgttcattattctctttaatttctctgatgcagggtcatcctaaatttatatatagataagtgatcactaggacaggaaacatagctctgctttcacttatagcaatacagaataatctataaatattaaatattagatgcctctacaaatgtggtctgcagagsaatgtgtgccatcaggaacttgtttttaagaaaacaaccgtgcatgagtaacttcattttaactcatcaattttaattaaattgagtctcctatgtagccaattttttaacttgtgtgctaagtaaatggcagcatatttagctggagttttgattagagtattaataaattgataacattctcttctatgatcaaagcttaaattttctaataactggtgcctaaatgaataaagagtcctaat

SEQ ID NO: 390168 - DNA, 396 bp, Homo sapiens
taaattaattataataattgtataaaattgaaaaartatcaaattcacctgtaaggtaattaagagggaaaaactgaaacaaacagactgaaaaaaaaaaagccagcacaaatgcacatgtcttgcctactttgtaaaatgaaactgcaatgattggcaagttcccttgggaaaaggaatttaattctttctattctattatattctaaacatagttaactctagataatcaattgatcaatcattttcattacatcattctccatttgtgatttttgagattagcgccatttattattctttcatagcaagaatctacatgtgtgtacatcaaaacagtcacaattaatagttacaaaaagtatgtataaaaatagaagttaaaatagcctgctt

SEQ ID NO: 390169 - DNA, 523 bp, Homo sapiens
ttaagctattgttagaaatatccaaagatgagtcctagatgtggaagaaggtagagaaaggataaactttcaacaatgaagagcaatatcagcagtaattggggtggccaaaatggtaacgctttgtctagtctgaaagctgacaggagacacagaatcagatcacagaaccataytggtacacaagtacttaaaagccatggttaaaagacagccagtgaggagaaaagattgaggatgtacaggatttaaatgacaacagttatgccttaatataactagatttgaccatacagctacaaaaacaaaaacaaggtccagaaaaccaaatgcacaaaaggaaaggaaatgctgactttgttagtcttcactgcagagtatattgcctatactgttctcaaagaaatgtcttttttaataaccttaattttataatgctgtgtatgttatttttgttttgggttcctttctttgaaggatcaacgttcacatctaatgaaatgaatgctaggtaaaatagaac

SEQ ID NO: 390170 - DNA, 523 bp, Homo sapiens
ttaagctattgttagaaatatccaaagatgagtcctagatgtggaagaaggtagagaaaggataaactttcaacaatgaagagcaatatcagcagtaattggggtggccaaaatggtaacgctttgtctagtctgaaagctgacaggagacacagaatcagatcacagaaccatactggtacacaagtacttaaaagccatggttaaaagacagccagtgaggagaaaagattgaggatgtacaggatttaaatgacaacagttatgccttaatataactagatttgaccatacagctacaaaaacaaaaacaaggtccagaaaaccaaatgcacaaaaggaaaggaaatgctgactttgttagtcttcactgcagagtatattgcctatactgttctcaaagaaatgtcttttttaataaccttaattttataatgctgtrtatgttatttttgttttgggttcctttctttgaaggatcaacgttcacatctaatgaaatgaatgctaggtaaaatagaac

SEQ ID NO: 390171 - DNA, 588 bp, Homo sapiens
tgaggacctttattgtgttgagaaacatttgttaacttatctttattcttttttatttttttctgtatgctcttccgattggatgatttccagggacctgtctttgagttcctgattctttctgttgattgagctagtcttctgttgaatccctctactaaatttttcagtttagttatagcaattttcagctctacaatttctgttcagtacttttttacagtttctatctctttgttgaaatcttcagtttatacatgcattgctctcctaacctcaatgagactctttatgaccataattttgagtttcctgttaggtaaaaaacatatcttcrcttcacttgggtaagtttctagagatttatcttgtttgcttattttaaatatatttacctgtatattcattttttttttcactgtcttggtgtctgtgaatcagataagactactgcctccctcagtcttgttagaccagtcttttgtaggagaaacatctcacctatctgtctggctagagattttaatgtaccttttaaatttttgtatttgaccaaactactgtctatgtttttggtggctccttgga

SEQ ID NO: 390172 - DNA, 588 bp, Homo sapiens
tgaggacctttattgtgttgagaaacatttgttaacttatctttattcttttttatttttttctgtatgctcttccgattggatgatttccagggacctgtctttgagttcctgattctttctgttgattgagctagtcttctgttgaatccctctactaaatttttcagtttagttatagcaattttcagctctacaatttctgttcagtacttttttacagtttctatctctttgttgaaatcttcagtttatacatgcattgctctcctaacctcaatgagactctttatgaccataattttgagtttcctgttaggtaaaaaacatatcttcgcttcacttgggtaagtttctagagatttatcttgtttgcttattttaaatatatttacctgtatattcattttttttttcactgtcttggtgtctgtgaatcagataagactactgcctccctcartcttgttagaccagtcttttgtaggagaaacatctcacctatctgtctggctagagattttaatgtaccttttaaatttttgtatttgaccaaactactgtctatgtttttggtggctccttgga

SEQ ID NO: 390173 - DNA, 588 bp, Homo sapiens
tgaggacctttattgtgttgagaaacatttgttaacttatctttattcttttttatttttttctgtatgctcttccgattggatgatttccagggacctgtctttgagttcctgattctttctgttgattgagctagtcttctgttgaatccctctactaaatttttcagtttagttatagcaattttcagctctacaatttctgttcagtacttttttacagtttctatctctttgttgaaatcttcagtttatacatgcattgctctcctaacctcaatgagactctttatgaccataattttgagtttcctgttaggtaaaaaacatatcttcgcttcacttgggtaagtttctagagatttatcttgtttgcttattttaaatatatttacctgtatattcattttttttttcactgtcttggtgtctgtgaatcagataagactactgcctccctcagtcttgttagaccrgtcttttgtaggagaaacatctcacctatctgtctggctagagattttaatgtaccttttaaatttttgtatttgaccaaactactgtctatgtttttggtggctccttgga

SEQ ID NO: 390174 - DNA, 313 bp, Homo sapiens
cttaaaccattttctgggagaagaaggaaacttcatttttaaagccmcattatcttcagcacccttgagagatgaagcgcctggaagtacttgaatgattgctcacaactgtactttttcttctgtgttctagagagacttaaatatgcgtagtcttctctgctcccacagctaggaggattagaattcaataccttgggtggaagctgtaaaagttggagtgtttgatatttggacaaactctttccagaatgaattgataaacttgatgttatcactggggcaagcaggagtagaaggcttggaaagtgct

SEQ ID NO: 390175 - DNA, 580 bp, Homo sapiens
ttggggtacttaatgtgtggcttaaaccattttctgggagaagaaggaaacttcatttttaaagccacattatcttcagcacccttgagagatgaagcgcctggaagtacttgaatgattgctcacaactgtactttttcttctgtgttctagagagacttamatatgcgtagtcttctctgctcccacagctaggaggattagaattcaataccttgggtggaagctgtaaaagttggagtgtttgatatttggacaaactctttccagaatgaattgataaacttgatgttatcactggggcaagcaggagtagaaggcttggaaagtgctgatctgcttctcagactgctggagggtcactgtttgtttgatctttaggtcctcaatgtatgttaggtagaagccaggctactaagtatccactgcaacagtgtgtcataaaccccttctggggagaaacaaggagctgttttttcaagccccttctctgcactactgctggaggatagagcccctagaagtgcttgcacatgtatacaaaaccactcattttttttttcttgtggacaagttagac

SEQ ID NO: 390176 - DNA, 579 bp, Homo sapiens
tatgttaggtagaagccaggctactaagtatccactgcaacagtgtgtcataaaccccttctggggagaaacaaggagctgttttttcaagccccttctctgcactactgctggaggatagagcccctagaagtgcttgcacatgtatacaaaaccactcattttttttttcttgtggacaagttagacttttacatggttaatctccttcactcccagagttagtgaattaagaaccaaattaaaaggaaccttagagtgagggcattacatgtgaggtccaagccctcttctccacaggcagagctgagtgtttgggatttctctcctgtctacgtggtgcagtatctgaacagggcctgtacctgggtgtgcctctgcttttactacccattccgtgtggatgttttcttagctgctcagtgagtaggagtctctcaactatttctgaatttctctcagatggaactgatacatgagtagatgtytatttggtacatccatgcttggagtgtgagtcaaaaagctctttttccaccattttgttgacatctcccataaagtcattttaataagaca

SEQ ID NO: 390177 - DNA, 579 bp, Homo sapiens
tatgttaggtagaagccaggctactaagtatccactgcaacagtgtgtcataaaccccttctggggagaaacaaggagctgttttttcaagccccttctctgcactactgctggaggatagagcccctagaagtgcttgcacatgtatacaaaaccactcattttttttttcttgtggacaagttagacttttacatggttaatctccttcactcccagagttagtgaattaagaaccaaattaaaaggaaccttagagtgagggcattacatgtgaggtccaagccctcttctccacaggcagagctgagtgtttgggatttctctcctgtctacgtggtgcagtatctgaacagggcctgtacctgggtgtgcctctgcttttactacccattccgtgtggatgttttcttagctgctcagtgagtaggagtctctcaactatttctgaatttctctcagatggaactgatacatgagtagatgtctatttggtacatccatgcttggartgtgagtcaaaaagctctttttccaccattttgttgacatctcccataaagtcattttaataagaca

SEQ ID NO: 390178 - DNA, 638 bp, Homo sapiens
ctcctggttgtgcccatccacccaccctggtagcttagcacaaacaacataaacttttgggaaccttatagccctgcttattgcctaagaaaccagaatactgaagaggtgccacgatggccaattagaagcagctgcgatccaagatactaacagagaagaatgaaaggggagaatgaatacagtaccttcaactgaaatatctaggttctcacattgggactgattagggaaacaatttgactgtrgacaatgaagaaaagcagggtagggtgatggcccactctggagtgacatagagccaagggaacccccagccctacccagggaaaccgggagtgattgtgtaactccaggaaaccatgcttctaccatggatctttgcaacccatggatcaggagatccccctgtgagctcatgccaccaggaccttgggtctgacacacagagctgtgtggagtcttcagatcagctgctcatgcacacacagagaccatgtagctttacatactccagcgcagggatccccaacaaacatgtctacaactcacgtaaggctggaggtctgcatacaaccctaggaagagtgtagatagaattcagagagctgagcatcgttccacttacatgacacctc

SEQ ID NO: 390179 - DNA, 444 bp, Homo sapiens
tatgttaaatctctccgttcataaatattagcaaccgctttaattaaaaactaaacaaggccaggcattgtggctcacacctgtgatcccagcactttggaagaccgaggcagacggatagattgagcccaggagtttgagaccagcctgggcaacatagcaagaccccatctctacaaaaaawtttttaaaaattagccaggcatggtggcatgcatctgtggtcccagatactcagggggctgaggtgggaagatcggttgaggccaggagttcaaggctgcagtgagccgtgatgatgacactgcactccagcctgggcgacagggcaagaccttatctcaaaaaacaaaacaaaaccacgtgagcccataaaacacatttgtgggttgggtttggctgagggatggcacgttcatttcctggagctgctataacaaatta

SEQ ID NO: 390180 - DNA, 571 bp, Homo sapiens
ttctccactcatatctggtatctcacctagaatggctgaaacaactgagagctagctgggcatctccccttcacctcacttatgttgtgcacactcatgtgcatagccaccctatgcgactaatctggcttcctcacaacatggtggtctcaacacagtcagactccttacatgggccaactctccctagagcaagcactctcagaggcccacagaagttacaaagtctcttatgacctagcttcagaagttacctcttttgcattctatgggtcaaagtgaatcacaggcctaggccaaattcaaaaagagtggaaataggctcctctccatgggaggaatagcaaaaatcggtggccatctctcttcttctatagatgctgtgggtcagtgtgcctcayagaatcgtggtgtacttcactgacagcaagatatgcttggcctcatgaaaacaagcgaggagtcattgcaagtccaactcaaacatgtatagtttgaacaagacttgtgtaagtcaaggcctcattctgatactgcaacattttacagtccctttcaagaaccttacact

SEQ ID NO: 390181 - DNA, 558 bp, Homo sapiens
acggtgagaccccatctctacaaacaatatgaaaactacctgggcatggtggcatgcacttgtagtcccagctactctggaggctgaggcgggaggatcacttgagtctgggaggtagaggttgcagtgagccaagatcatgccactgcactccagcctgggtgacagagtgagaccccacctcaaaaaaaaaaaaaaaaagaagtgtagcttccccaggtgaagtctgaaagtggtacacttactatttttaaaaataattattaagaaatcaggcgtgcagttttaatgcaatcttcagtggtatattcattcttatattcttattactgttgtaacaagttagcacaaacagtggcttaaaagaaaacaaattcattatcttkcagttccagaagtcagaagtctatgtcagcttcgtagagaaaaaattaaggtgtcagcagaattggttccttctggaagtcccaggggattgttttcttgcctgttcagcttttagaagctgcctgcattacttggctcaggggcctcttccttgaattactccaacctctt

SEQ ID NO: 390182 - DNA, 474 bp, Homo sapiens
agaaacagcatagagtgtttggagaattcagactgaggtgaggctggggaaaccaaatcccacactctgttcccatcaccargcaatgactggtgagctgacggagcgaagagcttcaaggtcagtcctagtgagggtcctgttcacccaacctgccttgcaccattcaggacatgtaaagggtatggcactgggggcccctccctccacctccaactcacagagtcttgtctccctgcctttcctgcacagaaggcctcagggccccaagatcctcctttggcaaaatccccaagagtctccctctgacaacacacccttcttttcttcacccttctgaccgaaaacttagtcctgactcatgccttggcattcctgggctggggtgtctgctgattttactggtgctgggctgacagctggactgacttcctgcattcagcaccacctcactttagtccatcccatgacagc

SEQ ID NO: 390183 - DNA, 529 bp, Homo sapiens
tctctactcccactgcactcctccacacctaagtacctactttctggaaggagctgcaggtccccaaaccgtggcttctgctgggcaaccctccctaacagtccccatcctcactgggtgctggcaactccatgcctccctttgcttcttcccactgggctagcctctgggtcatctcttgtttcctctcttaactttattattcctctgtaagtgatcctttcattgaagtctctatttgaaccatctgggtgcattctgtttcctgttgaaagtgataaagcaaaatgcttattttytcgtgcctcagtgtcctcatctaaaaataagaatcatattaatgcccacttcgcagggatgatatggcaatcaaatgagaaaatgtatttatgatacctagttcagtgcctggcataggtaagtgctcaatgaacgttcattgatattatcatcatcactcccattggaatttataacctggggctatacgatctctataggtccttacagcatgaatggaatatgaatg

SEQ ID NO: 390184 - DNA, 533 bp, Homo sapiens
aggtgggtggacacccaagcaggggctgggaagcagagatggctggagctgctaagaggggccagggctccagggcacacttgacttgtctctcagtggagccagggacatgctccaatgacacccatggctgcttcctcatagggcaccctctgcctctctggagcctgccgctggctctatcgaaaggggccagtgggaaatagtcatggggtcctactctgatctgagcagccagagggagtgacatgagctgagagttgtgaataaacccctgtactttgtacttacttactcaacttgacaaacattccccatggacttgccctctgtcagactgcactgggaactggggattctgtagtgaatcaggcactatgtttgctcttcagaatctagtaagakttgggctcacatagccaaaatgcaaagcagagcatggcagcgccctggaagatgaattccagattcctgctgcctggtccagaatcagcatagcccaacaatgctaggtgaccttggtcaagttgctt

SEQ ID NO: 390185 - DNA, 543 bp, Homo sapiens
tggacagtgcatgttctcagctggagagctacagccaagcctctttctcttaataayaacagtactaattccctggcacaggcttgtttgtgtgcagtagctccccaaagcctaggccgtggctggggcttatcatctggcctcccgagtggcatgccttaagccccctgcactagggcagattggatactgaagcccaaaaggaaggcacaataaccacatcactcagtcagccccattctaattctgcttttcacctaagtacagaaggagggcaaaggttgctctgtttttcttctgggaacctccttgcctagccagccccacacatgcagagaatgccaaggattccattctaaatcccctggcttttatggctaattcttccattagtctgcaagctatagagcaaacccttcagcctggcattcaaggcctgcagtctgcccaacaccaccgaggtaacctatcacagatagcaaagagaccatggtgcaatttcagggaaaacaaaaaagctttatacaagctaattactggagt

SEQ ID NO: 390186 - DNA, 543 bp, Homo sapiens
tggacagtgcatgttctcagctggagagctacagccaagcctctttctcttaataacaacagtactaattccctggcacaggcttgtttgtgtgcagtagctccccaaagcctaggccgtggctggggcttatcatctggcctcccgagtggcatgccttaagccccctgcactagggcagattggatactgaagcccaaaaggaaggcacaataaccacatcactcagtcagccccattctaattctgcttttcacctaagtacagaaggagggcaaaggttgctctgtttttcttctgggaacctccttgcctagccagcccyacacatgcagagaatgccaaggattccattctaaatcccctggcttttatggctaattcttccattagtctgcaagctatagagcaaacccttcagcctggcattcaaggcctgcagtctgcccaacaccaccgaggtaacctatcacagatagcaaagagaccatggtgcaatttcagggaaaacaaaaaagctttatacaagctaattactggagt

SEQ ID NO: 390187 - DNA, 567 bp, Homo sapiens
gaaggaagcctggagacctctgtgcagagcctctttgttgtacatgtgaggttctgagacccagagagtagcaggtgttctcaggttgcacagccaaggaggggaggcaccatggccaagaacggccttttcactccaggcaggctggcagggctggcattttggaaagctctcagcagacagaattcacacaccttcctgtagaggccgcacaggattcaagagatggaaactgctggaaggagcactgtcttattgaaagtaatctcaagatcccaggaccacacatctaratgtttcacatcagtctaattcccccaacacacaggcttagagaggagaaggacttattcaaggccacaaagcaagttcaaagcacagctggaactagaatccaagtgtcctgccccctgcctccagctccaaggctctgtctggcctttcctgcagttgttgatatgtctgtctgtcttctcagcctggccagaggccctttgagagcaaggttcatgcttggcttcccagctcccagcacttaggaataaagaaatattggtaagtgaagga

SEQ ID NO: 390188 - DNA, 567 bp, Homo sapiens
gaaggaagcctggagacctctgtgcagagcctctttgttgtacatgtgaggttctgagacccagagagtagcaggtgttctcaggttgcacagccaaggaggggaggcaccatggccaagaacggccttttcactccaggcaggctggcagggctggcattttggaaagctctcagcagacagaattcacacaccttcctgtagaggccgcacaggattcaagagatggaaactgctggaaggagcactgtcttattgaaagtaatctcaagatcccaggaccacacatctaaatgtttcacatcagtctaattcccccaacacacaggcytagagaggagaaggacttattcaaggccacaaagcaagttcaaagcacagctggaactagaatccaagtgtcctgccccctgcctccagctccaaggctctgtctggcctttcctgcagttgttgatatgtctgtctgtcttctcagcctggccagaggccctttgagagcaaggttcatgcttggcttcccagctcccagcacttaggaataaagaaatattggtaagtgaagga

SEQ ID NO: 390189 - DNA, 567 bp, Homo sapiens
gaaggaagcctggagacctctgtgcagagcctctttgttgtacatgtgaggttctgagacccagagagtagcaggtgttctcaggttgcacagccaaggaggggaggcaccatggccaagaacggccttttcactccaggcaggctggcagggctggcattttggaaagctctcagcagacagaattcacacaccttcctgtagaggccgcacaggattcaagagatggaaactgctggaaggagcactgtcttattgaaagtaatctcaagatcccaggaccacacatctaaatgtttcacatcagtctaattcccccaacacacaggcttagagaggagaaggacttattcaaggccacaaagcaagttcaaagcacagctggaactagaatccaagtgtcctgccccctgcctccagctccaaggctctgtctggcctttcctgcagttgttgatatgtctgtctgtcttctcagcctggccagaggccctttgagagcaaggttcatgcttggcttcccagctcccagcacttaggamtaaagaaatattggtaagtgaagga

SEQ ID NO: 390190 - DNA, 574 bp, Homo sapiens
gatagcatttactaccacattgtggagctcctcctaatttgcctgtctatgtgatctttctttcctctttgtcagtatctacagcctctttgacaggcctccaacctrccatggctgacctcactttgcatttttgctgccttctgcccagaattatgtgcccagtgagggcagagactgtggtttattcactcctgttttctccatagccctccagcctactgtttcccgcattctgcataagagtgacagttattgttcgttgtatgtaacaaacttctgatgtcctgttaagcttgaaactcctgtgggacatccaggtggagacccccagaaggaaatgcaatattggtggtcaggagaaaggctggaactggaacaaaggacctggcatataggccaagggatgtggtggccaaagccatgggcagaggagagtccctagggagaaaaacaatctcgtggaaggcttacatttaatagtgaagagagaaatgggaaccaggagaggctggagtggtcagagagttatgaagtaaccaagaggtgaggcttttacagaggaggggtagta

SEQ ID NO: 390191 - DNA, 574 bp, Homo sapiens
gatagcatttactaccacattgtggagctcctcctaatttgcctgtctatgtgatctttctttcctctttgtcagtatctacagcctctttgacaggcctccaacctgccatggctgacctcactttgcatttttgctgccttctgcccagaattatgtgcccagtgagggcagagactgtggtttattcactcctgttttctccatagccctccagcctactgtttcccrcattctgcataagagtgacagttattgttcgttgtatgtaacaaacttctgatgtcctgttaagcttgaaactcctgtgggacatccaggtggagacccccagaaggaaatgcaatattggtggtcaggagaaaggctggaactggaacaaaggacctggcatataggccaagggatgtggtggccaaagccatgggcagaggagagtccctagggagaaaaacaatctcgtggaaggcttacatttaatagtgaagagagaaatgggaaccaggagaggctggagtggtcagagagttatgaagtaaccaagaggtgaggcttttacagaggaggggtagta

SEQ ID NO: 390192 - DNA, 574 bp, Homo sapiens
gatagcatttactaccacattgtggagctcctcctaatttgcctgtctatgtgatctttctttcctctttgtcagtatctacagcctctttgacaggcctccaacctgccatggctgacctcactttgcatttttgctgccttctgcccagaattatgtgcccagtgagggcagagactgtggtttattcactcctgttttctccatagccctccagcctactgtttcccgcattctgcataagagtgacagttattgttcgttgtatgtaacaaacttctgatgtcctgttaagcttgaaactcctgtgggacatccaggtggagacccccagaaggaaatgcaatattggtggtcaggagaaaggctggaactggaacaaaggacctggcatataggccaagggatgtggtggccaaagccatgggcagaggagagtccctagggagaaaarcaatctcgtggaaggcttacatttaatagtgaagagagaaatgggaaccaggagaggctggagtggtcagagagttatgaagtaaccaagaggtgaggcttttacagaggaggggtagta

SEQ ID NO: 390193 - DNA, 430 bp, Homo sapiens
tgtcacactcctctcctaaccatataagtttgaatatattaaaatgtaaaaataaagtttgcatgtaaagtgtcattcaagtagatccctagtaatttatcacaatgtccagcccaatgcagattgagttaaatttgcacratctacagaaagggtttgcttcacatgactgttaaatagagtcaaaggaaataatgctgttagagtaatttgatagcaaacaggcatccttactataacatgtgcaatgcagatgctaacctagctgtggtctcctggcccctggaaaaccagataagcttatctccaaccaccattcacaccctgtcaaaatccaaacctcagcaagacggttgctaagtcctggtgggctcatttcattctcagcttctgcaggtgttctctgttcttcactgcaaaagtagaactc

SEQ ID NO: 390194 - DNA, 694 bp, Homo sapiens
atgaaaacacatgtcatagactgaaagaaaatatttgcaatcacttatctgatgaaggattcatctccaaaatatacagagaatccttaaaacttagcaataaggaaasaaacaaccctattttaaaatagacaaaacgtttgaacaggcatctcaccaaagatatacagatggcaaataagcatataaaaagacaccaaacattatttgtaattagagaactgcaatgtaaagcaacgagataacactacatacctattagaattgctgaaatttagaaaaatgacaataccaaatgctggtggggatttggagcattaggaactttcagtcattgcttgtggaaatgaaaaatggtagagtcaccttgcaagacaattgtttcttagaatgctaaacatagcctcaccacatgagcctgcaattgtgctcctaggtttctagccaattgatttgaaaactatgttcacacaaaacatgcacacgaatgtctattgaagctttattcataattgccaaaaagtggaagcaaccaaaatgtccttgaatatataaaagaataaacaaactgtggtacctccatacaatggaacagtattaacgataaaaatgagctatcaagctatgaaaagacatggaggaactttaaatccatatcaataagtgaaagaggtcagcacggtaatgctatata

SEQ ID NO: 390195 - DNA, 387 bp, Homo sapiens
acttaccctcagcctcctgtgcagcacttctcccagccctgctgggtcttctcaaatccggagctggggagcctctaccacggctccatccagctgctttgggagtcacactcatgcctctctattgcaccaacatggaaggacaggcatcctctccggaaacccacaaatacttccaaaaaaccaaagttaaaaaaaaaatatcctagccactggaattcyttaaagagctacacaaaggagagtggcacaaggccacacgcccctggggggctttgtgagcagtacacctgctcaacagagacccacacttccagcccaggtttatgagagtgggcactgcccttccatcacataatgactccttctgtgctaccttagagccac

SEQ ID NO: 390196 - DNA, 542 bp, Homo sapiens
ctagcaagactttggtacatacactatctgaagagtcctcacgggcccccaaggattggagaaaggaaatcaagccaccatttccagtttggttcctaaatggagccaaagcagaaatagaacctaggaactttgggcttccaagcaaacactgtatttwtgaggctctgcacctcccactgccccagagactgccaaaccccatcagagtgaagaagcaaagtgcagacaatgcaatctgtggcccctggcaaaggaccagggatgtgcaggatgtgctctgcttttaatgcatgtccccttttaattacagaactggtcaagagctctcagctcccacgcacccagctccttataatgctagactgttctacagccatctccagcagcaacagagtaacaaacacaactgctagcctcagctcctcaagggagcaggggttccagctgatatgaccagttcagcaacagttccttgttgccttgcttttttccaaaccagggcctgttgccgtgggtcaaggagatggaccctctgctgt

SEQ ID NO: 390197 - DNA, 550 bp, Homo sapiens
atccaatctgtgtttttgtaaaaaatgatactgaaactttataacacagtgcccctcctccttttccaaaaggcctgctttaatttctgagtggattccaagctgatgaccacctgttggacatactgtggaggagactctctcactgggcagaagaccagactacttacacaatcaagcctctcctaatgccaggattctatcacactagaatccatttcacagagaaagcagtgagcactccacttattatgtagatagcaagttaccagaccaatgactctgaacttcagattatagacacttgaggtttacagtatctttttcaaataaccaagaactccactgtgaatcaagcagtctgaattawtgatgaatagtttcttgagtacataagtgccattgtaattaataacacaaagttattaaaaatttagcaaaacccaaaaattacatgatcatctcaattgatgcagaaaaagcatcagacaaaattctataccctttcatgattttttaaaaaacacacacacaaaataaataggactag

SEQ ID NO: 390198 - DNA, 550 bp, Homo sapiens
taattccattcttaggcatttactcaagatataggaaaactatgttcacacaaagatttgtgtatgaaagttcattagaagctttgtctgtaatagaaaaaaaaacagaagtctatcaggaggtaaatggataaataaattgtggtatatccatacaatggaagagtattcagcagtaaaaagaaacaaactgttgattcatgtagcaacatagacgaatctcgaaaatatcatgctaggcaaaagaagccagacacaacagaggacgtgctrtgtaattctatcaggctctagaaaagagggtatggcctgttaagtggcagaaatcatgccattcttgaccttggctgtggtggaggtgagattgattgagaagaggcacaaaggagctttctggggtgatggaaatgctctccattttgattgtggaggtggttacatgactgtattacttgtcaatatttactaacctgtatatttaaaatgagtacattttattgtatgtaaagtatacctcaatacagttgacttcaaaagtgtttttcttact

SEQ ID NO: 390199 - DNA, 542 bp, Homo sapiens
ccaccctcacgacctcacctaaatctaatcatctccycaaggccccgcctcctaagaccatcacattggggcataaggcttcaacatatggattttgagaggacgcaaagattcattccgtaataccttgaagctcttttcagccttatatcatcacttgctggaaggagccaggcagcagggatgatggttctggggagcgttatggtttcctctatgcactctctcctttacaaagaaccctaagcagaatcattaaaattaatccccatcttaagtgtacctcttaattgtaccagaacacactttaaaatgggcgagtcttctccctggaatgtacgttttggattaggatcagttttagacatgtcatttctttagctaaagtgaagggaaaacaaatttttatttaatcttccataagatctttcctcagtgtcttttacttcttctcctgccatcagattcttaccttgattgaaaagccatgttaagtgcaaggcaaattctttacgtctttatacagagattaacaatctctg

SEQ ID NO: 390200 - DNA, 542 bp, Homo sapiens
ccaccctcacgacctcacctaaatctaatcatctccccaaggccccgcctcctaagaccatcacattggggcataaggcttcaacatatggattttgagaggacgcaaagattcattccgtaataccttgaagctcttttcagccttatatcatcacttgctggaaggagccaggcagcagggatgatggttctggggagcsttatggtttcctctatgcactctctcctttacaaagaaccctaagcagaatcattaaaattaatccccatcttaagtgtacctcttaattgtaccagaacacactttaaaatgggcgagtcttctccctggaatgtacgttttggattaggatcagttttagacatgtcatttctttagctaaagtgaagggaaaacaaatttttatttaatcttccataagatctttcctcagtgtcttttacttcttctcctgccatcagattcttaccttgattgaaaagccatgttaagtgcaaggcaaattctttacgtctttatacagagattaacaatctctg

SEQ ID NO: 390201 - DNA, 542 bp, Homo sapiens
ccaccctcacgacctcacctaaatctaatcatctccccaaggccccgcctcctaagaccatcacattggggcataaggcttcaacatatggattttgagaggacgcaaagattcattccgtaataccttgaagctcttttcagccttatatcatcacttgctggaaggagccaggcagcagggatgatggttctggggagcgttatgrtttcctctatgcactctctcctttacaaagaaccctaagcagaatcattaaaattaatccccatcttaagtgtacctcttaattgtaccagaacacactttaaaatgggcgagtcttctccctggaatgtacgttttggattaggatcagttttagacatgtcatttctttagctaaagtgaagggaaaacaaatttttatttaatcttccataagatctttcctcagtgtcttttacttcttctcctgccatcagattcttaccttgattgaaaagccatgttaagtgcaaggcaaattctttacgtctttatacagagattaacaatctctg

SEQ ID NO: 390202 - DNA, 592 bp, Homo sapiens
aatatttccattaaccccctttcttgtcctcctttgtagccagtcctccttttcttgtcctcctttgcagccagtcttcttcctccatcccaggcccagacagtcattgatctgcttcttgccactgaagtgttgccttttctagaatttcacataagtggaaccatacaatatggaatctttggtttcttttattaatgtgttaataaggtgaatgatataaattgattttcaaaggcaaaaataacattgccttcctaggataaaccacacttggtcataatgkattgttatccttaaattgatggatttgatttgcgaattttttaaagaatttttatctatgttgaggaaggatattggtctgcagtgtccttttcttgtaatatgtctttggttttgatagcagagtaatgctggacccatagcatttgaattaggaagtatttcctcctcttctgttttctggaagagtttatgtagacttgggtttatttcctccttaagtatttttgtggaattcattaaaatatcttgaatctttttttttttctttttggaatggtttctgataatgaattacatttattta

SEQ ID NO: 390203 - DNA, 451 bp, Homo sapiens
tcagttctgagttttgagaaatgcatagtcatgtaatcaccacaataatcaggttcacaatagttscattaccacttccccaaatttcctcatgctgttttttgtttttgtttttcttttggatggggtcttgctctgttgctaagctggagtgcagtggtgttatctcagctcactgaaacctccaactctctggttcaagcaattctcctgcctcagtactctcagctactcagctactcttctcctgagtagctgggattacaggcatgcactgccgggctcagctaatttttttttgtatttttagtagaaacagggtttcaccatgttggccaggattgtcttgatctcctgacctaacaattcacctgcctcagcctcccaaagtgctgggattacaggcgcgaaccaccatgcctggccatgctgctcttttttagtcacctcc

SEQ ID NO: 390204 - DNA, 512 bp, Homo sapiens
taacttctccaggctccacccttgccagattatttgaaatggcaaaaactgtataaaacctaaatgacgattacaaaggactgattaaaaaattatggtacattcatataatggaataccgtccatttgtttaaattacaaagaaacatctaaagaactaaaagcagaactaccatttgatccagcaatccagctactgggtatctacccagaggaaaagaagtcattatacaaaaaagatacttgcacacccatgtttatagcagcamaattcacaattgcaaaaatgtggaacaaacctaaatgcccatcaatcaatgagtggataaagaaactgtgatacacacacacacacacaaaatgaaatactactcagccataaaaaggaatgaattaatggcattcatagcagcctggatggattggagactattagtctaagggaagtaactcaggaatggaaaactaaacgtcgtatgttctcactcataagtggaagctaaactatgagg

SEQ ID NO: 390205 - DNA, 592 bp, Homo sapiens
tctgccatgagaacaaacctggttagtctgttatcctggaactaggctgagtcatcccagctgaaccaccagctgatgggagacacatgagcaagtcccatcaagctcagctaaatctattcacgtgagcagaactacccagctgacccagagactcatgaagaaatcataaatactacytgtttaaagctactagatttggtgatagtttattacacaacaataactattaattaatgatgtggaacttcaagtggaaagtttgtttcagagcactcattgtggtacaaagtgttttctgattttttagagagtgactttatggtgtttgtagaaatgatatgtattataaaaaagtttaagcaatatgagtaccacaaaaaagtataaaattacaccacctagttacatatttactttatagctaaatatgcatatttcaaaccatatattatgtgaaataatatatcagtttataaatttaaatgttattctctcatattttaagaaataacttaaaccctttatttgtatatttgatattaataattgttcttgattattagagccgctttttgagttgtctaacagt

SEQ ID NO: 390206 - DNA, 496 bp, Homo sapiens
tttggtgatttcatgatttttgaaaataatctcttgttgttattgtaatcttatttactgacaactatggaattcttattctcagggttcctatggagtggtggattgtagctgaccctytggcaatttgacttacaacactctaattttatgatatttcttgttatagatgatagtcctaaattatctatacaatttgatttatgaatatccagtatttggaaactttggggaagaaactgaatctaaaatcagagaaagcagatgtatatgcctatccagaaaagccagaatgagaattcaaatttgaggacaaagtcatttaccaaagtggaaactagattaatacggaaattggtcagcagtaaatgaggagattcaggacaattcaaatttaaatttgtatttaagatttatatttatggataaaagtggagcgtgtgtgtgtgtttatatttatggataaaagtggagcatgtgtgtatgtgtgtgtgtg

SEQ ID NO: 390207 - DNA, 594 bp, Homo sapiens
gtcaatactcttcaaaagtgtcaaggtcataataaagaaggaaagctgataaactgtcagactggaggaaaccaagaagacataactggtgccaccttggattagctcctagaacaaacaaaagacatgaatgaaaaccagtgaaattataaatgaagtctgtagttcagttaatagtattgtatctatattaatttcttgattttgataaaygtaccatggtaacataaaatgttaacattaacaaaaactggctgaagggtatatgagaacactctatgctatctttctaagtcttctatacatataaaattattcaaaataaaaagtttaaaaaatgattggacttatttaattggtaataataaatggcaaggtagtaacaatgtgtaaaaaatactgattaataaatatgcatagaatatgaaaattaattcttttcattttcaaatagaaagtgacaggccaaaatccaggtaaataaattgatttatctgacttacttatataaattagaattgaaattctctgcacatttttattaagactaaaagcctgaaaataatcctgtccttggtttccgttagaagctta

SEQ ID NO: 390208 - DNA, 594 bp, Homo sapiens
gtcaatactcttcaaaagtgtcaaggtcataataaagaaggaaagctgataaactgtcagactggaggaaaccaagaagacataactggtgccaccttggattagctcctagaacaaacaaaagacatgaatgaaaaccagtgaaattataaatgaagtctgtagttcagttaatagtattgtatctatattaatttcttgattttgataaatgtaccatggtaacataaaatgttaacattaacaaaaactggctgaagggtatatgagaacactctatgctatctttctaagtcttctatacatataaaattattcaaaataaaaagtttaaaaaatgattggacttatttaattggtaataataaatggcaaggtagtaacaatgtgtaaaaaatactgattaataaatatgcatagaatatgaaaattaattcttttcattttcaaatagaaagtgacrggccaaaatccaggtaaataaattgatttatctgacttacttatataaattagaattgaaattctctgcacatttttattaagactaaaagcctgaaaataatcctgtccttggtttccgttagaagctta

SEQ ID NO: 390209 - DNA, 612 bp, Homo sapiens
taattcttttcattttcaaatagaaagtgacaggccaaaatccaggtaaataaattgatttatctgacttacttatataaattagaattgaaattctctgcacatttttattaagactaaaagcctgaaaataatcctgtccttggtttccrttagaagcttattcatacagttgggcttaggaagctactaatttcttcaaaaatcctcttaactctgattttatacttctaattaaagtgcattataaacagacaaaaacgttgtttgtcatggcaaagaatcacataaccatcaaaatctttgtgtcagtgtcaacatttcacaaaattggaagagattgatagtgttgaaaaatgtttatattcaagtttttcacatagctttaaggttatatttgtaataaatttggatgcctggattaatactttgcacctttcattacaaaacagtgatgttagtgaatgatgttatagcaacaccagcagtttcattgcttttcatttcaaacaaaaattttgtcttattttaaagtatttgttattaaattatagcattagctaatatttactgagcacctgggtccaaatactgcaatatttgcttcatctg

SEQ ID NO: 390210 - DNA, 581 bp, Homo sapiens
taggaccttcagaataatgtcgaattgaaggtgacagagcatatattattgtcttactcctaccatagatagaaagggctatcaacatcgagcaggattctagctataggttttttataggtcaccttatcatgttgaagaagcttctttctatttctgcttgctgagagttgttattttgaatgattgttgaactttataaaaacaattaatgctcctgttaaaattatcatatagctctttttctgtattctagtaatataataaaatctattatttgatatatggttgctaacaatcttcattcccyggtaaactgcacttagtcattatgtattatcccttatatatattgttggatttgatttgctaaaattcttttcaagattttagatctgtgtttatgagagatacttatctgcagttctctgcttttataatgtctttgtctgattttgatagcaaggtcatgctgaccacataaaataaaatggaaacttcctcttctatttactgaaagagttttttgtgtgaaattagtagtatttcttcctaaaatttttgatagaatttgaagtgaa

SEQ ID NO: 390211 - DNA, 581 bp, Homo sapiens
taggaccttcagaataatgtcgaattgaaggtgacagagcatatattattgtcttactcctaccatagatagaaagggctatcaacatcgagcaggattctagctataggttttttataggtcaccttatcatgttgaagaagcttctttctatttctgcttgctgagagttgttattttgaatgattgttgaactttataaaaacaattaatgctcctgttaaaattatcatatagctctttttctgtattctagtaatataataaaatctattatttgatatatggttgctaacaatcttcattccctggtaaactgcacttagtcattatgtattatcccttatatatattgttggatttgatttgctaaaattcttttcaagattttagatctgtgtttatgagagatacttatctgcagttctctgcttttataatgtctttgtctgattttgatagcaaggtcatgctgaccacayaaaataaaatggaaacttcctcttctatttactgaaagagttttttgtgtgaaattagtagtatttcttcctaaaatttttgatagaatttgaagtgaa

SEQ ID NO: 390212 - DNA, 421 bp, Homo sapiens
atttgcaggaacatgaatggagctagaggccatcatccatagcaaactaacacgggaacagaaaaccaaatactgcatgttattgcttataagtgggagctaaatgataggaacacatggacacaaagaggggaacaaccgacagcaggttctacttaarggtggagggtaggagacgggagaggatcataaaaaataatatatttggtccaaggcttagtaactgggtgatggaataatctgtgacaacaaacccctgtgacacaagtttacctatgtgacaaatctgcacatgtacccctgagcctaaaagttaaaacaaaagattataaaaataactcagcttttagaatgtgtttgtaagagataacaaaaccctagcaaaaaacaataaggaatacgggatagtagtaatattcaa

SEQ ID NO: 390213 - DNA, 513 bp, Homo sapiens
aagtgaaaccgtggataaggaggaagtactgtatcgtaaatttttccaatcatagctattctatgaggkgtgtagttgtatctcattgttttagtttggatttcctacagaatagtgatagtgagcagttaaaaatctgcttatctatcatatgcatatcttctttttgaggtctctgttaaaatattttgcctctttttaaattcagttgtttccttattgttcaattttgtcttttttttgtatattttggatatgagagtcatttgtatattttggatagatgtcctttattagatatgtatttttaaaatatttcctctcagtctgttacttgttttattattctcctaagtgtcttctgcagaacagactttgtaaatttaaaagactaacatcaagtttttctttcatgcttttggtgtatataaaaactcatcaccaagcctaaggccatgtgggttttctcctatgttttcctctcaaaggtttgtagttttgcattttacattt

SEQ ID NO: 390214 - DNA, 578 bp, Homo sapiens
tgatttataacttcaccagcaccttgaactctgtatttccccacctccctttccttcccctacaggcttccaatccccattttatgttttcgggcgttcgttattacttacaataatcttcaaagtatgtgtagggttggaatccattatgactaagtcctattttggtgcttagtctgtgacagagaagctttggctggttgaagaaatttgaccttggtgtgtcctattcaaagtataaaataaggctgggcagtggttcacatctgtaattctagcacattgggaggctgaggtgggaggattgtttgatgccaggagttggaggctgcagtgagctaaaattgcacyactgcatttgccaggtgacttggagctaaaattttttcgactccagtgagacttgctgacataaaaagagaaaatatgctttaagcacctagtgcttatgcatggcacatagtagacactcattaaatgaatggttctttctctttccccatagatgggacagtgtgcaccaaacatctgaagaccagttgcttaagtgaaaaagaatgacctgatgtatttcagat

SEQ ID NO: 390215 - DNA, 508 bp, Homo sapiens
agcaactaactcttcacagcaataaaaatgaatgagcaacatatatgaattttagaaacattattaagggagaaataagcaagtcatggaagactacatacagattctgtttaagttttaaaatagacaaaacaacattatatttcaacctcatcgtctcatgtgcaaattcttgctaaaatacttagctgcacttgacaatgcccccccccgtacagacaacaaactacaccggatatctgacaactccagaagctcaagatcaagggcaattagataagaawaattaaagcaacagtagaagacataaccattgttcaagacacttggagaattccagaactgatttttggtagtaaatgtccaccgaatgcacacagcatcagcagacatcagccaaattttgtttctttctgctgctcattcagtaaaacaaaaacaaaaagaaattcaagtctctaaagtgagcaacttcacagtgtttggttaatgaaatgtgcagttaaac

SEQ ID NO: 390216 - DNA, 508 bp, Homo sapiens
agcaactaactcttcacagcaataaaaatgaatgagcaacatatatgaattttagaaacattattaagggagaaataagcaagtcatggaagactacatacagattctgtttaagttttaaaatagacaaaacaacattatatttcaacctcatcgtctcatgtgcaaattcttgctaaaatacttagctgcacttgacaatgcccccccccgtacagacaacaaactacaccggatatctgacaactccagaagctcaagatcaagggcaattagataagaaaaattaaagcaacagtagaagacataaccattgytcaagacacttggagaattccagaactgatttttggtagtaaatgtccaccgaatgcacacagcatcagcagacatcagccaaattttgtttctttctgctgctcattcagtaaaacaaaaacaaaaagaaattcaagtctctaaagtgagcaacttcacagtgtttggttaatgaaatgtgcagttaaac

SEQ ID NO: 390217 - DNA, 598 bp, Homo sapiens
cactaatttcaaaaaattctttttacttctataatgcccttccctccttgttctctctgatggtttacaattagatttatttctctgtaatacacaattaacttatgataattaagcccttattttccaagacatattgtttcatcttgtttttcatctttaaatctttttgtttaacacttaaaagagctttaactttttttcaagcaaattcttttacttcaaatacytaattctctttctttaaagatgtagttaatgcatgccttccgtatttttcctctctttttcctctgtactcaaaaactttaccaactgccttaagaggagtggcttcaaggttgatagtggaaacactaaatcttgaaatggcagcacatttgtcattgatgcacaatggtgccatcaatgtagagcccatgttatgtagaaatctcataccattggttttggataacagttctctagaaagaattgccttatggctacctcagaatactcagcaggctttttgcccagagctgctaaagcatttaacttgatacaactctcctccaaacactgtcaaagctcccagatgttctttgccactcactgg

SEQ ID NO: 390218 - DNA, 598 bp, Homo sapiens
cactaatttcaaaaaattctttttacttctataatgcccttccctccttgttctctctgatggtttacaattagatttatttctctgtaatacacaattaacttatgataattaagcccttattttccaagacatattgtttcatcttgtttttcatctttaaatctttttgtttaacacttaaaagagctttaactttttttcaagcaaattcttttacttcaaatacttaattctctttctttaaagatgtagttaatgcatgccttccgtatttttcctctctttttcctctgtactcaaaaactttaccaactgccttaagaggagtggcttcaaggttgatagtggaaacactaaatcttgaaatggcagcacatttgtcaytgatgcacaatggtgccatcaatgtagagcccatgttatgtagaaatctcataccattggttttggataacagttctctagaaagaattgccttatggctacctcagaatactcagcaggctttttgcccagagctgctaaagcatttaacttgatacaactctcctccaaacactgtcaaagctcccagatgttctttgccactcactgg

SEQ ID NO: 390219 - DNA, 598 bp, Homo sapiens
cactaatttcaaaaaattctttttacttctataatgcccttccctccttgttctctctgatggtttacaattagatttatttctctgtaatacacaattaacttatgataattaagcccttattttccaagacatattgtttcatcttgtttttcatctttaaatctttttgtttaacacttaaaagagctttaactttttttcaagcaaattcttttacttcaaatacttaattctctttctttaaagatgtagttaatgcatgccttccgtatttttcctctctttttcctctgtactcaaaaactttaccaactgccttaagaggagtggcttcaaggttgatagtggaaacactaaatcttgaaatggcagcacatttgtcattgatgcacaatggtgccatcaatgtagagcccatgttatgtagaaatctcataccrttggttttggataacagttctctagaaagaattgccttatggctacctcagaatactcagcaggctttttgcccagagctgctaaagcatttaacttgatacaactctcctccaaacactgtcaaagctcccagatgttctttgccactcactgg

SEQ ID NO: 390220 - DNA, 598 bp, Homo sapiens
cactaatttcaaaaaattctttttacttctataatgcccttccctccttgttctctctgatggtttacaattagatttatttctctgtaatacacaattaacttatgataattaagcccttattttccaagacatattgtttcatcttgtttttcatctttaaatctttttgtttaacacttaaaagagctttaactttttttcaagcaaattcttttacttcaaatacttaattctctttctttaaagatgtagttaatgcatgccttccgtatttttcctctctttttcctctgtactcaaaaactttaccaactgccttaagaggagtggcttcaaggttgatagtggaaacactaaatcttgaaatggcagcacatttgtcattgatgcacaatggtgccatcaatgtagagcccatgttatgtagaaatctcataccattggttttggataacagttctctagaaagaattgccttatggctacctcagaatactcagcaggctttttgcccagagctgctaaagcatttaacttgatacamctctcctccaaacactgtcaaagctcccagatgttctttgccactcactgg

SEQ ID NO: 390221 - DNA, 602 bp, Homo sapiens
gaataagtgtgggcaaagcaaacacagattttgttaaacttgatgattttgtactctayggcttttgcagggcagtttgctgaatccagatttcctgaagaagatgacattttctttagtgggacttagcccaagaaagcagttcaaaatgattagtgcagatcaagaaaagaaagggtattttagtattctcatgtctctaatttaattccaaaatgtgagtcctgtaccccccccagcacggttaaatgctttctgtagcacgatgaagggtagtaggagggaattcaacctgccagagccacacagatttatacctcataatagctaccaatgcgccgcagtaaaattttacgtttcagctaaattactaatgactttcaggcccgtgccagaaattttagagtaggcttataaagggagatgagagaatatacagtcaagcattcttaagagtggtgtgtgtgtgtgtgcgcgcgcgcatatgcgtgtgtttttcatttgggattatgggacacgtgctcatcattttttgccatcttgattaaatgtaattaggttctggcaagccacccttcccctctcttggatgctgggggtgt

SEQ ID NO: 390222 - DNA, 602 bp, Homo sapiens
gaataagtgtgggcaaagcaaacacagattttgttaaacttgatgattttgtactctatggcttttgcagggcagtttgctgaatccagatttcctgaagaagatgacattttctttagtgggacttagcccaagaaagcagttcaaaatgattagtgcagatcaagaaaagaaagggtattttagtattctcatgtctctaatttaattccaaaatgtgagtcctgtaccccccccagcacggttaaatgctttctgtagcacgatgaagggtagtaggagggaattcaacctgccagagccacacagatttatacctcataatagctaccaatgcgccgcagtaaaattttacgtttcagctaaattactaatgactttcaggcccgtgccagaaattttagagtaggcttataaagggagatgagagaatatacagtcaagcattcttaagagtggtgtrtgtgtgtgtgcgcgcgcgcatatgcgtgtgtttttcatttgggattatgggacacgtgctcatcattttttgccatcttgattaaatgtaattaggttctggcaagccacccttcccctctcttggatgctgggggtgt

SEQ ID NO: 390223 - DNA, 547 bp, Homo sapiens
cttgcaacatcctctgctcccttcatcccatgcttgagggcctgggaataatttcactgcttctctgccaagttgggaccttggaatcttagccggattgtctctgggtagatttgtgtctgtatgacacacagcatttcttctctaggaccctaccacctacccagggcttcctctctgagattacaacctgggaaaccatagggtatggccagctactaggaccttacaaatgcctccactgtcctcacttcccctccacctctcctccttttccaccacaccagggaaactttttctaacctaaaacagaagttctgcagtctttcatgatatgtctcccacataccctgtccttgcctggtgttttcttcattcctctgagggttttagcttttgaaatccaaagccctaaagactttayatttttttctctctgattttagaattagaacattcctcctcagtgacaatacatgcagaagaccttagctgcttaaaatgtggcagaggcaggaggaagagagaaaacacattggtaatattt

SEQ ID NO: 390224 - DNA, 569 bp, Homo sapiens
gaggcaggaggatcgcttaagacccgcctgaacaacctagtgagaccctgtctctacagaaaaaaatttaaaaatcaataagataaaaattttttttttaaaaaaaagaaggaaaatctttgtcaaataaagacatcaacagcatctgacccaagaccaagggccagattccttcccgcagaatccccagggatctttttcatactattagatgagatgaaacatatttagccaatatgtgggtttcagccaacgtttcataaaaagacgagtccattaaatgtaacatcaaattagtcacttataggtaatagaataatcatccacaaaacaatgacacttttagggaacaaccattggctaaaaaaaaaaagaagaagaagaagaaagaaagaaaatttaaaggtcatttcatttcgactgaaaagctgaattgtaaaaattatrgttggcaaagtgatatctactcaatcaaaataaaacataaaatgatccttactaggccaaaagcagctgtccaatcataataaacaaaattcctcagctgatgtctttttctggacccatgt

SEQ ID NO: 390225 - DNA, 471 bp, Homo sapiens
gcagatgttgggttttcaatggagaaaaaagacagtacattttaggcytacttttcttccttgggtctaattgaaaatttggttcattgtaagaactcacgtggtaggcaagagcatctatcccagttcttcttttaactgtcaaaatagagtttccatcagttgctgcctaagggagctatgacctggatggaaaatgccacaaacgattaaagcaaactttagttttttggctgccccagcatcttcccctttttctcctgctgaggagttggttcactgtggtcttgtttggaatattccatgaagaatactgacaatgtatgggattcgtcatggtatgaacaattttcatggatggaaatacaaaggccagtgttaaatgagagcctttatagaggctttgaacagtaataaattccgatgaacagtcccccacccctggggaccatcttaatctttttcaggcac

SEQ ID NO: 390226 - DNA, 471 bp, Homo sapiens
gcagatgttgggttttcaatggagaaaaaagacagtacattttaggcctacttttcttccttgggtctaattgaaaatttggttcattgtaagaactcacgtggtaggcaagagcatctatcccagttcttcttttaactgtcaaaatagagtttccatcagttgctgcytaagggagctatgacctggatggaaaatgccacaaacgattaaagcaaactttagttttttggctgccccagcatcttcccctttttctcctgctgaggagttggttcactgtggtcttgtttggaatattccatgaagaatactgacaatgtatgggattcgtcatggtatgaacaattttcatggatggaaatacaaaggccagtgttaaatgagagcctttatagaggctttgaacagtaataaattccgatgaacagtcccccacccctggggaccatcttaatctttttcaggcac

SEQ ID NO: 390227 - DNA, 587 bp, Homo sapiens
atagcaccacctgtttggtattagcagaagaatgaaactttaagaggacaggtttgggttggggtgggggaaggttaatggttattcccagagtctagtgacaacaaaaatgaatgactgacataaaagtctcaacttttgaggtgtgttaagccaactttggggtgcatctgtagacaaatctgtggctgtttctccaaagaggttttcaggaggtttaggatttatatatttccttaaagggactataaggcaaatggttgtattcccgtgagacattagattgtgcccagtaaatctatattttacacaagataaggtgaatgtttgaagagaaaaagaaagtattaataacagaagagccacttctgtagacctctctggataggyggaggaaatgagtcttgtcttcactctgcacttgcaaagataagattataatagatattatcagtgtggaattgaacagactttagttttaggagctagacttagattgcagatcatagatctaaagttacaaatgtcaagtccttgtttatgggaggccagcaaagaatttacttatgaaagatctgtggaagcag

SEQ ID NO: 390228 - DNA, 460 bp, Homo sapiens
acttttctttctctgctgagatttttatatttttttgtttgttttaagagaattcataattgattgttgaagcatttttatggtggtttcttaaaaatttttgtcaagtaattcctatatatgactcatctcaatgttgatgtcagttgattatttttcttattgaagttatgattttcttggttactaatatgagattatttttcattctatcctgttcatttttatctattctgttaggagtctctgggacccatttaaatattttattttagcaagcagttaccctgyttagggttagcaggtgagtcttgacatatttttgtgggctttgattccactgaaagtttacttttcagtctttgcaatgttattttggtctgattggcttatttggttccactgaggctgttactgttccctgcttgcttatttcttgaggaagaagaagacattttca

SEQ ID NO: 390229 - DNA, 609 bp, Homo sapiens
gttgatgttgaccttgctcacctggctgaggttttgtttgtcaagtttctccactataaaattgcccttttttcctgtttccatgctgtactctttagaagaaagtcactctatgcagcccacaattacagagtaggaagttatgctccacctctttgagggctatatatatatatgtatgtaactatttggaattcttctgcacagaagatttgtctcttgtttattcgaccatttacttatatcagtatggatccatggatatttattttatacatagggttataatccaatgttactttatttattttcttgctcaaattattccagctttggacattgggggctctttcagttggctcctatgtcactatgacatacccccatcaatgtgggttttttgcttttatttttattacttccttgttttctagcattatcagatactccagaatcatcttgtatatttctgcccagttytagaacgagccctctccccttagaatccccctaggaatcctttttttgaaaaatggtattagaaaccaatatctgggcactaagtatgctcattactactagggtctttctcagccaacagagcaagga

SEQ ID NO: 390230 - DNA, 533 bp, Homo sapiens
gttcaatcatgagcccatggatttcacagaagactgagggctactgatgcctaatgtacaaatatgcagctgttcataagccagccatgtgaaaaaagaataggaagtgtccaattctctgaaaggtaaccacgaagaagtggacttattcagaccacttctgggttactccagaaagtttgcaagcatgtaaatgacaaactctctagcaactacaactatctagaaatgaaactggctgccctaacaaagggaacaagcgctgcaccagaagaagtgttcaaatacaatccagataaccaacacctgataaaactttatttcacacaagcagtttgcacaaaaggtgcaatggcagccatggctgccatttatagagtactcattacacactacactcttgtgcacacagataaactcacacagcttgtaagggatgctacgttgcagaaccacaactggaacacaggttgactcctcaatccacgatcttagtcactataatctaaatrtatgaaacacgtttgtttttt

SEQ ID NO: 390231 - DNA, 608 bp, Homo sapiens
gtacctctcagaattatcttcaattctttttgaataatccagccaaaatcccccaaaattcttcaatgctttgcatgtcctcagcctccttttaagtaacccattttaaaaaggtttctatcactcacttcttacctaagagagacctgctgcgcggtccttcagtgagcctaaccactaaaggcatcggaatgctcaagactccacagcagtaagaggcacagaccagctgcaagagaaagcagctgcagagtgaccaraagctgattaggggagctcagtctgtggagaagcttgttggccagtgaagtgagtgtccacagatttcctagcccctaacctgccttctacctagcccaggaggcgtgagtgccaatgaaagacaggaaaagtgcacagttcccaggaaaagtcccctgggaacacccagcatgaccccactagacccactagaccgcatccctcagaacctggccttcctaacttcctcagcaggacctggccctctctaccaggaagtgctccaaggagctgcggtgttttatgtctgaaaatcactgcattcaactgcagtacctccgctgtaccctgtgtcttgttcaccacct

SEQ ID NO: 390232 - DNA, 656 bp, Homo sapiens
gactcagcagcatggcagtgtaggcatttcagtcttaggccagagattagagcacctgctctggagtggggtaggggcctccatagccagaattgtggaaagcacctcagctgtagggctagaattgtgctttcctccattgcaagcctggggcaggaggagagctgctaagttgcactttctcctgggcagcaacacttgcagccaaggccagcttggcgacctggaactgatccacctgtgtcattgttgggtgccccactctgctctactgatactgtggtatgacagggccgcctctgctccacycccaggcagaaatccagacatttggagcacctgtttgcctggaccagcagactgagccaccccacccctcctggacacagatcatggtgaagtgaggctctctctgctccacacccaggcaaatctacaggcattcagagcatctgcttgtctggttcagcagcctgagccaccccagtcttcctggacatagactgtggttcaagggtatcctgtctgttccatgcccaggcagatttccaagcatctggaatggcaactcttctagattagaagtttaagccatctcccattcctgtgtagagaacatggagcccagatggtttcccagctgcatgcctaggcac

SEQ ID NO: 390233 - DNA, 656 bp, Homo sapiens
gactcagcagcatggcagtgtaggcatttcagtcttaggccagagattagagcacctgctctggagtggggtaggggcctccatagccagaattgtggaaagcacctcagctgtagggctagaattgtgctttcctccattgcaagcctggggcaggaggagagctgctaagttgcactttctcctgggcagcaacacttgcagccaaggccagcttggcgacctggaactgatccacctgtgtcattgttgggtgccccactctgctctactgatactgtggtatgacagggccgcctctgctccactcccaggcagaaatccagacatttggagcacctgtttgcctggaccagcagactgagccaccccacccctcctggacacagatcatggtgmagtgaggctctctctgctccacacccaggcaaatctacaggcattcagagcatctgcttgtctggttcagcagcctgagccaccccagtcttcctggacatagactgtggttcaagggtatcctgtctgttccatgcccaggcagatttccaagcatctggaatggcaactcttctagattagaagtttaagccatctcccattcctgtgtagagaacatggagcccagatggtttcccagctgcatgcctaggcac

SEQ ID NO: 390234 - DNA, 540 bp, Homo sapiens
ggacagtataaagagatccagatcatcctagtgagaggccagactctctgaaagcaagaaattaagaacaatgttttttttccttgtctttgtttttctacttataataggatggaaacggctgtttttctgtccttctaagaggatatcttctttattccaaacttttggaatgttgtaaaatctctcctggagccaaataaccctgtgtctccaagtttttatgacctatagctgtctccaaattctggaacmtcatatcttttgacatatgaataccaaaacctagtcttccttttaccctaggacttaacctaggaacctagtaatctaaggattttaaaaatttgaccctcttaggggagtaaaagaagtttttctattgtttcaaatcagagaaattaactggacaaagggctacagatctaattctctcagtgtgtgaagagtctcaagaagctagtgctttgagagaatccatgagaaacccagggacctttaatatctcctcattattatttgcatagcatactaccaggg

SEQ ID NO: 390235 - DNA, 511 bp, Homo sapiens
attcattttgtaacctaagattttatgaattcattcatcaaatggaagagtcttttggtggaattcttaggcttaactaagtatatgcttacatcatcagcaaacagagataatttgacttcctcttttccagttyggatgccctttatttcttcctcttgcttgattgctctgggtaggacttccagtactatgttaagtagaagtggtgaaaatgggcatccttaacttgttctagccctcagtgggaatactttcaacttttccccattcaatatgatgttggccatgggtttgtcatatatagcttttattattttgagatatgtttattctatgtctagtttgtttagggtttttatcataaagcaaagctggattttactgaatgattttatgcatctattgagatgatcatatgtatttggtttttaattctgtttatgaaatacatcacatttattacgttgtgtatgttgagtcatccttgcatccctgggatgagactcac

SEQ ID NO: 390236 - DNA, 541 bp, Homo sapiens
ttcattttgtaacctaagattttatgaattcattcatcaaatggaagagtcttttggtggaattcttaggcttaactaagtatatgcttacatcatcagcaaacagagataatttgacttcctcttttccagtttggatgccctttatttcttcctcttgcttgattgctctgggtaggacttccagtactatgttaagtagaagtggtgaaaatgggcatccttaacttgttctagccctcagtggraatactttcaacttttccccattcaatatgatgttggccatgggtttgtcatatatagcttttattattttgagatatgtttattctatgtctagtttgtttagggtttttatcataaagcaaagctggattttactgaatgattttatgcatctattgagatgatcatatgtatttggtttttaattctgtttatgaaatacatcacatttattacgttgtgtatgttgagtcatccttgcatccctgggatgagactcacttgattatagtgaattgtctttttgatatgc

SEQ ID NO: 390237 - DNA, 511 bp, Homo sapiens
attcattttgtaacctaagattttatgaattcattcatcaaatggaagagtcttttggtggaattcttaggcttaactaagtatatgcttacatcatcagcaaacagagataatttgacttcctcttttccagtttggatgccctttatttcttcctcttgcttgattgctctgggtaggacttccagtactatgttaagtagaagtggtgaaaatgggcatccttaacttgttctagccctcagtgggaatactttcaacttttccccattcaatatgatgttggccatgggtttgtcatatatagcttttattattttgagatatgtttattctatgtctagtttgtttagggtttttatcataaagcaawgctggattttactgaatgattttatgcatctattgagatgatcatatgtatttggtttttaattctgtttatgaaatacatcacatttattacgttgtgtatgttgagtcatccttgcatccctgggatgagactcac

SEQ ID NO: 390238 - DNA, 511 bp, Homo sapiens
attcattttgtaacctaagattttatgaattcattcatcaaatggaagagtcttttggtggaattcttaggcttaactaagtatatgcttacatcatcagcaaacagagataatttgacttcctcttttccagtttggatgccctttatttcttcctcttgcttgattgctctgggtaggacttccagtactatgttaagtagaagtggtgaaaatgggcatccttaacttgttctagccctcagtgggaatactttcaacttttccccattcaatatgatgttggccatgggtttgtcatatatagcttttattattttgagatatgtttattctatgtctagtttgtttagggtttttatcataaagcaaagctggattttactgaatgwttttatgcatctattgagatgatcatatgtatttggtttttaattctgtttatgaaatacatcacatttattacgttgtgtatgttgagtcatccttgcatccctgggatgagactcac

SEQ ID NO: 390239 - DNA, 267 bp, Homo sapiens
gatttgtttttgtggcctatcctatggtgtatcttggaggctgttctatgtgttgatgagaagaatgtgaattctgcrgtttttgggtacaatgttctgtaaacatctgttaggtccatttcttctggactgcaacttaagtccagtgtttttttgttgttattgttgacttcctgcttcagtgatctgtctagtgctgtcagtggagtgttaaagttcctcactattattgtgttgctgtctattccttttcttaggtgtagtagt

SEQ ID NO: 390240 - DNA, 267 bp, Homo sapiens
gatttgtttttgtggcctatcctatggtgtatcttggaggctgttctatgtgttgatgagaagaatgtgaattctgcagtttttgggtacaatgttctgtaaacatctgttaggtccatttcttctggactgcaacttaagtccagtgtttttttgttkttattgttgacttcctgcttcagtgatctgtctagtgctgtcagtggagtgttaaagttcctcactattattgtgttgctgtctattccttttcttaggtgtagtagt

SEQ ID NO: 390241 - DNA, 267 bp, Homo sapiens
gatttgtttttgtggcctatcctatggtgtatcttggaggctgttctatgtgttgatgagaagaatgtgaattctgcagtttttgggtacaatgttctgtaaacatctgttaggtccatttcttctggactgcaacttaagtccagtgtttttttgttgttattgttgacttcctgcttcagtgatctgtctagtgctgtcagtggagtgttaragttcctcactattattgtgttgctgtctattccttttcttaggtgtagtagt

SEQ ID NO: 390242 - DNA, 556 bp, Homo sapiens
gagctcatttctagttttatttcactgtgacctgagaagatactttatataattttgactttttaaaatttattgagatttgtttttgtggcctatcctatggtgtatcttggaggctgttctatgtgttgatgagaagaatgtgaattctgcagtttttgggtacaatgttctgtaaacatctgttaggtccatttcttctggactgcaacttaagtccagtgtttttttgttgttattgttgacttcctgcttcagtgatctgtctagtgctgtcagtggagtgttaaarttcctcactattattgtgttgctgtctattccttttcttaggtgtagtagtaattgttttataaatgtaggagctccagtgttatgtgcatacttatgtagaattattatattttgttgaattaattatttaattattatgtaatgactttctttgtttttttttttttttactattgttgctttaaagtctactttatctgatgtaactacacctgcttgctcttggtttccatttgcattgaatatctttctccaccccctt

SEQ ID NO: 390243 - DNA, 579 bp, Homo sapiens
gactgcaacttaagtccagtgtttttttgttgttattgttgacttcctgcttcagtgatctgtctagtgctgtcagtggagtgttaaagttcctcactattattgtgttgctgtctattccttttcttaggtgtagtagtaattgttttataaatgtaggagctccagtgttatgtgcatacttatgtagaattattatattttgttgaattaattayttaattattatgtaatgactttctttgtttttttttttttttactattgttgctttaaagtctactttatctgatgtaactacacctgcttgctcttggtttccatttgcattgaatatctttctccacccccttaccttgagtctatgagaatctttgaatgttaggtgagtttcttgaagacagcagatatttggtttgtgattttttttaaatcaactctgccattctgtgtcttttaagtggtgtatatagaccatttacagtcaatttcaattatgagacgtgaagtggcattccagtcagtatgttgttacctagaaattttagggttttttttttcactttgttattgctttat

SEQ ID NO: 390244 - DNA, 540 bp, Homo sapiens
cctcactattattgtgttgctgtctattccttttcttaggtgtagtagtaattgttttataaatgtaggagctccagtgttatgtgcatacttatgtagaattattatattttgttgaattaattatttaattattatgtaatgactttctttgtttttttttttttttactattgttgctttaaagtctactttatctgatgtaactacacctgcttgctcttggtttccatttgcattgaatatctttctccacccccttaccttgagtctatgaraatctttgaatgttaggtgagtttcttgaagacagcagatatttggtttgtgattttttttaaatcaactctgccattctgtgtcttttaagtggtgtatatagaccatttacagtcaatttcaattatgagacgtgaagtggcattccagtcagtatgttgttacctagaaattttagggttttttttttcactttgttattgctttatagaccctataagttttatactttcaagacgtctattctgatgcagctcaacc

SEQ ID NO: 390245 - DNA, 540 bp, Homo sapiens
cctcactattattgtgttgctgtctattccttttcttaggtgtagtagtaattgttttataaatgtaggagctccagtgttatgtgcatacttatgtagaattattatattttgttgaattaattatttaattattatgtaatgactttctttgtttttttttttttttactattgttgctttaaagtctactttatctgatgtaactacacctgcttgctcttggtttccatttgcattgaatatctttctccacccccttaccttgagtctatgagaatctttgaatgttaggtgagtttcttgaagacagcagatatttggtttgtgattttttttaaatcaactctgccattctgtgtcttttaagtggtgtatatagaccatttacagtcaatttcaattatgagacgtgaagtggcattccagtcagtatgttgttacctaraaattttagggttttttttttcactttgttattgctttatagaccctataagttttatactttcaagacgtctattctgatgcagctcaacc

SEQ ID NO: 390246 - DNA, 310 bp, Homo sapiens
tgcattggtttttctgtaatgccacctgtagtagtaatgaactggtcacatggacagactcaggacctcctagttagccaaggttatataggcaaaggtgatagcttaggtcacacacaagttttctctttcctgtgcactgttatcgtgcctgcagatgctgaaatggattgtgtcagtaggcctccagccacaaggtggcacttgaaaaagagcaccagctggtagcagtgggatttgtgcttgccttatgttacscaggggaggtaatctgatgactcaggcaatgggcagggccattgagctctca

SEQ ID NO: 390247 - DNA, 600 bp, Homo sapiens
aaataaaacctgacaaatcaaataaaagtaaatgaattattactcagacatccacttatggtttgggtatatattttgacartccatgagaaaaattcctccaagggtcttcacttccagacataaaatcactttgttgtttttctaaaagctatttttaaaaacatcaacatctttttaaattctcccatctataagctggcaaaaatatctcttgaggtttgtaagcaacattttaaataataaatgtaatatttagggacaatttaatttagtgattcaaggcatctaatatttggtatcagtatatgaatattaacaaacatttagccgttttatttatagtattttttatatcaaaacaatttctactttctattatgcttcttgttctgtgatagtttactatttctgaaactttattttttacaaaatttcaagttgagtctaaaaaaattatattttgttgttttgaaaaatatatagcctaaaactgtacatgctaacagttgagttttatcagtgttatttttactaaacctaatcactataaaatagctatatcttgtgtatgttaaaaatgtgaaataagatgagaat

SEQ ID NO: 390248 - DNA, 552 bp, Homo sapiens
gaaattaaacaaaaacagatacccaagtatcagctggaatggatctcaaaaatatcatagtgagattataaagcatgtgttgaaataatacagagaaaacaataacatcttatttaaatttgaagatacaaacactaccatatgckgtataaaatattctatacacagacctgtacttaaaaatagagaaatatacaaggggatgctaaacaattttagcctgtagttatcccttgtagaatttcttataatcttgtttctggttatgttgctgtatcaattatttttcagttttgggcatgtgtgaaatatttcataaaaggaagttggacgttttaataatacattgactttaagaggaggaagaataggtgatgggggtattttgttatataccaacacatgactgaaataatcatctattctaattctgttcagttcagtggaaagtctgaaggttttttaagagttgcagtttgtcatatctttgagaacattgtgttagattaagtggaacaggaatgcttagagggaaggagattaaaataatgt

SEQ ID NO: 390249 - DNA, 552 bp, Homo sapiens
gaaattaaacaaaaacagatacccaagtatcagctggaatggatctcaaaaatatcatagtgagattataaagcatgtgttgaaataatacagagaaaacaataacatcttatttaaatttgaagatacaaacactaccatatgctgtataaaatattctatacacagacctgtacttaaaaatagagaaatatacaaggggatgctaaacaattttagcctgtagttatcccttgtagaatttcttataatcttgtttctggttatgttgctgtatcaattatttttcagttttgggyatgtgtgaaatatttcataaaaggaagttggacgttttaataatacattgactttaagaggaggaagaataggtgatgggggtattttgttatataccaacacatgactgaaataatcatctattctaattctgttcagttcagtggaaagtctgaaggttttttaagagttgcagtttgtcatatctttgagaacattgtgttagattaagtggaacaggaatgcttagagggaaggagattaaaataatgt

SEQ ID NO: 390250 - DNA, 552 bp, Homo sapiens
gaaattaaacaaaaacagatacccaagtatcagctggaatggatctcaaaaatatcatagtgagattataaagcatgtgttgaaataatacagagaaaacaataacatcttatttaaatttgaagatacaaacactaccatatgctgtataaaatattctatacacagacctgtacttaaaaatagagaaatatacaaggggatgctaaacaattttagcctgtagttatcccttgtagaatttcttataatcttgtttctggttatgttgctgtatcaattatttttcagttttgggcatgtgtgaaatatttcataaaaggaagttggacgttttaataatacattgactttaagaggaggaagaataggtgatkggggtattttgttatataccaacacatgactgaaataatcatctattctaattctgttcagttcagtggaaagtctgaaggttttttaagagttgcagtttgtcatatctttgagaacattgtgttagattaagtggaacaggaatgcttagagggaaggagattaaaataatgt

SEQ ID NO: 390251 - DNA, 279 bp, Homo sapiens
actaattgcaggaatcttttgttatttggttgaaatgttcaaacaagtcccactctgaattctattagaaatccatcattggcttmtctctgtttctcactgtcttaaatcatgtattttataacactatgaagaacgatgttcaaaagaataagctaaatttaattaattaaattatttatttatttattttgagacagagtctcactctgtcacccaggccagagttcagttgcacgatcttggctcactgcatccttcacctcctgggctcaagag

SEQ ID NO: 390252 - DNA, 503 bp, Homo sapiens
ttcaggcgtatttaagggcagcttaattataagacactatgaaattctcctaattaatttggagcwaaatattctacatcaaatattttacaaaacttaaagaaatatttacttttcacatgattacgattttgatactaggttaaaaatgacttatattggcattttttaaacagtttaagacaaataatgtttttgatactgtttattataacatatgaaaagtctttatatttatgcaaatatactctattttatcatctgttcatttaatgttgcatttgcatgcactcctgaattacttgttactaaaacatacagaacagacagaaagttaaaattggttaatttctatctaatctggataagataaacacaatgagtgaaataaatcattatgtcaaataaccaaaaacctcatgcatagaaacttcaacatttctgaataacaaaaagtataacattatgtagggcaagatgccacttttgtatcaactagaaat

SEQ ID NO: 390253 - DNA, 503 bp, Homo sapiens
ttcaggcgtatttaagggcagcttaattataagacactatgaaattctcctaattaatttggagcaaaatattctacatcaaatattttacaaaacttaaagaaatatttacttttcacatgattacgattttgatactaggttaaaaatgacttatattggcattttttaaacagtttaagacaaataatgtttttgatactgtttattataacatatgaaaagtctttatatttatgcaaatatactctattttatcrtctgttcatttaatgttgcatttgcatgcactcctgaattacttgttactaaaacatacagaacagacagaaagttaaaattggttaatttctatctaatctggataagataaacacaatgagtgaaataaatcattatgtcaaataaccaaaaacctcatgcatagaaacttcaacatttctgaataacaaaaagtataacattatgtagggcaagatgccacttttgtatcaactagaaat

SEQ ID NO: 390254 - DNA, 503 bp, Homo sapiens
ttcaggcgtatttaagggcagcttaattataagacactatgaaattctcctaattaatttggagcaaaatattctacatcaaatattttacaaaacttaaagaaatatttacttttcacatgattacgattttgatactaggttaaaaatgacttatattggcattttttaaacagtttaagacaaataatgtttttgatactgtttattataacatatgaaaagtctttatatttatgcaaatatactctattttatcatctgttcatttmatgttgcatttgcatgcactcctgaattacttgttactaaaacatacagaacagacagaaagttaaaattggttaatttctatctaatctggataagataaacacaatgagtgaaataaatcattatgtcaaataaccaaaaacctcatgcatagaaacttcaacatttctgaataacaaaaagtataacattatgtagggcaagatgccacttttgtatcaactagaaat

SEQ ID NO: 390255 - DNA, 372 bp, Homo sapiens
agctgtcattagtatgtttatataagcaaaatgggcttccttccttctgtggatcctggcagggcatctcagtaatcagaaagaatcaaagaccctttccttcccagtctgctctggccttggtcaacatcttagtgccaaatattgctggtgtattatcattattggcttacaccattttctgcagtgtttcacttaagccaactgatactctgaccttgatttgaaccatccaacagagagtaggaattccctccacaaagcaygttactcattaacatcttcctttacaagtctcttgatgttcattcacaaactcaattacctttttcctccctcaacctcaattatttgcatcattttccatgggcc

SEQ ID NO: 390256 - DNA, 589 bp, Homo sapiens
atctgctatgattttaccctatttccaaatgcttcctcccaatatcaggctgtataactcatcatgcataatgtttgcccacacaatcaataacaagaaccttactagcacacccaaacaaatgtttgggttttatttgtttgtttgcttaacttttattttaagttcaggggtacatgtgcagatttgttacacaagtaaacttgtgtcatggggtttgttgtcaaacaaatgttataagtgatagacagaggacctcagaagtctctcctctgcttgataatggagctaccttcacctttagccctaatttgattacataggaaggaacttttgatccaccacaaattacctttcagaaaaggcacagtcaaattaaatgacaagaatatcacgtcttgggtaatgtataatcttcctctggtgcaagtaaacttaaaactgggtttgagaccaccattagaggccaaataaaagtattagatgtgggaaagatataaagttatatattattgcrttccccttcactccctcattactacctgttgattttagtaaggcacagtggattttgtgatttatttctcat

SEQ ID NO: 390257 - DNA, 560 bp, Homo sapiens
accttctttagaaatttgcacatataattagttaagatgagctcctactagattaaggagggtcctaattccaatgactggaggtgtttttataagaagagaggacmcatggagaagagattgaaaatgaaagcagaaattggagtaataaatctataagtaataaagctccaaaaatttgtaagagagagtagaacctaggcaggggcaagaaaagatttttttctgtggcttttcaaggaagcgtgaccctattgactccttggcttcagacttctagcctccagaactgtgaaataataaatttcagttgttttaagctacccagtttgtggtaatttgttccagcagccctaggaaagtactacaatgctgtattcacgttctgaactctttccagttattttgtgagtatgggtagacaagattcttagaacagtcttgacagtctctgagtttattgcttattgatgggtcctatgaaagataaattacttctcacagtttaaggaatgtcctaagttgatctgcactaatttacaggatttagttgcagttta

SEQ ID NO: 390258 - DNA, 560 bp, Homo sapiens
accttctttagaaatttgcacatataattagttaagatgagctcctactagattaaggagggtcctaattccaatgactggaggtgtttttataagaagagaggacccatggagaagagattgaaaatgaaagcagaaattggagtaataaatctataagtaataaagctccaaaaatttgtargagagagtagaacctaggcaggggcaagaaaagatttttttctgtggcttttcaaggaagcgtgaccctattgactccttggcttcagacttctagcctccagaactgtgaaataataaatttcagttgttttaagctacccagtttgtggtaatttgttccagcagccctaggaaagtactacaatgctgtattcacgttctgaactctttccagttattttgtgagtatgggtagacaagattcttagaacagtcttgacagtctctgagtttattgcttattgatgggtcctatgaaagataaattacttctcacagtttaaggaatgtcctaagttgatctgcactaatttacaggatttagttgcagttta

SEQ ID NO: 390259 - DNA, 598 bp, Homo sapiens
accctattgactccttggcttcagacttctagcctccagaactgtgaaataataaatttcagttgttttaagctacccagtttgtggtaatttgttccagcagccctaggaaagtactacaatgctgtattcacgttctgaactctttccagttattttgtgagtatgggtagacaagattcttagaacagtcttgacagtctctgagtttattgcttattgatgggtcctatgaaagataaattacttctcacagtttaaggaatgtcctaagttgatctgcactaatttacaggatttagttgcagtttaaggaatgtcctaagttgatctgtactaatttccaggaattaatttgcaccttgggctgtgccttaaattatagctggatttatcagccagcttctatttgtaatatgggtgackatggtccttaactcctctcctaatttttgctctgagaagaaaattatcatcataccatgaaagtagtatatgaactctatcttttaggttattctttaccagattatggaaatgtgataatgaatttttttaaaaatccatgataagacagtaaacatatacttgtttctat

SEQ ID NO: 390260 - DNA, 412 bp, Homo sapiens
aggtacagatgaagcatgcaaatgaaccaccttgatactctactgtaactgtccaggggctacctacttattgaccagttagaactacaaaaaggaagttaatgtggggaggggaacttccttctgaaccattttcttaattacaacagtagtctcttattgcgcccttggaattctgcattgcttaatrtttactattgtggagagcttgagcaattccaaaggatcccatttggcatggctgattaaaatttggtgaagagtgagcttagtcttcatcctctgtggaaacacaaagacaacaatgtcccattcatattgaatgacaattgcaattttgtatttatgtaaaggtagcacaagcaggtaatattctctccaaccacacattccaacctgtaacttcatcttt

SEQ ID NO: 390261 - DNA, 412 bp, Homo sapiens
aggtacagatgaagcatgcaaatgaaccaccttgatactctactgtaactgtccaggggctacctacttattgaccagttagaactacaaaaaggaagttaatgtggggaggggaacttccttctgaaccattttcttaattacaacagtagtctcttattgcgcccttggaattctgcattgcttaatgtttactaytgtggagagcttgagcaattccaaaggatcccatttggcatggctgattaaaatttggtgaagagtgagcttagtcttcatcctctgtggaaacacaaagacaacaatgtcccattcatattgaatgacaattgcaattttgtatttatgtaaaggtagcacaagcaggtaatattctctccaaccacacattccaacctgtaacttcatcttt

SEQ ID NO: 390262 - DNA, 412 bp, Homo sapiens
aggtacagatgaagcatgcaaatgaaccaccttgatactctactgtaactgtccaggggctacctacttattgaccagttagaactacaaaaaggaagttaatgtggggaggggaacttccttctgaaccattttcttaattacaacagtagtctcttattgcgcccttggaattctgcattgcttaatgtttactattgtggagagcttgagcaattccaaaggatcccatttggcatggctgattaaaatttggtgaagagtgagctyagtcttcatcctctgtggaaacacaaagacaacaatgtcccattcatattgaatgacaattgcaattttgtatttatgtaaaggtagcacaagcaggtaatattctctccaaccacacattccaacctgtaacttcatcttt

SEQ ID NO: 390263 - DNA, 287 bp, Homo sapiens
ttttcttttgttagccattgccttcttcctcttatgtaagattaacttatggattctttcctcatttcacagccctcacatacttttcttcaatctcaatgccaggtgatgaccttgtttcctgtgtcaataaataaataaatagatagataaataacaatcaagaggaaatgcatgcagactcccagtactacatatacttaaygccagtatctaaaattacacattactcatcctgcatattaatagagcagggtcttttctctggtactatggacaaactgagc

SEQ ID NO: 390264 - DNA, 616 bp, Homo sapiens
ggcacgttttgaacttactagagtcttgttacattgttgtgaccaagctactgatagagacacacaatgaagtccaggctgaggaggtctcagttggagataaggaacttaatgggaactggagcaaaggtcactttagttaggcattagcaaaaaggttggmtgcactgtgcacctgccctagggatctgtcgaattttgagcttgagagtatctcaagttctggtgggtatctggtggaaaaaatttctaagcagcaaagcattcaggaagtaatctcgctacttctaacaaactattttggtgtgtgtgagcaaagaaatgacctcaaactgaaacttatatttagaaggtaagcagagtgtagaaacttgaaaaatttgcagcctggccatgtggtagaacaaaaagtccattttcaggagagaaattcaagcaagctgcagaaacttggttaactaaaaggaaggcaaatgctgatagccaggaaaatgatgaataccttccagggcatttcagagacctttgtggaagctcctcccatcacaggctcagaggacaacgaaggaagaatggtttcgtggcccaggcctagggccccactgccctgtgcagc

SEQ ID NO: 390265 - DNA, 569 bp, Homo sapiens
aattcaattttatgatatatttcatgtgttgctatcctcagttatatttactcatgtatacttacacttgtcaatgtcctagctataatcacgtatttttagattttaataaatataattaaatagcgtttctatttttataacaagttctaaaattaagccacagttgaaaattcataagattaagtttgatttttatttcacttttatatgtatgaatcttaagaatttggtatttcctatctaatatttgtctttctgttcttggaaactaatttcaaattatttacaagtttcagaagtatgcagccagtgaagaatccaatatcattttgttcaatmtacctataatttgaacttaaatatgtatacttccacaaatgtcactgaagcaagtatttcaagtatttatttccaggtataatttcaattatggggtattcagatatcttgttatatcaacaagtaaacataatatattaaattatttgagatataaaaagtatatcttgaaaacagtgcagttctaaatctttaaggtaggaaagcagctcagcaaatgttttcct

SEQ ID NO: 390266 - DNA, 569 bp, Homo sapiens
aattcaattttatgatatatttcatgtgttgctatcctcagttatatttactcatgtatacttacacttgtcaatgtcctagctataatcacgtatttttagattttaataaatataattaaatagcgtttctatttttataacaagttctaaaattaagccacagttgaaaattcataagattaagtttgatttttatttcacttttatatgtatgaatcttaagaatttggtatttcctatctaatatttgtctttctgttcttggaaactaatttcaaattatttacaagtttcagaagtatgcagccagtgaagaatccaatatcattttgttcaatctacctataatttgaacttaaatatgtatacttccacaaatgtcactgaagcaagtatttcaagtatttatttccaggtataatttcaattatggggtattcagatatcttgttatatcaacaastaaacataatatattaaattatttgagatataaaaagtatatcttgaaaacagtgcagttctaaatctttaaggtaggaaagcagctcagcaaatgttttcct

SEQ ID NO: 390267 - DNA, 432 bp, Homo sapiens
ttattataatttaacatgtgttcattaactgtgtgtgttcctaaaccttgtcttatttggatatgatttttarcaataaatagtggggcaagatggaaaatctgaagtttcacaaaaactaaatataagacaaaaacaatatatattcaactaaaaaggagtgggcaacaaacttctctgattctatatcaaatccccaaaaacaatggaatatgtatcagtaattattgactaccatagggtaataataataataaatggtcataaaataaattagttaatggaaaatggtagatattaattattgaatgataaagcacaatgtaaaacaaaatgataatagaaataatcatactcacaaacataacaatctgtatgtagaagtctaggttttccaaattaaagctggttactcacaaaatccttgaaaag

SEQ ID NO: 390268 - DNA, 432 bp, Homo sapiens
ttattataatttaacatgtgttcattaactgtgtgtgttcctaaaccttgtcttatttggatatgatttttaacaataaatagtggggcaagatggaaaatctgaagtttcacaaaaactaaatataagacaaaaacaatatatattcaactaaaaaggagtgggcaacaaacttctctgattctatatcaaatcccmaaaaacaatggaatatgtatcagtaattattgactaccatagggtaataataataataaatggtcataaaataaattagttaatggaaaatggtagatattaattattgaatgataaagcacaatgtaaaacaaaatgataatagaaataatcatactcacaaacataacaatctgtatgtagaagtctaggttttccaaattaaagctggttactcacaaaatccttgaaaag

SEQ ID NO: 390269 - DNA, 157 bp, Homo sapiens
tcactgaattgctgcaatcttgtaatataactaacagatgaggaactgcttcttatagatgaacaaagaaagtggtttcttgagatggaatctaytcctggtgaagatactgtgaacattattgaaataacaatgaggatttagaatagtccctaaa

SEQ ID NO: 390270 - DNA, 234 bp, Homo sapiens
agtgctgcaataaaaatgactagatgcattgcaattagctttaaaaagatggaacagcattgtaaggacagaccatgaatctawgcccttaggttgaatacttaggttgaataaaattgttggaggaagtggatatttgatgtacgtaatgaaagggattcttacttggcaggtattattagaagaaaaaaaaaagagagagagaaagttgaaggagaggggaaaactgccaca

SEQ ID NO: 390271 - DNA, 458 bp, Homo sapiens
gcctcgcgcatgcgcactggcgaggccgactcacccgccccacccctccttactcagcagagtcaggctgcggaccctttaaaaaatggcggygacgcggcggctgcggggactggggcggcggtgctggaggttgcggcggcggcggctgcggcgcagcccgaggcggcgggtgggaagaggtctaccagaggggcctgcgggagacccagggtcggacccataggagtcctgtcgtcaggacctccttgatcggtctcctgcttctgttcccggtgaaggaggaccttcggggtgctggctgggctgcgcggactcctcttgggatccgatgatggctcccaccggctgatcgggaatggggttacaatgcagtgaggcggaaagggtctcgccggggcaaggaaagatccccagggccgcaaggcgtgctgtcgtctgcaacggcacggacccat

SEQ ID NO: 390272 - DNA, 470 bp, Homo sapiens
gcggcggctggggcctcgcgcatgcgcactggcgaggccgactcacccgccccacccctccttactcagcagagtcaggctgcggaccctttaaaaaatggcggcgacgcggcggctgcggggactggggcggcggtgctggaggttgcggcggcggcggctgcggcgcagcccgaggcggcgggtgggaagaggwctaccagaggggcctgcgggagacccagggtcggacccataggagtcctgtcgtcaggacctccttgatcggtctcctgcttctgttcccggtgaaggaggatcttcggggtgctggctgggctgcgcggactcctcttgggatccgatgatggctcccaccggctgatcgggaatggggttacaatgcagtgaggcggaaagggtctcgccggggcaaggaaagatccccagggccgcaaggcgtgctgtcgtctgcaacggcacggacccat

SEQ ID NO: 390273 - DNA, 470 bp, Homo sapiens
gcggcggctggggcctcgcgcatgcgcactggcgaggccgactcacccgccccacccctccttactcagcagagtcaggctgcggaccctttaaaaaatggcggcgacgcggcggctgcggggactggggcggcggtgctggaggttgcggcggcggcggctgcggcgcagcccgaggcggcgggtgggaagaggactaccagaggggcctgcgggagacccagggtcggacccataggagtcctgtcgtcaggacctccttgatcggtctcctgcttctgttcccggtgaaggaggaycttcggggtgctggctgggctgcgcggactcctcttgggatccgatgatggctcccaccggctgatcgggaatggggttacaatgcagtgaggcggaaagggtctcgccggggcaaggaaagatccccagggccgcaaggcgtgctgtcgtctgcaacggcacggacccat

SEQ ID NO: 390274 - DNA, 441 bp, Homo sapiens
ctactaacactttcctcaaaataattctcaatattttggtttttaattttttactgcctttgcattctcctggcagagacccatttcacctctcctatagattatttcataaagattttatcatccgtatcatatatatttacaatattaaaagttatctgtagcatgctctcattgttgcttatagattaggtttgcttctctatgtactactctggtaggcagtggttaaatatactgctttaagccttttcacagtaccttctataatatcatcatgcacagttttaggcacacagcagaaaatcaatgaaacatatttaattgactaaaaattgaaaracattggtatatatgtaggacagatactgatatttttataagcccaactctgaaatggtgatacacaaaaagttgataatttttttcagcaaaaactat

SEQ ID NO: 390275 - DNA, 551 bp, Homo sapiens
atttcccaggctggggtatgtctttatcagtagcataaaaatggatgaatacaggaatataggaagtgtctgctttgtcctggcttttacctttgcctgtaacaccaccccagaggctcacatggcttctcctttctcttcaagtcttgctaatcattccttgttgattccttaaaatcaacacatataaatgtgtatccctttcttaagcaagtgatccctttcatcctttacctttctgtatttgtcagtagaattaaccatctgctagcatactataaaatttacttatgtattgtatatattatctattctagtgatatgatttggctctgttcccacacaaaatctcatcttaaattataatcagatttataatccccatgttttgggggaggcaactctgggaggtgattagatcatggggtggttctcccatgttgttctcstgatagtgagtgagttctcatgagatttggtggttttataaaaagcttttaccccctgcactctgcagttttccttcctgccacaatgtgcagaaggacatg

SEQ ID NO: 390276 - DNA, 311 bp, Homo sapiens
tttgtctgatattaatagaagtcttcagtttttatatacttagtgtttataccatagaaatactgccatcctcttatcttaaaaggctccagaaatttgaactttcatgtaaaatattttcaatattaatttataatattttataacattacatagtaattttgaaaaaatatttgttatttatataaaaagcctactgagattttgactgatattgcaattaatctagaaatmaatttagtagaactaccttcttaacactataaagcattcaaattgttgaacttggtttatctctccatttatttagg

SEQ ID NO: 390277 - DNA, 622 bp, Homo sapiens
tgtaaacacacaacccaatttaagcataagaacagtatcaataattttgcagttatctttcactctttttcagccacacagagacaactatactcttaattttgtgtttagagtcctctattttcttaatggacagattgcacatggttaaaggtctatctttacatcaagagagcctgtgtttggatcttgttcacgctgcttatgtctcttttgaagttatgcttaagctttatcccttgttcctttatggaaatttgagtattttaggaaaagtaaaaaaaaaaaaaaaagaaagaaactttaaagtagaatgataaaatctagtgttwttagatacagaagtgagaagttgaatacgggtaaagcatgatggactatgggaagaacggaatttcttgtgtgtgactgctcattcaataagctatattttttaaagacctgaacaggttatagctattggttatctacaagtggaattctcaaacacgaaaatgaaagcctgacaaataagatgctaatgccattttcacttaaaaaatagaacaagcgaaagagagaaataaaagcactagcccagtaagaacatcctctatttgccttactcataagccagttcagg

SEQ ID NO: 390278 - DNA, 506 bp, Homo sapiens
atctttttaaaaataatctatttgttttgaagaaaaccccaataggaaggtgttttcatttttaaaggtatctcttcagatactatttaatactcaatgtgctaataatgtcaaaaattgttaaatgcgtatatatctgtatttcaaataggatagtttatcaagtcaggttttccaagaagctgatactatgcaattatwagtcactcaaaaggttataagaggaacattagttaaagattaagaagaaaaagcagacctaagtgcagggagtcttcagtgatgcaagcctggcttctgtcaaaagagggggagaaggaagaaagatgagaatgaaagagtcacagcctgaaacacagtttaggaaattttggcccggacaataggagtctccagtccaaagtcttctgttggaaggttaccacaaatcttaaaaatggccttcatcaatactcccagcatgctcagtcattggccaggaacagccagagaaaatatggcctgag

SEQ ID NO: 390279 - DNA, 506 bp, Homo sapiens
atctttttaaaaataatctatttgttttgaagaaaaccccaataggaaggtgttttcatttttaaaggtatctcttcagatactatttaatactcaatgtgctaataatgtcaaaaattgttaaatgcgtatatatctgtatttcaaataggatagtttatcaagtcaggttttccaagaagctgatactatgcaattattagtcactcaaaaggttatragaggaacattagttaaagattaagaagaaaaagcagacctaagtgcagggagtcttcagtgatgcaagcctggcttctgtcaaaagagggggagaaggaagaaagatgagaatgaaagagtcacagcctgaaacacagtttaggaaattttggcccggacaataggagtctccagtccaaagtcttctgttggaaggttaccacaaatcttaaaaatggccttcatcaatactcccagcatgctcagtcattggccaggaacagccagagaaaatatggcctgag

SEQ ID NO: 390280 - DNA, 506 bp, Homo sapiens
atctttttaaaaataatctatttgttttgaagaaaaccccaataggaaggtgttttcatttttaaaggtatctcttcagatactatttaatactcaatgtgctaataatgtcaaaaattgttaaatgcgtatatatctgtatttcaaataggatagtttatcaagtcaggttttccaagaagctgatactatgcaattattagtcactcaaaaggttataagaggaacattagttaaagattaagaagaaaaagcagayctaagtgcagggagtcttcagtgatgcaagcctggcttctgtcaaaagagggggagaaggaagaaagatgagaatgaaagagtcacagcctgaaacacagtttaggaaattttggcccggacaataggagtctccagtccaaagtcttctgttggaaggttaccacaaatcttaaaaatggccttcatcaatactcccagcatgctcagtcattggccaggaacagccagagaaaatatggcctgag

SEQ ID NO: 390281 - DNA, 515 bp, Homo sapiens
ttggatattttattaaatatttaatcattatatatgcacatatttatgggcatgtgatcttaatttctgtttttaaattcagaatgcttcaataataacattgcattttatataatcctgattttcttttttaaaatcagctcaaaaggagaagctaaaatattcagctttaatttcaccagtagatttttaatgttttgtaatcataatgtttaatttgtgctgttcttagaastttaattatgaagctaaattgtactaatacccattaggtacttcttaattgaaggcgcatcatatttctgatgtggcagtactaattggtgtaattaaattctaatatgcttcagtagcctgattttttaaagtgaataaaaagctgatagaaataagtcagctcttgaagctgcatagttgtataatacatacacgtgtttgcatttgtaacatgcacatttattcagaacaaacaactcattaatttattccaaaataatttcacttgataacttgaa

SEQ ID NO: 390282 - DNA, 515 bp, Homo sapiens
ttggatattttattaaatatttaatcattatatatgcacatatttatgggcatgtgatcttaatttctgtttttaaattcagaatgcttcaataataacattgcattttatataatcctgattttcttttttaaaatcagctcaaaaggagaagctaaaatattcagctttaatttcaccagtagatttttaatgttttgtaatcataatgtttaatttgtgctgttcttagaagtttaattatgaagctaaattgtactaatacccattaggtacttcttaattgaaggcrcatcatatttctgatgtggcagtactaattggtgtaattaaattctaatatgcttcagtagcctgattttttaaagtgaataaaaagctgatagaaataagtcagctcttgaagctgcatagttgtataatacatacacgtgtttgcatttgtaacatgcacatttattcagaacaaacaactcattaatttattccaaaataatttcacttgataacttgaa

SEQ ID NO: 390283 - DNA, 515 bp, Homo sapiens
ttggatattttattaaatatttaatcattatatatgcacatatttatgggcatgtgatcttaatttctgtttttaaattcagaatgcttcaataataacattgcattttatataatcctgattttcttttttaaaatcagctcaaaaggagaagctaaaatattcagctttaatttcaccagtagatttttaatgttttgtaatcataatgtttaatttgtgctgttcttagaagtttaattatgaagctaaattgtactaatacccattaggtacttcttaattgaaggcgcatcatatktctgatgtggcagtactaattggtgtaattaaattctaatatgcttcagtagcctgattttttaaagtgaataaaaagctgatagaaataagtcagctcttgaagctgcatagttgtataatacatacacgtgtttgcatttgtaacatgcacatttattcagaacaaacaactcattaatttattccaaaataatttcacttgataacttgaa

SEQ ID NO: 390284 - DNA, 515 bp, Homo sapiens
ttggatattttattaaatatttaatcattatatatgcacatatttatgggcatgtgatcttaatttctgtttttaaattcagaatgcttcaataataacattgcattttatataatcctgattttcttttttaaaatcagctcaaaaggagaagctaaaatattcagctttaatttcaccagtagatttttaatgttttgtaatcataatgtttaatttgtgctgttcttagaagtttaattatgaagctaaattgtactaatacccattaggtacttcttaattgaaggcgcatcatatttctgatgtggcagtactaattggtgtaattaaattctaatatgcttcagtagcctgattttttwaagtgaataaaaagctgatagaaataagtcagctcttgaagctgcatagttgtataatacatacacgtgtttgcatttgtaacatgcacatttattcagaacaaacaactcattaatttattccaaaataatttcacttgataacttgaa

SEQ ID NO: 390285 - DNA, 545 bp, Homo sapiens
taatattttaagtaacctggagataggactcatatcttttaatagaacatgcattctaacaagccagtgatttttcaaagttttctaaaacacttttctcaaaccayatttaacctagaagtagaaacaaataaaagacacaaaattagagttaattttgttgtaactgggttggctccagagattatagttaggaagtgattacattaagctctacatatgcagcattctagcaaatttcaatgcagtagacaaaatctataaataatgtgaaacacatattaacatgttaagcataatatgcattcattgtcttcaacagaatagttctctattaattttttaaatgtaatacaattttactataaaaacactgaaaaatcaacatatttcattaagaaaaaattactaaatgttgcaaaatgatgaggaaaatacctatagtaataattcccaactactaacaattttgttttatctaatactggtcagctttccatgtgtccaagccttacaggacttttcattaagcctaatcctcacaa

SEQ ID NO: 390286 - DNA, 545 bp, Homo sapiens
taatattttaagtaacctggagataggactcatatcttttaatagaacatgcattctaacaagccagtgatttttcaaagttttctaaaacacttttctcaaaccatatttaacctagaagtagaaacaaataaaagacacaaaattagagttaattttrttgtaactgggttggctccagagattatagttaggaagtgattacattaagctctacatatgcagcattctagcaaatttcaatgcagtagacaaaatctataaataatgtgaaacacatattaacatgttaagcataatatgcattcattgtcttcaacagaatagttctctattaattttttaaatgtaatacaattttactataaaaacactgaaaaatcaacatatttcattaagaaaaaattactaaatgttgcaaaatgatgaggaaaatacctatagtaataattcccaactactaacaattttgttttatctaatactggtcagctttccatgtgtccaagccttacaggacttttcattaagcctaatcctcacaa

SEQ ID NO: 390287 - DNA, 545 bp, Homo sapiens
taatattttaagtaacctggagataggactcatatcttttaatagaacatgcattctaacaagccagtgatttttcaaagttttctaaaacacttttctcaaaccatatttaacctagaagtagaaacaaataaaagacacaaaattagagttaattttgttgtaactgggttggctccagagattatagttaggaagtgattacattaagctctacatatgcagcattctagcaaatttcaatgcagtagacaaaatctataaataatgtgaaacacatattaacatgttaagcataatatgcattcattgtcttcaacagaatagttctctattaattttttaaatgtaatacaattttactataaaaacactgaaaaatcaacatatttcattaagaaaaaattactaaatgttgcaaaatgatgakgaaaatacctatagtaataattcccaactactaacaattttgttttatctaatactggtcagctttccatgtgtccaagccttacaggacttttcattaagcctaatcctcacaa

SEQ ID NO: 390288 - DNA, 558 bp, Homo sapiens
tttctggagtttttggtactatacctttttcaagataaagtaaaaaaatttatggataatttagttgttccctgtgtagattccagtgccaaattcctttcttagacactgtttctagtacaacatgttaatatgtracccctgcttcacttacggatttttagagatctatcccaggttacttaattcaactccaatacatacttttcttttaaatgcagtgaataaagggtgagttacttagtcactccggttttatttaatcctactgtcatctgacaatatggtactgatactatttcctatttctagatggttgctagaaatatactgtaatatttattcttgatatatgtttgttactttaacgggaatacataggctataaatagtccccttggatctcacaagttagacagtcctacccagaatgccctgctgaagagttgtagcagatcaccctgttcctccttaacctctctgtgtctcatatgctcacctgtaaaatagtaatcatagtaacacctaacttgtgatgatgtagagaggattaaagaa

SEQ ID NO: 390289 - DNA, 558 bp, Homo sapiens
tttctggagtttttggtactatacctttttcaagataaagtaaaaaaatttatggataatttagttgttccctgtgtagattccagtgccaaattcctttcttagacactgtttctagtacaacatgttaatatgtaacccctgcttcacttacggatttttagagatctatcccaggttacttaattcaactccaatacatacttttcttttaaatgcagtgaataaagggtgagttacttagtcactccggttttatttaatcctactgtcatctgacaatatggtactgatactatttcctatttctagatggttgctagaaatatactgtaatatttattcttgatatatgtttgttactttaacgggaatacataggctataaatagtccccttggmtctcacaagttagacagtcctacccagaatgccctgctgaagagttgtagcagatcaccctgttcctccttaacctctctgtgtctcatatgctcacctgtaaaatagtaatcatagtaacacctaacttgtgatgatgtagagaggattaaagaa

SEQ ID NO: 390290 - DNA, 499 bp, Homo sapiens
caaactggtatccctgcaattatctgaacagaatttttaagtagtcacattgacttttttttttttaaagttagttttaagctatttgataacatatggatctacttcactaaagttktatttttgtgtgtaattctttaatccatctggagatattttggttgtttttcaatcagatagccagttaaaccagaaagaaaaatcttaccaaaaagtttccacttagaaaatttaatagccaaaaaaactaatatatgcaagaatgagcaaaaacatattgataaaagatacatcatatttttattgaaatatttcataatgaaatgtttcacatggttaaagaactacaaattcattcaatgtaaataaaaacttcatgggaaatgtataatatatgagggattatttgatatctgaaaaaattagatagaaaataaagcttaaaaacttctagaaggtaatccagtagaatatttatcagcttaggctaacaaatgat

SEQ ID NO: 390291 - DNA, 499 bp, Homo sapiens
caaactggtatccctgcaattatctgaacagaatttttaagtagtcacattgacttttttttttttaaagttagttttaagctatttgataacatatggatctacttcactaaagttttatttttgtgtgtaattctttaatccatctggagatattttggttgtttttcratcagatagccagttaaaccagaaagaaaaatcttaccaaaaagtttccacttagaaaatttaatagccaaaaaaactaatatatgcaagaatgagcaaaaacatattgataaaagatacatcatatttttattgaaatatttcataatgaaatgtttcacatggttaaagaactacaaattcattcaatgtaaataaaaacttcatgggaaatgtataatatatgagggattatttgatatctgaaaaaattagatagaaaataaagcttaaaaacttctagaaggtaatccagtagaatatttatcagcttaggctaacaaatgat

SEQ ID NO: 390292 - DNA, 499 bp, Homo sapiens
caaactggtatccctgcaattatctgaacagaatttttaagtagtcacattgacttttttttttttaaagttagttttaagctatttgataacatatggatctacttcactaaagttttatttttgtgtgtaattctttaatccatctggagatattttggttgtttttcaatcagatagccagttaaaccagaaagaaaaatcttaccaaaaagtttccacttagaaaatttaatagccaaaaaaactaatatatgcaagaatgarcaaaaacatattgataaaagatacatcatatttttattgaaatatttcataatgaaatgtttcacatggttaaagaactacaaattcattcaatgtaaataaaaacttcatgggaaatgtataatatatgagggattatttgatatctgaaaaaattagatagaaaataaagcttaaaaacttctagaaggtaatccagtagaatatttatcagcttaggctaacaaatgat

SEQ ID NO: 390293 - DNA, 610 bp, Homo sapiens
aattcagctactaataaagatcatgcgaaaaggtgctttgaaaacatccagaaacaaagtcaactgactatgctcaaattataccacagttaaagaaacaccagcccacacasattagaaaaaagccaacataagaactctagcaactcaaaaagtcagagtgtcactttacctccaaatgactgcactggttctacagcaatggttgttaaatagaaggaaatggctgaaatgacagatatagaactgagaggtagaaggaaatgaagatcattgaaattcagtagaaagttgaacactatttccaagaatctgaggaatccagtaaaatgattaaagagaaaaaaattagccatttgaaaaaacaaaacaaaacaaacaaacaaacaaaaaccaagcctagcagatagagttacaaaacacagtacaagaatttcataaaatgattggaaatattcacagcagaatggactaagccaagaaaagaatctcagagactgaagactgattatttaagttaacacagccagaaaataaataaagaaaagaagaattttaaaaaatgaaaggtcaggcatggtggctcacgcctgtaatcccagcactttgg

SEQ ID NO: 390294 - DNA, 572 bp, Homo sapiens
tggacactctcatacacagatggttgtacagctattctagaatgctgttggtgtgagctattaaatttccgtatgtgcatgtgtgtttgtgtatrtgtgtgtttgtatgaaatgattgtacatgggcacaaaaaacatgaaaagtagaatgcatagatattaggtaacggcaaaaaacacaattactcttgcaccaacctaatatatccatggaatattatataataaaaaactatacagcaaataaaataaactaccattacattggtgtaatttgaaagctctttggaaaattagcagtctctactttaaactgtgcctgtacatattcagcaattttacttcccaacagaaatggggaagtgagtttataaaacagaaaacatagaatgctcataggaggactaaatgtattaagcctaaactgattttatgaaatgtccttccaaaatcgagcagaaacataaattgtggcatattgacacaacagaggactgtctggtggatatacatagcatcatggataaatcttacaaacaaaatttttagcaaattcagccaaacaaaaagaa

SEQ ID NO: 390295 - DNA, 570 bp, Homo sapiens
taatgatttcaagtggtaaattaatttgcagcccatcttcttgaggctgggaatgttcaatgacttgctagaaaccaacacgccaggctggtcactgaagagcttgctgtccttgttttggcttcttcaggcttttttgcctattttttctcctctcctattttcccatttccttcctccttattctcctcatctcatggtcatttttctacttaatctctactgggggaagcgcaggtaaaacatgaattgtctatttaaattgttagccacactttatcaacggctttcgtctactcaacttcccctcccaggtatttaaatgtgagcatcttctgaccctgtcctcaatttctgaccaattacctattcaacatctctatttcagtgtcccagagttgcttcaarctgaaatccaaaaccgaccacatggtcttccctcttgaacagttattcctgccatgtttcccacctcaggaagtgttagctccatctccacaactgcgcaggctggacatttaggagtcacctttgaggtctctctcctgctgtattgattcagtcttcaca

SEQ ID NO: 390296 - DNA, 615 bp, Homo sapiens
ttttctcccagtctgtggcttgccttttcatgttcttaacagtgtcttttgcagagcagaagtttttaattttagtgaagtccaacttctctttttttsatggattgtgcttttgcatggaatttgtcataattgcatttttatatggtttgtttgatttgaaaagaattttcttcagtgttattatctgaatttatgttaatttttacagggttggaaatacataaatatgcatgtaactttttaaagtgacaaagtaatctctaattataagttaaagtccttttgttgttcttatagattcatattatgttacttttgttgttattattattgtgtttgttagtattaagtagctattttggcagaaagagcagacacactcttccttttgcctttgccatctaatgccttgtgtcctgtgagttaaagaaaaataatttgcgtatagaaattattgatttgcatcagttttctgcttcagcacagcacattggttagggactgggttagtagtaatatatcaataaagtcataataaaaactgatatattattttctcagtttaaacctggattgtatggccatcctgtgttttggccttgaactgttaca

SEQ ID NO: 390297 - DNA, 556 bp, Homo sapiens
taagtaacaaaaagccaaatattaatcaccaagacaatgtggaaaacgtctccagggcatgtcagagaccttcatggcagcccctcccatcaaaggcccagaggcctaggagaataaaatggtttcatgggctgggcctagggctcccctgttctctgcagccttaggacatrgtgccctgtgtcccagctgtttcagtcccagtcatggctaaaggggccaatgaacagctcaggctgttgtttcagagagtgcaagccccaagcctcagcagctcacatctggttttgggcctgtgggtgcacagaagtcaagaactgacatatggaacttccacctagatttcagaagatgtatgaaaatgcctggatgtccaggcagaagtctgcttcaggggtgaagccctcatggagaacctctgctagggcagtgcagagcagaaatgtggggttggagcccccacacagagtccccactggggcactgcctagtggaactgtgagaagagggccactgcatcctccagatcccagaatggtagatccacggacagctt

SEQ ID NO: 390298 - DNA, 356 bp, Homo sapiens
tctaaaatttctgcttgattatttttaattattttaatcttttattaaatttatctgaaataattctgaattccttctctgtgttatcttgaatttctttcagtttcctcataacagctcttttgaattctctgaaaggtcacatacctctgtttctccaggataggtccctggtgccttatttagttcatttggtgaggtcatgttttcctgtctrtcttgatactcatagatgtttgtctgtattggggcattgaagagttaggtatttattgtagtctttgaaatctggacgtgtttgtattgtccttcttgaaaaggctttccagatatttgaaaaggctcaagtgttgtga

SEQ ID NO: 390299 - DNA, 565 bp, Homo sapiens
caggactgggtcactcctttcaaggcaattggtttccttctgacccacagtgtgtctaaaaatgtctgggggccctgaccaacgtggagaaacctcatctccactaaaaatataaaattagctgggtgtggtggtacatgcctgtaattctagctactcgggaggttgaggcagaattgcttggacccaggaggtggaggttgcggtgagccgagatcacaccatttcactccagcctgggcaacaagagcaaaacttcacctcaaaaaaaaaacaaaaacaaaaacgtcgtgggactagggcctggaaagggggcctcatgactttgactggtgccttatcctgctgtggctgagctggtatccaagatgcaagagaaagtgctccctgctcttccttctcttctcctcaagtggaaggaaggggtcttyttggagccacaagctgtgcagcctgtggttacaggaagggtgatcccagcactttcttagccaccctggctggtgtctccgtaggtcacatgccctcatagtctactgtctcggggcccagttgagccctagga

SEQ ID NO: 390300 - DNA, 513 bp, Homo sapiens
ttgtatagtgttggtggcaatgtaaattgaaacagccattatggaaccggtgtggagcttcctcaaaaaatttaaaaaacagagctaccatataacccaacggttccactactgagtatacatatccaaaggaaaagaaattaatgtcccaaagaaatgtccgcactcccattgttgattgcatcattattcacaatagctaagatataaaaacaatctgtgtccattgtagaataaacaagaaaatgtcaaatatgtgtgtacaccacacacacacacacacacacacacacacaaagacattattcagccttacacaaaagaggagaagctgctgtgctgccatttgtgacaacatgkatagacctggagaacatcgtgctcagtgaagtaagccaggcacagaaagacaagtacctcacgctctcgtttatatatggaatttcaaagggaaaaaatagttgaatgcataggaacagagagtagaacaggggtcagcagggtagggaggga

SEQ ID NO: 390301 - DNA, 485 bp, Homo sapiens
atatcaaaacatcaacttttactcctaaaacttatacaataaaaaattcattgtttagtaatttgtttgttcatcactgctcctttccccctactctttcctcaaggacttaaaattttcttcttttcaaaatatatccttgagaagcaacttctgttaatatttatctaaaaaaaatctttaatgcatttttacttccgaatgatgaaaatttaaagtcaatagtaattcttcccagcattttgaacatattctcccactgtattcagaagtctagattttgctgataaggttgataaaaagacctttgtataaccccatctttgtagatgaaaaattccttataatgataaaacattcagtcttagatgccgcacgatggacacagagaggcscctcttctgtcccccgactgagctgtgggcagatacccattgctggccaggacctctcagaggtttcctgtgtggcagagagccacgctg

SEQ ID NO: 390302 - DNA, 609 bp, Homo sapiens
atctctatggattgtacttgccccaggagaaacttaaaacacccgttacttaacaagaagaaatggaaaagaaccatttagacctaacaaaacccagaactaactttctccttactatgcatggtgacagagaaagctkcaaagagggcacataatttacattaatacattataagcatttccaggaggggcaacaattttaaaaatacactgttatctatccccccaccttttttaaatttgaaagagaatatgctttctttatccttgcatcatagttcttattttatcaagagtctgatggtaacctcactttgaaccttattaggtaatattgatttaagtagaggggaactcttgaagtttttactcatctgaaatgcagaacacatacatgttttaccaaaaggtttactatgcatattaatcttttatgcattttatttctccaagcgtgaaaagaaacaagttgaagtaatagaggttgccaggtgttggtggcacccattccactgtaatgacagccatgacttaaggttttgtctcgctctactcttcctatgaattgcaaatcttcaggttgccacagcaactctatatactgacagg

SEQ ID NO: 390303 - DNA, 611 bp, Homo sapiens
tatatatacaaacaacaacaacaacaaaacccatgatccagtaaggataagaagattttctattcccatcaaaatatgcatcagtatatagtataaaatatgtgcagattgttttaatgtgactagacaaaaagagaacctttaaagatcatgacaatgcaccccgattctgtaaattaaacaaacttaagaagactgtggttagaattcaataagctcagcagataaagacaatttggctacaagaaacagggccgtactaagctattattatagatgaaacgataaatggctccctgaatgtttttaaaaatctaaataactggctgcttcttaagtcaccactacagattctgtcygctcttttattaataagtctttgataatataaatcaaactctaacatctcaatgttgagtgcttaaggaggctgcgagtttctattttcctaaccaaagtattgccattttacagtagcagcatttaacagtgcttctgtatcaaatgagaacaggctccagttctttccacattagctgtgattttaataacatgccaagccaaacaggctagcgtaataagtttcattgcacccacttcaacaacagata

SEQ ID NO: 390304 - DNA, 548 bp, Homo sapiens
gcttattagttgtaagggttaatatagtaactatacagtagaaaaatcaggcaatgccctgatcagataaccaaaattactatcaccaacaaagggtagaaggacattgggtattacattgggtacctctggatgtaatagtgtaatctccagaataatagtgaaggacatgttacttcagtattattctggttgggaatacacagccttaatctcatcatgacaaaacatcaaactcaaaacttttttacctaaaaaataaaagaggtgggggagttctgtatattttttaatgtcaatgtcacaaaagacaaagaaagcctgaagaactgttccccattaaagtagattgaagagacataacasctagatgcaatatgtaatcctggactggatcttgcactgtagggaggaaaattgctataaaggatatcattagatcaactgaccaaactgaaatatggagaatgctgacagaagattagataaaagtattatgtcaatgttaaatttcctgaagctaataattataccatagttacataaga

SEQ ID NO: 390305 - DNA, 581 bp, Homo sapiens
aaacttgtctgtatattagaatcacttaaagatattttttaaatgccaaagcccaaaccacacccccaaacaattagatcacaatctttgggggtgacagcaggcattcaggatttcttgatgctctccaagtttgggaatcattgacgtaaagtacagaaaacaaacaaattcttctaccttctttcagatttctcattgggattatcccagagaactgaagggggagaaaaagataaagggaaaaggaaagagttgggaaaaaattactaaaccaatgcattaatctacatctgctttttaaagcaaatcatttacacacatactcactgctgtttctgaagctggctcaacaaaatgctgaaaaaaaatcattatagaggtacatggcatattatgctgacatgagtttctacagcagagccccagtcctttaagaaggatttgggtgagagagcagaagacagattattctcataaacacaaaaaaaggtatgcagattccaaggtgactaccacagctttctagtgacaaatcgccagcaatcrgagatgtttgaaatgtgaacttgcttaacctt

SEQ ID NO: 390306 - DNA, 562 bp, Homo sapiens
tagtgacaaatcgccagcaatcagagatgtttgaaatgtgaacttgcttaaccttgcctactttaatggtttattttaataaggggaaggatattaaaactctctattaagttcaaacatggaagaagagggcaagaaaaaaatcctaaaccctgtaattccaactttttttaaaaaagactcactgtagctaatttcctaattttacatattatttaaacatagtccaaaagattttarttgctacatagcattttattctccttctgtcccgtatttcttttttaaagaaatgatttaaggtacatgcattccatttgtaccattggttcatgacattcaaagagttcatcatgcacacaggatcacctgtgtacttagcttaactctgtagaaatctctcatccctaggaaagaacctagattatttttatgccatccaaatgggagactgtcccagataccagatgatgaaggggcccctgagggaccataatgctaacgtgctatgagcactacaaaatttgacttcaaagatgcctctcagtttggcagggcctcc

SEQ ID NO: 390307 - DNA, 591 bp, Homo sapiens
tacacaacattccaagatagattctggtatcttgagccaacatatcaggagaatggtacagaaaaactgaacattaccagcccctctaccttagctaactgcaaaatgaacarcttccaaggacttgctgctactctcccacaaaatgaaaagtctatgtatcaagatgtagaatagtacagctaagcacaaggctcctccccagtcaaagaggagcagagagtgaagatcactatcagtaaaagcgctggcctagagttccatcactaaactgatatgtaacccaaggcaggtcttctttctttgagtttcagtctcatcatctttgaagtgagaataacagagcataaaagtcaaacttgaaccaacacatgatctgtatagctcatttttttattctcaagtgacaataagagacattgtactctatcatgtttacgttaatgactaaggaagtgtaccatacagttagaactcttaacaaggcatgcacccctttgctaattgtagaacagattaacaaaatggtggacaaaaattttgagactagcaaagatggttaaaacaatacctccctaaacccagagacta

SEQ ID NO: 390308 - DNA, 591 bp, Homo sapiens
tacacaacattccaagatagattctggtatcttgagccaacatatcaggagaatggtacagaaaaactgaacattaccagcccctctaccttagctaactgcaaaatgaacagcttccaaggacttgctgctactctcccacaaaatgaaaagtctatgtatcaagatgtagaatagtacagctaagcacaaggctcctccccagtcaaagaggagcagagagtgaagatcactatcagtaaaagcgctggcctagagttccatcactaaactgatatgtaacccaaggcaggtcttctttctttgagtttcagtctcatcatctttgaagtgagaataacagagcataaaagtcaaacttgaaccaacacatgatctgtatagctcatttttttattctcaagtgacaataagagacattgtactctatcatgtttacgttaatgactaaggaagtgtaccatacagttagaactcttaacaaggcatgcacccctttgctaattgtagaacagattaacaaaatggtggayaaaaattttgagactagcaaagatggttaaaacaatacctccctaaacccagagacta

SEQ ID NO: 390309 - DNA, 552 bp, Homo sapiens
ctacattcaaaaattgcatccagtatgattccacgtatatgacattccagaaaaagcaaaactatagcaacggcaaacagatcaatacggctgccaaaggttagcagttggaaggaggtttgactagagagagacaccatgaggggatccgggtgagtgaggaaactgtatattgactgtggtaatcataccactgtaaagtagatatacaattctatgcatgtgtcaaaattcacagaactctacccaaaaaaagtaaatttcagtttatgtaaatttaaaaataaatccttaaaggtgtaaattaaaattactgctagcaaaaaggttcactcttataaaatagtagtgggaactcaatgaaatgatgaatgtaacttgctcatagtaagcacttagcaaaatttttaattattatggtattaccaaagtctcagtatttaatatgcaattcacattcaaattaaatcaatayatttatcaagaaccaattatgtcctggcacagagttggcttctacaatatatacaagccatatatagtatctgtact

SEQ ID NO: 390310 - DNA, 325 bp, Homo sapiens
ttgtcttaaagataaaatgtataaggactccattttgactcttccaattcaaattcaasactacgtagctttcacttaaaatcatgtatttgtgttttcattcatgcatgtgaaaaatcctgacaccagcattggagattcttaaactgggatacatcatacgcacagtagtttctgggaggtaaagcttggcatctgcatttttaacaatttccacaggtgattctgatactcacccaaggatgagaaccactgatctattttttacgaactattttatgttatagatacttaaatggaacctcccattttcttcttagaatcc

SEQ ID NO: 390311 - DNA, 325 bp, Homo sapiens
ggattctaaaaaaaaaatgggaggttccatttaagtatctataacataaaatagttcrtaaaaaatagatcagtggttctcatccttgggtgagtatcaaaatcacctgtggaaattgttaaaaatgcagatgccaagctttacctcccaaaaactactgtgcgtatgatgtatcccagtttaagaatctccaatgctggtgtcaggatttttcacatgcatgaatgaaaacacaaatacatgattttaagtgaaagctacgtagtcttgaatttgaattggaagagtcaaaatggagtccttatacattttatctttaagacaa

SEQ ID NO: 390312 - DNA, 325 bp, Homo sapiens
ggattctaaaaaaaaaatgggaggttccatttaagtatctataacataaaatagttcgtaaaaaatagatcagtggttctcatccttgggtgagtatcaraatcacctgtggaaattgttaaaaatgcagatgccaagctttacctcccaaaaactactgtgcgtatgatgtatcccagtttaagaatctccaatgctggtgtcaggatttttcacatgcatgaatgaaaacacaaatacatgattttaagtgaaagctacgtagtcttgaatttgaattggaagagtcaaaatggagtccttatacattttatctttaagacaa

SEQ ID NO: 390313 - DNA, 421 bp, Homo sapiens
tattatatagtctatactgtagggggaggaagagcctgcagttttactattacctcataaaattaattggtgcctaaaacaaatagtattaaagatactgtattttataacataccaagatgactgatatagtttctgtagggagtttttgtttttctgtgtttgtgtcaataaactcataaaatctgcagaatgaaatgagtcataatctcatttttactatcaaaaagtgaagttgagcagaagmatgaccacgtagttcctcccagtggctcaaacaagtaaataatttaacatgtcttcataacacagggttttgcttatatcaagaaacacaatcaccaccccttccctgttcaatgtaaggggcttagctttattggagtcaaaaaatctagtgcagtactttgtcagtcagtga

SEQ ID NO: 390314 - DNA, 525 bp, Homo sapiens
aatgctcactttatgtccaacatagaatgtaaagaagcaaaaggatcccaagttctccatttttttctaattctggtatcttttatagatttttatgtaagattttatttttatttaagaaaaatctagaggtttttccaaaagtgttcctgaaaacacaattcaccttcttgagtttctttgctgctttgctctcagataataattgcaattctcatattcaactccccctcctaatttactggattttgttttggggggacccacctggcattctcttcctgactctctgctctatgttccacgttcccttgtcatgaactgtgattcttttgtacgaaaatacagctgaggtaataacaattacaacaaaataygtggtttactctgtccacttaattctcagtggacaggttagcttctctctcccatgatttggcaatttatgcacttagctatcaggagaatcaactaagagaatgagggcagacacatgcaaattcatcctctgttgtacctcaatgg

SEQ ID NO: 390315 - DNA, 521 bp, Homo sapiens
catagatgagtacactgaagcattgcaagtattttctcatggcctcaaaggacgtgtgctgttgacagactgcagctgaaaaggaccaattacttaactaatgttttgcagagatgtccacatgctgaccacagcaatattgaaggcataaattattatgcaaagtcatgaatgtacatccatttcagagttatctacgggaaattgtcaggtcgactttagtgacaaagcacagccaagtggtgttttgagagagagaatccataayactccagcagcacagaaggtcttttaataatatctgcactgagaacatgaacaattgctcatttttcctggtttattttttcccatcaaaacattggagtagggctcagaatttctaaagtaaatcagacttttaataaattctgttatgcttttattatatgctaataaatttctttttaaaatctgttccctgaattaacagctccataaattcagctctacaagtggcagaaaccagaaagtacagcaaa

SEQ ID NO: 390316 - DNA, 521 bp, Homo sapiens
catagatgagtacactgaagcattgcaagtattttctcatggcctcaaaggacgtgtgctgttgacagactgcagctgaaaaggaccaattacttaactaatgttttgcagagatgtccacatgctgaccacagcaatattgaaggcataaattattatgcaaagtcatgaatgtacatccatttcagagttatctacgggaaattgtcaggtcgactttagtgacaaagcacagccaagtggtgttttgagagagagaatccataatactccagyagcacagaaggtcttttaataatatctgcactgagaacatgaacaattgctcatttttcctggtttattttttcccatcaaaacattggagtagggctcagaatttctaaagtaaatcagacttttaataaattctgttatgcttttattatatgctaataaatttctttttaaaatctgttccctgaattaacagctccataaattcagctctacaagtggcagaaaccagaaagtacagcaaa

SEQ ID NO: 390317 - DNA, 597 bp, Homo sapiens
acttggtagatcagaaatgcagattctagagccccaccccacactactgaatcaakaactcagggagtaagactcagtcttctggtattttgttggggtagtggagggaaggggcgccgagcttccatgtcctcccttggtgcaccaccctccaggaacctccacatgtttggctatctagaagctccagtcatccgtgctttaacaagccctctggatgattctgatgcatgttcaagtttaagaggcactgagcactgttgagctaacatggcagacagtccattctcagccaggaactataaaggcaccagactgcagtgcagtcagccattgagctcttcattgtcatataaagaaacctatagcttctcttttgttatttcattttgtattctggcaactggttttgactctcaaagactaaaaaaatcgtgcacgtaatatgccggctttaccccggggcaaagaggatgagtattaggttgagtattaaaacaaagccttcccagaaaatcaaggtgtgttcaaagaaatggtccagaaaacagggaattacagatgagttgatacttttatgttatggagggcatgata

SEQ ID NO: 390318 - DNA, 597 bp, Homo sapiens
acttggtagatcagaaatgcagattctagagccccaccccacactactgaatcaataactcagggagtaagactcagtcttctggtattttgttggggtagtggagggaaggggcgccgagcttccatgtcctcccttggtgcaccaccctccaggaacctccacatgtttggctatctagaagctccagtcatcygtgctttaacaagccctctggatgattctgatgcatgttcaagtttaagaggcactgagcactgttgagctaacatggcagacagtccattctcagccaggaactataaaggcaccagactgcagtgcagtcagccattgagctcttcattgtcatataaagaaacctatagcttctcttttgttatttcattttgtattctggcaactggttttgactctcaaagactaaaaaaatcgtgcacgtaatatgccggctttaccccggggcaaagaggatgagtattaggttgagtattaaaacaaagccttcccagaaaatcaaggtgtgttcaaagaaatggtccagaaaacagggaattacagatgagttgatacttttatgttatggagggcatgata

SEQ ID NO: 390319 - DNA, 552 bp, Homo sapiens
tacaattaaaaaaaaaacctcccataggaacatgtttatattttgaagaattgggaataaagaattattatcttacatggtaagaatctctaacaatagagacatcagaggtatagaaataaattatgatgagacagtatatagattaaactgaaagtcaaggataatctaggaatatcagataactgcccacatttaatgactaaatgagcaaatatgacaaagtcagaattttttaaaattaggcatgtcaaatgtattatataaaggagaaattgaatktaatacttatatgataaggataattatattatgaatgtatagaatcagttaattttataacaataattaataattactggtccaaatctttgcctttcccgggtagctctggaactggtagagctgaagtggagaaatcaggcaagtgttgaacctacatgttaagacactgttcaggtgagtcttagaaaagccctaaaatgagtgaaaccaaatacgttaccccaggtaactaagaagtagttgacatagtttagcaggattaacaca

SEQ ID NO: 390320 - DNA, 444 bp, Homo sapiens
tttcctttttttgaagtattcttgttctgagttcccataggtttaaaaattattttctaactaatacacattaagaaatgatagacagatcagtgattaagagcataaaatttggagatatatctgtgctgggatcctagttcttctactgcctggatagataaactcaggcyattgtggcagatactattaatctctactgatatgtagttctcttcttctcctaggcaatagcagaagattgtgattcttatccccttgaagataagaatgaacttgaacctatctttgactaatgaaacatgagtagacatgatgtgtattactttttagtgggaaccttttagagccagtggttgattctttaggagcccacatgctttgggctacaggctttggaatctcccttagcctgaataattggattgccataatgaggacaac

SEQ ID NO: 390321 - DNA, 621 bp, Homo sapiens
caggggagtcagtgcccctaacaccctcgttattcaagagtaaactgtatatgataaagaagaggattttcagaacctggaaaaaaggaaagtaaaacttggccagataatcaaatattctcttcatgatagtaagtgcttatacaagttacttaaatataaatattttatgacttacataaaaatcctaagatagtctttgttgttactaartgtatttatagtgaactgtgtagaaaaaaaacatttcattgatattactgtttcagtcacttctaattttgtttagtatatataaagttccaaattaaaatatagcattctcccccactgtcttccataattacagatatatttattatctggatggatcttgcctgattaatgcaattgtgcacagtacctaggaaaagctaactaggtaagctgaacaatggtgatttaaataaatccatataaacgtactaacctccaaaagtatatactgtattataagttgactgtttaaaagctgtaataacctattggcattttttctctctcagcagatggtgagctattttagaaaagggctgatgtgagttgattatagtgtgtttgtgtgcatcaccacttagaata

SEQ ID NO: 390322 - DNA, 536 bp, Homo sapiens
cttctaattttgtttagtatatataaagttccaaattaaaatatagcattctcccccactgtcttccataattacagatatatttattatctggatggatcttgcctgattaatgcaattgtgcacagtacctaggaaaagctaactaggtaagctgaacaatggtgatttaaataaatccatataaacgtactaacctccaaaagtatatactgtattataagttgactgtttaaaagctgtaataacctattggcattttttctctctcagcagatggtgagctattttagaaaagggctgatgtgagttgattatagtgtgtttgtgtgcatcaccacttagaatagtatcccatgtgtaatggtgctccatatatttttgttaaagaattgaaaaaaagaattaaaatatatattgtaattcctcaactgccaagtagctttaacattgatagagytcaaaccaaacaagacaaattttgatgcttaggtataataagatacattttggctcttaatttgctttggtagtac

SEQ ID NO: 390323 - DNA, 574 bp, Homo sapiens
acctctgctatcttctagggattgtcctccaagcatggccaaagctgagtttcaggcacctcctatttttatttgttaaaaaggaaataaatggtgaagaggctctcactcttaatagcttatcattcagacaagaaatgacgtacatcaatttctctcacactccatcagcgagcatttagtaacttgacttctcccagctgcaatagaaacagatgtatattctttagccgggcagctttgcacctagccagraatctttgatcccaggaaaaagagaaaacagatagatattaatggaaacacagcatgtaagcacatgggaataaaaagagtattgtttccatgatggcactcagttctctgaacttcttccagattttatcacctatccaaaaatcacatattgattgaccatcaaaatttatttttaataatcagctgctacacttgtttagattatccattaatttctttattggacctgactggaaatatagttcatgattagaagttgttaccaatcattagagacatttttttctttttcttttgctgggaagcatatggcagt

SEQ ID NO: 390324 - DNA, 607 bp, Homo sapiens
catgtgaatgttgtttctgctttgttcaatccccatgaccaaagcttgtttggggctcctttgctgagtcagtttgcatgaataaaccataaagaatgttttgcttattctaccagtaatttccgcatttcccaaagcatgttgagaaatttccagtataatttcagaaaaaagctatatggtgcgtggttgatttaaaaaaaaaaaacttaagactagaattgatgcagaagggaagagaataagattggcacaaagaaaaaggttacttaagaaaagacttcaaagggaagagtcaaatattttcgggattgattcctacttgttccacatcaagaaccaattcttcccacygggctgcagaaaagctttgctgcgagatcagtgcttaatgacctcagagctgggagctcagcaagataggagctagaacagttactgtaccatagcaaaagaattccttcctttcagaaaggcagctgagttactgaagtatattcacgatatatttttaagtaatagaaatatttcgatatataacaattatatctatttaaggacatgatgaacacattctgctttatagaaattacaaagaattgtcaat

SEQ ID NO: 390325 - DNA, 603 bp, Homo sapiens
tcattttataaaatatataattatatgcaatatgtaaacccctgacttttgtgcagttagtttggaggacaaacattctatatttagtcatattttatttctccccactttgcacctctaccaattatatgttgagttatcraagcacaatattcatgctattgcatgtggcagcaactaccaacaatttgtcaatcctatttcatcacttttctgggcacactgctatgtttcccagcctcttttgcatttgacagggaggatgggcttgagttccacccaatagaatatgagaaaaaatgatatgaattatttccaggtctttgcttaaaaaataatttcctggccaggtgactgagcaagactcatctccaataaataaataaataaataaaaataataatttcccatgtgattttctgcacttttccctttttggttggcttggtgaaaatgaacacaataatctacatcatggtagaaccacaagataaaaagaagcatcccggaacatgacttagaggaaaaccacttgccataaagaatactcagtttggactttagatgagtaaaatatatatttctgtttgttcgcttgcttgt

SEQ ID NO: 390326 - DNA, 603 bp, Homo sapiens
tcattttataaaatatataattatatgcaatatgtaaacccctgacttttgtgcagttagtttggaggacaaacattctatatttagtcatattttatttctccccactttgcacctctaccaattatatgttgagttatcaaagcacaatattcatgctattgcatgtggcagcaactaccaacaatttgtcaatcctatttcatcacttttctgggcacactgctatgtttcccagcctcttttgcatttgacagggaggatgggcttgagttccacccaatagaatatgagaaaaaatgatawgaattatttccaggtctttgcttaaaaaataatttcctggccaggtgactgagcaagactcatctccaataaataaataaataaataaaaataataatttcccatgtgattttctgcacttttccctttttggttggcttggtgaaaatgaacacaataatctacatcatggtagaaccacaagataaaaagaagcatcccggaacatgacttagaggaaaaccacttgccataaagaatactcagtttggactttagatgagtaaaatatatatttctgtttgttcgcttgcttgt

SEQ ID NO: 390327 - DNA, 608 bp, Homo sapiens
ggtatttttattcctatattacatatgagataaatgaagctctaagggttgaagtagcttgccccatatcagacaaccaattatttctaggtccacccaactkccaagtctatatgttctccctaatagatttctactggagccctactcacaagagttggttttaacaggtattgtcttgtaagacctatctagaatgtgtttttagactttaagacctataaaactgtatttgcagatccttgataatatctttaagattgaaaacaaattctttctctcaaatgtctctctcattgacttcagtgtttcatcaaattaagtaagaatatggagtcctagaaggtttagttaagaatacaaaaattgttgttaagaggttcatatcagttaattactcctcatactccacttctgaaaaagcagaactgtaagaataccaaagtacattgttatgacaaatgacattttcatgaagaatttaatgaactcctatttctcgaggaaaactccaagacaatcaacatgagcatcttctgatacaactctaccagagatcaacctagtaagaattagtgacgggagtaggctgcaatcttcattttaaa

SEQ ID NO: 390328 - DNA, 613 bp, Homo sapiens
attcctcaaagatctagaaccagaaatatcatttgacccagcaatcccattactgggtatatacccaaaggattataaatcattctactataaagaaactgagacttttttaaatcaaataaacaacatttcataaagcaacacaggattttatatcttcccattccattagatgctattatgctgaattggaacctcattccaacctgtgtcaatattttagggttgaaatagtctgaaatataatctttactgttctcctgttgagatatctatatatttaatatgttcacattmtctgtcttcacctatattaataatatgaaaaaggaaaagaaatggggctttaggaagaacttcacatcacacgtcagagtaaacatcaaatcaagttgtcatcatcaatttactaataaactcatttaagaaaaaatattcagctggagagcaatgaatcttattgtcttttcatctgatccatatttctccacctgagacatcaaataaccagggagttcttgtaaaatacctcaggtacattgttgaaagtaatttcctgcttttgtgggataacggaaacataaatgtaaataaggtaggttgaaagttcagt

SEQ ID NO: 390329 - DNA, 611 bp, Homo sapiens
gtttgtataataacatgtacataggataatatagatttcatcaatgtatataaataaactacctgccattatggctaatttcttagcaaattattcataaaagtttattactttgtgaggcattacagacaccaaaactaacgacttggcatttccatggcccaatttgtctaaakaactatcttttacactttactgttttttaataggcagtaaggtgcccaaaaagtcttttatatcaagttcagtaggttgataacattgactataactgagtgttgctttgcttctaccctcaggtaattctgaaaattttctcatgcctctttatgaaaatggagagacctcacaagagatgctaatgaacagctcaccccaccccatcacaggttatagagtattaattcccaaattacccagacctttagttctgaatgtgaaaaaatggtttaggctaaaatgttcttgactactgacaagctcaagaattcagaggaggtagtaataagggaaaagtaattaatacataacatcaaaacttaagcacaccaccataacacctgattttggatgatgccaaatacttaaagttttccctttttattttctgg

SEQ ID NO: 390330 - DNA, 560 bp, Homo sapiens
ttataaggacatcaaatcaatcagattcatcagaaaagaaaacattcctcagagagtctgttctcaagctgatgtttcttcattgaatttggttctaaactaccatttttgttgaatcctctgtgctttcagaatgctgaaatgtaaattatttttaatttatgaaagagattatttttattttctcctatacattgtttaagtagcaccttaaaaaatagacaaatccatccagagtcaagagaactcaactcaattctctatcactgtgaaaatagactatgttcttcattacaaaagcactacaataactacaaaaattatacctcctggagtatatgatatttacatatccttgcaaaaggggaatagattaaaatatgtttataaatgtctaaaaccttaagtcagtttaacatagtattataaatcaggtttgtgggtgatattttgcctgcttctagacttgtgagcaagttatttttaggtttcttatatttaaaattcagaaaggaaaygattgggattgcactcaaagaaaggggacatttcaaaacttc

SEQ ID NO: 390331 - DNA, 583 bp, Homo sapiens
atttctcgaggaaaactccaagacaatcaacatgagcatcttctgatacaactctaccagakatcaacctagtaagaattagtgacgggagtaggctgcaatcttcattttaaacaatgtcctccctcatatggtttggctctgtgcccccactcaagtcatagtttgaattataattcccaatgttggaggagagacatggtaggaggtgattggattatgggggcagacttccccttgctgctctgaggatagtgagtgagttctcatgagatctggttgtttaaaagtgtgtagcacttctccccttcactctctctgtctcctgctctgccatgtaaggattgtgcctgcttcccctttgccttctgctatgattgtaagttccctgaggcctccccagccatgcttcctgtatagcctgcagaactgtgagttaattaaacctcttttctccataaattacccagtctcagatatgtctttacagcagtatgagaataaactaatacagaaaattaggatcagagaagtggggcattgctataaagatacctaaaaatatggaagccagtttggaact

SEQ ID NO: 390332 - DNA, 577 bp, Homo sapiens
actttgtatgaataagtttacctaattttccacactatgcatatctaatagatattactattgcacagaygagaaaactgcatctctgattattattatttattctagtcacagtgataagaaagggcaaaatatcacaatataagcccaaatagttcttagtttaatggaatattctttccactggacttcaacttgtttgtcttatttatctattcatctaagatcagttgaaaaaagagatatgcagatgcaatatttcagctaatatgtccaatctcctatttgaaatctcctgggtatttaacagaaaactcaaatttagtatgtctgaattcaagctcactgctgcacatgttcacactgaaacaaagcaatacaaaattccttcaacagattttctcatctcaataaatggcactacactgtgcctgcgtgactcatgtccaaaacctagaggtcaacctaggttcttttttttccccatcactctccatttccaagatttccatttcttctgtgaatacttctcaaagccacacccatctctctgtcagaatatcacaatgcatcgcaa

SEQ ID NO: 390333 - DNA, 532 bp, Homo sapiens
aatctcctgggtatttaacagaaaactcaaatttagtatgtctgaattcaagctcactgctgcacatgttcacactgaaacaaagcaawacaaaattccttcaacagattttctcatctcaataaatggcactacactgtgcctgcgtgactcatgtccaaaacctagaggtcaacctaggttcttttttttccccatcactctccatttccaagatttccatttcttctgtgaatacttctcaaagccacacccatctctctgtcagaatatcacaatgcatcgcaaatctgcctccccacttgtcatctcctccctaaatgctctattttcacagtagtcacagtgatttttttttaaagcacacaagatcttgactctttattcactaccttctgctttaactccttgattgtctttccactgctaatataaggaaaattttccaactcctttttaatgaccatagatcctggcttgatgttttctgcctgcctctccaaccacatgtcaaacacgtcacttcttttcc

SEQ ID NO: 390334 - DNA, 551 bp, Homo sapiens
taagaagttttctgaaatatcttaattaaagttccttccctgggtacgagcagtctcctcactttgtttatttttattgtaatatttaattattgttttctatttgttcaatttcttgtttcttgtttctccctcaggtcaagaccatattcaaatttgtatcctcagctcttatcaaactactaggtaactacacacctattaaaacaactwagcataaaaattagtgacaacaaatgctggcaaagatgaagaaactgtatcattcagacattgttagaattgtaaaatggtataatactctggacataacttatcagtttctttaaaaactaaacatatatttacaatatgacccagcaattgcactcctggaaatttatctcagagaaatgaaaacctgtacattatctttcatagcacctttaattctaatagaggaaaactggaaacatacaaaatgttggacagatgaatggttaaactgtggtatatccatatggtgaaatactatccagaaataaaaagaatatatttttgacacatgcaat

SEQ ID NO: 390335 - DNA, 551 bp, Homo sapiens
taagaagttttctgaaatatcttaattaaagttccttccctgggtacgagcagtctcctcactttgtttatttttattgtaatatttaattattgttttctatttgttcaatttcttgtttcttgtttctccctcaggtcaagaccatattcaaatttgtatcctcagctcttatcaaactactaggtaactacacacctattaaaacaactaagcataaaaattagtgacaacaaatgctggcaaagatgaagaaactgtatcattcagacattgttagaattgtaaaatggtataatactctggacataacttatcagtttctttaaaaactaaacatatatttacaatatgacccagcaattgcactcctggaartttatctcagagaaatgaaaacctgtacattatctttcatagcacctttaattctaatagaggaaaactggaaacatacaaaatgttggacagatgaatggttaaactgtggtatatccatatggtgaaatactatccagaaataaaaagaatatatttttgacacatgcaat

SEQ ID NO: 390336 - DNA, 445 bp, Homo sapiens
attcatattgtaccagtatcgatgcctggtcttgatattgtactaaattatacaagatgtaactattggaagaaactgtgtagaatggcacatgagacctctctgtatttaaaacttcctatggatctatgatattttcaaaataaaaagctaaaaaatgttaggtgttcaataaataaaacagtagtaactatattttatctaattcttaccatataaagatgcttyacacacattaactcatacaattcaatctatagtaggatcatattgatgccattattattactaacttatagcctagtagctcgctcaaggtcatatagctaatatgaggaagggttacaattttaatcctagcaaccagctccagaggatgtgctcccaatcaacacatcacagtgtttctcaaaaataattctggatggaaggaaagaagggaggt

SEQ ID NO: 390337 - DNA, 445 bp, Homo sapiens
attcatattgtaccagtatcgatgcctggtcttgatattgtactaaattatacaagatgtaactattggaagaaactgtgtagaatggcacatgagacctctctgtatttaaaacttcctatggatctatgatattttcaaaataaaaagctaaaaaatgttaggtgttcaataaataaaacagtagtaactatattttatctaattcttaccatataaagatgctttacacacattaactcatacaattcaatctayagtaggatcatattgatgccattattattactaacttatagcctagtagctcgctcaaggtcatatagctaatatgaggaagggttacaattttaatcctagcaaccagctccagaggatgtgctcccaatcaacacatcacagtgtttctcaaaaataattctggatggaaggaaagaagggaggt

SEQ ID NO: 390338 - DNA, 445 bp, Homo sapiens
attcatattgtaccagtatcgatgcctggtcttgatattgtactaaattatacaagatgtaactattggaagaaactgtgtagaatggcacatgagacctctctgtatttaaaacttcctatggatctatgatattttcaaaataaaaagctaaaaaatgttaggtgttcaataaataaaacagtagtaactatattttatctaattcttaccatataaagatgctttacacacattaactcatacaattcaatctatagtaggatcatattgatgccattattattactaacttatagcctagtagctcgctcaaggtcatatagctaatatgaggaagggttacaattttaatcctagcaaccagctccagaggatgtgctcccaatcaacacatcacagkgtttctcaaaaataattctggatggaaggaaagaagggaggt

SEQ ID NO: 390339 - DNA, 509 bp, Homo sapiens
ggattgcctttgttatatctaatattctatcaccccagatctatctttttaaatcaccacattacttagcgtaaccctgtttttctattttctagaataaccctccacattgatcaggctgatttattcacatttttccaaatgctaggtacattccttcctaaatcaaccagtcagttatagtctataatgcccatggatgaattatgttcacagttatgactcttaggaggagatcttcaatagcatctgttggtatatgctggacattacctaaaaatgtacagtttttgcaaccaacagattctattcttatacctgttggtcatgcccaggcagttacatgtaaaataactacamaaaaatttcaaaatttcaagatgtttgcccacctatataatgtccttcactctcctctccagctctctaaatagtatccataattcaaagaccagttaaatcctacaggcatattcacagaataacttccccaggaaacattgtttaaa

SEQ ID NO: 390340 - DNA, 598 bp, Homo sapiens
aatttgcagctatccttagcaaataatgagaaccatctggactgattgatgtggagattgaaagtaattgatcctgcaattgagaagctttttgaaacatgaaattaaacaagatgatgttaagcattctgaagttcatcagagtggcatatcaaatgtgttactagctgttcattttccttcgtatttttataaagagccttgactggcagaatggaacagaaatagaagctaaaagatctagatattgatgtagtgatcaaaggcacacagctggtttactttgytgtaataaacattttatgtggtacatgaagactttgattccttgccaaatgtcatgtgtaggtgagcaattattaatatgattgtaagtcttaatatgcaagtatctccattaataaaagtagactattgtaaagtgaattagcaatcattttacttatgaataaaaacttatactatttcaggtcattttcttattgtttcttgaaaaaggaagtcctttataagtccagtgaaatattacctaattttcacatcaaatttcatggtaaacaagacttattcttcttactttactgattttaaaaagcta

SEQ ID NO: 390341 - DNA, 596 bp, Homo sapiens
ttctagagataggtactattattctttccatattgctcatgataaaattgaggagcagaaaagttgagaatctatccatgatttttcagctatcgagtggtaaactaggcttcaacacaatttagtcttagagaccaatatgttaaaccctctattttctgttagatcttcagttcttaacacacagaaagaaggtatgggaagcattagataaaatattacctgttaaactgatataacaaactctaatatgtataatgtgaacaaatgttctccgaaaataaatttgtagcaaagagactttattccagtgaacagtttgaaaatctggaaaatraagcctttggtgtaaaccaaagttgtgttccagaaaacaaaggaagtttcagactttacagcaaaactttctgtccagattcccaatcagttccatttataccaattaaggattcaaacttgctcagttccaattagttgatacagctgacacttgattggtcaagtgagatgagctctgattggttgcttcaggtgagcgctagtattcccaaagcagaacaagaagtatgagttttcaggaaactcagagcacatgt

SEQ ID NO: 390342 - DNA, 572 bp, Homo sapiens
tagtagcattccactaataaacaaagaaataacraaagaattggaatattagctattcacagcacctaataaaaacaagagataatagacagcaaacatcataaaaaaggccatcaggttttatgtacaccctgaaggaagtatacaatacctcctgtgaattaggcttgcaagaaagaaaaaaagaacctctgtttgatcaagatcctaaatctaataaccaatttgcaaaaatacaagagaagcaagagctttttaaatgataccccatttcagaaaaactgacaaaccatgtttttctctgctctcacaccaacacaacaatcaacagagaagacttcgctgaccccaaaatatggggatttctatttcccagcaagcaagcaatggattctgcaacagacaccaactgggtgtcgtctaattcaattctgacaccatagacctgaaaatagtgtcagatcccataggttgagtgcacagttcccaagactgtcacttcatcttaagacactagtcaaaagtctgggcctctggaaattctaactgaccatcttcaaattaggtttccc

SEQ ID NO: 390343 - DNA, 572 bp, Homo sapiens
tagtagcattccactaataaacaaagaaataacaaaagaattggaatattagctattcacagcacctaataaaaacaagagataatagacagcaaacatcataaaaaaggccatcaggttttatgtacaccctgaaggaagtatacaatacctcctgtgaattaggcttgcaagaaagaaaaaaagaacctctgtttgatcaagatcctaaatctaataaccaatttgcaaaaatacaagagaagcaagagctttttaaatgataccccatttcagaaaaactgacaaaccatgtttttctctgctctcacaccaacacaacaatcaacagagaagacttcgctgaccccaaaatatggggatttctatttcccagcaagcaagyaatggattctgcaacagacaccaactgggtgtcgtctaattcaattctgacaccatagacctgaaaatagtgtcagatcccataggttgagtgcacagttcccaagactgtcacttcatcttaagacactagtcaaaagtctgggcctctggaaattctaactgaccatcttcaaattaggtttccc

SEQ ID NO: 390344 - DNA, 568 bp, Homo sapiens
gtcttctgctggcttaccaccttccaggaacctccaagtgtttagctatccgggagctttctgaactctttcctcttgggttttttatggaggcttctcaagggaaagaataaatggtgggaaaacgtataagacacttctggaaatttcaaccaataacaacgtatggatttatgtgggcttwtatcaaacaaactgctaaaatatgattggaaaaatatgagtaacaattattttacaatgtcaataatttatcaaatttgtaggtatgctaatggcattgtggttataattttttttaagccctaaaggccgttgtttctcctggaacaactggagaaacctgttttgttttgtttctctggaaaaccctgactactacaatgggaaaggaaaaagcttacaaatatcacccccgcccacccctttaccccccaccctaatactaaccattctgagttcaaacaaaaacacacacttcacacgtttacctacatgaaaagtttctgaataatttttggagctttttggggacttgaatagaagttattttacttgaaaaaaagat

SEQ ID NO: 390345 - DNA, 568 bp, Homo sapiens
gtcttctgctggcttaccaccttccaggaacctccaagtgtttagctatccgggagctttctgaactctttcctcttgggttttttatggaggcttctcaagggaaagaataaatggtgggaaaacgtataagacacttctggaaatttcaaccaataacaacgtatggatttatgtgggcttatatcaaacaaactgctaaaatatgattggaaaaatatgagtaacaattattttacamtgtcaataatttatcaaatttgtaggtatgctaatggcattgtggttataattttttttaagccctaaaggccgttgtttctcctggaacaactggagaaacctgttttgttttgtttctctggaaaaccctgactactacaatgggaaaggaaaaagcttacaaatatcacccccgcccacccctttaccccccaccctaatactaaccattctgagttcaaacaaaaacacacacttcacacgtttacctacatgaaaagtttctgaataatttttggagctttttggggacttgaatagaagttattttacttgaaaaaaagat

SEQ ID NO: 390346 - DNA, 568 bp, Homo sapiens
gtcttctgctggcttaccaccttccaggaacctccaagtgtttagctatccgggagctttctgaactctttcctcttgggttttttatggaggcttctcaagggaaagaataaatggtgggaaaacgtataagacacttctggaaatttcaaccaataacaacgtatggatttatgtgggcttatatcaaacaaactgctaaaatatgattggaaaaatatgagtaacaattattttacaatgtcaataatttatcaaatttgtaggtatgctaatggcattgtggttataattttttttaagccctaaaggccgttgtttctcctggaacaactggagaaacctgttttgttttgtttctctggaaaaccctgactactacaatgggaaaggaaaaagcttacaaatatcacccccgcccacccctttaccccccaccctaatactaaccattcygagttcaaacaaaaacacacacttcacacgtttacctacatgaaaagtttctgaataatttttggagctttttggggacttgaatagaagttattttacttgaaaaaaagat

SEQ ID NO: 390347 - DNA, 580 bp, Homo sapiens
ttgttctgcctgatctctcctttggaatggggctatttactcaatgcctgtacccacattatatctttgaaatgactaacttgtttttgatattacatgctcatagatggaaggacttgccttgtctyagatgagacattagcttggacttttgagttaatgctgaatgagttaagagtttgggggactatttggaatgcacaattgtgttttgaaatgtgagaaggatatgagatttgagaggagccagaggcaaaatgatatggtttggctctatgtccccacccaaatcgcatgttgaattgtactttccaatgtagggagagggacctggtgggaggtgattggatcatgcagtggggaggggattttccccttgctgttttcatgataatgagtcagttcttacaagatctgattgtttaaaagtgtgtagcacttccccctttgctctctcttctgctgcaaaatgtaaagactgtgcctttttttccttcactttctgccatgattgtaagttttctgaggccctccaaagcatacctcctttacagcctgtagaactgtgagtcaattaaac

SEQ ID NO: 390348 - DNA, 580 bp, Homo sapiens
ttgttctgcctgatctctcctttggaatggggctatttactcaatgcctgtacccacattatatctttgaaatgactaacttgtttttgatattacatgctcatagatggaaggacttgccttgtcttagatgagacattagcttggacttttgagttaatgctgaatgagttaagagtttgggggactatttggaatgcacaattgtgttttgaaatgtgagaaggatatgagatttragaggagccagaggcaaaatgatatggtttggctctatgtccccacccaaatcgcatgttgaattgtactttccaatgtagggagagggacctggtgggaggtgattggatcatgcagtggggaggggattttccccttgctgttttcatgataatgagtcagttcttacaagatctgattgtttaaaagtgtgtagcacttccccctttgctctctcttctgctgcaaaatgtaaagactgtgcctttttttccttcactttctgccatgattgtaagttttctgaggccctccaaagcatacctcctttacagcctgtagaactgtgagtcaattaaac

SEQ ID NO: 390349 - DNA, 580 bp, Homo sapiens
ttgttctgcctgatctctcctttggaatggggctatttactcaatgcctgtacccacattatatctttgaaatgactaacttgtttttgatattacatgctcatagatggaaggacttgccttgtcttagatgagacattagcttggacttttgagttaatgctgaatgagttaagagtttgggggactatttggaatgcacaattgtgttttgaaatgtgagaaggatatgagatttgagaggagccagaggcaaaatgatatggtttggctctatgtccccacccaaatcgcatgttgaattgtactttccaatgtagggagagggacctggtgggaggtgattggatcatgcaktggggaggggattttccccttgctgttttcatgataatgagtcagttcttacaagatctgattgtttaaaagtgtgtagcacttccccctttgctctctcttctgctgcaaaatgtaaagactgtgcctttttttccttcactttctgccatgattgtaagttttctgaggccctccaaagcatacctcctttacagcctgtagaactgtgagtcaattaaac

SEQ ID NO: 390350 - DNA, 580 bp, Homo sapiens
ttgttctgcctgatctctcctttggaatggggctatttactcaatgcctgtacccacattatatctttgaaatgactaacttgtttttgatattacatgctcatagatggaaggacttgccttgtcttagatgagacattagcttggacttttgagttaatgctgaatgagttaagagtttgggggactatttggaatgcacaattgtgttttgaaatgtgagaaggatatgagatttgagaggagccagaggcaaaatgatatggtttggctctatgtccccacccaaatcgcatgttgaattgtactttccaatgtagggagagggacctggtgggaggtgattggatcatgcagtggggaggggattttccccttgctgttttcatgataatgagtcagttcttacaagatctgattgtttaaaagtgtgtagcacttccccctttgctctctcttctgctgcaaaatgtaaagactgtgcctttttttccttcactttctgccatgattgtaagttttctgaggccctscaaagcatacctcctttacagcctgtagaactgtgagtcaattaaac

SEQ ID NO: 390351 - DNA, 479 bp, Homo sapiens
cctccaaaacatttgagtcttcagaattagaaagtaaagttccacttgttacctggccatcacagcacagcccttctcttccctttttggctgtaacccaggttaggatattgaacttcttgcacagmaatggccaaggaattgaggaccccataaatccctgatactgttgacatcacaagttgggactatattttttgtggtatatatactatttctgttgtaataagtggattttaagttaaactaaattatttttctgttcaagttatagttattattaggaatgatttctcctgttttgaaaaaaaatacataaaagggataagttattttaagaggtttataagagaaaataatggaatgatacttagacctaagctgggtagaacaaacaaagacaacatttggtatttatcagggtctctactagggactccctgcaaacacacaaagtaaaaaattagacttgttatcac

SEQ ID NO: 390352 - DNA, 479 bp, Homo sapiens
cctccaaaacatttgagtcttcagaattagaaagtaaagttccacttgttacctggccatcacagcacagcccttctcttccctttttggctgtaacccaggttaggatattgaacttcttgcacagcaatggccaaggaattgaggaccccataaatccctgatactgttgacatcacaagttgggactatattttttgtggtatatatactatttctgttgtaataagtggaytttaagttaaactaaattatttttctgttcaagttatagttattattaggaatgatttctcctgttttgaaaaaaaatacataaaagggataagttattttaagaggtttataagagaaaataatggaatgatacttagacctaagctgggtagaacaaacaaagacaacatttggtatttatcagggtctctactagggactccctgcaaacacacaaagtaaaaaattagacttgttatcac

SEQ ID NO: 390353 - DNA, 532 bp, Homo sapiens
tggagatttaggatttaataactgccctgctaagttttaaacatgcatggggcctgtaagcccctttaactctttgttttggctgatttctccctttgggaaaaggaatatttacccaatgcctatacccccactgtatcttgagagtaaataaattgtttttgattttayaggcacatggatagaagtgatttgccttgtctcagataagactttggaatttaaacatctgagttaatgctaggacgagttgtgattttgggggactattagaaaggcatggttgtattttgcaatgtggaaatgatatgagatttgtgagggcctagagttcgaacgatatagtttagatattttcccctcctaaatctcatgttgaattgtaatgcccagtgttggagataggtcctggtaggaggtttggggtcatggggggccagaaccctcatgaatggcttgggccatccccttggtgatcagtgagctctctgagttctcatgagacctgattattttaaaatgtgtgccactt

SEQ ID NO: 390354 - DNA, 532 bp, Homo sapiens
tggagatttaggatttaataactgccctgctaagttttaaacatgcatggggcctgtaagcccctttaactctttgttttggctgatttctccctttgggaaaaggaatatttacccaatgcctatacccccactgtatcttgagagtaaataaattgtttttgattttacaggcacatggatagaagtgatttgccttgtctcagataagactttggaatttaaayatctgagttaatgctaggacgagttgtgattttgggggactattagaaaggcatggttgtattttgcaatgtggaaatgatatgagatttgtgagggcctagagttcgaacgatatagtttagatattttcccctcctaaatctcatgttgaattgtaatgcccagtgttggagataggtcctggtaggaggtttggggtcatggggggccagaaccctcatgaatggcttgggccatccccttggtgatcagtgagctctctgagttctcatgagacctgattattttaaaatgtgtgccactt

SEQ ID NO: 390355 - DNA, 618 bp, Homo sapiens
aatattgctaatttcattttacagataagaaaactgaagcacaaagccattatattaattaacttctgttttttaatacattatcccaaatgtagtgcctactacaacagacatttatttagctcatgattctgtggtttagaaaattggtctgagctcatttaggcagttgttctgccatgattaagctcccttatgcttctgtggttagatgcacctcagttagatgctggttgggatgaaaatagtgactgggtcacatgtgtctcatcatccagcagaccaccctgggcttgttcacatgccagtgcttgatagagaaaaagagagaggagagcaagacctacatttgtaactactgtattccaattctgccacattctattagttaaagcaagtcacagtaccagtcaagactcaagggatgaggcaatataccctatacttaatgggaggggatacaatgtcatgttgtaaagggatgtggatactggaaggagtgcataattgtggcyatgtatgctatgcagcaaactaaaaactaaaatacataaaaaaataaatagggggaagacagagtgaatttaactttattggatattctttaatctactgaat

SEQ ID NO: 390356 - DNA, 581 bp, Homo sapiens
tcgtaaatttatagtgggaatacaaccataagctcagaagtttgaatgttcttacatggcaataacatggagcatattttcattcctttaattttgttttgcaaaatggaagtagcctgaaaaataaaggagaaatttaatcttgatttacataaataaatctagctatttattttctcctatcaaaattaatggagactaaaaacttagacaaaataaaacagatccctccgtaagaattcttaggtctttctcctttttttttgagatgggggtctcactctgttgcccagtctggagtgtagtggtgcaatcttggctcactgcaacctcttgcctccaatcactccactgcaaataattctcctgccttagcctcccaagcagctgggattacaggcactcaccaycatgcctggctaattttttatattttcagtagagatggggtatcactatgttggccaggctggcatcaaactcctaacctcaagtgatccacccacttcagcctcccaaagttctgggattacaggtttgagccaccacgcctgcctgtaatagtcttctgacagtcactc

SEQ ID NO: 390357 - DNA, 581 bp, Homo sapiens
atgttccagcagttatttttgaacacttcgctttcccctaataatggtccagcctttaataaatgtgtaatctgtctgtatgtctaagaaacatcccaacatatccttctcctatagggagcagaccgttattatttttttcccttcctacttcatcaccaatataaaatctttaatttcctttgcaagcctttaagagagctttgtctaatctttargactgagacctagaatctaggatatgaatgagataatatttttctgggtactaatatatttgaacacagagtgggtgtttttaaagctgtaacatttagtacagattgttctgccatgcttacccataaaataattttgactcttctaaataggagattacagtggaaatgtcaaacaagcctattattcccttttcttcatttgaacatttttgtgattttactgacaccaatagaggcatacagagacactccagttctaaaaagccaacagaaaataacacatgacaaaagaatggcacacttaggcaatagcaatatctagactggtatttatcacatttaatagaaaaaaaagtagtc

SEQ ID NO: 390358 - DNA, 583 bp, Homo sapiens
cacactcttccaagattaagccagaaagagattgaaaccttgaatagtatcaattctgcagtttattacactagtaatagaaagctataarccaaaaatagtcctaaaccatgtgaactgagtccttgaatttgagccagcctgggcaaaaggtgaaaccccgcctctacctaaaataatacaaagtattacctaggagtggtggtacatgcttgtagttccagctactcaggaggctattgtgggagaattgcttgagccaggcggtggaggttgcggtgagctgtggttattccactgtactagagcctgggcaacagagcaagactgacttaaaacaacaacaacaaaacaaacaaacaacaacaaaaaacacaaagccagtagcacatcaaaaagttaatacatcacaatcaagtaggctgtatgcctgggatgcaaggatggttcaaaatatgcaaatcaataaacatgatttaccacataagtagaattaaaagcacacacaatatgattatctcaatagatgcagtaaaagctttcaataaaatccaacatcccttaatgataaaaaccctcaaca

SEQ ID NO: 390359 - DNA, 583 bp, Homo sapiens
cacactcttccaagattaagccagaaagagattgaaaccttgaatagtatcaattctgcagtttattacactagtaatagaaagctataaaccaaaaatagtcctaaaccatgtgaactgagtccttgaatttgagccagcctgggcaaaaggtgaaaccccgcctctacctaaaataatacaaagtattacctaggagtggtggtacatgcttgtagttccagctactcaggaggctattgtgggagaattgcttgagccaggcggtggaggttgcggtgagctgtggttattccactgtactagagcctgggcaacagagcaagactgacttaaaacaacaacaacaaaacaaacaaacarcaacaaaaaacacaaagccagtagcacatcaaaaagttaatacatcacaatcaagtaggctgtatgcctgggatgcaaggatggttcaaaatatgcaaatcaataaacatgatttaccacataagtagaattaaaagcacacacaatatgattatctcaatagatgcagtaaaagctttcaataaaatccaacatcccttaatgataaaaaccctcaaca

SEQ ID NO: 390360 - DNA, 583 bp, Homo sapiens
cacactcttccaagattaagccagaaagagattgaaaccttgaatagtatcaattctgcagtttattacactagtaatagaaagctataaaccaaaaatagtcctaaaccatgtgaactgagtccttgaatttgagccagcctgggcaaaaggtgaaaccccgcctctacctaaaataatacaaagtattacctaggagtggtggtacatgcttgtagttccagctactcaggaggctattgtgggagaattgcttgagccaggcggtggaggttgcggtgagctgtggttattccactgtactagagcctgggcaacagagcaagactgacttaaaacaacaacaacaaaacaaacaaacaacaacaaaaaacacaaagccagyagcacatcaaaaagttaatacatcacaatcaagtaggctgtatgcctgggatgcaaggatggttcaaaatatgcaaatcaataaacatgatttaccacataagtagaattaaaagcacacacaatatgattatctcaatagatgcagtaaaagctttcaataaaatccaacatcccttaatgataaaaaccctcaaca

SEQ ID NO: 390361 - DNA, 571 bp, Homo sapiens
tatgtagtgtaacattctaaacaagcttaacatatacctaggactttatctttctttctttgagtccacgaaacattttctatggacctattttatagcagttatatttttattctctaattatttgcacaatattttaaattatttatctctacctgttcgattataaattccctaaaggaaagaaagatgttttgcttaatttccatgccctgttttccacatatccggatttgaaaatatctggcaagcaagtaggttcattmtcctgcacatctgctatgtatttatcattcttttccaatggggctagggtacagagttagtattttttataacatgcccttctatgcagccactgcttttacctgacacctgaaaaagaaacttgtttgtcacaatttatcactaccttaatggcaccaagcagacatttattgaatcaatgaagttataaagtataccaaactcaaactaaggtctgtgaagctgtctaaataaagtacatgagtttcgttgcaagcagtttataatcttttttgcttactgaaaggttttgcttactttacag

SEQ ID NO: 390362 - DNA, 571 bp, Homo sapiens
tatgtagtgtaacattctaaacaagcttaacatatacctaggactttatctttctttctttgagtccacgaaacattttctatggacctattttatagcagttatatttttattctctaattatttgcacaatattttaaattatttatctctacctgttcgattataaattccctaaaggaaagaaagatgttttgcttaatttccatgccctgttttccacatatccggatttgaaaatatctggcaagcaagtaggttcattctcctgcacatctgctatgtatttatcattcttttccaatggggctagggtacagarttagtattttttataacatgcccttctatgcagccactgcttttacctgacacctgaaaaagaaacttgtttgtcacaatttatcactaccttaatggcaccaagcagacatttattgaatcaatgaagttataaagtataccaaactcaaactaaggtctgtgaagctgtctaaataaagtacatgagtttcgttgcaagcagtttataatcttttttgcttactgaaaggttttgcttactttacag

SEQ ID NO: 390363 - DNA, 571 bp, Homo sapiens
tatgtagtgtaacattctaaacaagcttaacatatacctaggactttatctttctttctttgagtccacgaaacattttctatggacctattttatagcagttatatttttattctctaattatttgcacaatattttaaattatttatctctacctgttcgattataaattccctaaaggaaagaaagatgttttgcttaatttccatgccctgttttccacatatccggatttgaaaatatctggcaagcaagtaggttcattctcctgcacatctgctatgtatttatcattcttttccaatggggctagggtacagagttagtattttttataacatgcccttctatgcagccactgcttttacctgacacctgaaaaagaaacttgtttgtcacaatttatcactaccttaatggcaccaagcagacatttattgaatcaatgaagttataaagtataccaaactcaaactaaggtctgtgaagctgtctaaataaagtacatgagtttcgttkcaagcagtttataatcttttttgcttactgaaaggttttgcttactttacag

SEQ ID NO: 390364 - DNA, 557 bp, Homo sapiens
ggtagtgggaagacatacatgtatgcaaatgcaataaatactacattaaaaatttgggtgggccatgcctaagaaagagcacttatattcacattactaaactttgctacattccacaagcaatataatgtctaaacccctgaacaatttagaatatatccaaagtagttattgatgcatcaaaaatggcatcagttaacacaagaaaagtgaatcatgaaacgttatattattccattcttacactgctataaataaatacctgagactgggtaatttataaagaaaagaggcttaaacagttcatgtctccacaggccgtacaggaagcatggctggaaaggcctcaggaaacttaaaataatggcagaaagtgaaggggaggcaggcacatcttcacatggccagagcaggaggaacagcatgagggaggaggtgccacacacttttaaacaaccagatcttatgagaactytatcatgagaataacaccaaaggggaaaatctaccctcatgatccagccacctcccaccaggccccacctccagtgagggag

SEQ ID NO: 390365 - DNA, 557 bp, Homo sapiens
ggtagtgggaagacatacatgtatgcaaatgcaataaatactacattaaaaatttgggtgggccatgcctaagaaagagcacttatattcacattactaaactttgctacattccacaagcaatataatgtctaaacccctgaacaatttagaatatatccaaagtagttattgatgcatcaaaaatggcatcagttaacacaagaaaagtgaatcatgaaacgttatattattccattcttacactgctataaataaatacctgagactgggtaatttataaagaaaagaggcttaaacagttcatgtctccacaggccgtacaggaagcatggctggaaaggcctcaggaaacttaaaataatggcagaaagtgaaggggaggcaggcacatcttcacatggccagagcaggaggaacagcatgagggaggaggtgccacacacttttaaacaaccagatcttatgagaactttatcaygagaataacaccaaaggggaaaatctaccctcatgatccagccacctcccaccaggccccacctccagtgagggag

SEQ ID NO: 390366 - DNA, 444 bp, Homo sapiens
ggtggggaagctaagaatcaactgtaaagattctaacccaaggatgtagtactgttaaaggactgagatttagtagtaaaattatatcacactaacccttcctcaaatcttaccagcatacaccaacagggctgcagtagaaaagcagtgkattacaaaaaagacctgcaggatgtagactttgtttaaggagagacttttagggaagctcaaagacaacaggggagacaaaatcaaaaacagtagtggaatgtatagcttctgatgcctacagttacagaaaacattaagcaagcccagcttcaggccagattaacatacaaccatatattaaaaatctatttaacccaggttctattatccaatacattatgtccagctttcaacaaaaaaattacaaatcatgctgaaagacaggacaaacataatctgaagacacaaagc

SEQ ID NO: 390367 - DNA, 444 bp, Homo sapiens
ggtggggaagctaagaatcaactgtaaagattctaacccaaggatgtagtactgttaaaggactgagatttagtagtaaaattatatcacactaacccttcctcaaatcttaccagcatacaccaacagggctgcagtagaaaagcagtggattacaaaaaagacctgcaggatgtagactttgtttaaggagagacttttagggaagctcaaagacaacaggggagacaaaatcaaaaacagtagtggaatgtatagyttctgatgcctacagttacagaaaacattaagcaagcccagcttcaggccagattaacatacaaccatatattaaaaatctatttaacccaggttctattatccaatacattatgtccagctttcaacaaaaaaattacaaatcatgctgaaagacaggacaaacataatctgaagacacaaagc

SEQ ID NO: 390368 - DNA, 648 bp, Homo sapiens
tttacagaatgtagttaatggcagcaagtgggtagaagaggggagctagaatggagctcactgaagcaaactcaacaaaggccaagagggaaagctggtgaggacgctgagggaaaatgtctccagcctagtgtcaacaagttctgtctctacatggctgtgtcttttgggaaatcatgctggaccaaacagagcagaagatttatgaattgagattaaccgctttctggggtctccctgtgggtatctcataaatactcatttatgccttttatagtgttctatcttttctttgacttattctccccattgctggtttccataccaatctagtcttcagatatcttcctgctgcttcctttctccccacatttgaaattcagcgaaccattatatattgatgtaaagttccagacgcctattgtgcatgcaatagctagggccagggaaggattaaatacaagattgtatatatgaaagtaccaygttcattttattaataaaaatataccactgtcatttgttactgctagtgacaataatgtgtcattatgatgtaataacaatagcagagacagggtggggaagctattttcttcccacgattcgattttcttctttgaagaggtagtaattcggttgtacaca

SEQ ID NO: 390369 - DNA, 447 bp, Homo sapiens
tgtagaaatacaagataaatttgctttagcaattaacacagaattttgggttcctctattctgtgatttggggaatctccatcccataacatcatgttgcataccctaaatacatagaattatattgtatacatttaatgtgaatgtctaatatcacactttattgcctaccaagtattatttactgagctactaataacaacatcaaacaccrtgagtattcactatgttccaggtgctggtcagatgttttacacattacttcatttaattcccacaacaaattcaccaagtaggcattataatcaccatggtggcaacacactggtgagactcacagtatacccaccatgtgaaccaactagatgagaaaatacatctctctctttcattgcatctactatgtggaatcatcctcacatggtgcttaccatctgatgcggaagc

SEQ ID NO: 390370 - DNA, 447 bp, Homo sapiens
tgtagaaatacaagataaatttgctttagcaattaacacagaattttgggttcctctattctgtgatttggggaatctccatcccataacatcatgttgcataccctaaatacatagaattatattgtatacatttaatgtgaatgtctaatatcacactttattgcctaccaagtattatttactgagctactaataacaacatcaaacaccatgagtattcactatgttccaggtgctggtcagatgttttacacattacttcatttaattcccacaacaaattcaccaagtaggcattataatcaccatggtggcaacacactggtgagactcacagtatacccaccatgtgaaccaactagatgagaaaatacatctctctctttcattgcatctactatgtrgaatcatcctcacatggtgcttaccatctgatgcggaagc

SEQ ID NO: 390371 - DNA, 594 bp, Homo sapiens
tctagtcaaccactaaaaccttataattcaaagatactttcttttacaaaaaatgctgaaccacatttcttgatgatcaacaggtatctttaccaataggcaaccattttaactatttaattatctatttatgaaaacagacagtagaaaacagaaaataaaagtgttaagaaaaaatgaaataacccataatatcaccattcagagaaatatttagtgtatttcatctaattgatctattaatacatttaagactgtgtatttctgcatatataagaagtactgagatcatgcttatatattgttctataycctggtttttttcactcagtattataagaaacagcattttcctgtatcttgaaagttattagaaatatttaaaacatctactagtcctaaataatagcaacataccaaactttgttgaataattctcctattagttgttgttttctaggtcttgctaatactgcaatgaattgttgtaaatgtttgtccaaatttctcattattcccctaggatcgtttcctagaagtggagatattgggtcaaaaggtaaagaaacaaggctcctagcatattgccaaacg

SEQ ID NO: 390372 - DNA, 565 bp, Homo sapiens
cattctttgcagggaggggtgggtggagctgtgccattcttactgttaggaaagcaatgtatccccttaatcacttattttcctgggactgacttattcctaaaattacagtgaaaattggttaaatttcagaagactgaaactatattagaatacataagtgaagtaaaaaaagatcaagctggaattctaactagatttttggctaagtattcacagtttggagattcagatttagcctttcaataataaaatgyaggcactgtctattggtaatttaattggaagagagatgcagaaacaagagaaatgtggagaaggagtaaaaaaaaatgctccttcctttattaggaacaaaaattagcttcatctaagagtcttataatggcaacttgaaatgtattttcaaaaactcaactgtcagcacattctaggcttacattcttttacttatttatattttctaaaagcacataatttttatcttttaatctgtgactgaaatctccctctctgacccagaccacaacactgtgaatatgcacatacgtgcatacacaggtgc

SEQ ID NO: 390373 - DNA, 589 bp, Homo sapiens
ctagatttttggctaagtattcacagtttggagattcagatttagcctttcaataataaaatgcaggcactgtctattggtaatttaattggaagagagatgcagaaacaagagaaatgtggagaaggagtaaaaaaaaatgctccttcctttattaggaacaaaaattagcttcatctaagagtcttataatggcaacttgaaatgtattttcaaaaactcaactgtcagcacattctaggcttacattcttttacttatttatattttctaaaagcacataatttttatcttttaatctgtgactgaaatctccctctctgacccagaccacaacactgtgaatatgcacatacgtgcatacacaggtgcacatgtgcgcacacacacacacacacacmccccttagttatgcttcatcccaaaaggatgactgagtgtcccatcacaccccaggtgacaaactgttgagagtttagagcagaaatacatatcacttgagcttttccagtctgtgtggccttgtatttattttcaaaagaagtttaagacagcaatctcaatctgcaatgaataactgatcaaaact

SEQ ID NO: 390374 - DNA, 581 bp, Homo sapiens
ctctcctgtacattacattgccattcttaaggtttataaattatcagcttggaggtttctgtgagcctcttgaaatgacacgtaacattctgtatacatactacatgggagagtctgggtacacagcttgcacrtgtttctcaaaggggtctgggacaccataaaatatggagaaagtgggaggtgactcttagatttccacctgtaccaccatagccccttttttaaaagaacaaaactctttaaactctgatacttggacagcagtgaaagatgtactgatgactagtttattttggcacatataaaatttattgatattcatttgtttatcccttagtttcgtagatatatctgccatttgtgaatggtaaaaccaaaggtcactagaatcctttgttgtggggaaggtatagatcgtacatctaacccaagtggatgtgtatcacctatatgatgataaaaatcctaacttctatcaggaacatgtaagaactatgtggtctgatacattctaaaaattacatctaggttacaaaatgttcaaattattagctttcttttttttcccccctttaaaa

SEQ ID NO: 390375 - DNA, 606 bp, Homo sapiens
tttcttccaatttatataatgtgcatgtagaggcacacgcagaatgtgatggaactagcaacatcatttgtacattgacaacagattttagttttcatcagtattttaagttcatcaaattactttttagtaccttgaataacattttctcaaatatgcagtgatcatactttattacagcaatgtggctttctttgattaatataacatataaaatgttttttaaatttgtctcttttcattcccttgcataatgagagttttattctgtagatctgaagtttacatgtgaaaattatgtgatttttcacattcaagatcttgattgatagtggcactcagtaaacacttgccacttgttagatactagtctgagaacttcatgcacatgactgatttaatactcactaagctaatgtggtgggtgctagccctgttctcattttaaaaacaaggaaatgacaggcccagaaaggttaagtaatttggccagggtcaggtagcaggtccaggatgtgttctacaaaaccgaaactttgcttttcctctttagatttctgacaagaaacctatttatgmgaagtgttattgttaacattgtttttg

SEQ ID NO: 390376 - DNA, 607 bp, Homo sapiens
aaacaagtggtaatttaattttgttcaattccattaaaactgttattgtcctccctttattgaaataatttagtgatattagttttgtgagctatatttattttttttaaatagcataaaattggcataaaatcatgaaatcacttattactttccattgctaatttggagtataatgtttttgttctaatttcatgtttctcctagctacaagacatccatttaattttatacctccaaaatgaaaatatccttgattaagataattctatatccttcatgattgaatgttgagcagttttatatttttaataaaaataatttcatgaaatttgtttcttttggagatactttatatacgaatgtcattgaaaaaatctgtattttaaatattaatcttccattattgttttgtatcaggatcttgttattttagaatatctatctagtacaggcctgaacaaaaacatgccttgacaactattcgttctgmagaacagtgtaattcattttgttaatacaattctttggaaaatatatacacatattttcaattatttatcttcattgggtgagtggctacctgcaggattggattgtgtaggtt

SEQ ID NO: 390377 - DNA, 555 bp, Homo sapiens
tatgcaatggacatcactaggaatggtttcttatttatgtgggttggcctaaggtgaaactctgtcctgcaaaacaataaaatcttgataaaacatgtaagtcagtaagaagaatgatattagatcctctaatatgactcacrtacagagagtctattgttctgagcagcagtgatggtcttttcatataggaatataattataaaaacaatatgcatttgtcttaaaaatatggttttctactctgtaaaagtaaaactcattcatcatagaaaacttacaattccaatttttgctttcactcctctatacctgtctatacatatttttaaaaggaaaaattgtatgcttttgtgtaagcctttagtaaccacttgcatttgcggtatctcatgaacattttccagtgttatatattctagaaaatgtatatatgtgtgtatatatggaagatgtatattgttgacaaaattatattgacgtatttaaacaatcttctattattaggtggtttcttatgatggttttgataaactaaatttaccatagactctt

SEQ ID NO: 390378 - DNA, 556 bp, Homo sapiens
tctcaaattctccagagggaaggagagagagacaccaaccgagagtgtccattcctcttctcttcagaaacacctggggtgggaagtaatgtaaaggagaagtgcatggtgctgggataatttataatcctgatcaaggtctttagaagctgtattctctttctttgccttgattttttcatctgtaaaataggcaaacaggggyggcctattgtaactcatgagtttgttgtgagcttcaaatgaagtaattggtgtgaagtgcttaaggatgtagtgattggaaattgtaagccatataaaccaccgctgctacagtggtgcagtggtggttggctggttattattattattactatgaaggaatggtatttatttttgtgtcatgaggttgtaagctcaaagagtgcaagaaatttggtttgttcactgctgtagccccatcggggcatgcgtaggtactcagtaaacatttgttgaataaacgctttgggaaagttagtagggaaacagtgtgcaaatgtttattcccactggtgcatttactgaggccagc

SEQ ID NO: 390379 - DNA, 556 bp, Homo sapiens
tctcaaattctccagagggaaggagagagagacaccaaccgagagtgtccattcctcttctcttcagaaacacctggggtgggaagtaatgtaaaggagaagtgcatggtgctgggataatttataatcctgatcaaggtctttagaagctgtattctctttctttgccttgattttttcatctgtaaaataggcaaacaggggtggcctattgtaactcatgagtttgttgtgagcttcaaatgaagtaattggtgtgaagtgcttaaggatgtagtgattggaaattgtaagccatataaaccaccgctgctacagtggtgcagtggtggttggctggttattattattattactatgaaggaatggtatttatttttgtgtcatgaggttgtaagctcaaagagtgcaagaaatttggtttgttcactgctgtagccccatcggggcatgcgtaggtactcartaaacatttgttgaataaacgctttgggaaagttagtagggaaacagtgtgcaaatgtttattcccactggtgcatttactgaggccagc

SEQ ID NO: 390380 - DNA, 464 bp, Homo sapiens
cctggtgcaaatgacaagcagctggtgagaccatcatctaccaccatcacattatcttcctatatgctccatgattaaccagagaaaacagcatcaacctgagaaagactatacatccttaactggataaagagccatactacgtctttagattccatatataaataaggtcgcacrgtatttgtctttctgtgtctggcttatttcattttatgtaacatcctccagattcatccatgttgtcgcaaatggcaggacttttttcttttttaagactgaataatattcctctgtgtgtgtgtgtgtgtgtgtgtgtgtgtgtgtgtttgtgtgtgtgttcctgtgtgtatgtgtctgtattgcacattttcttcatccattcatccactgaccaacacttaggttgtttccatatcttggctactgtgaataatgctgcaaactcagagaggcagagagtagaa

SEQ ID NO: 390381 - DNA, 617 bp, Homo sapiens
gtctgtttacttgggaatttattcattcatttggatggtattttatttctcagagcccctctttggcagtatcattgttgctgtactacaggaagatctccttagccatgatgctgatttctgagctcatgtcatatgcatttttaagtgactgctgactcctgatggtccacaaacaccagaggagcaattatccatttggacaaaatggacatgggaagatctaggacatactttctactcttaggaaaatggtattctggragatcattcttacatgagtagagttgtacaggttttgtgctgatggcctagttatgtagcctttgttactattcagtcttcctttgcagctactacaggacctggaattgcagagtggttcagtaagcctagttactgatgttttttatagttgattttgaagagaaatatggtaaacagtaattcaaggttgtattaacttaattcacttttttccatttatattgtattttatgaaggacagttaatagaacattctggctatagaatgataaacgcatggggaaaaactgtaattttcactaaatagaacaagaagaacctgtcgtattgggaaattaaagttagcaaat

SEQ ID NO: 390382 - DNA, 583 bp, Homo sapiens
gtattctaagaccggatacccatcrcttcttctagacgacaggtcgccgtgtgatttccatgactccactaaagtattgacaggaggaaaggaactcaggtgttggaaagattggtctctagccgatcgtgataaagatattgtaccttgagcaccaatcctgtagtggaaggactgtccacctgaattcaccccaacaatagcagaggaagggatgctggcctctgggtaatagctcccatcatctggttcttgtttaatacccactgggaatccgctgccttcacagttaccatcaaagccgggcacaggtggtcctaaaattcctgatagggaataatagtctttatcatccataaaggaaaaatacgagccatccataaatggaaacgggtttactgttggattccctttaaaagaggtgcctgaacatgaatgcttggttgattcttgctttattggtactgagaatgaagaatccgaatttattttgctatttcctcctagacatgagctgctaaaagctccatctggttctggttttatgtactggacaatattaagctggccagtcacaccattt

SEQ ID NO: 390383 - DNA, 583 bp, Homo sapiens
gtattctaagaccggatacccatcacttcttctagacgacaggtcgccgtgtgatttccatgactccactaaagtattgacaggaggaaaggaactcaggtgttggaaagattggtctctagccgatcgtgataaagatattgtaccttgagcaccaatcctgtagtggaaggactgtccacctgaattcaccccaacaatagcagaggaagggatgctggcctctgggtaatagctcccrtcatctggttcttgtttaatacccactgggaatccgctgccttcacagttaccatcaaagccgggcacaggtggtcctaaaattcctgatagggaataatagtctttatcatccataaaggaaaaatacgagccatccataaatggaaacgggtttactgttggattccctttaaaagaggtgcctgaacatgaatgcttggttgattcttgctttattggtactgagaatgaagaatccgaatttattttgctatttcctcctagacatgagctgctaaaagctccatctggttctggttttatgtactggacaatattaagctggccagtcacaccattt

SEQ ID NO: 390384 - DNA, 559 bp, Homo sapiens
ataaaacatagactggagagggacacaccaggggagaggtaacgtccgggcaaggagggaaggaaatatgatcaggaacccttcaagtatacattccttaaaaaaaaaaaactctgcaggaaatatgatcaggaacccttcaagtatacattccttaaaaaaaaaaaaagtctgcgggaaatatgatcaggaacccttcaagtatacattccttaaaaaaaaaaagtctgcaggaaatatgcaaaatgttgacaattatatctgagagatgaatgcatgaatgtttgttctattcttctctagtcttttccaaacagaaaagtatcttggggtrgagttataatattctcaggtgaaaacatgcccaaatggggtttagggttaggtaagaagtgtgagacggtagcaagaattcaaatgttctgggtggtggcaggcaggaaaggtattcacaagggccaaagagtagttccagaatcacctgaaaggagggcaaggtagggctgcctagggagacagtacactacgggcactgtgtgaatgaaaaatacaacaaggt

SEQ ID NO: 390385 - DNA, 484 bp, Homo sapiens
tttctggtccttttaaagtaatgtaaggctttccccttggttttgtggtgaatgatacacctccatagtatctttcataggtagtcagcagctgctaatgttcacagttctcttccatttttatatatatatctttcagtaggtagacattcaggtgctggtaaaaggatcattactaaaatgtattgtttccatacaagtttcctacaagtgcaagatccctcaggctgtaataaatgctgaagttttgtttttgttttttgaaatatggagaaggtagagtttcaggagacaaaattagatttcccagcaattcacaaattaatttccttatctttgtttcatcacatgctttcctcacagagaaattgggaagggaaatgaaawaaatgtgaacgcacctgacattttttagtagggaaataagtttaaagtacagtcatttttcaatgattcacactagtctgtgggaatattatcctaa

SEQ ID NO: 390386 - DNA, 509 bp, Homo sapiens
taaatggtaatgcttttaagtaataaaaaaaggaaaaaggacaactgccatttgctaaacatccaycatgtagacattcacatacaacagcttcatgcaactcctgcaaaaactttaagttattaggactttctacattttataggtaaggaaactaaagttgagaacgtttaagcaatttgcccaagatgatggaggctggacttgaattccgaacaattctaaaggcaacaattcgctcagttaaaaatacggagtgatttttccatgaactttaatcgttaactggagaagttataactaaacatgttagtttaacttgaaacctaagtcacaagtaggtgttgaatgggttgttcgctctaatcacttgagcagttccatgtctggccaatgatcccctggtatctatttctgaccagccagggaggctgcactacaacaatgtcaacatttctgcaatgctattttggagataagtacttaaaaaatgaatgagttgaaaattc

SEQ ID NO: 390387 - DNA, 509 bp, Homo sapiens
taaatggtaatgcttttaagtaataaaaaaaggaaaaaggacaactgccatttgctaaacatccaccatgtagacattcacatacaacagcttcatgcaactcctgcaaaaactttaagttattaggactttctacattttataggtaaggaaactaaagttgagaacgtttaagcaatttgcccaagatgatggaggctggacttgaattccgaacaattctaaaggcaacaattcgcycagttaaaaatacggagtgatttttccatgaactttaatcgttaactggagaagttataactaaacatgttagtttaacttgaaacctaagtcacaagtaggtgttgaatgggttgttcgctctaatcacttgagcagttccatgtctggccaatgatcccctggtatctatttctgaccagccagggaggctgcactacaacaatgtcaacatttctgcaatgctattttggagataagtacttaaaaaatgaatgagttgaaaattc

SEQ ID NO: 390388 - DNA, 542 bp, Homo sapiens
aagtggtctaagtatagtaataacccaaacagaaatcacatgccacctgacaggatgcaatgagaagaatgcacaaaacagagctgggagtagaatcctgcccttctgtctttctgttacattatcattccattccagcgggagacagtggtacaaaagctgatgttaaggttggggagaccatgatattcctgccaaaggtacatctgttgaatctaatcatgaggaaacataccagaaaacccaatggaaagactttctaccaaataactgccctttaattttcaaaagcagtatcaagtcatgaaatctagaaaagactgaggaactatcccagactaaagagacatgacaactaagcacaatacataattctgaactggatccttttgctataaaaggcattattgggacaaacagcaaaagagtagatgccagtaactyacccatactaatttctggattttaatggttatattctcattatgtaagtgaatgtccttgatgctaggagttctctataatatactttcttttttgta

SEQ ID NO: 390389 - DNA, 622 bp, Homo sapiens
tttaagtgactacctattaggaatctatagaagaattaagtcgcataattcactttctacatgtttcactattattctcattatctcagataccttatcttaaattagattaaaaggttcgccactacagagagatctcaacagacactaaaatgcattgaaccaattcactaacacagaaaaaggtatwtattttaataaaagtagttaaaatggtacaaaatatagaaatgccttaggttggaaaatcaaaatataaagatctgaatttactacacaacactctaaaacatttaatacatgtaaaatgaaattcaacttacaaacaacttcttagtaacaaagataaacagttatgtaggcaagtcatttaacagcactagctcttagttttcccatctgtaaaaaagggagttggtctagacatctaaaacctctttacattctaaattatatagcgttaagttctttttaaacttcaaatatttagtaggattaagcggatttcaaatacctcctctctccatacttaaaagattcagctaacacttccttggataacattattaggctcatttggatgtaccaaacaattaatttaagcaaaaggatagcaaaacaa

SEQ ID NO: 390390 - DNA, 622 bp, Homo sapiens
tttaagtgactacctattaggaatctatagaagaattaagtcgcataattcactttctacatgtttcactattattctcattatctcagataccttatcttaaattagattaaaaggttcgccactacagagagatctcaacagacactaaaatgcattgaaccaattcactaacacagaaaaaggtatatattttaataaaagtagttaaaatggtacaaaatatagaaatgccttaggttggaaaatcaaaatataaagatctgaatttactacacaacactctaaaacatttaatacatgtaaaatgaaattcaacttacaaacaacttcttagtaacaaagataaacagttatgtargcaagtcatttaacagcactagctcttagttttcccatctgtaaaaaagggagttggtctagacatctaaaacctctttacattctaaattatatagcgttaagttctttttaaacttcaaatatttagtaggattaagcggatttcaaatacctcctctctccatacttaaaagattcagctaacacttccttggataacattattaggctcatttggatgtaccaaacaattaatttaagcaaaaggatagcaaaacaa

SEQ ID NO: 390391 - DNA, 622 bp, Homo sapiens
tttaagtgactacctattaggaatctatagaagaattaagtcgcataattcactttctacatgtttcactattattctcattatctcagataccttatcttaaattagattaaaaggttcgccactacagagagatctcaacagacactaaaatgcattgaaccaattcactaacacagaaaaaggtatatattttaataaaagtagttaaaatggtacaaaatatagaaatgccttaggttggaaaatcaaaatataaagatctgaatttactacacaacactctaaaacatttaatacatgtaaaatgaaattcaacttacaaacaacttcttagtaacaaagataaacagttatgtaggcaagtcatttaacagcactagctcttagttttcccatctgtaaaaaagggagttggtctagacatctaaaacctctttacattctaaattatatagcrttaagttctttttaaacttcaaatatttagtaggattaagcggatttcaaatacctcctctctccatacttaaaagattcagctaacacttccttggataacattattaggctcatttggatgtaccaaacaattaatttaagcaaaaggatagcaaaacaa

SEQ ID NO: 390392 - DNA, 589 bp, Homo sapiens
ttggtctttctgctgactcacccccaacctgaagttatctaagagccccagccaccagtcatctcattggcataaactcaggtatgattaaaaggagcttattatgaatgatgaagatgctcttcttatacctatccttcaggaatttacaagggttttaagagctcaatgccaggaaccagagatgaagaccaaatatgtatttcttagtgtatcatcatatcacaaagtgttctagggkcttagagaaagagggtagctctgtggagtcaagattgtaggtcttggattgataactttactcaaaacctcacaaataaatcttaatcatggtcagtagcaacatccttgaagatggcaattctatcattttatttttcacatcattgtcagcatcatctggaaccgatatttactgaccctcagttgggtgcaaatacagaaacacagtcttggccaggtgctgtggctcatttctgtaatcttagcactttgggaggccaaggcaagaagattacttgagcgcaggagttcaagaccagcctgggcaatatagtgagatctcatctctacaacaaatttacaaatt

SEQ ID NO: 390393 - DNA, 589 bp, Homo sapiens
ttggtctttctgctgactcacccccaacctgaagttatctaagagccccagccaccagtcatctcattggcataaactcaggtatgattaaaaggagcttattatgaatgatgaagatgctcttcttatacctatccttcaggaatttacaagggttttaagagctcaatgccaggaaccagagatgaagaccaaatatgtatttcttagtgtatcatcatatcacaaagtgttctagggtcttagagaaagagggtagctctgtggagtcaagattgtaggtcttggattgataactttactcaaaacctcacaaataaatcttaatcatggtcagtagcaacatccttgaagatggcaattctatcattttatttttcacatcattgtcagcatcatctggaaccgatatttactgaccctcagttgggtgcaaatacagaaacacagtcttggccaggtgctgtggctcatttctgtaatcttagcactttgggargccaaggcaagaagattacttgagcgcaggagttcaagaccagcctgggcaatatagtgagatctcatctctacaacaaatttacaaatt

SEQ ID NO: 390394 - DNA, 610 bp, Homo sapiens
gcccagattttttaagttggcaattattccaaaaacaacracaacaacaacaacaaaaaacaaaaccactgagggggctaaacaaaacacctttagatgcagtcaagggcctccagctcaccacctctgctggactgaagggagctctcaggcagagaaatggaaagttcagatttgcatatttagtcactcttgggcagtatgattagagggagtaagagactagagataggcagtctggttaattcaacaacagactttttgagacctctgtgtgtgtgacaagagctggagtcacaatagtgaggttttggaacctcaagtctggtgtgggagagcaacttaatgaacagtcccacaaatgtgtaatcacgcactatgagtgtactccagggaagaaaagagtaaggcccaaattgtggggaaatatggaaaagaacagactaaagagctattttggaagtttggcaacaacttagatgggggagaaaagaaagggcatttcaaggtcttacccgggtgagtgggtagatgccgttgtggaaagaagcagaaaaaagagcatgggaaaccctgtcactattgagagttacataaacagaggaaaatg

SEQ ID NO: 390395 - DNA, 487 bp, Homo sapiens
ggaacagccgggagttaccacctctttccacggcaatgacctaatgacctaacagttactaccctttccctagaaatttcctcaaaaactgttccttaatctgaatgccattaaaagtgggtataaatatgacccaaactgccctactctgtctactgggtagcctcactctgcaggagtagtcaccaaactgtaacaatgcctcttcaataaagctgttttcttctacctctggcttgcccttgaattctttcctgggaaaagccaagaatcctcatgggctaagctccactttggrgcttgcctgccctgcatcaaacctagctgacatctcaaagtggcgatgtgactacaatttattatatgattcaattttattctcataacaatagaggtagatattattgtctcaccttacagattaaaaaactgagggtattatacattatgcagtaagtcatgaatttgggaatctgagagtgttata

SEQ ID NO: 390396 - DNA, 606 bp, Homo sapiens
caaaaaaaaaaaaaaattgtgacaatactaataacctaaaaaggggatggagctataggagcagagtttttgtatatgtttgaagctaagtgatgtgaattcaaaattgattgttgtatgtttaagagttgaattgtaacctccaggataaccaataataatgtaactaacaaaatacagaaaaggaaataagaaaagaatcaaaacagtacactacaaaaaacaattaaacataaaagaaaacaataagaaggaatagaggaacactgttttattttgtttttcagacagagtccagctctgtagctcaggctgcagtgcagtggcatgatcttggctcactataacctctgcctcctgggttcaagcaattctcgtgcctcagccacccaagcaggtgggattataggcgcatgccaccatgcccagctaatttttggatttgtagtggaaacagggtttcaccatgtyggccaggctggtctcaaactcctgacctcaagtgatagcctgcctcggcctctttccaaagtgttgagattataggtgtaagccaccatgcccagccaaggaacactggtttttttccccaggttctttgactta

SEQ ID NO: 390397 - DNA, 322 bp, Homo sapiens
tgatccctttttcctttctctctctctgtctgcaacctggcaatctcagctggcactgacctcagattgctttgtatttagtaatttatatatttttggatctttccaatgagattttaagcaatgtgtgaaggtagtgattttgtcttgtatgattttgaatyccacccagggcctagaggcagacatggaataaggaagagaacgctggactccaaagtcaggacaacatgtttctagtcacagctctgccgttaactggtcttgtgactttgaataagccacttattcttttatacctcagtgtcttataaatgaaaga

SEQ ID NO: 390398 - DNA, 563 bp, Homo sapiens
actgtgcaaaattatatatgagttcatcatccaggggagggccagttctctcttttagtggaaatgagatacccagkttccttccaaagaaaacctcctctccagccattggcatgatttaaaatgtgtcttctttgaaattttagaagtaaactaccaaattgaaataatgtctctctacttaggctttttgtgctcttctaaattgcaatgaaaaatcttatgaaaatgtttgatgtgttacattcacaaatatgattttcagaaattaaaactcttagtaatatatattcttaaatatcatagtgaagtttttgttagtacatttatattatgctgattcttacattgtaaatgtgttaccatggcacctacttaatcacacttggcaaatctaacccagttatttaatccggttaatctatgtaagattcactcttatcaaagatcagtcatctagcagcctcaaagtaaagcaggtgtccagtaatcagttgatggaacatttgtaaagaatggaaaagatcatgatactgacattttgctggttaactgaatgaggg

SEQ ID NO: 390399 - DNA, 563 bp, Homo sapiens
actgtgcaaaattatatatgagttcatcatccaggggagggccagttctctcttttagtggaaatgagatacccaggttccttccaaagaaaacctcctctccagccattggcatgatttaaaatgtgtcttctttgaaattttagaagtaaactaccaaattgaaataatgtctctctacttaggctttttgtgctcttctaaattgcaatgaaaaatcttatgaaaatgtttgatgtgttacattcacaaatatgattttcagaaattaaaactcttagtaatatatattcttaaatatcatagtgaagtttttgttagtamatttatattatgctgattcttacattgtaaatgtgttaccatggcacctacttaatcacacttggcaaatctaacccagttatttaatccggttaatctatgtaagattcactcttatcaaagatcagtcatctagcagcctcaaagtaaagcaggtgtccagtaatcagttgatggaacatttgtaaagaatggaaaagatcatgatactgacattttgctggttaactgaatgaggg

SEQ ID NO: 390400 - DNA, 510 bp, Homo sapiens
caccaaacctgttactataatcccactacttctcccacatgtctacttacactcatgtcattaacagcattaggcagacatctattttatgttttgtcacacatctcatctgactgtaactgttctcaattaaagctcttattcatctcacaaaatattttgggtacttaagttcccaaaactgtaatagactctgagaaacaaaacaaacaaaatgtagaccctgtcctcatggagcttacaattgggggtgggagagggtggcaggtcttacgagcaggcaggtctgtgtgtgtgcagggagggtgggaggaagacttcatgtagatgtcaagacagaaaaaaacactgaagaacatagggaggcacaagggaaacactagtcaattctgwaggcacttctattttgtctgactgtaataagtgtgctgcttaaaaaaaaaagtaacaattatttttcaacatggaagggaaaaaagtgggaggaaaggagaaaaaaaaaaaacccta

SEQ ID NO: 390401 - DNA, 510 bp, Homo sapiens
caccaaacctgttactataatcccactacttctcccacatgtctacttacactcatgtcattaacagcattaggcagacatctattttatgttttgtcacacatctcatctgactgtaactgttctcaattaaagctcttattcatctcacaaaatattttgggtacttaagttcccaaaactgtaatagactctgagaaacaaaacaaacaaaatgtagaccctgtcctcatggagcttacaattgggggtgggagagggtggcaggtcttacgagcaggcaggtctgtgtgtgtgcagggagggtgggaggaagacttcatgtagatgtcaagacagaaaaaaacactgaagaacatagggaggcacaagggaaacactagtcaattctgaaggcacttctattttgtctgactgyaataagtgtgctgcttaaaaaaaaaagtaacaattatttttcaacatggaagggaaaaaagtgggaggaaaggagaaaaaaaaaaaacccta

SEQ ID NO: 390402 - DNA, 592 bp, Homo sapiens
cctcttccatgcttaagtctctaaaacagatgtaggaactctaaattccctgaaggagcagtgtaaaaaaaaaaagcacttagcacctagaggttggaactaaccagaagcgaaatcatagtacttttccacacccctattaattgcatccccaaccaatcagcagcacccataccttacccactggttgccaaactatctttgaaaaaccctagcctctaaattttccaggaggctggttagaggaatagtaaaattccactctctcatttagtcagctctgtatgtattaaaccctttctctgttgcaattcctcagtcttgataaatcggctttatctggggagcaggcaggaagaatgcattgggcaattacaattgtaggtgttcttaccatacacacaagcgtgataactatgaaaggtgatgggtaagttaatttgcttaaytgaagtaatcctttcactgtttaatatatatcaaaacagcatgttatacaccttaaatatatatactaagaaagaaaataaaaaagtctacctgtcagaatcagtgaattgtgtgtctgtatgagtagccttgtagatttgtt

SEQ ID NO: 390403 - DNA, 623 bp, Homo sapiens
tagcacacagtagatcacagcttgtggtaggtaaggccacagcccaagctaagcgatttcattaggcgyatgctgacttagcccagattgttcccttcgagtcctggatactatatggaattgaataatcttccatcataattactggaagcatcagaagcagctgttgcctcctccccattgcttgagctggacagcaaagagtctgaaggtcccatcatctgataatgattcgcttcatttcagtgttcatgtctatgaatttcactgcctgagccaggagccattacctacccacttgctgctaaacatggtggcaaaagttctatttacaatacagcataggaatagtactactgccaaatataacaggcttatgagcactaacctttaccaaggtatgaattatagactactactgttaatattagccattagttatttatcaccactatgtgctaggcatcatgctaagcactctatataggtagtttcacttcatcctctaaaagcatccctgagattaaaaacatgccatcatctgccagggaaggtaaaatagatgaagggaaggtaaaatagaccctcttctctgcacaaagtctgtcaaaataaaaggaaag

SEQ ID NO: 390404 - DNA, 623 bp, Homo sapiens
tagcacacagtagatcacagcttgtggtaggtaaggccacagcccaagctaagcgatttcattaggcgcatgctgacttagcccagattgttcccttcgagtcctggatactatatggaattgaataatcttccatcataattactggaagcatcagaagcagctgttgcctcctccccattgcttgagctggacagcaaagagtctgaaggtcccatcatctgataatgattcgcttcatttcagtgttcatgtctatgaatttcactgcctgagccaggagccattacctacccacttgctgctaaacatggtggcaaaagttctatttacaatacagcataggaatagtactactgccaaatataacaggcttatgagcactaacctttaccaaggtatgaattatagactactactgttaatattagccattagttatttatcaccactatgtgctaggcatcatgctaagcactctatataggtagtttcacttcatcctctaaaagcatccctgagattaaaaacatgccatcatctgccagggaaggtaaaatagatgaagggaaggyaaaatagaccctcttctctgcacaaagtctgtcaaaataaaaggaaag

SEQ ID NO: 390405 - DNA, 546 bp, Homo sapiens
cccttaacctgatctgcccccatctcaaaagtcttcctgaaatctgggcttcagagcagcatccaaaaatatgtcctaccaggctcttgccaccatcaatagctagaaaaggaaggaattcagaaggagaaaaaagaatagctataacttgacgtttagatctaaacacaatacattcccagataagcaacctgcctgcattcagatttcttaattttcaatttctatttaccactgaaaccctggcacacagagatactctttcaggaatctctagaacttctatgaaactgattatcaactaacctaagtcagttcamatacatgagtgaatgaagctttatccaagatgaagggtcctgactgggtaaaaataatttctgaggaaatttctttatcccaaacagtagacgttcaaacgagcatgtggccataaacattattgaatgcaacttccacatggtacagagtaaaatgcagagtcttgtgaggtcagattgctatatggggctgtaagtcttcctaactctggctcagagtcatttt

SEQ ID NO: 390406 - DNA, 569 bp, Homo sapiens
cctcttaatataaaaaaaagcataatcaaggttacatttataaatttcaggcatagtgytgcaaatcttaacgaattcacctggaactgttttctaccataactacacatatattcagttcagaactttaattatctggaaacagaccaggccaataatctttaggcaaatccccactgtcagacacttagaacaatgagaattttctaatgccaccagctgcctaataaatttcgaagaggtttttgatgtgttttaatgactcaaatagaggccttaagcacaaagtttgatagtttttttagcttctttctgattatattatctataatagtactttggggcactgataaaaagaaatcttggttgaaaatcaggtgctagaagaaatctgacatactggtggtggatacaagttggcacacttacgtttatcagagatatgtgtggacgtatgcatttagatagaaatattctactacataggtctggtaaaaaaaaacacttcaatacttgttcttagtgaaaaagagacataggtttcatggatagcaagctgaatacatgtt

SEQ ID NO: 390407 - DNA, 569 bp, Homo sapiens
cctcttaatataaaaaaaagcataatcaaggttacatttataaatttcaggcatagtgctgcaaatcttaacgaattcacctggaactgttttctaccataactacacatatattcagttcagaactttaattatctggaaacagaccaggccaataatctttaggcaaatccccactgtcagacacttagaacaatgagaattttctaatgccaccagctgcctaataaatttcgaagaggtttttgatgtgttttaatgactcaaatagaggccttaagcacaaagtttgatagtttttttagcttctttctgattatattatctataatagtactttggggcactgataaaaagaaatcttggttgaaaatcaggtgctagaagaaatctgacatactggtggtggatacaagttggcacacttacgtttatcagagatatgtgtggacgtatgcatttagatakaaatattctactacataggtctggtaaaaaaaaacacttcaatacttgttcttagtgaaaaagagacataggtttcatggatagcaagctgaatacatgtt

SEQ ID NO: 390408 - DNA, 639 bp, Homo sapiens
gaatgtgtgctaaaatctctcattatcacttctcctctggtgaatcccaggagaaggcaacttaggatttgtggccacctgcagcatctcactcatcagctaattcctctcccttccaactgctctgcttaagaacaagcaaggactatcaaggccaagtagcagcatccagcctttggagcctcttacctaaaagcatcttaaaacacttccaggtagcagccagaratgcttaggttggagaaaactggcctacttgcatgaattttgtgcatcacaaggaaatgggaattttgtgcatctgaactaaaggatatatcttctctgtttcccatcttcaattctatgagtggtttttaactacgttcatttgtatttggagaagatgtttgtgttttgtattttcttgtttactaagatgaaaatgttccagacaccaaagatgaccaatgaaaatgatattcagaggttctcatttgataattatgaggactactccaagaatctatttttgaaggcttacaaatgattctaatattcagccagggcttacaaaccagagaattacataaagtttgtttaaggctctcctcatagttgcaagtacagaaatgcactcatagcaggagagtgacacaa

SEQ ID NO: 390409 - DNA, 639 bp, Homo sapiens
gaatgtgtgctaaaatctctcattatcacttctcctctggtgaatcccaggagaaggcaacttaggatttgtggccacctgcagcatctcactcatcagctaattcctctcccttccaactgctctgcttaagaacaagcaaggactatcaaggccaagtagcagcatccagcctttggagcctcttacctaaaagcatcttaaaacacttccaggtagcagccagaaatgcttaggttggagaaaactggcctacttgyatgaattttgtgcatcacaaggaaatgggaattttgtgcatctgaactaaaggatatatcttctctgtttcccatcttcaattctatgagtggtttttaactacgttcatttgtatttggagaagatgtttgtgttttgtattttcttgtttactaagatgaaaatgttccagacaccaaagatgaccaatgaaaatgatattcagaggttctcatttgataattatgaggactactccaagaatctatttttgaaggcttacaaatgattctaatattcagccagggcttacaaaccagagaattacataaagtttgtttaaggctctcctcatagttgcaagtacagaaatgcactcatagcaggagagtgacacaa

SEQ ID NO: 390410 - DNA, 579 bp, Homo sapiens
caatctgtccattatcctgagacttctattctcattcaatacagagtagaagcatgtttttttttactcttagtcacctagtccaggaaaaataaaaatattattagtctacaatttcaggaatagctgatacaaccctattggtttaagattctttttgaatcaaataccaaccttataccaacacatttaatataaaatagctctgtcatatgtcaatccagaacttggaatacatttcagttatgaaactttaacagcaaagcagtctgagtcctgaaatagtcttccacatgaacattctctagttttttttatttctaagcaaaattgcataagatttataatctcagytgtagatcaaaatctgctttaacttaatggggaacatgtaaaattatgcaatccttttgaaggcttttcttacaccagtataaagctcaattttatttagcaaatattaacaacaccccttaataaatgcttagggctgcgccgatacatagaataaggtgtagtatgtgtcttcaagaagtcaaaagtcctatagattttattttctcataatttgtcatagtt

SEQ ID NO: 390411 - DNA, 510 bp, Homo sapiens
gtccattatcctgagacttctattctcattcaatacagagtagaagcatgtttttttttactcttagtcacctagtccaggaaaaataaaaatattattagtctacaatttcaggaatagctgatacaaccctattggtttaagattctttttgaatcaaataccaaccttataccaacacatttaatataaaatagctctgtcatatgtcaatccagaacttggaatacatttcagttatgaaactttaacagcaaagcagtctgagtcctgaaatagtcttccacatgaacattctctagttttttttatttctaagcaaaattgcataagatttataatctcagttgtagatcaaaatctgctttaacttaatgggkaacatgtaaaattatgcaatccttttgaaggcttttcttacaccagtataaagctcaattttatttagcaaatattaacaacaccccttaataaatgcttagggctgcgccgatacatagaataaggtgt

SEQ ID NO: 390412 - DNA, 604 bp, Homo sapiens
cagcatcaaggacccctaagcttcattgtcattaagttaaagtgaaaccgatctggtggtggaatggttttcttcacgttcactcagctgcatgggtgcattgtggttttgccaacaatgattacaacaaatgcagaagggccaggaaaccaaaggttcatgcagggcagtgatgataatgatggatcataggatttaaattgggctaggagaaggtcatgctaccccacaggctagtagggaagacagacaagtacagtaatatatctgtgtgcatgcatgcatggtaaggtgcaaatgtttccatgtaaatgaataagaaagcaagatatttcttactctatggccaataacatcactgaccttttaatcagtccttgtctttttagaactagttgttagagactatgatagttttgccagggctgcagatatgtccctctgtctcatttcaagcagggaggaagcagactcgggwctcctttaggaaacctggatagttctcactcagctggctaagctgataaccatacactagtcaaagtagtatataaatcacactttcagtgcaataaaatttcctcagaccatccaagttttatct

SEQ ID NO: 390413 - DNA, 583 bp, Homo sapiens
ctccctcctctaccatccatttgagattattttcatagttggtgaacacttgcactggtttaggttgcttgacaggtgtgatgacccagatttttatttctgaggggtcagggtccctggttatgatgccatctattcatagttaaaatgagcaggagggatgagaaacacaaaatacatcaattccrtcttttcaaaatattattttcattacattattaaatttctagcaatgaaatgaagatgagaaaaaaataagaagtgtttctttttgcctctgtgactttcgttattaagcttctttaactttactatacattttcacagggagggggaattagaactgctctgtttacttccctagaggcagaaataaaaccatgaagttgaagatacaggaagtggattccatacaaaggtttataaagtttgaaataaattgacacgagaagatatgagtttcttattctcttatgttaatgtatctcaggagagaagaaaacccacttaaaacacttctaacccatgagtccaagactttaagaattactacttcatttaacttcatgtgcaaagccaagga

SEQ ID NO: 390414 - DNA, 583 bp, Homo sapiens
ctccctcctctaccatccatttgagattattttcatagttggtgaacacttgcactggtttaggttgcttgacaggtgtgatgacccagatttttatttctgaggggtcagggtccctggttatgatgccatctattcatagttaaaatgagcaggagggatgagaaacacaaaatacatcaattccatcttttcaaaatattattttcattacattattaaatttctagcaatgaaatgaagatgagaaaaaaataagaagtgtttctttttgcctctgtgactttcgttattaagcttctttaactttactatacattttcacagggagggggaattagaactgctctgtttasttccctagaggcagaaataaaaccatgaagttgaagatacaggaagtggattccatacaaaggtttataaagtttgaaataaattgacacgagaagatatgagtttcttattctcttatgttaatgtatctcaggagagaagaaaacccacttaaaacacttctaacccatgagtccaagactttaagaattactacttcatttaacttcatgtgcaaagccaagga

SEQ ID NO: 390415 - DNA, 583 bp, Homo sapiens
ctccctcctctaccatccatttgagattattttcatagttggtgaacacttgcactggtttaggttgcttgacaggtgtgatgacccagatttttatttctgaggggtcagggtccctggttatgatgccatctattcatagttaaaatgagcaggagggatgagaaacacaaaatacatcaattccatcttttcaaaatattattttcattacattattaaatttctagcaatgaaatgaagatgagaaaaaaataagaagtgtttctttttgcctctgtgactttcgttattaagcttctttaactttactatacattttcacagggagggggaattagaactgctctgtttacttccctagaggcagaaataaaaccatgaagttgaagatacaggaagtggattccatacaaaggtttataaagtttgaaataaattgacaygagaagatatgagtttcttattctcttatgttaatgtatctcaggagagaagaaaacccacttaaaacacttctaacccatgagtccaagactttaagaattactacttcatttaacttcatgtgcaaagccaagga

SEQ ID NO: 390416 - DNA, 553 bp, Homo sapiens
actaatcaactcattacactggcctttatacctttgatagcactagtaccatcactattctgtgagctgttcaactttcttccaataaatttctttccttagtaaygatttccttcttagagtctatttctgttgcttgccaccagaaaatcctaactgccacaagtcatatcactgataagtttaacctcaataaaattgttttgctggtagtttattattcaaaataaaattgatacttttcatgttacctagaattagctcacactatgcaggaaaaagacaaattgtatagcttaaaattactggagcaaacctaagtaaattatattactaattgtaacaaaatagaaaaacataggtatgaaatacagtgtgcacaatttttcatatttcaggttgagaaaaaattgaaagtcatgtttatctctaaagaagacaattatgatgggaaactgtctcatggattttttttattgatattcaaattagtgcaaccattttggaggacaacaatatctttcactacctttgaagtgtgtacccttcaatc

SEQ ID NO: 390417 - DNA, 627 bp, Homo sapiens
atcaatggacacttagattgttttcacctcttagctattgtgaataatgctgcaatgaacagccactatagaaaataatatgttggttcttcaaaaaattaaaaatagaactacaatctgatttggcaattccacttctgggtattcatcctaaagaattgaaatcaagatcttgaagagatatttccacatccacattcaagtaagtttttccttagcatttattattgtctgacattatcttgctgatccatttttttttatcatcgctaccagaacttaagccccctgagaacagaaaccttatacatcttcttcaccgttgaatacacagctactaatacaatgcttgccacttacyaggtgttcaagaaataattattgaacaagtgaataaagatgcaatgcaagtctaaataaaggagggcatcccagtctacctgtgaagacagaggagggagcactcacgattgagagtagttggctaagttcacaactcagaggagatttcattcattcttctatccagccagccatctttctaccactgatccatttactcagaagatttctttgaggcactgtactattgaccaaggaatgcagtaggaaataaaattaactggg

SEQ ID NO: 390418 - DNA, 604 bp, Homo sapiens
ggtatgcactcatagtcccagctacccgggaggctgagatgggagggtcacctgagcctggaaggttggggctacagtgaaccatgatcatgccactgcactccagcctgggtgacagtgtgagcccatgtccaaaaaaaaaaaaactgttctttagaaaaatactaatgttaaattattagaaagcaacaagactaaaaaactgattcaagcacaggaatacagaccaagaataattatttcatttggttttttaatgttcatctcattcataaaatttttactttttataaagattttgttttataaaataattttaaataagactttttatgtctaccaatatactaaaacaaattttttagtcaacaaatattcaaatatgtaaaattatattacttgtagcgggtctttttattttcaaaagcattctacttgaacagtaaattatgtggccacctgaatataaaggagctattttcaataattattcaaaactaagcagttctgccttcacttcaggtcagtagagataattctyataaggtgctaagccttaggaatcaaatccatttggggtcattacacacaattgggaaaataa

SEQ ID NO: 390419 - DNA, 593 bp, Homo sapiens
tttctttactagtttcactgatgagtaataactcaatctctaactccactctatagctccaatctgctgtgagatttcacattgcatttttaaccaaagctaatcacttgcaactatatatcaatcaaccataaagtgaattattattaataataactatcacttactaggtaaatattacatgtgcatccataactcaacatgaattatctcatttgttcttcaaaattcccctctaaaagaaaagtactgacagccacrtttcctagatgaagacactgaaacacgaagaggttatttcatttgtcccacagacaacagcatgtggatgacgcagcctaagtcatctgctataaatggggctgaggagaaggatttaaaggatgtgaacaacaatggctggtgaccatcttatttattttgcagaaactccctcagctgtgttatttgatattatttcatcattatgatctatcttgggatttgcgtattctatcagaaacaactctcagaggcaaagaaatgatgtgttttagttatcatctatgaatcaatcaactataaggaacaaaatttcaaaatttccgtaattc

SEQ ID NO: 390420 - DNA, 446 bp, Homo sapiens
cacctaagcttatatattcaaatttcagaaaacctaaaacaaaaggaaaatttttgaaataagtcaggggaaaaaaagcacttcacctacagaggaacaaggagaactacattggacctttccaaataggtaaatccacagagacaraaaacagattggtggtttccgggggctgagaagaagggagaatggaggagtaaatgcttaatgagtatgggatttccttctggggtgatgaaagcatttagaactagattgaggtggtggttgcacaacattttgaatgtattcaatgccactaaattgttcacttgaaattaagtgtatattatgtgaatttcacctcaatttaaaaacgtacatttgagaaaaagtaaaggaattaaaaaagacataccatactaacactaatcaaaataaacttttagtagctacactaattttca

SEQ ID NO: 390421 - DNA, 449 bp, Homo sapiens
caaacatacaaatatctctccttcacattaagtcgagatttttctctaataagcaattgcctactcttgaaaaatcagcccacttaaattattctaaaatataaatataaaaataaatttttgtaataatttttgaaatgaaataatttttatgtaacatttgtgatgccaaaactgagtccaatagtgttttggtaaatcagctctctggaaaaaaggaagagaaagaggaagacttctgattgccaatttccatggtgatrtaaacagtcctccaattttgagtcactaatagtttaacatccagctcattaaattccagaatatgcattaatcagcccttatgcccagccagttctagcacaccactacaaaatgtcaaactatatgtaattatcaatggtactgattggtttctcttaattgctttttggatatcagaagacaaa

SEQ ID NO: 390422 - DNA, 588 bp, Homo sapiens
actcatagaaggctctacattctcaacttatatatcgaagggaaaatggccagaaattggcttgggtaggggaagagaattataaattcagattggttgggaaaaaaattacacgctctttagggattctcttctcctaaaataatactaagcaactcagtggggtctttttctctgattctttatgaaaagggaaatatcaattttgatctcacctgaaggaacaacattataattataccaaggagaaacatacaggcgaaaggaagcataaggaccataagaagwaattaaatcttttcaaagctaggggggaaaatggagtgtcagtgccaagaaggataacacctacatacgctcaggaacttcagtggtaaattcacgggtaatatatgactattccaacacagtcttcatttattatgtttgccttgtgggcaaagtagagaaataccttacctcatcaatatgaaactgctcaaaactcagaagctacagccaatagtaatatgtttatgaaatatatatatttttaaaccctcattgcttacagatcaaagctacaactgcacatagcatcaacaactg

SEQ ID NO: 390423 - DNA, 588 bp, Homo sapiens
actcatagaaggctctacattctcaacttatatatcgaagggaaaatggccagaaattggcttgggtaggggaagagaattataaattcagattggttgggaaaaaaattacacgctctttagggattctcttctcctaaaataatactaagcaactcagtggggtctttttctctgattctttatgaaaagggaaatatcaattttgatctcacctgaaggaacaacattataattataccaaggagaaacatacaggcgaaaggaagcataaggaccataagaagaaattaaatcttttcaaagctargggggaaaatggagtgtcagtgccaagaaggataacacctacatacgctcaggaacttcagtggtaaattcacgggtaatatatgactattccaacacagtcttcatttattatgtttgccttgtgggcaaagtagagaaataccttacctcatcaatatgaaactgctcaaaactcagaagctacagccaatagtaatatgtttatgaaatatatatatttttaaaccctcattgcttacagatcaaagctacaactgcacatagcatcaacaactg

SEQ ID NO: 390424 - DNA, 588 bp, Homo sapiens
actcatagaaggctctacattctcaacttatatatcgaagggaaaatggccagaaattggcttgggtaggggaagagaattataaattcagattggttgggaaaaaaattacacgctctttagggattctcttctcctaaaataatactaagcaactcagtggggtctttttctctgattctttatgaaaagggaaatatcaattttgatctcacctgaaggaacaacattataattataccaaggagaaacatacaggcgaaaggaagcataaggaccataagaagaaattaaatcttttcaaagctaggggggaaaatggagtgtcagtgccaagaaggataacacctacatacgctcaggaacttcagtggtaaattcacgggtaatatatgactattccaacacagtcttcatttattatgtttgccttgtgggcaaagtagagaaataccttacctcatcaatatgaaactgctcaaaactcagaagctacrgccaatagtaatatgtttatgaaatatatatatttttaaaccctcattgcttacagatcaaagctacaactgcacatagcatcaacaactg

SEQ ID NO: 390425 - DNA, 583 bp, Homo sapiens
aatgtgattgtttttattttaagccaccaaattctgggtgatttgttatatagcaataggttacaaaacagcgtgcatatcctggcctgatttctgagtaaatataacaataaaacaaataagtcagagcaatagaaacccaaaatattattgtgattttcagtagtagctaagtggagatttgtcttagtttgagagccagtgttagtttgctgagaccattgtgttctaagaatttggtactgtagtatttagggacaagacctccttatgaaaaccggagaggcatgttaaaagcagtgccctctcataatgagtagcagttataagcagctgttgagttcagacaagatttgttctgaagcctggctctgcaacttaataggaatgtgtacttgatcaagtaaygtaacctcgctaagcttcagtttccttatctataaaatggggataataatggtacctaatttattgggtctaacacatagttaggactcaaaagagtgtttctattatttgctactataggatgctagtaaagatattgtttaacatatgctttatgttaaagtcatgtgagatc

SEQ ID NO: 390426 - DNA, 583 bp, Homo sapiens
aatgaaatcctggagataaagtgcacggtgtccacagcacacattgttggtagccttaatggcttccgcttcctggtcccattcctaatagggcctccgtggatttcctagccactctgttttgatagatttgacatcgatttccaggggcagaggttggccctagttagcgtaagcaatttagagtattctgttttcttggaatacagagattgatttaaagatggcacatggcacagttttagacagtgagactgaggggacattttctgtgggcttcaagaatgaagatttcttacttttttgcatgaactccccraagagatacccctcatctctgctggatgtaaatgaggggtagctgttactggcagccatcatgaaaggaagcctgagaaacaaagggagagaaagaatagaattcagtctttggtgatgttatgagctgctggaccaaatctcttctgtgaatatgttagttaaatgaatcaatacattctctttattatttaggactattgatttcagctttttgttatatccaataaaaaaaatctgtgtacctcaatgtaaaataccttca

SEQ ID NO: 390427 - DNA, 555 bp, Homo sapiens
ttcagtctttggtgatgttatgagctgctggaccaaatctcttctgtgaatatgttagttaaatgaatcaatacattctctttattatttaggactattgatttcagctttttgttatatccaataaaaaaaatctgtgtacctcaatgtaaaataccttcactaaatgtaatctattttaagtcaaatggcaaaatgtttttaatttaattcagaaaattatttaaaatatcagtgactttttgaaataggatagacatcttagcacctggtattctagcatatggcctrtaaaatctccctaagtgttttaatttctcttctggaatggaatatgaaaaaaataagacctagaaggaaatatgtgggtttatattctttaatttaccatacaaattaaaaatttacacgtctaagtttaatcctagtaatattcagctaccttgcctacatccctccttgctgcctttcatttcactatagcttgctctttcttgcccctggaaaatgcctctaaatccctgaacctgtcaattttcacaagcgtgtaatttt

SEQ ID NO: 390428 - DNA, 558 bp, Homo sapiens
ctacagtgacacaactgctaccaccttaatatctattaagtagcacagaattatagtgtaacaactctgaaattgctgtgacatctgcatgaataccaaatagatttgttatgttcagacttattacaaaaarcacttcctgaattttaaataatgaagattcttacaaattaatagttatcaagtgagatactttctaatgtatatatgttatttaaagatcgcggttcagttaaatgtaggtaacggtacaagtgctactgccactcactagctactgatgtttggagaaatagtcttaattttgaaagctttcaagtggcattattttaagaaaagtacaccttcactttaagtgctacctgtcattcaccccgtctctctggagatgaagaaaaaagtaaagaaggaagaaagtgataaatgtccatattatggggtttttgcctttttgaaagcccattccccattgcactagctggaattttatagagacataaatcacaaagaaataagaagccagtaatgagatagaagtatatttgaaatatggatgca

SEQ ID NO: 390429 - DNA, 558 bp, Homo sapiens
ctacagtgacacaactgctaccaccttaatatctattaagtagcacagaattatagtgtaacaactctgaaattgctgtgacatctgcatgaataccaaatagatttgttatgttcagacttattacaaaaagcacttcctgaattttaaatratgaagattcttacaaattaatagttatcaagtgagatactttctaatgtatatatgttatttaaagatcgcggttcagttaaatgtaggtaacggtacaagtgctactgccactcactagctactgatgtttggagaaatagtcttaattttgaaagctttcaagtggcattattttaagaaaagtacaccttcactttaagtgctacctgtcattcaccccgtctctctggagatgaagaaaaaagtaaagaaggaagaaagtgataaatgtccatattatggggtttttgcctttttgaaagcccattccccattgcactagctggaattttatagagacataaatcacaaagaaataagaagccagtaatgagatagaagtatatttgaaatatggatgca

SEQ ID NO: 390430 - DNA, 609 bp, Homo sapiens
taaattatttcctaattctgtggttttaaaggtacataatgaatcctttagaagaagtcaaaattcactgtagttgcttttaggcaaaggtggggtaaaaaaaaaaaagagaaatgaaaaaggtggttttcctacttcaaaaaatagagaacaaaatgattttaaagtttttattaacctaataaatcacccagtccagctacttcatttaataaatgaagaaattgaggcacagattattaagtggcttatccaagtgctcatagatatttatagcagagctcagataagaattgtgggggcccgagatgtactgccttcatcccacttcaatgaagggtgtattttcccagctgccgagagtacaatctgttgagagcccccagttttcagctcctttarggttcacctcagctttagagattccccttatccaaaagcatgtctttcccaggatgatcatatcaatgagtggaaggagataaactgcagcgggatagaggccagctgttatctggcccctgtgagttgacactgatgaaccatatacctccagaattccctgaggagccagaaaggcttagttggctctgtacttcattttctccc

SEQ ID NO: 390431 - DNA, 618 bp, Homo sapiens
atattcttcaagttgagtggatatttccaaattactttccacattatagtcccatcagaaatgaatgagttcttgctttccagcatttttgycaacaggcattaatttttgttactgtattggatgtggagtagtatcattatggttttattatttattattttgaattttactgtttattagtcaggtgaaacacctttttatactttggtgattttaactttcctgtttagttactaaaaaggaaaatatattttatctatctttctattatttttattttatatagacattaatatttttattcatccttctatttttattttaagtggattttaagaatttttaatgtattctagagactatttgcttatgattattagcactgcagatatcttccctccttctgcttgagttttaacgttttgataatgttttatacagatattttttaattcaaaagtagtcaaatttatcaagtatttttcttatgaatttttgtattttttaaagagattttcttctactgtaggtctaaattttcttctaaaagtgtaaattgccttgaagttgcttttaaaatttaagtttttaattgatgtggaattcatttgtgta

SEQ ID NO: 390432 - DNA, 596 bp, Homo sapiens
atctgcgaaacatcaagtgaaaaacaataactcagataattatttttttagtaaaacataatccagaagtgccatctgcagaattctggtttaactgaattactattatatttgccattacaagtgaaaaatttttttgatgtgttccttaaaacaataactcactaaacaagacctcggggacctggaaaaatgtgagcttcccaaactttcctttggcagaaagtcactaaacacattgggtagaggatgaattttcattaaggaaaagaagtgtatctggaggaatctagtcaaaatgtgaaagtatgagtctattgttggaatcttgaaatggaactaaaatacaataatagtaacaaaaataacaaaacrctatcatttgttaagcactaactacatggcaggccctgttgtaagctctcacttgattacaacattataacctttaaaggcatcctcatattataggactctctgaaagtgtctgagttcatatcaagctctatctgacatcaaaacctattcttaaccactcgacaccatgaaatagggccactaagttgaagcagtaattaatatctagaactgaattt

SEQ ID NO: 390433 - DNA, 577 bp, Homo sapiens
ccttttccctattgtaccaagattatcaggaagcgtggggaagaagggcaattattacatatataaagacaacctaaagtctgacaataatcaggtagcctacactgtcaggaaggaataacagctacacccaggctgtgtatctccaagagacacacaagctgtgggaaaccggtgtttgtcttggcagttataactcctatcttcctcgtggatgtattcttgttctaagagaagcagtaagagactgcataagaattcttccacacatgcactagattcataagcccaaggaaagatttctatcattactttaaaaaatggcagatgaaaattattctagcaaatatcaaagtaagratgccaaacacccgattgggaggcatatatttcacatccttcacacaatttatattcccaaactctctacagaattaaaagctaaataaagaaggaacatgtggtataaattagagaaaaagcaatggtgccataacagcgaataaatttaaaccctctagcagtaacgtgtacattccatatgttttatgtacatatatactatgttactgtgtgg

SEQ ID NO: 390434 - DNA, 586 bp, Homo sapiens
tggctaatgggtctgcaggctgtaccagcagcatgaggctgacacctgctcagttttcagtgaggcctcaggcaacttttactcatggtagaatgcaaggatagctggtgtgtcagatggtgaaggagygaagaaaaagaggaagaggtttcaggttctttttaacaaccaattctctcatgaactaatagaaataaaactcactcattgtcacagggaaggcacaaagccattcatgagggatctgtccccatgaccaaacacctcctactcagcctcactcccaagattggaggtcacattttagcatgagatttagaggggacaaataaccaaaccatatcacctctctattcaaaccctcaacacatcctcttccaagttcattctcagctgacgatcttattatcttccttcctatttgactgaaagaaaaaaaaatatttccaccaccacagctactcacttgagttccccaaatctgtattccctgtcatccccacaaatgaaacattaatcctcttatcaaagctgatgcttctgcttgtgtacaagttcccaccccacccactgattcaaggaatcc

SEQ ID NO: 390435 - DNA, 568 bp, Homo sapiens
ttctgtctctgtcattctttatcttgtttcacccttttgtacttttttctgaatatatatctctttatgacacctcttaacaattccttctcttttacactcttctttttttatgctgaccataatgcagagcaaaaatttattttaaytgtaacttttgttatttttgtgttttatagtctaactttaaacatgtgatagcaatgttttaaaatagctaaaaaacttgaaatcagttgttttctttattgaaagagaacatttaattttatttctcaacttatccactcttaaaatctctgtcttttgatcactgtatttaaaacattgacatttaaagggattgttaatatagttgaattaacatctacttatttgcaattgttttatattagttgcatttgttctccgtttctttctctcccctgcctccacccatctgccttctctggtttggtttgattccatttttctcagcataacaatcacatttttaaaaaattgttaacagttgtcctaaagttaagagtatgcattttttaactaatctaagtgccttttttcaaat

SEQ ID NO: 390436 - DNA, 627 bp, Homo sapiens
gagtcagatttctgaaatttcaaatgagaaatgttagtctttctgtctgcacaccacacatataaagcatatggatgtcaccttaactgacgacacagaatatctgcactacagctctcctgagaggatccagccaagaatctactacagcccagcatttgcaaagagctcatttgacctatctcattttagagagtcaacctaaagaacataatagctgctcactcctctaggttcttctaattccatcattgcattagatcagcttgtgagataataaacttcattggtcttattatcttgacttttttatcctacctctcctcaaaattcttagactttgtagggttaaattatagttttatgaacctagttttcatataagttccatagaaaatattcactaaatcacatttccctaactcctactaatttgttggcaaagaaaccatgttgtacaggaatccctgtatacagatctataagaaatgctggtttcagaaaaaaawttaacttttgtatttattatctagtactacataaattatcacaaaatcagtgaattgaagtgacatacattttttatctttcagtgtctgtcgtcatacatccagctactgcttagat

SEQ ID NO: 390437 - DNA, 597 bp, Homo sapiens
cagctaaccattgtagaaacctaagttactacaacaagacctgaaaatattttctaacaaaataagtattgcatttctttcattttaattcaaatattattgagtgccaagtctgtctaaagcactactgtcagcatcaagagtatgtctattactattgagtttaaaattgagtaaagggacacaagaggatataacaagaacctggagagtgccttaggaattcagagaaaatttcaacatagagaattcagaagaagcttcagaaagaacaacagttgagcttgaccttgaagaagtatcatatatattctgaccataagcagaacagtgaacatgycgaaaccctgtgtctactaacaatacacaaattagccgggcacaaatggtggtgcatgcctgtaattccagcatctcggcagtctgacggaggagaatcacttgaatccgggaggtggaagatgcagtgagcggagatcgtgcctcggtgacagagcaagactccatctcaaaattaattaattaattaattaattaattaaaatgatgcttgttaccatgaaaggccatgttcaaacctgctgacaactggaagtt

SEQ ID NO: 390438 - DNA, 597 bp, Homo sapiens
cagctaaccattgtagaaacctaagttactacaacaagacctgaaaatattttctaacaaaataagtattgcatttctttcattttaattcaaatattattgagtgccaagtctgtctaaagcactactgtcagcatcaagagtatgtctattactattgagtttaaaattgagtaaagggacacaagaggatataacaagaacctggagagtgccttaggaattcagagaaaatttcaacatagagaattcagaagaagcttcagaaagaacaacagttgagcttgaccttgaagaagtatcatatatattctgaccataagcagaacagtgaacatgccgaaaccctgtgtctactaacaatacacaaattagccgggcacaaatggtggtgcatgcctgtaattccagcawctcggcagtctgacggaggagaatcacttgaatccgggaggtggaagatgcagtgagcggagatcgtgcctcggtgacagagcaagactccatctcaaaattaattaattaattaattaattaattaaaatgatgcttgttaccatgaaaggccatgttcaaacctgctgacaactggaagtt

SEQ ID NO: 390439 - DNA, 591 bp, Homo sapiens
gacataaactgggaggtcagatagaggtctgagagaccatggcctttgtggcttcattcatttaatctcatttctggtcacrttttagggaacactcatctcagctgaaatactagaattgcctcttacggagttaccttgcatctactcttgcttcatctacaatatcttttccacatggtacctagataaatcttttcaaaatataaattttgattttagacatttttcctccacttctttgtatatattccctttaaccttcagtggtttcctattgcctttagggcagagacaaaggtcctctgcatggcctgcaaggtttcctggtctctcccctgcctgtttatgccacttcagtttttgctgctccctgtcacttagtgcacacatgagcatcctcctattttctggaatatggtatgccttcttctgctagaagacctttgatgtgctcttccttctgtctagaaagttctcgtgtcccttcatctttcctcttgagtcgtcacactcagcccaattgtcatttcttcagggaaacttcctcttactctctggatgagggcatgtcttcctagtgtagactcc

SEQ ID NO: 390440 - DNA, 591 bp, Homo sapiens
gacataaactgggaggtcagatagaggtctgagagaccatggcctttgtggcttcattcatttaatctcatttctggtcacgttttagggaacactcatctcagctgaaatactagaattgcctcttacggagttaccttgcatctactcttgcttcatctacaatatcttttccacatggtacctagataaatcttttcaaaatataaattttgattttagacatttttcctccacttctttgtatatattccctttaaccttcagtggyttcctattgcctttagggcagagacaaaggtcctctgcatggcctgcaaggtttcctggtctctcccctgcctgtttatgccacttcagtttttgctgctccctgtcacttagtgcacacatgagcatcctcctattttctggaatatggtatgccttcttctgctagaagacctttgatgtgctcttccttctgtctagaaagttctcgtgtcccttcatctttcctcttgagtcgtcacactcagcccaattgtcatttcttcagggaaacttcctcttactctctggatgagggcatgtcttcctagtgtagactcc

SEQ ID NO: 390441 - DNA, 644 bp, Homo sapiens
taaaaataactgtaaatttaaataactaatttttgtcttatccattatgttattatatgtcaagctctttgaagttgggaccctgttttctctattgactaagaggcagatctttgtgtttagtagcgaagaaaaccctatgtcactgatctagtttgtctcaaattgagccaggaaccaaatccacaccatgcatgccgaggtgaggttttctgtttctctatttagcaatggatgctgtcagaaatacagaaaagacagacacagggactatttttgagtttgcacatgggagcacatgcattgtgcaggaggctctgcatcctggagtcatcttgggcacttggctgtgagggctggcgtgggcatcttggttttagctgaatcctagcacattgctataggtacctctaaggcaggagaatagggcctsgaggcagggaatccaaaaactccctagaaccaaatcagatagaaacacttcagctatgacaggaaatatcctcttcatttacatagggagtacaccaagtaaataactttgtaacttcattttatcctcttcagttacatagtgtgtacaccaagtaaccaattgaaacctctataggtatttaaaccccagaaaattctgtaaccagccc

SEQ ID NO: 390442 - DNA, 644 bp, Homo sapiens
taaaaataactgtaaatttaaataactaatttttgtcttatccattatgttattatatgtcaagctctttgaagttgggaccctgttttctctattgactaagaggcagatctttgtgtttagtagcgaagaaaaccctatgtcactgatctagtttgtctcaaattgagccaggaaccaaatccacaccatgcatgccgaggtgaggttttctgtttctctatttagcaatggatgctgtcagaaatacagaaaagacagacacagggactatttttgagtttgcacatgggagcacatgcattgtgcaggaggctctgcatcctggagtcatcttgggcacttggctgtgagggctggcgtgggcatcttggttttagctgaatcctagcacattgctataggtacctctaaggcaggagaatagggcctggaggcagggaatccaaaaactccctagaaccaaatcagatagaaacacttcagctatgacaggaaatatmctcttcatttacatagggagtacaccaagtaaataactttgtaacttcattttatcctcttcagttacatagtgtgtacaccaagtaaccaattgaaacctctataggtatttaaaccccagaaaattctgtaaccagccc

SEQ ID NO: 390443 - DNA, 483 bp, Homo sapiens
tatatttcttttaactagaaattgcctttaatctgccaaactgtaaattaggtcatgaaggagattagaaactcaggtaaaagggaggtgagtttcacaatttcaggcagtttgggggtattggtagcccctaaaattaaagctrtccttctcatgtcttaaattatgggcatgctattgtgtgcccataatctgtgtagctttctatatatcttattgcctatatttctcctccagaatgagcaaatttctaaaccatcagccttctcacaaacactcaaaaaaagaatctttgatttatgtttcaccatcttcgctgcactgagctctcctgaataaagaaaaccaacttcttcgataggtttctctgcaatatcaacctgtttgcatgtgtttctttcagaatagtactttaaaacactggaacaaatttctcattctagttcacactacttgtaaaacacaggtgcgaggggcagtgga

SEQ ID NO: 390444 - DNA, 483 bp, Homo sapiens
tatatttcttttaactagaaattgcctttaatctgccaaactgtaaattaggtcatgaaggagattagaaactcaggtaaaagggaggtgagtttcacaatttcaggcagtttgggggtattggtagcccctaaaattaaagctatccttctcatgtcttaaaytatgggcatgctattgtgtgcccataatctgtgtagctttctatatatcttattgcctatatttctcctccagaatgagcaaatttctaaaccatcagccttctcacaaacactcaaaaaaagaatctttgatttatgtttcaccatcttcgctgcactgagctctcctgaataaagaaaaccaacttcttcgataggtttctctgcaatatcaacctgtttgcatgtgtttctttcagaatagtactttaaaacactggaacaaatttctcattctagttcacactacttgtaaaacacaggtgcgaggggcagtgga

SEQ ID NO: 390445 - DNA, 461 bp, Homo sapiens
caaaaaccaccgtaccccaaaagctacttaaataaaaaatatttttaaaataaaattaaaaagtggtagaccttaaaaatatgcaatttttatgtcaattatacctcaataaagctagaaaaacaaaacaaaccaaaaagctgtccacatcatcattcataagaaatgacattgaaatcatattcaatataaggagaatggttaaagaaatygcaccacatgcattaaatggaaaactctgaggtaatttaaaaggtttagctcttaacataattaatgaaatagcaacatatttacaatccataacattaaaaagatattaattgaaaaattatctctgggatcttaaataaattcctgaccattcaaactgcaaagaaacagaagttctttctcatgataaaacaaaaaaagaaacctgtttaaggtgaaagtgtctttagatttcatgttcctgagtc

SEQ ID NO: 390446 - DNA, 461 bp, Homo sapiens
caaaaaccaccgtaccccaaaagctacttaaataaaaaatatttttaaaataaaattaaaaagtggtagaccttaaaaatatgcaatttttatgtcaattatacctcaataaagctagaaaaacaaaacaaaccaaaaagctgtccacatcatcattcataagaaatgacattgaaatcatattcaatataaggagaatggttaaagaaatcgcaccacatgcattaaatggaaaactctgaggtaatttaaaaggtttagctcttaacataattaatgaaatagcaacatatttacaatccataacattaaaaagatattaattgaaaaattatctctgggatcttaaataaattcctgaccattcaaactgcaaaraaacagaagttctttctcatgataaaacaaaaaaagaaacctgtttaaggtgaaagtgtctttagatttcatgttcctgagtc

SEQ ID NO: 390447 - DNA, 461 bp, Homo sapiens
caaaaaccaccgtaccccaaaagctacttaaataaaaaatatttttaaaataaaattaaaaagtggtagaccttaaaaatatgcaatttttatgtcaattatacctcaataaagctagaaaaacaaaacaaaccaaaaagctgtccacatcatcattcataagaaatgacattgaaatcatattcaatataaggagaatggttaaagaaatcgcaccacatgcattaaatggaaaactctgaggtaatttaaaaggtttagctcttaacataattaatgaaatagcaacatatttacaatccataacattaaaaagatattaattgaaaaattatctctgggatcttaaataaattcctgaccattcaaactgcaaagaaacagaagttctttctcatgataaaacaaaaaaagaaacctgtttaaggtgaaagtgtcyttagatttcatgttcctgagtc

SEQ ID NO: 390448 - DNA, 576 bp, Homo sapiens
tttggccctgaaactctgctgtatttcccatataagtctatttcctctggttcatagtcaaatacttcaaggcaataatcttcagagtctgttctcaatgaaggtaaactggccacatagaagagctgggtcatgagagataattcctcacacattcctgattcaaatgtcaataccayccttgctggtgcttttttttttttttttttttttttttttggttaggaatcccttgcccaggctcctcaatgcacaagcacaggaagggctgacgtctagctcataaagactcctactgaggggcagattcctccatctgtgcaaaaaggagaaaggaatcatctaaactgctaggaaaggcactggtctgggaacccatcatgttggttctctcggtgactttgacattgactcttttgtgctacaactttgcagagagccaacatctccttatctacagaatatgggtgccggccttgatgaatactaggctttggaactggatcctgtgttgggaagagagaggaataaaacatagtccctgacttcactgagtttgaatctgcaggggccaag

SEQ ID NO: 390449 - DNA, 588 bp, Homo sapiens
tgctgctgtaaaaatcccaagagagagatattgtaggctgtatctgaaggactaatgttccattgaatacactggaatatttggttgtgaaacagaaaaggccttgattaggaatcagaaagctgagattctgagaggattcttccacctcccagctgtttatctattgaaggcaaagcttctttttcctatgccctgtttccttattcatacattaaggaagctaagctgtgtgatatataagctaattcccagaacttccacattttatacctgtatacttgtcattcctattgccttgtataccttgtggtgcctacccaccaccagataatgtccatggtcttcatatctaatgtcgttgccatataacctgcttacctccccaaagtcatcattcaccatgtaaccctagggtgaccaactcaatgcagtttgcctgggactttcrtggtcttagccctgaaagtcttacattatgggaaacccccttcagtcctgacaaaatccatacagaatctacccaaaattttgttacttcacatataaggcatgcctttttatgcttttccaaattgtgttccctct

SEQ ID NO: 390450 - DNA, 567 bp, Homo sapiens
gtttttcctaattttccttgcatctctccaatagctctagctgagactcttttgcaagtttcttcaccttcaaatatatataaattgtgaattttctctttagagtctggtcttaccaacaaaataaaatttagacttcataatactggctctggagacaaacagctatgaatccaaaccctgtcatagggtggccaagtgaccttgggcttcagtgtacttatctgtgaaataatacctatctcacaggtctatkgatggcatcaagtgagttgatacagtaaaaactcctggcacagtctgagctcacacacctgtgctagtgttgtatagtcactgagtgatttcagccaagctcaattacggttatgagctgatgaatcccagcccagattctcacctggcctctgcactcagatatcccattgcctttagacctataaactcacatcaactcctcttgctgcttgatcctcttctccttcagctttattgactaattcacccaagggaacttcttaaccatcactgcaacttttcccttcccctcaacacaatgcaaaaaca

SEQ ID NO: 390451 - DNA, 595 bp, Homo sapiens
tagtgttgtatagtcactgagtgatttcagccaagctcaattacggttatgagctgatgaatcccagcccagattctcacctggcctctgcactcagataycccattgcctttagacctataaactcacatcaactcctcttgctgcttgatcctcttctccttcagctttattgactaattcacccaagggaacttcttaaccatcactgcaacttttcccttcccctcaacacaatgcaaaaacaccaattcttttcattccattacctcagcagtcctcaattattctccttctgagctaccttcacctctttaataatttctccccacgccagctgtcatcctctttgattctaatgtgtcatttctgttacacatacaatcaagcaactcccttactcaaattgtttcatagtcttcctttatctatagatacaatcccagctccagaaggggacacacacacccttcatgatcaatctccctggaatctggctagccccatccctcctactctatcaaaaacaaaacaaaacaaaacacttgtatgcagtactcttgaaaaccctagcactacccaggagatgacatgc

SEQ ID NO: 390452 - DNA, 618 bp, Homo sapiens
gacatcacaacatttgaatgcccttgtgtgagccaaataaaacaaaatatgcactgtggcactatggtaagaatgtgtcccctctaaactgtatgttgaaacctaatgccctcctaacggtgttaagaggtgaggccctttggaatgtgattaagtaattagggctttgtcctcatgagtggatgagtgacttataaaaggcctggagggaactagcttaagctttttctcccttccactttccaccatgtgacagggcagcatttgccccttctatcatgtaaggacacagcactagggccctcaccaggcatcaaatgctggtatcttgatcttggactttccagtctccagaactgtgagaaaataagtgtatgccatttgcaaattacccagtttcaggcattttgttatagcagcacaaaaggactaaaatggtgtgttgaggggggcatggtagagacagaaagggaaagagagagagagagaragaaagagagagccagcgagtgagagaaaacataagagtatgtgaacgctagagtctaggcatccaagaatgaattctttcaagtggccacttgcagaacgttcaaaaccagggcagatattgaaccc

SEQ ID NO: 390453 - DNA, 618 bp, Homo sapiens
gacatcacaacatttgaatgcccttgtgtgagccaaataaaacaaaatatgcactgtggcactatggtaagaatgtgtcccctctaaactgtatgttgaaacctaatgccctcctaacggtgttaagaggtgaggccctttggaatgtgattaagtaattagggctttgtcctcatgagtggatgagtgacttataaaaggcctggagggaactagcttaagctttttctcccttccactttccaccatgtgacagggcagcatttgccccttctatcatgtaaggacacagcactagggccctcaccaggcatcaaatgctggtatcttgatcttggactttccagtctccagaactgtgagaaaataagtgtatgccatttgcaaattacccagtttcaggcattttgttatagcagcacaaaaggactaaaatggtgtgttgaggggggcatggtagagacagaaagggaaagagagagagagagagagaaaragagagccagcgagtgagagaaaacataagagtatgtgaacgctagagtctaggcatccaagaatgaattctttcaagtggccacttgcagaacgttcaaaaccagggcagatattgaaccc

SEQ ID NO: 390454 - DNA, 619 bp, Homo sapiens
gttcaaaaccagggcagatattgaacccatgtgagcctctgcttcctctatgatttagggataatacaatatyccttgtagaattgtgagaattacatgaggttatttgtaataacacagaatttcaaaatttttcttctccaaagaattctggttaactccattgggttgagacataaaagacagtttcacccaatgatggtgaagtgattttttcaaataaaacaccaaattttacttggtctgagaacacaatgtatgatggtgaaagcaaagatctccctactttgaggaaggacatcagaacagcctccaatggtgtcttccgtttttccaaaagtttctaaacagtaactcagctacctgagtgtcaatggctggggtctgtggagccacggaaacccttacatcagctgaatggaagatttgtagacattttctgtttatgaaaactcctctcacttaaaaagtgcagatccattacctaataccatgaagtttcttaatctatgtttaattcttctaagctttgtgaaatgtcttttgcagaggttttagaaggggtggagcagaagagatttgggagtatatgaggacaattaagtcaaagatcatttcc

SEQ ID NO: 390455 - DNA, 619 bp, Homo sapiens
gttcaaaaccagggcagatattgaacccatgtgagcctctgcttcctctatgatttagggataatacaatattccttgtagaattgtgagaattacatgaggttatttgtaataacacagaatttyaaaatttttcttctccaaagaattctggttaactccattgggttgagacataaaagacagtttcacccaatgatggtgaagtgattttttcaaataaaacaccaaattttacttggtctgagaacacaatgtatgatggtgaaagcaaagatctccctactttgaggaaggacatcagaacagcctccaatggtgtcttccgtttttccaaaagtttctaaacagtaactcagctacctgagtgtcaatggctggggtctgtggagccacggaaacccttacatcagctgaatggaagatttgtagacattttctgtttatgaaaactcctctcacttaaaaagtgcagatccattacctaataccatgaagtttcttaatctatgtttaattcttctaagctttgtgaaatgtcttttgcagaggttttagaaggggtggagcagaagagatttgggagtatatgaggacaattaagtcaaagatcatttcc

SEQ ID NO: 390456 - DNA, 591 bp, Homo sapiens
tgaacccatgtgagcctctgcttcctctatgatttagggataatacaatattccttgtagaattgtgagaattacatgaggttatttgtaataacacagaatttcaaaatttttcttctccaaagaattctggttaactccattgggttgagacataaaagacagtttcacccaatgatggtgaagtgattttttcaaataaaacaccaaattttacttggtctgagaasacaatgtatgatggtgaaagcaaagatctccctactttgaggaaggacatcagaacagcctccaatggtgtcttccgtttttccaaaagtttctaaacagtaactcagctacctgagtgtcaatggctggggtctgtggagccacggaaacccttacatcagctgaatggaagatttgtagacattttctgtttatgaaaactcctctcacttaaaaagtgcagatccattacctaataccatgaagtttcttaatctatgtttaattcttctaagctttgtgaaatgtcttttgcagaggttttagaaggggtggagcagaagagatttgggagtatatgaggacaattaagtcaaagat

SEQ ID NO: 390457 - DNA, 519 bp, Homo sapiens
ctcacagctccacatggctggcgaggacttacaatcatggcagaaggtgaaaaaggagcaaaggtacatcttacctggcagcaggcaagagagcatgtgtaggggaactaccctttttaaaatcatcagctctcatgaaacttattcactaccacgagaaaagcccaagaaaaatctgcccccatgattcaattacctcccaccaggttcttccyacaacacatggtgattatgggagctaaaattcaagatggtatttgggtggggacacagccaaaccatatcaattaagtttttaagtggcaagaagaccccttcctgaggaattagctggaataagtataaagtacctgcataaaatgtagagaggaacatacattcagagcttgaccagatcgacagtctgttctagccctggcactgaccagctgaggatgtttggttcagagtctcaattacaatcaatggagtagtccatagagggcttgggtcctcttggcttgtactgtaaaacctggg

SEQ ID NO: 390458 - DNA, 553 bp, Homo sapiens
  misc_feature (1)...(553): n = A,T,C or G
nnnntaattcattcagattccaccaatgtttactgtgatgatcctctgcatttctctacccgcattctccttattgacccagaaggttctatgtggctcatgctgaatttcctgctcactatccctaaacttctctttccttacaaagcaaagccaggttttctcaggggaattactatacctacctaaaaatacccaccctttgctgactcccttgcagctaggagaaacctcatgaccccctcttggctaatgaaataaaagtgcacattggcaggtaaagcagacaggaaatgacccttgggctgtttgtctcatctctcaatttgtgaatatatccaaaaatataattgtggttgttraagcaggctttctccagccatgagtattaaaaagccatttgctaaggatggaagagcagaaggagaagtctgagtccttactgtccctggtgacatggttgtgctgtctacttctgtgtttcttgtggtatcttgtgctagttaagcacagggtaagttatatgcttgattatttgaagccaaatacactt

SEQ ID NO: 390459 - DNA, 583 bp, Homo sapiens
tgtgtctcctctgagggctagaggattccctagaaatcattaacccccttagattaaaaaaaaatcagaaaatttaagttacataacaaatatcaaagctataaatgaaaacactgagttgtaggcacttaataaacatttgtccaatcaaattgtgtttaaatggagcctccgcagaagcccaaaaatagttgctgcatgctgattgtgcacgccttcaggtgctttaacytcacattggtatcttgaaattggccttggtgggagtatttatagcatgcaaatggacaaacatcataaatctttgttttgaagagccagtttttacacatctatcagcaccactgctccacctccttccatcaccaccaccgctccattctgttaaccaaaggaaatctgaaacccaaacagaggaagtaaatgggcgatctggaaagatttcaagaaaattactgttgggttggactcaaactgttgagccttcaggaaatatatatatattgctcaaagaatcctcattgaataaagctagctaattaagctcttacaagctgcagggaagaatgacctctataaaatg

SEQ ID NO: 390460 - DNA, 599 bp, Homo sapiens
ggtgctttaacttcacattggtatcttgaaattggccttggtgggagtatttatagcatgcaaatggacaaacatcataaatctttgttttgaagagccagtttttacacatctatcagcaccactgctccacctccttccatcaccaccaccgctccattctgttaaccaaaggaaatctgaaacccaaacagaggaagtaaatgggcgatctggaaagatttcaagaaaattactgttgggttggactcaaactgttgagccttcaggaaatatatatatattgctcaaagaatcctcattgaataaagctagctaattaagctcttacaagctgcagggaagaatgacctctataaaatgtatgccttttgtacataaacttggaagtctgaacagaatggctataacttctcccattgcctcctcttctcgttcatattaaaacaaaacaaagcaagtgaacagcattrgcaacaaccctaatggtgctttttgtgtcaacttaaagcaaactaactctctgagcttcagttttctcatttgcaaatgaagatttcagttatcttctggagttgatatagaaatcaaaatcaatg

SEQ ID NO: 390461 - DNA, 574 bp, Homo sapiens
aaaacaactcacaagtctttcatgcagaaggatcaaaggcatgaagtgaaaacatatgatagaatccaggtgctcagaaagaccaggttttaaatgctggatttgcagtttactaatggtgcatgactccaaacaattcattttacctctctgagcatttggtttctcatgttaacattttttatggggaagaaatgagataagacacgtacaacacctggtacagtgtaggagacacagtaagcaccaagtccttctaaaactgtaatttaattattattataattatgacattcatatgttgctaatggaaagtagacacagaaaaggggaagaagtcttccaaagatttgcaaagtctgtgctagatctcatgactgctaatgttggcccatcatccaattcattatacccatataattgaacacaatttaattctaggatatatattaatatgaagtgataagaaaatactttctacaagtrggctgttacctgattgttcctgttaccttattgttcctttcaggtactctgtaaatatcaataataagcagaatatcagagtgaaaac

SEQ ID NO: 390462 - DNA, 510 bp, Homo sapiens
tgctctcattacctcccctctgcactttttctgagcaggactatattttggaaggtcccacatttcaggcaatcaatgatctccagaataagctgtcggccactctcatataaatgtacattttttttttttttgagatggagtttcactcttgttgcccaggctggagtacagtggcatgatctcagctcacttcaatctccgcctccagggttcaagcgattctcctgcctcagcctcccgagtagctgggattacaggcatgcaccaccgcacccagctaattttgtatttttagtagagatggggtttctccatgttggtcaggctgatcttgaactcccgacttcaggtgatccacctgccttggcctyccaaaaatgcattatttttagtcctgcctccctggcatgccacatatggtaggtgctaggaaacaatttccaacttaatgcaaagttccaaaaacatgaagtactgactaatgaatggctccaatcacagacacat

SEQ ID NO: 390463 - DNA, 541 bp, Homo sapiens
atttctaccatgctttcgtgacatcagaaaaaaggagaatggattggggaggctagaaaactgcactggcctttgacaaaactgggacacagattgcatatgtgtcmcagtttttttgcatatgtgcatatggtgattagaattagagcattccatcagctgagagctgcagcatcacagagttaaagtgctagaacaatttaaacacaattcctccttgcttcttgttacaggaaagcctccctcactcacatccccaacccagccccctctgttaggccacctgagtgtcctctgcagggctggactccaaagagaggggttccgtcgcttcctgttcatcaggatggagaggaagagctgatgggggagtggaagcgtgggggctgtgctttatccccacccccatccggtccagcctgcagtgggcacagcccctccatctgaattcctcatatctaatttgtgatccctggacgccaggcctggttcatcatcccgggatgggttgggagctgcaagaactcctttgtcatcatct

SEQ ID NO: 390464 - DNA, 561 bp, Homo sapiens
tcttagaaccctcctgctggccagcatcccagctcctcagcctggcacatagggttcctcgtggtccagctctcccacatccatcccctcctccctcctgcatgcttcccacatccttggatgagtcagcccatgcccctgaggctccctgtacctcaactctctctgtgcctcgtgcatccactcatccttgaagggctggttcaaggttcactttcttggcagtggtaaatggcccttctttctcttgggactctcagcccccgcatgctctccaaatccagctccacctccctgtgttacatgaatgtgcttttgttcatcccacaagacggagcactttcctagtataggaacactgtctcactgtctagtactccctgttcccagcacctaggagagaaactgaaacaaagtactcaagaattgtttaggactgggtataaacccagaagaagtagaataagagactcacacagattttgcatactcatgttcactgcagcattsttcgcaatagccaaaaggtagaagcaacacaaatgtccatcaccagatgac

SEQ ID NO: 390465 - DNA, 559 bp, Homo sapiens
tgactaagtccacaaccattccatcacctcccaaacgtgtctactgtgtcccctggaactcccacctcataatcagaaaatgtctccaaatattcttgcatctccctgcctgagataaagaaaacctgcattccctgaggactctggctctctgcagccccctgcagtgcactggtttggttgtttcctcttatctgaaacaccactggacaggaggggggtttaggagctcctttctttccatggcccttccagatcattgctgcctgaccctttcacccaatgcrgatcttcgaggcttgtgccatttagttatactccctccagcacctctggctgctgtgctgatgagaatgggatgaggagggaggcagacggaggctagggagaggcagtgacaggcatccaggtgagagaggacagtggcttagactggacggcagcagtgaagatgctgagaagagctgcaggatttgaggtatcttacgaatgtgagccaaaatcattgcctgaggatttacaaaagataagaagtgtcaagggagaagataccatgtca

SEQ ID NO: 390466 - DNA, 559 bp, Homo sapiens
tgactaagtccacaaccattccatcacctcccaaacgtgtctactgtgtcccctggaactcccacctcataatcagaaaatgtctccaaatattcttgcatctccctgcctgagataaagaaaacctgcattccctgaggactctggctctctgcagccccctgcagtgcactggtttggttgtttcctcttatctgaaacaccactggacaggaggggggtttaggagctcctttctttccatggcccttccagatcattgctgcctgaccctttcacccaatgcagatcttcgaggcttgtgccatttagttatactccctccagcacctctggctgctgtgctgatgagaatgggatgaggagggaggcagacggaggctagggagaggcagtgacaggcatccaggtgagagaggacagtggcttagactggacggcagcagtgaagatgctgagaagagctgcaggatttgaggtatcttacgaatgtgagccaaaakcattgcctgaggatttacaaaagataagaagtgtcaagggagaagataccatgtca

SEQ ID NO: 390467 - DNA, 574 bp, Homo sapiens
ctccatgcagtagaagagtctgtttctttatcttttccagtttatagaggctgcctgcatcccttggctggtgatcagcaatggctggtcacgtctttctcacattgcactactctgtccctctctctctgtctcttgcctccttctttctcttataaggaaaagactcttgtgattgcattgagtatacccatgaagtttagaataatctccaaatttcaaggccagctgattaacagctttaatttcatctgcaaccttaattctgttttgcccaacatatttacaggttctgaacattaggaggtgtatgtcaggggttggggggtattattatgcctaccaaattatgtaaagggcatagtttagtgccagtcatacagagggaaatcaataaaggrtgactatttttgttactatatcccagaaggagttctgtgcaaatctaggctactgaaacacaacagcatactgcctgaagttttccacatcctagcttctttccccattctgatgaaaccaatggcccatcttattttgccatttgataattctccaacaatttaagcaaact

SEQ ID NO: 390468 - DNA, 574 bp, Homo sapiens
ctccatgcagtagaagagtctgtttctttatcttttccagtttatagaggctgcctgcatcccttggctggtgatcagcaatggctggtcacgtctttctcacattgcactactctgtccctctctctctgtctcttgcctccttctttctcttataaggaaaagactcttgtgattgcattgagtatacccatgaagtttagaataatctccaaatttcaaggccagctgattaacagctttaatttcatctgcaaccttaattctgttttgcccaacatatttacaggttctgaacattaggaggtgtatgtcaggggttggggggtattattatgcctaccaaattatgtaaagggcatagtttagtgccagtcatacagagggaaatcaataaaggatgactatttttgttactatatcccagaaggagttctgtgcaaatctaggctactgaaacacaacagcatactgcctgaagttttccacatcctagcttctttccccattctgaygaaaccaatggcccatcttattttgccatttgataattctccaacaatttaagcaaact

SEQ ID NO: 390469 - DNA, 574 bp, Homo sapiens
ctccatgcagtagaagagtctgtttctttatcttttccagtttatagaggctgcctgcatcccttggctggtgatcagcaatggctggtcacgtctttctcacattgcactactctgtccctctctctctgtctcttgcctccttctttctcttataaggaaaagactcttgtgattgcattgagtatacccatgaagtttagaataatctccaaatttcaaggccagctgattaacagctttaatttcatctgcaaccttaattctgttttgcccaacatatttacaggttctgaacattaggaggtgtatgtcaggggttggggggtattattatgcctaccaaattatgtaaagggcatagtttagtgccagtcatacagagggaaatcaataaaggatgactatttttgttactatatcccagaaggagttctgtgcaaatctaggctactgaaacacaacagcatactgcctgaagttttccacatcctagcttctttccccattctgatgaaacyaatggcccatcttattttgccatttgataattctccaacaatttaagcaaact

SEQ ID NO: 390470 - DNA, 561 bp, Homo sapiens
gatgaatctacacaatgcttcattatatagcaatgctccatctcagtctgctaacaaaatgccataaactgggtgccttattgaccacagaaatgtatttttcacagttctagagattggaagtttgagatcaggatgccagcatggtcaggttctggtgagggtccttttccaggtttgcagagtgatgacttctctcattgtatccttgcatggtgggaaaggtgaggggaacagacctctgrcctctttttataagggcattaatcccatatatgagaactctacccttaggatgtaattacctcctgaaggctcctcctccaaatataatcacattggtgaaagatatgcatcttggggagacataaacattcataacaagtgcatatttaggcacctgcctctgctttgagcctttgtctcttcatctggtgtaaaatttaccttatgggtttgttatgataattaaggaaagtaaccacaattgaaaagcactttagaacttgtaaaatgccatatagttgttccctattataaataggtaatcaataggtaatc

SEQ ID NO: 390471 - DNA, 602 bp, Homo sapiens
gcttcctcctctggacacgtgggcaatggtgcctgccctgagaggatgcctgagggttagagatgacattgctctgacttaatcccattgctagccaagtgggatttcactgcgagttcactgctccatccttcccagagcaggtgctacagaacactttactcttgccccagatgggattctagatcaaatccaaatgagattctcaaaagccctgcaaaaaggaaacttgtttagcattttttttgcaaactgacttctcccaaactgggtatgtatatcccttctatttttctttttgtgtaatactctcagatatcctgttcacccagaactccatgaaacatgcatggaaattctgctttcagcataaatgacattgatttttggacaagatagtgtttctctactttgggaagtagaccagctaagtatttcatytggacaagatttgactcctgaaatcccttggactttgtttcttttgcagatggaagacgcactgagtgaagtagattttcaactcaaggtggatctgcactttacggacagtgaacagcagtgagtgtcatggaaattattgaattgtagtagcacagtgc

SEQ ID NO: 390472 - DNA, 549 bp, Homo sapiens
tgaaatttgtcttgtctggcggctctcaatgcaggcaggaggattctgacccctggagacatgtgccatgcccagagacatgtttggttgtcacagctcgggaggatgcttgaggggagatgtgagcaacaataagggcggggcttcacttctgactttatagatcagaaagaaggccaacctcttctagggccttagaacaagtcccagggatggtgtgaagcagacaggattgtcacacttagatattgccatctagtgagtaaaggccagagatgctgcttcacattgtagagtgcacaaatcagcagtgccccctcccaccacaagaaagcatgattcagtccccaaagtcaatgttatgaggtgaggaaaccctgctttatcctaacctcatatttgtacttgttactctgcaaagacccatcagaacctgtttgcacagggatggggagctcactccttcacrtcatggcccattctgccctgaatagttctgctgatcgggaaattcttctttatttcaaggaacaattcatccctgtgcat

SEQ ID NO: 390473 - DNA, 632 bp, Homo sapiens
ttgggtcctgtcaccggatgagccatcttttggagctggcaggcgccagctgtgaggaccagagggctgcaggatgctcagtggttggcagagcccagcgagtaatgggggaagagaagggcttgagatagtgctgcacagagacaaagaaaataaaaaaaaaactattttcttttctagtatagtttaacagaagaataattatgatgaagttggtatgccttgagctttacagtagcacactgtttagaacagaatattaacacagtggccagcaataatttacaatgagattgtgccccaggtgagggatgtgcagaatttgtatttcttcttcaaggtgaattttccaattatactatttttggttagagaccgctgcattatgaagcactccaaaacttgtgacttttaacaatggcttattcttttataatgttttgagttagccagcctaggctggggacatttatgcactaccttcagctgagatctcagctgaggatggagcagccaagatggcttcactcatctgtgtctgaccccttggttggagtggctgcaccagatgagcgacasgtgggcttctgtctccagttgggtggtcagacttcttacatgatagctgagtt

SEQ ID NO: 390474 - DNA, 632 bp, Homo sapiens
ttgggtcctgtcaccggatgagccatcttttggagctggcaggcgccagctgtgaggaccagagggctgcaggatgctcagtggttggcagagcccagcgagtaatgggggaagagaagggcttgagatagtgctgcacagagacaaagaaaataaaaaaaaaactattttcttttctagtatagtttaacagaagaataattatgatgaagttggtatgccttgagctttacagtagcacactgtttagaacagaatattaacacagtggccagcaataatttacaatgagattgtgccccaggtgagggatgtgcagaatttgtatttcttcttcaaggtgaattttccaattatactatttttggttagagaccgctgcattatgaagcactccaaaacttgtgacttttaacaatggcttattcttttataatgttttgagttagccagcctaggctggggacatttatgcactaccttcagctgagatctcagctgaggatggagcagccaagatggcttcactcatctgtgtctgaccccttggttggagtggctgcaccagatgagcgacacstgggcttctgtctccagttgggtggtcagacttcttacatgatagctgagtt

SEQ ID NO: 390475 - DNA, 546 bp, Homo sapiens
gtcctatttctggccaactatccaaacatattttccattatctgtatgcatttctgacgggaaaaaagaaaaatatatctttaggcaaaaatatagcatattggaagagaaccaggaggagtgaaaacatttggactttaatgatgtctttgatactcagtatttgaatgatcttgttggaataaatgatttcatttggctgttttgttccatgtatctctcttttttttttttttttttttaccacaatggggatagtcataccttttgcctagggtttcagagaggatttgaggacatgatgacaaagcccctagcatagtgcttgatacaaaatgggaaaaataaaatgcagctgttattattaatattatcagttaataaaaagtcttaccattcaagggaagtcaagcattcaagggaagcttgcagrtggaaccaacagaagtgttcctaaggcagaggtgacagaagggatatttaaacagggtgatttgatgtaagtgagacagagggccctcatagcatgggtgaaggggtgctgta

SEQ ID NO: 390476 - DNA, 591 bp, Homo sapiens
tagcctggggctatggctcaagcacaccatgatattggagccaatgaggcctgaacacaaatcccaggcccaccagtttayttccctgaacctcagttcttccacctgcaaaagagaatgttagctacagcatcgagcagttgggaagaatatttacatgagtaggaaagaccattttaaacaagcttacaggcaaaagcttcaatacactaaacttcaaagtgtaaaatgtctgtatgacaaaaactgcctaaaacaaacttaaaagacaagctacagactacgggaagacattttctacatgatatacccaaaaattgtcatcaaagatgtggttggcagaagacaggaaataaaattatataatgaaggagtaaattattcaaagaaaaagaagcaaaagttgtagatgggagattcatgaaagggaagacaaaaatagccaataaacatgagaagatggtcaacctccttagtaattagggaaatgtaaactaaaacagtgctatattttacccttcttgattggtttcaataaataaatatttccataaactgctagtggaagttgaaactgacactttgaagtac

SEQ ID NO: 390477 - DNA, 425 bp, Homo sapiens
tagctatatttagactaatagaatagcatgtcttagtgaaagattggaacctcaaaagtcacctataagcatatttattgaccaggcatttgactaatggaagatatttctaaggcaagagacaaagacactggcagaacttaggcataaaatgaccatcacacaagcatttatacaagaatgaatttcgatccttctcaaactcttccaaaaaaataggataggaggtaacacttccaaactcattttttgaggccagcattaccttgataccaaaacaagataaggccatccaagaaaaaaatatatagaccaatatatctgatgaacatagatgcaaatattttgatcaaaatactagcaagcctaattcaacagcacattaaaaggatcatatgycataatcaagtagaatctactcagat

SEQ ID NO: 390478 - DNA, 570 bp, Homo sapiens
ggaagcaggcgagcacccgccgggcccctgggcacacgaggggctatgcacgaggtcgccgcatcctgctggcgagggcccgaccaaccagaaaggctacacgctggcagcactgggggacctggcacagaccctggccgtgcccggaaacaggccgtggctagagaagagcgagatcatctttaccgggcccggaaaaagtgccagttcctcctggcctggaccaacgaaaatgaggcggccctcacacccctggcyctagactgcgccagggctcaccaagcccatgctgtggtagccgaggaggtggccgccctcactggggagctggagcggctttggggaggccccgtgccacctgccccaagaactctcattgaggagctccctagctgaacgggttaccctggtcattaataaagctgtgactggtcagccctgttgcttgtttctgagggatagctattgtcccaccagaccccagattcctgggcccacaagccactgctcagcttctccctgatcagtgctgacccagccagtcctaggggagagaagtgcaccaagggt

SEQ ID NO: 390479 - DNA, 533 bp, Homo sapiens
gatagttgtgtctgtattgaacagacacagatttytttgtcattattccctaaataatacagtataacaactatttacatagcatttacattgtattatgtattataagtaatctaaagtatacaggaagagatgtgtaggttatatgcaaatactatttgcaagtcccattttatgtaagggacttgaacacccatgaattttactgtctcaatgagtcctagaattaatcccctacagatccaagagtgactatataccaataactcttacaaagaaaaaaagtcaacaaaacaatagccatatgcaaacatactcaacttcactagaaactgaggataggtaaattaaaatgagatgccatttcactatcagatggataaaaatgtaagacattgatactatcaagtattggcaatggggtggaaaatgggaaatctcatcatctgtttggtaggagcataaattgatatggcctttggatgagcagccaggcagttcaaattttaaatatgtcaaaaataaatgaatag

SEQ ID NO: 390480 - DNA, 533 bp, Homo sapiens
gatagttgtgtctgtattgaacagacacagatttttttgtcattattccctaaataatacagtataacaactatttacatagcatttacattgtattatgtattataagtaatctaaagtatacaggaagagatgtgtaggttatatgcaaatactatttgcaagtcccattttatgtaagggacttgaacacccatgaattttactgtctcaatgagtcctagaattaatcccctacagatccaagagtgactatataccaataactcttacaaagaaaaaaagtcaacaaaacaatagccatatgcaaacatactcaacttcactagaaactgaggataggtaaattaaaatragatgccatttcactatcagatggataaaaatgtaagacattgatactatcaagtattggcaatggggtggaaaatgggaaatctcatcatctgtttggtaggagcataaattgatatggcctttggatgagcagccaggcagttcaaattttaaatatgtcaaaaataaatgaatag

SEQ ID NO: 390481 - DNA, 567 bp, Homo sapiens
cttcaaagccaggcttcgtggctaagtcctccagcttcrgtgcatccatttttccacccctgtcctcagccctctccaatctggcttctcttcctgccacgccactgaaggggctctaggtgttgtcagtaacagcctccatggtgctaaacccagtgggcatttttttcaggcctcatctaaccttacagcagctctcagaactctttgtgggccatacctatcatcttactgttaacgaaaagattgacatgcaggtcaaagcaaatagcacttatttgggaagcaaaaatggcagctggggtacaccggatcagggcagccctgaagagtgccctataaggcaggctgcaggagagaatttttaaaatagaggattgtcataaaaagttattttcggaagtagttcattggccaggcagaaatcctaaatcacaaagccgttgtgattggttagttaatgagagtactctcagctgaggtgttgaaggccagcagatgctgacttcagttgtttgaccgagtctattggaacatcccctgggtttgaccttcagcaggtgtgag

SEQ ID NO: 390482 - DNA, 611 bp, Homo sapiens
agtgttgtaagctgttgtgagcacttcagtttttcctttgagagaaatggggagccactgaaggattttttgcagagggatatttttagattcattctggctgcagagttgacaaaagtctcaragtgttatctcttagggaagcttccacatattctgttatcagctcatcaaaaaacagaatggagggcagttgaaggcacccatattgctgtcaccattcagtgaacagcagccttgaaaattgattgtatgaattggagtaatcttcatacccagctaaattagagtccagagatgagggagaagagaaagcagttggggcacaaagtgcctgcccaggaattatattgaaagccagctgccaaggtgacctgctataacctgaagaccagtttcacccagtagctgctgaaacgaattgctgtaactctaagactagttttacttaccaccttctctcacaaattagagcttgcctgttcctaaaaactttgcttagggtcaatgagctatctttcaaggtaatacataacatttctctaatgaaacctccaaccatctctttgttgttctgaagaccaccccagtctgtgtgtatgccctgaact

SEQ ID NO: 390483 - DNA, 611 bp, Homo sapiens
agtgttgtaagctgttgtgagcacttcagtttttcctttgagagaaatggggagccactgaaggattttttgcagagggatatttttagattcattctggctgcagagttgacaaaagtctcagagtgttatctcttagggaagcttccacatattctgttatcagctcatcaaaaaacagaatggagggcagttgaaggcacccatattgctgtcaccattcagtgaacagcagycttgaaaattgattgtatgaattggagtaatcttcatacccagctaaattagagtccagagatgagggagaagagaaagcagttggggcacaaagtgcctgcccaggaattatattgaaagccagctgccaaggtgacctgctataacctgaagaccagtttcacccagtagctgctgaaacgaattgctgtaactctaagactagttttacttaccaccttctctcacaaattagagcttgcctgttcctaaaaactttgcttagggtcaatgagctatctttcaaggtaatacataacatttctctaatgaaacctccaaccatctctttgttgttctgaagaccaccccagtctgtgtgtatgccctgaact

SEQ ID NO: 390484 - DNA, 582 bp, Homo sapiens
ctcattactgtgctgctaactttgatcacttgggtaagatggtgtctgtggagtttctccactgtaaggttactattttcctctttgtaattaataaataactgtggagaagtactttgagacttgtaagtagccatccactaatgattcttgcctgaaccaatttttactatgctgattgccaaatggtgatctaactccttcattctttctgcatgtattagttggcattcttctctaaggaagagttttcccttctccttctttatttatatcagtatgaaattaaagtgttatttgtttggctaaaacagtgaattgttcaaatggatttgctggaacactcctattttacaaaatttatttttattgcagatctaattttttttgaygttaatgatggggtatccatggacaaaccttagagctaataaagatcatttatatttcttacgtttatcgagagagaaggtccctaaaaaataattggaataatttaagcaatcatctttaaatttcacttattggcaaagtgaagttgatagtactacacaagttcttaaattatatatcaaattaaat

SEQ ID NO: 390485 - DNA, 582 bp, Homo sapiens
ctcattactgtgctgctaactttgatcacttgggtaagatggtgtctgtggagtttctccactgtaaggttactattttcctctttgtaattaataaataactgtggagaagtactttgagacttgtaagtagccatccactaatgattcttgcctgaaccaatttttactatgctgattgccaaatggtgatctaactccttcattctttctgcatgtattagttggcattcttctctaaggaagagttttcccttctccttctttatttatatcagtatgaaattaaagtgttatttgtttggctaaaacagtgaattgttcaaatggatttgctggaacactcctattttacaaaatttatttttattgcagatctaattttttttgatgttaatgatgrggtatccatggacaaaccttagagctaataaagatcatttatatttcttacgtttatcgagagagaaggtccctaaaaaataattggaataatttaagcaatcatctttaaatttcacttattggcaaagtgaagttgatagtactacacaagttcttaaattatatatcaaattaaat

SEQ ID NO: 390486 - DNA, 426 bp, Homo sapiens
cacctgtctgctcttggctgccagacctctcgaaagggtggtccaggctcgaggtctcagtaactctccagtctggcttctgttcacacagctttactgtgctggttctcagcatgggtgattttgcctcctaggatgcatttggtaatgtctgaagttatttttggttgttgcgattgagagggtgctrttggcatccggtagatagaggccagggtgctaaacatcttccaatgcatgggacagcccccaccacaaagatcattcagtccaaagcatcaacagtgcttaggttgagaagccttgctctactgaatcaattcttgataaggtcatcgatgattcaattgtctaatccagtggccttttggagcccttattttactaaacctttctctattatatgatacctttgactaatagtct

SEQ ID NO: 390487 - DNA, 546 bp, Homo sapiens
cctaccctacagtgcctgaaaccgtcaccatgagygtgctttcctttggatttagagatcctatctccctcccggagaggttttttttttttttaatgcaaatttctcttgaataaaagcccattaaactagtcagccattaatagctcagtatgaattaatctagtagagataaactggggggcagacagcaacacccggaagtagggagcccccagacagtgacatttgtacaaatgcaaatttcagtgggataaaacctattaaactagtcagccattaatatcttagtatgaattaatctagcagagttaaatggggaggcagacagcaagaaccagaaggagggaactcccattttgcgatgtctcaggtgggaaaacggatggaagaaaaggtggtctggatgttgggtcaccagggacagctagagggcacacggtgaaaatttacagaagcacagaatactagggccatgaggggacctagtgaccacctcatctaccactcctggtttataactgaggatctgaaggctcaggggtg

SEQ ID NO: 390488 - DNA, 337 bp, Homo sapiens
atttcctatgcctgtctttactttaatctcttaatcctgtcagctgaggaggatgtatgtcrcctcaggactatgtgataattgcattaactgcacaaattgtacagcatgtgtgtttgagcaatatgaaatgtgggcaccttgaaaaaagaacaggataacagcaattgttcagggaataagagagagaaacttaaactctgactgccagtgagccgggcagaacagagccatatttctcttccttcaaaagcaaatgggagaaatatcgctgaattctttttctcagcaggggatatccctgagaaagagaatgtgcagctagggttaggtctct

SEQ ID NO: 390489 - DNA, 337 bp, Homo sapiens
atttcctatgcctgtctttactttaatctcttaatcctgtcagctgaggaggatgtatgtcgcctcaggactatgtgataattgcattaactgcacaaattgtacagcatgtgtgtttgagcaatatgaaatgtgggcaccttgaaaaaagaacaggataacagcaattgttcagggaataagagagakaaacttaaactctgactgccagtgagccgggcagaacagagccatatttctcttccttcaaaagcaaatgggagaaatatcgctgaattctttttctcagcaggggatatccctgagaaagagaatgtgcagctagggttaggtctct

SEQ ID NO: 390490 - DNA, 337 bp, Homo sapiens
atttcctatgcctgtctttactttaatctcttaatcctgtcagctgaggaggatgtatgtcgcctcaggactatgtgataattgcattaactgcacaaattgtacagcatgtgtgtttgagcaatatgaaatgtgggcaccttgaaaaaagaacaggataacagcaattgttcagggaataagagagagaamcttaaactctgactgccagtgagccgggcagaacagagccatatttctcttccttcaaaagcaaatgggagaaatatcgctgaattctttttctcagcaggggatatccctgagaaagagaatgtgcagctagggttaggtctct

SEQ ID NO: 390491 - DNA, 337 bp, Homo sapiens
atttcctatgcctgtctttactttaatctcttaatcctgtcagctgaggaggatgtatgtcgcctcaggactatgtgataattgcattaactgcacaaattgtacagcatgtgtgtttgagcaatatgaaatgtgggcaccttgaaaaaagaacaggataacagcaattgttcagggaataagagagagaaacttaaactctgactgccagtgagccgggcagaacagagccatatttctcttcyttcaaaagcaaatgggagaaatatcgctgaattctttttctcagcaggggatatccctgagaaagagaatgtgcagctagggttaggtctct

SEQ ID NO: 390492 - DNA, 608 bp, Homo sapiens
ttgtaacctctaaaaacttaccaatctaaaaactgatcttactatttcacctgggaatatcttatcaggattttataccaatggttctcaactgaagttttgaagacagaagttgaggttgttagggaagtgaggttgaatcaaaatcacatatggatgttttcaaaccaacctctttccacataatctgtgccagaattccctgatgcagggaataaataaagtaaccataaaatgaaaaaaacttatgggtgattttgcccaaccttcattccttcactactttcaactgaaaatggctatgttaggctcatagatatccaaactctttccttcttgtccattccttataaataccaccatgatatgtgatcaaaggtctgagactgagctgagggatttcttattaacatgagaaagagaaaagagagagagaaggggctggcaaattctgtggaatggtttaaattatgaaacatctctaacatcagattcatattcttttctcccgttctctctacaactgcttwatttcaggattaccagcgtacctcgacttctgcaatgacctaagtgacttctctgccattagtctttattccaatccc

SEQ ID NO: 390493 - DNA, 612 bp, Homo sapiens
aacatgttggctggtttgagtatggcagtcagagagatggactttaaattgggcaacgcctgcaataaagatgaaagagtttgaacattattctacaggcaggatgtgtagtaaaacacatgccagactaaaaattgggaagcccggataagaatgatacaatggactttggggactcagggaaaaggctgggagggggtgagagataaaagactacactttgggtgcagtgtttactgcttgggtgatgggtgcaccagaatctcagaaatcaccactaaagaacttatttctgtaaccaaataccacctgttccccaaaaaccaattgacatgaaatttttttttaggaagactgggtttgaatctagtgctctcattttaaaattgtgttatctggatgagggacttactattaatcaatttagatttcttcatttgtaaaatgagggagttgaaggtttttcgtttttgttgtaattaggtgaagagaaatttgagggacagaagtctttccaaartagtatcttagaaagataaaattgaggtgaaaggggatgagaagcataaagaatcttaagatagcaaaatcatttgtgagattattgccctg

SEQ ID NO: 390494 - DNA, 622 bp, Homo sapiens
catcaaaggttacaattacaatggtcacattaagtcatagaatagtgtggaagattcaactttgattgatataagcaccttccattttttaaagttagcatgtgtttggaaaagaaggaaggtgttgcaacactcagaaattgactattgtgtgtcaaaagagatactcttttgaatggattcttcaaaagcctcaaatcagtattataatttagtgttacaccaactttattttcttccagattctgtttctcaatctattggttctattgcatctttcatcacttttaatatgtcactttgttcttctttaatattctttatattttcataaaggcttttaactcccagcatattgcaaacaccaattaactaagctactcaacatccctatgtgtgtagaagcattctattattcttgttttaaagctgggaaaaagaggttcagtgaggtgaggtgactcgcctaacgagctagtgggagaagctagtctctcagtttatgacacctaattatctgcattaacaggacatgataatctcctacctctaatcttttcatggctgtacattatgtggagtaaagacrtcaatactgatgtcaatttgagaaaccagccac

SEQ ID NO: 390495 - DNA, 621 bp, Homo sapiens
acagagagattgagtaatttgaccaacatcacacagtgagcagatggaaaggaggaatagacagcgtgacataaagatgggaagggataggaagacacagtgtgcctcggggtctgcactcctaaccaccacttttgtattgcttcccaaagggaccggggaaagagacttttgaagagtatttcacatggacatagaactrcacatcaggctgtatttctctttctctctctctttttttttcttttttttttttttttgagatggaatctcactctgtcgcccagtctggagtgcaataatgtgacctcggcacactgcaacctccacctcccaggttcaagtgattctcctgcctcagcctcctgagcagctgggattacaggcacccgccaccacacccagctaattttttttgtatttttagtagagatggggtttcaccacgttggccaggctggtctcaaactcctgacctcaggtaatccacccaccttggcctcccaaagtgcagagattacaggcatgagccaccgcacctggccccaagctgtatttctctttaggaagatgaccatctcactgactccatccagtaagggtactataggaactaactat

SEQ ID NO: 390496 - DNA, 513 bp, Homo sapiens
catatagctttaggccacgcctaaaaagcagcagtagcagattatttcaaaaagatgcagacaggtttatatgggtacataggatagccatgtagtttcaatcactttacttttatggcctaaaattttaatatgattktataaaaaactattatacagaaattcttgccaatagatccaacaaaaagacttgagcagtgagtccagctaagtcactgctttacttcactttacttaattagaaaacacgcagacagttggtttggggtgaagagttgttttcagttagaaaaaaaaaactcattagtatgctcatctcatgtaaatcctctaaagaccagattgagaacatgttttctcttatcaggatcatgatatccttttcctaaacgaagcatttgtaccacagtgaaaattccccactttcccttatacctatgggaaagaacttctaaataatgcatttgttttggctcaaagacaacatcgtgggtaatctgaatctctcagttt

SEQ ID NO: 390497 - DNA, 618 bp, Homo sapiens
ggagggtaatcttattttctcaaagtttaactgtttaagtgttaatcacatctaagaaataccttcaccacaacaactaggctggtgtttaaccaaaaactgagtaccacaggctaaccgagtcaacacagaaaattagaaaccacatctggcatgcttaggagaattacagattagcatcaatagacctggcttgaaattcaagtgctgatgtgtcacattaagtaaacaagaggattctgtgctattttatactatatraagtgtcccccggagagaaatgcagaggtcaaagtctcaagtggtagtctttgttgtggtatccagatttattctgcttaataaatatgttattgtaaaaaaattattgataacttaaggcatccagaaagtagcacatttatggaaaatggcaacatcatttttggagctgagcccgcctttatcatcttaattcccacactttagatgatggataatttagaactcactcttatgtgtgctttggttaaatgttgagatttataatgtttcataatcagcctgtaaaatgagtctcaatttcacataagctgaatgaggactaaaaatcaagcaacaaatatgaggattatttcc

SEQ ID NO: 390498 - DNA, 618 bp, Homo sapiens
ggagggtaatcttattttctcaaagtttaactgtttaagtgttaatcacatctaagaaataccttcaccacaacaactaggctggtgtttaaccaaaaactgagtaccacaggctaaccgagtcaacacagaaaattagaaaccacatctggcatgcttaggagaattacagattagcatcaatagacctggcttgaaattcaagtgctgatgtgtcacattaagtaaacaagaggattctgtgctattttatactatataaagtgtcccccggagagaaatgcagaggtcaaagtctcaagtggtagtctttgttgtggtatccagatttattctgcttaataaatatgttattgtaaaaaaattattgataacttaaggcatccagaaagtarcacatttatggaaaatggcaacatcatttttggagctgagcccgcctttatcatcttaattcccacactttagatgatggataatttagaactcactcttatgtgtgctttggttaaatgttgagatttataatgtttcataatcagcctgtaaaatgagtctcaatttcacataagctgaatgaggactaaaaatcaagcaacaaatatgaggattatttcc

SEQ ID NO: 390499 - DNA, 570 bp, Homo sapiens
actcactaaaaaatctagatgctcttaaagacagttccacagtacctacaggtgcaaggcaaattgtacagtacagtgactgactctgagaagcactaggaagtatacaggactctggctatagtggcttttgtcccagtttgcctagagcctgatctgacatatgcctgttgttctggcataattatcaacactacacctatcattttcaatgtaayctaattttgatgataaatcatatggttatcctaaatgaaaaactagagggcacatgttctacccaaagaaaaaataaagctttacttggttcttgcccatcattgttacataggaatgaagacctgtgctttttcaaaagaagccagatctagattttaggtagaatcctccagtatttagtgttagctaagatgtcttatttttctttgtggttactttgtaagtcaaaacttatttgaatgacagatttccccatgcatcaccaatggtttaaaacttcttttggtctagaacttctacattttgggggcttctgtaccactattttcttttccatttcatcagttggag

SEQ ID NO: 390500 - DNA, 570 bp, Homo sapiens
actcactaaaaaatctagatgctcttaaagacagttccacagtacctacaggtgcaaggcaaattgtacagtacagtgactgactctgagaagcactaggaagtatacaggactctggctatagtggcttttgtcccagtttgcctagagcctgatctgacatatgcctgttgttctggcataattatcaacactacacctatcattttcaatgtaacctaattttgatgataaatcatatggttatcctaaatgaaaaactagagggcacatgttctacccaaagaaaaaataaagctttacttggttcttgcccatcattgttacataggaatgaagacctgtgctttttcaaaagaagccagatctagaktttaggtagaatcctccagtatttagtgttagctaagatgtcttatttttctttgtggttactttgtaagtcaaaacttatttgaatgacagatttccccatgcatcaccaatggtttaaaacttcttttggtctagaacttctacattttgggggcttctgtaccactattttcttttccatttcatcagttggag

SEQ ID NO: 390501 - DNA, 572 bp, Homo sapiens
agcccagagtgaacaagtctgcctttagacactaaactcccagtcagcttttcagccattcttaaagatgaatggacagccaatgatcaccaaacatcagaggaaactctctagcaaagtaaagataaaataaacagtatggggccgggagtgctggcttatgcctgtaatcccagcactttgggagactgaggtgggagactgaggtaagagactcgcttgaacccaggagacagaggttgcagtgagccgagatcacgccactgcactccagcctgggtgacagagcgagactccatctcaaaacaaacaaacaaacaaacaaacaaacaatgaaaaagacaaaaattaaaaaaaaaaagtatgaaatttaaacaaagataatgaaaggaacagaagaaactttttgtgaaacgtaattgaagagaaacaaaaagaaattatattacataaaaatgggaagcaataaggaagattcatacaacaaaagctagcayttggaaattaaaaaataaagaaccataaataaaaaaaatctaaaagaatagttggaagataaatttgaacaaaaa

SEQ ID NO: 390502 - DNA, 544 bp, Homo sapiens
atgatttctttcttaaatatttggtcaaattcatagtgaaactatctgtacctgatcctttctgttttggaatgttattgactattgattgaattttttaaataaatataagcctattcagatggtctgttttttcttgtgtgagttttggcagattgtgtctttcaggggatgggttcatttcacctaggctagtatgtgagactagaattgtttgtagtatttctttttaattgtgtttttaaactttctaaagagagagtgtcttgttctgttgctcatgctgaagtgctgtggcatgattgtatttcattgcaacctcaaactcttgggctcaaggaatcttcccatgtcagtcacctgagtagctaggacttcaagtgtgcaccaccatacccagatattttgttaaattatttttgtagagataagttctctctatcttgcytagattagtctcaaatcctggccttaatttatctcttgccttgacctcccaaagggcttggattgcaggcctaagtcatcaagcccagcccatagt

SEQ ID NO: 390503 - DNA, 628 bp, Homo sapiens
agcctgggtgcagtggctcatgtctataatcccagcactttgggaggcctagacaagagggtcacttgagcccagaagttcatgaccagcctgggcaacataacaacatctctacaaaaaataaaacacactagctgggcatggtggtgcatgcctgtggtcccagctacttgggaggctgaggcaggaggatcacttaagaccagaaatttgaggctactgtgagctatgatcacatccactgcactccagcctggacatcagagtgagaccttgtcccatacaatcatacaaaaacacagaaayggcaaattccctcctgtcgggcaatgtcacctcacctctctagtaaccaaaactctgctaccagcctaaacttgtttcccagactcttttttctgaagatggattaactcctgagggctttgcaaattcttcatggacgcagatttctggagaatacatcccagcacttcactgaaaatgacaaacctggtctagatctcaatagatgcatcctagattaaagctgggatcgccattgtattaacataagaaaaaaaatcttccctacattttctgtggactctgtgtgtgtgtttcttttgaggttgggatgctttttaat

SEQ ID NO: 390504 - DNA, 502 bp, Homo sapiens
taaaggtacattaatcatgaccatccagttggctaaaagataagaaaaatacaaggatttaagggcaaatttagaaaaactccaagaaaaaaagagtttgagttttgttttcatattcagtgagctcttaaccttgaaagaatgtttcttaataagcattattgtattttcattctgtaaagaaaataagtgatatcatttkcttctcacctgtgagttcaaaagcagtacagtttctccctgcagagtccagtgtgaacatttagacacttatttcacatttatctgtgttgatttggacaggaaagaggagatattgaacatgaacattttgaaccacaatatttttaaaaagcatatcattattgaagaacctccacatagtatttaaggaatccaaagaacccaatgttgaaacatgcttgaaaactattacttttcctaatgttaagagctttactcaatgccaaagcagacaaagttttgctatcagtcccattcc

SEQ ID NO: 390505 - DNA, 650 bp, Homo sapiens
caagtgtcagcagggctacattccttctggagacttcaggggagaagtcattttcttgccttcttcgatctttaaaggctgtcttcatttcttggctcctgaccctttgagtctgtccttacatatcttgctactttctttgatctcctacccctctcttatgaagtttgtaagtayatcagacccactgagatgattcaggacagtctctcaatctcagaatcttcaatttaatccatctgcaaagtcccttttgtcatataaggtaagatttataagtatagggaattagaatgtgaacatctttgaaggaccattttcagcctaccgcaatatactttacaatactcaacaatatactttacaaatcttagtcttagtggaagatgacagtcaaaagtcaattaaaagatatttataagaagtcagacaaagattctacatgttaacaacattctaaaagtggaaatactgggaattaattacatatgtgacagaaaaacattgcagcaataaaacgtgagtccatcaacttaagaaggataaaatggcaaaggaatgttgaatataattaatctgatctgggattaaattggaaattatggaacttgtaattgcaagctttgagtgaataaccatagatttttgtt

SEQ ID NO: 390506 - DNA, 571 bp, Homo sapiens
tgggaattctgctgggaggctggggattgccctacccctacttaccatctacggtgcatgcacacaacattagggaggctgaggacaagcctgcttggcctggctttgctccctgaggccagggcatacagtccagggtccagggaattgcccagaccagttcaccaccattggcatmtgagcactcttctaaggaaccagaagttgggtctccacaccatactgctcccctgcagctaacacctcctgacacataacacctgtgggatggagactggcctaccaagcccattgcagccacttccaacaccagtgtgcacagttgaagatccagaaggttgtgccaccactaccactgacattgcctactcatgctggctgcctaggcactgaagaaccttcctacccacagagcccactgctgccacgaccagtatccaagtaggtcccctggagtctcaagaatcggcctttttggacctgctaacaccagtgccagcatttgctgccctggagcccaaggacagacatgctcagtcctccactgccaccactagggcccaaagactgc

SEQ ID NO: 390507 - DNA, 588 bp, Homo sapiens
gatccaaataatccacagcaggttattcatgaacacactccactagagtttaagttgttgaaggaattaaaagcgagtgtagtaaataatggcatatggagcccattcactttaggattgctagaatctgtgttcagtgctatgtgtcttttaccctttgatgtgaaacacttggtgtgaacttgcttgtccactagtgcatatctgacatggaatttaaattggcaagaaatgtgtgcagagcaggctagacagaatsgtgttgctggacatggagatatttataaaggatatgctgttatgtaatggcccttattcagacctggaacgacaaatgacactcccagaggctgcttatcagcagtgtgcacaggttgctaaatgcacctgggccacaattcctgaagagggagtcccagcacaatccttcttacatatcatgcaagggtcacaggagccctatgcgcaatttcttgcaagattacaagaggcagtgaagtgtcatattcctcacactgcggctgcagaaatgctaaccttaactctagcttttgagaatgcaaacgcggattgtaaacgtgcactggc

SEQ ID NO: 390508 - DNA, 524 bp, Homo sapiens
aagggatagaaggatttgcaggattctttaagaataaaaaaaaatagaagaaagatgatagaaaaaggctggagagagaaaccatgaraataggagtaggtcttttattttcccctggtagatgacaagactagtaagtaatgggtctttgtgacagggaaaacacaaaattgagaatatttgctacagtggaatcacgctagaagctaggtatattgtttaattctccatcagttctgtaagtgtggatactagattcacttaaaagttgagaaaattggtacttaataagattgtataatttgaccaaggtttttcaactagatctgactaagaaaattttgtattttgaattgtgccaaaagagggaatttggatatatccaacagtggtacacctggtcttatttttatttttggtcactgttgtttttccccgtttttaagccacatttctggggctgctgtaactcaaagtttcagctaatgatttcaggagcctgcaaatctctaagaaatttattt

SEQ ID NO: 390509 - DNA, 559 bp, Homo sapiens
tccttctctcattgtttctcacttcctttgttttttttctctttctttgttcctacgccagttttttttacttttycattgcaatgacaataattagccttaaatgtgtattccacttgcaacagccaaaagcatttaatagatgtggcacttgatctttatagaacaactattttataatcattttgcaaaggaaaaagcagaagctaagaaatgtaagtgattttccaaagacacataagtaggaaaatgcaaaaccaagactgattatagttctcctgattctagctctgcaccactgtcttttcacgtacctaaggattaaacaagaccctttagagttccttaatcccactcaatactttcaagactatacaggtgactgaaacatactcaagcatctgagccaccttcatacacatggtggggttaaaagcaaaacaaacaacaagcctatacctctttttggttgtgtataatattcccagatggaactctgacatttattcaagcaaacttaacccatttatgccacaggtcgcgaatttgttgtgtgaaa

SEQ ID NO: 390510 - DNA, 559 bp, Homo sapiens
tccttctctcattgtttctcacttcctttgttttttttctctttctttgttcctacgccagttttttttactttttcattgcaatgacaataattagccttaaatgtgtattccacttgcaacagccaaaagcatttaatagatgtggcacttgatctttatagaacaactattttataatcattttgcaaaggaaaaagcagaagctaagaaatgtaagtgattttccaaagacacataagtaggaaaatgcaaaaccaagactgattatagttctcctgattctagctctgcaccactgtcttttcacrtacctaaggattaaacaagaccctttagagttccttaatcccactcaatactttcaagactatacaggtgactgaaacatactcaagcatctgagccaccttcatacacatggtggggttaaaagcaaaacaaacaacaagcctatacctctttttggttgtgtataatattcccagatggaactctgacatttattcaagcaaacttaacccatttatgccacaggtcgcgaatttgttgtgtgaaa

SEQ ID NO: 390511 - DNA, 537 bp, Homo sapiens
aagttagagaaatttcctctgctccctctttatcctctcttttctcctgactgaagtcacatggaatatccaaattttggaaacatagtattttttaaggttgtttcttgtcctacccaagaacatttcactatttccttcattatgtcaatgaaatgttaacataaatattgttcacttatgatttttaaaatttatctctgtaaacaaagctatacatctttccatgtattttttaaatagaacatgaaccaaaatttcaaaattcagaaacagatttactgattttaatataaatgtattatattaaggaaatcttacatttgagagcatgattttatcatcacttatcattgtgctttcataatgtttctaaagagtaagacagggaactgtctatatttcacaggggaaaaataagtccaaataagtgaagaagttaatcagctcacttagcaattcggtcaaagaaatagaattakaaagcaaggctccaacctctcagttctccagtctttttttacagagagcagtcaa

SEQ ID NO: 390512 - DNA, 553 bp, Homo sapiens
tctacctacctacctatctatacataggtgggtgggtgtgggaggggtgttttgaattatatcaatattttggaaactgttgacaattgtttaataattttgtaaataatgtgtactaaaaataacattctccaattgggtataatgtactatgtatttccattaacttaatattattcacactattcaaatttatatggactttctcagtctgctttgctttgtctgtcagttactgagaattatgctgaaatctcaaacaatcatggattagtctagatatttttgttgatctaaaaatgtttgcttttatattgtaagaatatgttattgatgacatagaaggttcttatatattcctgagtaaagattttatttatatgtagagactcttgatcacgaattaatgactttaaaacaatttctttaactgatgttaawatagacaacatattccttttctttatatttgcttttttactttccacctttctgtgtcatgttttaggaggtatgtctcttgtaaacacaatgtatctgatttgtaaagatc

SEQ ID NO: 390513 - DNA, 589 bp, Homo sapiens
tagaccccttcctttcaccatatacaaaaatcaactcaaggtggattaaagacttaaatataaaactgaaaactacaaaattctagaagataacctaggaaataccattttggacataggaacaggcaaagatttcatgacaaagtgaccaaaagcaattgcaacaaaaccaaaaattgataagtaggacctaactaaatgaaagagccactgcatggaaaaaggaattatcaacagagtagactgtcaacctatagaatgagagaacaaattatgcatctgatgaaggtctaatatccagaatctataagatttaatatccagaatctattaaaaaaactaaacaaatttataagcaaaaacaaaccatctcattaaaaattaggcaaagaacaataacagacacttttcaaaagaagacaaacacatggccaacaagcatayaaaaatgcttaatatcacaaatcatcagagaaatgcaaatcaaaaccacaatgcgatattatgtcacaccggtcagaatggctattactaaaaagtcaaaaaacaacaaatgctagtgtggttgtggagaaaagggaatgcttat

SEQ ID NO: 390514 - DNA, 495 bp, Homo sapiens
gaacacagtaccctaaaatatcgcactttggcatactgaactaaagaagctgcctcaaggttttctgatcctctgtctctcccaaagcacagagtaaagctgttctttagaaaccagatatgccaaagagcaacacaattgcctttaatcacttccatgaaattttattaaccagagaatattaaaactcatatcagagaggaagaaactgaaaattaaacactatacctagagcacaaagaaactttgtccaaaggtactatttatcctccagtccyattcagtttacaaagagaattattcatattcacaagcaaattcctgtctccaaggtgcatatatctcttttcaaatcagttattaccccctaaaattgcctatgtcccctttcttctctccctcttattaagagggtatttaagcttcaaccatctggcccttctttgagtcttatacattgtatatgactcccatgtttatgcacattagtaaatt

SEQ ID NO: 390515 - DNA, 532 bp, Homo sapiens
tgtaattgttggtttaagtaagtatcattgatgaatgtctaarccatttgatgaaatgttggtcacaagatttatacagtttaaaattattacttcaagcttatttattaattaaaataattacttcaaatttattattaatttcttaagtgtggaagatacaattacagtgtagagactgaacagacaccaacttcaccaaatgataaagctgagtattcccaatgatgaaacaacacctgcctctggataagatctaatagaaaatttaatcagaggcacttggcttgtggtacatgacagaagaaagtctggaatctttaaaaaagtccgtgaatggaagacaagaaatatttttgtagttgttccacaccaggtgtcaacaagttatgacaaaacttatttgtaagtaaagtgtttttggggtttcttctttggtataaattttagaagtaagtcaagagtatatggatggtccccgtaatgctttctgagatatttttatagacataaatatttcaaaaataaaaag

SEQ ID NO: 390516 - DNA, 573 bp, Homo sapiens
ttctacgaatctgttggacttgtcatttaatgtccttatatcaaaacaaagaagcatcatatatttaacttcgttttaggagcaaagaataagatgatttttaataagagaaaatgataatcatttggcaaagctgtttgccagtgtgcagtttttttcacgaactccaaaagaggtcatgggccaggtagcattgaagcaatttgagaaaaaataaaagcacgctaaatacaaagcaactcaaaaacactacagtaccaaatggagtgcttcaaattgctcctgagtatcaggattttatgatgcagaattttgagggtctatttaagaaagcactgtatccatggactgtcctaatccttcatctaaaatagtagatattcatggcctatcccaggtccactgctttatttatttatttatttatttaattttagattcyagggcacatgtgcaggtttgttacatggatatattatgtgatgctgacgtttgggtttctattgaacctgtcaccctaatagtgaacttagtacccaattggaattggatgcagggactctccagatctag

SEQ ID NO: 390517 - DNA, 581 bp, Homo sapiens
aacccattgtaataagttcagtgtatatagatttggtttgatttattttattttattttattttatttattttattttattttatttattttatttttggkatgtcctaaaagttgttttattgtggaacattgttaacctgtcctttttttcctattttttattttactatactctcctactttatttgccctctttcttttttttaactcctcatttttcattgcttcttcttactcttcactcatacatctaactccattttaggagcacaatacgataggagattttatttttttaagaaattggcaattatttggcaaagtcatattaccagcacagtttctgcaactacaaaagaggccataggccagtatgaatggccatgcacagggtggaggcagaaaagcacacacacccccagtaattctaccctctgtctccttacttcttccctcccttcacgttacgtgacacagtatctcttcattagcgagcatgtacgaaaggatgactaccgaaattcaacagaaaggatttttgttctctgcatctacaggttttatttctactcacacttc

SEQ ID NO: 390518 - DNA, 581 bp, Homo sapiens
aacccattgtaataagttcagtgtatatagatttggtttgatttattttattttattttattttatttattttattttattttatttattttatttttgggatgtcctaaaagttgttttattgtggaacattgttaacctgtcctttttttcctattttttattttactatactctcctactttatttgccctctttcttttttttaactcctcatttttcattgcttcttcttactcttcactcatacatctaactccattttaggagcacaatacgataggagattttatttttttaagaaattggcaattatttggcaaagtcatattaccagcacagtttcygcaactacaaaagaggccataggccagtatgaatggccatgcacagggtggaggcagaaaagcacacacacccccagtaattctaccctctgtctccttacttcttccctcccttcacgttacgtgacacagtatctcttcattagcgagcatgtacgaaaggatgactaccgaaattcaacagaaaggatttttgttctctgcatctacaggttttatttctactcacacttc

SEQ ID NO: 390519 - DNA, 581 bp, Homo sapiens
aacccattgtaataagttcagtgtatatagatttggtttgatttattttattttattttattttatttattttattttattttatttattttatttttgggatgtcctaaaagttgttttattgtggaacattgttaacctgtcctttttttcctattttttattttactatactctcctactttatttgccctctttcttttttttaactcctcatttttcattgcttcttcttactcttcactcatacatctaactccattttaggagcacaatacgataggagattttatttttttaagaaattggcaattatttggcaaagtcatattaccagcacagtttctgcaactacaaaagaggccataggccrgtatgaatggccatgcacagggtggaggcagaaaagcacacacacccccagtaattctaccctctgtctccttacttcttccctcccttcacgttacgtgacacagtatctcttcattagcgagcatgtacgaaaggatgactaccgaaattcaacagaaaggatttttgttctctgcatctacaggttttatttctactcacacttc

SEQ ID NO: 390520 - DNA, 581 bp, Homo sapiens
aacccattgtaataagttcagtgtatatagatttggtttgatttattttattttattttattttatttattttattttattttatttattttatttttgggatgtcctaaaagttgttttattgtggaacattgttaacctgtcctttttttcctattttttattttactatactctcctactttatttgccctctttcttttttttaactcctcatttttcattgcttcttcttactcttcactcatacatctaactccattttaggagcacaatacgataggagattttatttttttaagaaattggcaattatttggcaaagtcatattaccagcacagtttctgcaactacaaaagaggccataggccagtatgaatggccatgcacagggtggaggcagaaaagcacacacacccccagtaattctaccctctgtctccttacttcttccctcccttcacgttacgtgacacagtatctcttcattakcgagcatgtacgaaaggatgactaccgaaattcaacagaaaggatttttgttctctgcatctacaggttttatttctactcacacttc

SEQ ID NO: 390521 - DNA, 414 bp, Homo sapiens
gtagcttaaataattgactctggatattgtgtaatgagagcctgaagcagagataaagcaaaaatgggaayaacagttaagaaatcatggaatcaatccatgtaagagatgacagtggctttactgtgattatggcaatggaaatagacatattcaaatactattttgaggacaaaaaatgtcagaaattggtaaattatgtgattatttatcatataatttatgtgattacttatcacaacccatctaagctattatcaatttctggcataataaacaatagctatgccctcacaaaaatatcataaaaaagaatgaattataggtattattaaaatatacatttttttatgagcaaaagaaaccacattttattcaaaggtctaaaacagaagtgtctagcctgggagagta

SEQ ID NO: 390522 - DNA, 622 bp, Homo sapiens
gtagcttaaataattgactctggatattgtgtaatgagagcctgaagcagagataaagcaaaaatgggaacaacagttaagaaatcatggaatcaatccatgtaagagatgacagtggctttactgtgatwatggcaatggaaatagacatattcaaatactattttgaggacaaaaaatgtcagaaattggtaaattatgtgattatttatcatataatttatgtgattacttatcacaacccatctaagctattatcaatttctggcataataaacaatagctatgccctcacaaaaatatcataaaaaagaatgaattataggtattattaaaatatacatttttttatgagcaaaagaaaccacattttattcaaaggtctaaaacagaagtgtctagcctgggagagtaatgggcgatcagacgagtaatgtttacttttaatatgtcaaaaatgtttcagaattaatgaattttctttgatgaggcaacttcaaatatctttgcttaggatgtttagggcttgacatggaaaactttgtttagcttttgataatgtatttattgtctgtatatgattcatcatgatgagaatattatggattccctttaaatatta

SEQ ID NO: 390523 - DNA, 622 bp, Homo sapiens
gttctgtccacatattaaatatatagcaataagattatttaattttttattcccttcaatatataatatgtaacaattatattggtaatgtttcttgtattttcttttttttggctacagcttatattttccttacccaactttgctgaaggattattcttaacatatagtatctataacatatagtagtttatatcattcatgcaaatttttcaacaaacatatcacagataaacacatatcatcctttagaaaacatgttatatttgtgccaaaatctgasatagagaagaaaacactctgtattatatagtccgtatgtttagtttaatcatttttagcttatatcatttttaaagtacccttattttgctatatccacatgtaggctgataaaactttgaaacctgtggctttcttttaaaggtagccaattcactaatttggatattatcagaaaacagttcgtatgataatgctagactgtctaaattttttatactttacatttttgttttcctgagacattatcacatccagctgatttaggtatatataaaatagaaacaaatacctcacaaatgacaacaacataattttattttaaaagttttcacttatg

SEQ ID NO: 390524 - DNA, 629 bp, Homo sapiens
aatttatttttaagtttgcaaaacaatattttttttggaactaatattactatgtctaaatttttccagataacatacaaatgttttctttcttgtgtggtttctcaagaaaaaataatttaattaaaaatttaattctagcattttgaatgtaagatgaatcaagcttcatataattcccaatgttattgyattcttacttttttctctgttctttacataattttttcttcagagagaaagcaaaaataaataaataagaaaagtgaccattttatgtcttatttgacaaaaagtcatcttcattcataatgagaaactccagtatttcattctgtaatgcagcatagagcaaaaactgctgatgaaattcaaagagtaaactccctcaataattgagttataacaaaagagttttgaaagggtaggtgggtcttttttccccccaagataagtatcttactgttaattaatctggttgggggattatgagatagaataatttaaaatactacatttgctatacaactgatcatcttctactttaaggatttttttcatgatttatgggattttacaggtttaaaagagaattgaataaaaaaaagtttctgtgtggatgaatataa

SEQ ID NO: 390525 - DNA, 533 bp, Homo sapiens
acattatgacctatagaaaacatatatgtaaatgaattcaaaaaccttgtgttcaattaacataccatatatactatgtggaattaaactsgtctctactattgatgcaaataaataaataaaaatgtttccactgattgaaaaaaataaaagatttttggggaatgagtattttattgctgatcttatttagaattgccagctcctggtgataatgaaaagtaaatcaacttaaaaaaaatgcatatggatttgacagaaaagagtcgtgtgtgtaatgagtgatcagtgacaatacgtgttgtttcagtttatgtatctttgatcttctgtataccatttttctaattctttaccacagaatggatcctggctcataaccagctcttactatttcctgttgaatgcacctacttgctttattgttcctaggtagatattaccatcaaaagcagtcacagagcccagtgtggtggcttttgtttgtaattccaggattttgggaggccaaggtaaacggatcacttgaggcc

SEQ ID NO: 390526 - DNA, 620 bp, Homo sapiens
atgctttgccattttttaaattgagtttcctgtccttttctgattggctttctggagttccttgtatattctagaaattgatggtatgttgtgtttagacatcgcagatgccttctcccagtcttcatatgcctgtgacattgctgaggtgtccttgactggacagtagagctggcccctagtcactcagctcaagagggtggaatcaggattggaacccaggccagtctccctcaggagttcatgctctttccatagtgttcctccctccccacctgctttcttcaaagagggcagttctgcactcagtcaaggcagcctgtgggtatttggaaagagagggagtagtgcatctccagaaattgcacaaggtaacctcccagtagtgcttcagaagccrtgttgatgcctaaagggtgaggatttgtgatttgtaaaagaccttttctggagctgttggaagctctcatttctcctcgtccaccttagcaaggggtaactgtcaccttcctggctgtaattatcagaagttaaacatacctctaaatggagcattgaaccacaggtcctcctggtgacctgggatcccactgacaacccaagatgaatatgtgaagaaa

SEQ ID NO: 390527 - DNA, 551 bp, Homo sapiens
ctcattactcagtgtcttctggggatttcccttggacagcaagataagagtgcccaaggtcaagaccatcaggagatgaagcccccaccactggaggatggaccgtgtaggggtggggaggaggctgagattgagaaagggcagtgctgtgggctgctgtgggtaactacaggaaggcatcagagccctagacatctgtaggtgaggaagcccaggccgcagtgctgaatggttggggaagaagctactgtctccaccacaacaggctgtgctggtctggtctgtggratggctagtcatggttcccttctacatgtgtctcttgtcgaggctggctgtgaagaccctgtgtttaggaagagttgtatggcatggggcaggggtggggttccccagctcttctcctttaatggtctctcatgtattatggttacatattgggcatcagagagcactgcatggtccctcctacttgatggctttatggttctcagccttctccctttggcgtagaagatctgtcctctatggctagcagccaagaggagatt

SEQ ID NO: 390528 - DNA, 620 bp, Homo sapiens
ctgtcctctcttgagctactgacctgctttcagactggcaaagagatgccttactctcttgtgatttgtttacatatctgtctcccactgtaggtaccaggctccttaagaaaatgctttctttagagcccctctcagcgcagtgggcagcacgtcagtctcataatctgaaaatgctctctttgtctttgtgttcccartcttgctccttacatggcacctagtcactcaatgatcttcggtgaaatgggttattctatggagtattggcaaggatctaaccaaatgctgatggccaggggcccttgtatgttacagggttatgtggtcaaacaccataatcaaatatgaacaataatacttttaaacgaggacagagttttccgtaatattttattcctttgtctagctttagggtcccagaatgtatattaagtctttcaagaagtaaaagtgagtattgacaactagcaaatgtttacaaaaattaaaatgcaatcagccctagactaaataaaattcttccaagactttaattcagtggttccattcaaacatctttcttaggtaatattaggagtaacagttgcataattgggaggctatattacatcaccaaa

SEQ ID NO: 390529 - DNA, 555 bp, Homo sapiens
aactgactccatcttgcttctaacgtcacaagctacctgcccttatttctgggtgtaggccaagctaactgtgggaagaatttaatttatartttttttttaagcaaggatgataatagttcctagccaaaactgatgcccctctggggacagaaactgcctttgcaagacttatgaaaggccagaacttgaggattatgggagggaccttaattctgctaagatgtagacatagttaaataataaacaggcattgttccctatcttggtatcttggtttttcataatctgttactgctcaagtgtcacatagccagaggtcacaagattggtaatgtcccagattgctcctgtaaataacatcactattgtaaaacctaagatttgtctttgagatatttttcagacttttgcattccattgactgactgactcaacccacacccatgactcatatgagggaactgacttaaccagtcctgtggcccctcacccagaaacagattcagcagaccactttgacaagtggtctttccaaacagagagccaaatcat

SEQ ID NO: 390530 - DNA, 484 bp, Homo sapiens
gatgacatatgccccacttgtatcacagctgatatcacttgtatcacaccagaaaggggtctgctttgggtttaatagcctctgatcatgtgaatagctgggatagtgcattgagagatatcttctttctaaggttggactgaacagttctagccagccctccctgtctcaggaggttacattcccagcatattctatagttatttttgagaagcacaaataataataagaaaagccctgaactgaactgtaggtagtatagcagaaatggagaaacagcatgaatctaagtacaaaagccttgactagatggttcaggggcttgtaaaccattcttaacgaatttttaaatttactttaggagccttagggagcctttgcaaagttttaagtaatgggaagacataattagatttrcatttaagaaagattatgctgtatgccttgtggagaatagatttgattcacagaaatctctggaaac

SEQ ID NO: 390531 - DNA, 607 bp, Homo sapiens
tgataagtcaggcaccagtgatagactaatggggagaggttataagaggagcctgcatggagctctcagcatcatatctcagaatcagatgccagcttcgcctgcttcaagaacagggacagtggaaaggcatagacctaaaasaatgttcccgagctttttggactcaggaccactttatactcatagaaattattgaggacctccaaagcttttgcttacgtggtaaactacatcagaaattaaaactgaatttttaaaaatttatttaaaactaagaataaacacataatatattcacaaaaataatgtatctttataaataactaactgtacaagactgacacaataatgacaagaaggacattaatttacatattttcaaataaaaatggcttaatagaaaacagctaggttctccagtctgtttctgcattcagtctgttaccatctaatactggaaactccactgtacactcatgagaaaatgaaaagaaaaaaaggcaaaaagcattttagtattactaggaagtagttttcaccttgtgaacttcctgaaaagggttaaggaatcccccagagttcctgggaccacattttgagaccc

SEQ ID NO: 390532 - DNA, 540 bp, Homo sapiens
ggaatgatctgatatgaggaagatagggtgaagcaactgctgtggaggctgacttaaattagactgcagaagttaagaaagaaatgttctgattactgggaagtatctgcactgtggcatcactgtcatatttttaaccagtcatgacaggtagttattatattttaagtttcaaatttcctcaattcctattattgctaaatcacaccttaataaagtctctcaagatgggttagacaggtgtgatccaaagaaatacaccatcaaaatgtaagaggtaaaaattctttagtctttgcctctacatagaaaatagcaaaacaataaaaaaaaaagccacaaaataaccacacctcatctgctcttttgatctcacttggccactgtacgttagaaacctgtgaggcagaaagtgggagtggggggaagggggggtctctgtgtaacacttagagagatcttgaacagyttcctaagcaaatggtgacataaagtccccagtgaggtgagcagaggagctaccaatttcccagggacaac

SEQ ID NO: 390533 - DNA, 605 bp, Homo sapiens
taaagaacactggcttcctataaaccctaactttgtacctggcactcacggagggcttgagataaaaatttttatttttatttttttgagatgaagtatcactcttgttgcccaggctagagtgcaatggcacgatctcagctcacagcaacctccgcctctcgggttcaagccattctcctgcctcagcctctgcagtagctgggattacaggcatgtgccaccatgcccggctgattttgtatttttagtagagatggggtttctccatgttggtcaggttggtcttgaacccccaacctcaggtgatctgcccacctcggcctcccaaagtgctgggattacaggtgtgagccaccatgcccagctgagataaaattttaaataagaaaatttcctttaagttcatcctcttaatcatctttttacctccttaagyacataatattcccacacctccatctttcccaaggcaccaccgtttggccccacaagcctcattactctcctctaagcctttgaacacaaaagctttctccctccacatggcagcctactatcaattcttctaggctcacatcatctattgcatcattagtgatgcc

SEQ ID NO: 390534 - DNA, 605 bp, Homo sapiens
taaagaacactggcttcctataaaccctaactttgtacctggcactcacggagggcttgagataaaaatttttatttttatttttttgagatgaagtatcactcttgttgcccaggctagagtgcaatggcacgatctcagctcacagcaacctccgcctctcgggttcaagccattctcctgcctcagcctctgcagtagctgggattacaggcatgtgccaccatgcccggctgattttgtatttttagtagagatggggtttctccatgttggtcaggttggtcttgaacccccaacctcaggtgatctgcccacctcggcctcccaaagtgctgggattacaggtgtgagccaccatgcccagctgagataaaattttaaataagaaaatttcctttaagttcatcctcttaatcatctttttacctccttaagcacataatattcccacacctccatctttcccaaggcaccaccgtttggccccacaagcctcattactctcctctaagcctttgaacacaaaagctttctccctccacatggcagcctactatcaattcttcyaggctcacatcatctattgcatcattagtgatgcc

SEQ ID NO: 390535 - DNA, 474 bp, Homo sapiens
acctatctacattctgttttcatggcagtttttactagcttttatcagagtggtgattatacttaaacataatcatgtgtttctatatctacttctaatatgtgagttccttcaggcaggaaaaatatatcctttacctctgtctccccacctgtatatagaaagtgttttggacttctgttttcaaaaatgtgaaaactgaactgcctaaaaggcacctggaaaatgttaaataaactattacaggcagtattttaaatgcacgtttcagwtgtcaagaaagtaagagaagtcttcagggatcggaaacaaagaagaaactgaaagagtgggaagtgtgaaataacactggggttatcgagtctctcagcctcagaaaccaaagatttttaggtttcaatggccacttagggacagaaaaatcggccttggttttgagcaatgtggggagttggaactgatatgcctgaaaag

SEQ ID NO: 390536 - DNA, 608 bp, Homo sapiens
tatacttaaacataatcatgtgtttctatatctacttctaatatgtgagttccttcaggcaggaaaaatatatcctttacctctgtctccccacctgtatatagaaagtgttttggacttctgttttcaaaaatgtgaaaactgaactgcctaaaaggcacctggaaaatgttaaataaactattacaggcagtattttaaatgcacgtttcagatgtcaagaaagtaagagaagtcytcagggatcggaaacaaagaagaaactgaaagagtgggaagtgtgaaataacactggggttatcgagtctctcagcctcagaaaccaaagatttttaggtttcaatggccacttagggacagaaaaatcggccttggttttgagcaatgtggggagttggaactgatatgcctgaaaagtttctcaacccttgaagcgttataacttcatgaaaaggtggaaaagaaaattcatccaccaccaatagttgaggtatgagaagcctgtctgtttaaacagtgcagttggtcataaaaagcatatataggcctctcttgagaattaaaattgtaggcctgttcttacccaattttaacatatgcatttatat

SEQ ID NO: 390537 - DNA, 525 bp, Homo sapiens
caaacatcatattcacaaaaattttaaaatcttgtcataataatgttggggaggatgtgaagtagctggtactgagaagtaaatgaagtgtgtgcatgtgagaatcagactgagttgaaaccctggctttgccactttctagctggaggacctcggacatgttacttgatctctctgtgcctccaactttttatctttaaagcaaggataaccataccagcacttcaatgtgtaagatgattgtgaaaacaaatgagctaatgtgcataaaataattagtgcaatgtctgacatgtaatgatcacataaggattggtttgtgagagtgaatcttggtacagccatatcggagagaaatttgttaacatataatagaatgaaaaaaaaaactcaaaatgcagcattcaacatctaggtgtaggccctatgaaccttgtcatctcctcatctgtaactgacyttgacaagagggcctctgacttttctgggttttttacctcctagttctcactggtacttttctgg

SEQ ID NO: 390538 - DNA, 540 bp, Homo sapiens
agtatcatggttaaagtgacaggctcagagaacatggagacataaaacagtacagtctttgagcaagatttggtatcatctcacccaggtaaaaacttttccctctgtgaaaagcttccagtttaagaccttaagtaggaaagctagagggagctataaataaatggtattctccagtaggatgattcttaagatacgttgcttcattttaagttagaatttctatttaataaaagtatattctgatataattttatctattgaaaatagcagtggttttacctttaatctggtaactgcctggagcatttgcttgttgttgtattggatgcttgatttctggaggtgtctaaaacagaaaaaaaacaccacctggaaaaaaatttgtgattgtgtgtgtgtgtgtattacattgattatatttgctaatcatttagcccagttctttctttgtgttctttaactgtgttctacctctgaamgaagctttgccaggaaaggaaaaatgtgactcatatctctgtgaaaattggtgatcat

SEQ ID NO: 390539 - DNA, 546 bp, Homo sapiens
ctcaagaaatcactatttatcacaggacattggtcctccagaggggatggatgtcccttatctaattttactaattagcaggtaagaaataggaagttcatattctattattcagctgtgtgacaactacagcccctgggagtctaatgtgcaagaatgtgatctgactttttccttggctttcacgtcaaaatgaggaacagtccttcacatactggctcctatcctcactataattcacctggtgcaagtcactgactaccaatatctacatggattacaaagtcaggtaaactgaaggtaattaagaaatgtgatactctgttattacaactgtttttatagcataatatctcctgcaaaaattacttttaaggcagtctcactgtgctcatgcattcttttcctaaataaagaacagatgtaatttactgtgtgtgtgcatgtgcgtgcgtgtgtgtgtgtgtgtrtataaagattctactttgtggctgggcgagttggctcatgcctgtaatcccagcactttgggaggccaaggcaggc

SEQ ID NO: 390540 - DNA, 606 bp, Homo sapiens
atacatttacaccatggactactatgcagtcacaaaaaggaagagaatcgtgttctttgaagcaacatggatgcagctggaggccattattctaagcaaactcacacaaacagaaaaccaaataccacatgtactctctgaagtgggagctacatattaagtatacatggacatagagaacaacagatactggggaayaaaagagaagggagcaagtaatggggcaggactgaaaaactacctattgggtactgtactcattacctgggtgatagattcatgcatactccaaacctcagcatcacacaatatatctttgtaatatacctgcacatgcaccccctgaacctgtaataaaagttgaaaaattaaaaaataaacaataatgtgtattttacttaatcaagatacaatatatttgacatgtcaaggggtactagtgagtaaaggatttttccaaaaagcaaataatttttctttttctttgtattatgaacatctctgtattgcaagtgaaaagacagcaaacgacaagaagaaacttggtagaacacatcactatgggaaagatgactctttttttagctcgaagcaattttggcttca

SEQ ID NO: 390541 - DNA, 606 bp, Homo sapiens
atacatttacaccatggactactatgcagtcacaaaaaggaagagaatcgtgttctttgaagcaacatggatgcagctggaggccattattctaagcaaactcacacaaacagaaaaccaaataccacatgtactctctgaagtgggagctacatattaagtatacatggacatagagaacaacagatactggggaataaaagagaagggagcaagtaatggggcaggactgaaaaactacctattgggtactgtactcattacctgggtgatagattcatkcatactccaaacctcagcatcacacaatatatctttgtaatatacctgcacatgcaccccctgaacctgtaataaaagttgaaaaattaaaaaataaacaataatgtgtattttacttaatcaagatacaatatatttgacatgtcaaggggtactagtgagtaaaggatttttccaaaaagcaaataatttttctttttctttgtattatgaacatctctgtattgcaagtgaaaagacagcaaacgacaagaagaaacttggtagaacacatcactatgggaaagatgactctttttttagctcgaagcaattttggcttca

SEQ ID NO: 390542 - DNA, 606 bp, Homo sapiens
atacatttacaccatggactactatgcagtcacaaaaaggaagagaatcgtgttctttgaagcaacatggatgcagctggaggccattattctaagcaaactcacacaaacagaaaaccaaataccacatgtactctctgaagtgggagctacatattaagtatacatggacatagagaacaacagatactggggaataaaagagaagggagcaagtaatggggcaggactgaaaaactacctattgggtactgtactcattacctgggtgatagattcatgcatactccaaacctcagcatcacacaatrtatctttgtaatatacctgcacatgcaccccctgaacctgtaataaaagttgaaaaattaaaaaataaacaataatgtgtattttacttaatcaagatacaatatatttgacatgtcaaggggtactagtgagtaaaggatttttccaaaaagcaaataatttttctttttctttgtattatgaacatctctgtattgcaagtgaaaagacagcaaacgacaagaagaaacttggtagaacacatcactatgggaaagatgactctttttttagctcgaagcaattttggcttca

SEQ ID NO: 390543 - DNA, 623 bp, Homo sapiens
tatgcaaatagcaccagccccttcaccrtagaagagttgacaatttagtctccaagaatgttctgcatacaagtaaacacattcagcaggtaaaacacattggaagcaaatctcttacatgacttgtatgttgtccaacaatttgacataaacacaaaattttccaagaatacttaataaacgcaatacatgcacgctgtcttaaaagaagcagtagcatcctttaactgaggagccttccttaatttattctatcatgataattggggacaaggagataatatgatctggaggatgtgagggggtagtgctgccaaaaatacacagatttttaaaaaatgtttagagtcagtagagaggaaaggacgtaatcagagttaaataatcagagccacaatgattttaaatgattatgctttcatttttaataggcactgattcattcaaagatttttattgagtgtctgctctgtccaaggcactaagttaggcgcagtgttagataaatcatgtctttcccctcagtgagcttgtaatctgaaagagtacacaagagtacataggtcaggtgctggtgggaggattgctcaagcccaggagttcaaatcatagctcaagcccag

SEQ ID NO: 390544 - DNA, 624 bp, Homo sapiens
aagtggcttctgaggagggagaacattcacatcagtctgattttatttggaagacagtgatgaaatgtttaagtcatttaagcaatggaataacacaatcagagctttgcacagcataatttttaaagactgcataaggtgaataatatgttcaacagactaacagaaatgaatccatcagagggctgttgggctagcccagtaaagatggtattaaaaaacagagtgttatgtgtgttatggtccacagggacctgaaaaccatcctcgtccgtgggacagtggtgtacaggatgggcaaaagatggcrgagaagccaaggatggccctttcactttaagtctgggtaactgaaaggatgatgggaccacaaccagaaaggggtaactcaagtttagcaggaagatgatggacttcatatactggatgtgatgctcccataggaaaccttggtgatgatgttgagaatagagtaagaaatacagagctggagctggataaatagatcatgatttggaagttacttatgcaattgtgatagaagaagaattcaaaagaagggaacagattgccaaagacaccttgaaaaaggagaagatgtggaaggcaggtctctggtgtatt

SEQ ID NO: 390545 - DNA, 624 bp, Homo sapiens
aagtggcttctgaggagggagaacattcacatcagtctgattttatttggaagacagtgatgaaatgtttaagtcatttaagcaatggaataacacaatcagagctttgcacagcataatttttaaagactgcataaggtgaataatatgttcaacagactaacagaaatgaatccatcagagggctgttgggctagcccagtaaagatggtattaaaaaacagagtgttatgtgtgttatggtccacagggacctgaaaaccatcctcgtccgtgggacagtggtgtacaggatgggcaaaagatggcggagaagccaaggatggccctttcactttaagtctgggtaactgaaaggatgatgggaccacaaccagaaaggggtaactcaagtttagcaggaagatgatggacttcatatactggatgtgatgctcccataggaaaccttggtgatgatgttgagaatagagtaagaaatacagagctggagctggataratagatcatgatttggaagttacttatgcaattgtgatagaagaagaattcaaaagaagggaacagattgccaaagacaccttgaaaaaggagaagatgtggaaggcaggtctctggtgtatt

SEQ ID NO: 390546 - DNA, 481 bp, Homo sapiens
tctggtatttctttacaacagtgcaagaacaaattaatacaacctcattcctaggaatcacatcaaataaccaggaaaggtttacttttggagaaaagatcaaaacttgtcacaatgcacagacttcatctatacttctaggagcatctccaaggaattatctgggagatattatctacataataagacaacgtctgttcacagtgaagttccaccccttaccttcccaaaatttgtcactacctccccagagcttagaggaactttgtctcagttctttgtccgttcttggggctcattcagtttccagaaggaatcacttacaaactgttgmctgctcttttgggcatttcccctaaaaatcatttactacccctctaaaatggctacaccttcatttctctcttccctatgaagaggggtatataagtccctgaatctgattgtgttagaggacaatactgtcctgtgatttttcccc

SEQ ID NO: 390547 - DNA, 481 bp, Homo sapiens
tctggtatttctttacaacagtgcaagaacaaattaatacaacctcattcctaggaatcacatcaaataaccaggaaaggtttacttttggagaaaagatcaaaacttgtcacaatgcacagacttcatctatacttctaggagcatctccaaggaattatctgggagatattatctacataataagacaacgtctgttcacagtgaagttccaccccttaccttcccaaaatttgtcactacctccccagagcttagaggaactttgtctcagttctttgtccgttcttggggctcattcagtttccagaaggaatcacttacaaactgttgcctgctcttttgggcatttcccctaaaaatcatttactacccctctaaaatgsctacaccttcatttctctcttccctatgaagaggggtatataagtccctgaatctgattgtgttagaggacaatactgtcctgtgatttttcccc

SEQ ID NO: 390548 - DNA, 433 bp, Homo sapiens
gggtccgtgacactgaagccacactatgcaagttgataaattggtttctcatagaagtctgggttagtgattctgaaaccaccttacatatatattaagattwaaaaaataaagaaataaattacatcatgagagccagatttctcagtgtcagagaaagaggttacaataagcaaggggataaggcttgaacaaaccctgttttactggatttgagttggagaaatcaacatgaatgcaattttatcttaatgtatatacacaaatagctaaaagcagaaataattatagatatgtgtgtacacgttggttactatacatacatatatttctcagctctgtccaatgagagggtttagaagtagtaacctctcagtagtaataagcacacccagcacccagattgtggtttctaaatattattctccaataa

SEQ ID NO: 390549 - DNA, 572 bp, Homo sapiens
atgatgcatggcagcagcatctgcttcttgtgagggcctcaggaaggtaccactcatggtgaaatgaggggagttggcatgtgcagatcgcatggcaaaagaagcaaagagagaggaggaggcatcaggcttgtttcacaactagttctctggggaactctcatgggaactaatagagatattgctaaatattagatactacatattaaatactagatattggctgggcgtggtggctcacgcctgtaatcccagcaatttgggaagccgaggccggcggatcatgaggtcaggagttygagaccagcctggccaacatggtgaaaccccatctctactaaaaatacaaaaattagccaggcatggtggtgggcacctgtaatcccagctacttgggaggctgaggcaggagaatcgcttgaacccgggaggtggaggttgcagtgagctgagatcgcgccactgcattccagcctgggcgacaagagcaaggctctgactcaaaaaaaaaaaattaaatactagatatttttgccattactttcaatggcaaaaatagcaattccttttgc

SEQ ID NO: 390550 - DNA, 372 bp, Homo sapiens
caggtcgtggggagagaaaaaagtaaagggaagccacatatgatgggaaagatattcatgtggaagatattgggatgctgactactactgctgaggtcagtaggcagggtagaacaactcagggctctatggaggaagaatgggatgggaagtgatgggaaggagaagacaaagagcaggaggaaaacaattccatttgagggtaagagcatttctctggagcaggaaagagcaataaagtccacgcaaagatcagyggagctgccctgaaagtggcagcatgtgacaggcacagtgctcaccctggacggctgcagtggagcatgcaaagggaagcacgagaggaggagagtcagagaaacaagaatgggg

SEQ ID NO: 390551 - DNA, 591 bp, Homo sapiens
agccattctaaactttgtttttttggtcatatgtaaatggggatgaaaatatttaccttataagggatttactaaattaagtggaataatatatttaaagtgttaggcacagcacctggcatacagaaatctgttattacatagatgttatcatgagtactagttgtacttttattatttgctttctgtatacatgttcttgatcattctctaaggctgtattagamatcactaagcccattcattgctgcttagatattagttagagcaagaatattgctggcgcatgcattggtgatactgttattatgcactggacaccactaacattctttctaatgtctaccagccaggcagaagcacctatgcagtcatgctgaatatttctgtgtatacacatgaaatttagaacaatgttatgcatgttcacctctgtctagctgcagtcctttaaagttgggcatacgcaaagtttacacaataagggatacctgttgggaatagagagattttcttttctgacttgtttgctgaagttcctaggaaaaagataaacactgtaacgttatattcagtatgaaagctatgctt

SEQ ID NO: 390552 - DNA, 591 bp, Homo sapiens
agccattctaaactttgtttttttggtcatatgtaaatggggatgaaaatatttaccttataagggatttactaaattaagtggaataatatatttaaagtgttaggcacagcacctggcatacagaaatctgttattacatagatgttatcatgagtactagttgtacttttattatttgctttctgtatacatgttcttgatcattctctaaggctgtattagaaatcactaagcccattcattgctgcttagatattagttagagcaagaatattgctggcgcatgcattggtgatactgttattatgcactggacaccactaacattctttctaatgtctaccagccaggcagaagcacctatgcagtcatgctgaatatttctgtgtatacacatgaaatttagaacaatgttatgcatgttcacctctgtctagctgcagtcctttaaagttgggcatacrcaaagtttacacaataagggatacctgttgggaatagagagattttcttttctgacttgtttgctgaagttcctaggaaaaagataaacactgtaacgttatattcagtatgaaagctatgctt

SEQ ID NO: 390553 - DNA, 449 bp, Homo sapiens
ctccactgaattgatgtggcttgaagttctgggtcttgctttcttcttgactcacctcagtgtattagtcatggctgcctctaccttgaaaaatgcttgaggcactgaaaaagttaggatatgtttacttctgaacaaaatggaggctaacattattttctgaaaaaatgctatggtatagatawtattggtataaaataatttaataataatcctggtaaaaatctaagagtgagtttgagaaatcagttttgaactcacaaattttatttgtccagagcaacaggtatatttctggtcgtttaaccaacatttattaaatatctaccatatgtcagaaactatggaggaatcacaaatgatttcttattcttgaagagtttataaactatttgtgagaatgacagatttatgtcatcaatattggttacccacagaaagatgggatt

SEQ ID NO: 390554 - DNA, 449 bp, Homo sapiens
ctccactgaattgatgtggcttgaagttctgggtcttgctttcttcttgactcacctcagtgtattagtcatggctgcctctaccttgaaaaatgcttgaggcactgaaaaagttaggatatgtttacttctgaacaaaatggaggctaacattattttctgaaaaaatgctatggtatagataatattggtataaaataatttaataataatcctggtaaaaatctaagagtgagtttgagaaatcagttttkaactcacaaattttatttgtccagagcaacaggtatatttctggtcgtttaaccaacatttattaaatatctaccatatgtcagaaactatggaggaatcacaaatgatttcttattcttgaagagtttataaactatttgtgagaatgacagatttatgtcatcaatattggttacccacagaaagatgggatt

SEQ ID NO: 390555 - DNA, 534 bp, Homo sapiens
aaaaagggcaaacagtttcatttcttttagtctttgatcatttactgaatccacattttacatgtatgagaaggaagtgggaaaatagttacgcatttctcttgtactcagtgaatttttacataagtcagcatagagcagaagaagccgtcaaatatgcatttgtctcaggtgaattgtgcgcaggggagggttgatttctaagtcctgtcctttgtccagtactcatgaaaataagctgttaacttayattgtcagggtgaaattcaacagaactgttttagggaaaagaccctgggacccacaaggaattgtgagcaaattgtgagacaggtatgtagtcttttatctttgtagctatctattttggaagaaaatgagagacagttttgcatgatgcagctcccagattgacttttccctttggcttagtgagtatggggtcccaagattttattttcctctcacagaattaatgaacatgaattagaaaactggctctcctacttattagcagtgtgaccagagagaatg

SEQ ID NO: 390556 - DNA, 525 bp, Homo sapiens
ccaccagggccctgggtttccagcacaaaactgggcagccatttgggcagacactgagctagctgcaggagttttttttttttcatacctcagtggcaccaggaatgccagagagacagaactgcttactcccctggaaagggggctgaagcttgggagccaagtggtctggctcagtgcatcccacccccacagagcccagcaagctaagatccactggcttgaaattcttgctgcgagcacagcagtctgagctctacctgggatgctcaagcttggtggggggaagggcrtctgccattgttgaggcttgggtaggcggttttaccctcacagtgtaaacaaagcccccaggaagttctaactgggcagagcccaccgcaactcagcaaggccactgtggccagactgcctctctagataggttccctcctgtctgggcaggacatctctgaaagaaaggcagcagccccagttagggacttagagataaaacctgcacctccctgggatagagcaactggg

SEQ ID NO: 390557 - DNA, 549 bp, Homo sapiens
cattgtgtaatagcttagacatcaccttatgaaatgcagtcagctttttctctgatcatgacaaagtaattgtcaggggcaattcagtggcaatttaaataatctagttttatcaacagtaatcatggatatttctaagacccatggatatattagccaccttaatttgacactcagaatgagggatttgttcaagctacaacatgatttattttatttggtaactcataggattagccatgacttctataagcagccctatgaaataactaagactccattgctttccaaatgtacatatttgtccagacttcttcacccaagaaaatcttaggttagtgaatatttaaatgtcaccatttgaatgagctccatagggcttatttgcatttcagaaagattgaagaaatcatacaaggccatctggaacayatatgaggtcatgtatccttaacttcctactccacatttaccatagctgtaacatagtgctagttttataaaaatgggtttctgaggaagcagaatcatttgatatatgacacaata

SEQ ID NO: 390558 - DNA, 478 bp, Homo sapiens
ttatcccacctgctttatttgaaatcatgtcctcatgctatcatttatatagtcctcatgctatcatttatattgtcctcatgccatcatttgtatagttctaaaaaagtatgccrtccacaaatgactcacgtacattaaattgaaaaaacagaaatagatgctgacgtgcaggagagagcaacaatattagccatgatagttagtttaattgctagttaacaaatatttatgtagaatttactgtgggccagatactcttctaaacactttgcagtttttaatcatcaacacaaccctaaaaatctgctcttattttaaaatcttttttcccagatgagagaactgaggcaaagagagtttgagtgtcttgctatagtcacacaattaacaaatggcagaaccgggatttgagtccaggtagacatgttttggaagtaattagtttttctctaaactatgctgtttgcacaactga

SEQ ID NO: 390559 - DNA, 552 bp, Homo sapiens
cctaaattaaccaagattctctctttatatcagtatctattattgaaaatcttgttagaaataaactgttcatctcctacctcactaactacaccataccaaacataattcaatttctttcatgagttaaagatgttttcatacccataagtcattataaacatcaatgtgtcctcactcttgaactcactttatatttagtgatgacttgatccattaagcgaaacaaggaaagaataagatcaagtttccttataaaactaataacctagtagaataaatagcatagtttcaggggggaattttagatttaactttcaggaacgctattgaatgcagacaatgtgcatgttgcgggagggagcattytcatgtatcggcctagagggaacagtagtgttctgaaagaagaagcatgtctggcttttcaaagaataacaaggaggtaagtatggctgcaaatgagtgagcaagaagtgggaaatgaggtctgagaagtgatcagctacagtggttttaaaacataactctcaagttatttggcactcctcc

SEQ ID NO: 390560 - DNA, 586 bp, Homo sapiens
tcatccatgttgttgcaaatgataagatttccttcttttctaaggctgagtagtattccattgtgtatacataacccatttcctttatccattcatctgttaatggatacytaggctaattccattatcttggctattgtgaataatgctggaataatcatgggggtgcagatatctcttccacatactgatttcattttctgtggatatatacccactagtgtgattgctgggtcatatggtagttctatttttaattttttgagtaatctccatactgttttccataataattgtccttattaacactcccaccaacagtgtgcaagggtccccttttttctatcctcaccaacacttgttgtctttcatctttttaataatagccattctaacaggtatgaaatgatatctcattatggtttaaaattgaatttccctaatgattaatgatagtgagcatttttttcatatgtttgttggccatttgtatgctttattttgagaaatatctatgcaggtcctttgcctgtttttttaattggatttgttttcttgctactgaattgaataggaatattttaag

SEQ ID NO: 390561 - DNA, 601 bp, Homo sapiens
aattagaaaatcaaaaattgraaatgctccaaaatcagaaactttttgaatgctgaaatggggagtcaaaggaaatgctcactgagatatttcagattttaggtttttgggttaggaatgcttaaccagtaagataatgcaaaaattcccaaatctgaaaaagctgaaattggaaatacttctggtcccaaacattttggataagggatactcaacctatatatgcatatacacatacacccttatgttaaaataaaaatgcttttaaatggaaactagcaatttcttaaagaaaaagaacatgtacaacattgtttgtctatcacataatttcaaaaaagcacctaaaccataaccagtaactggattctgcattccttataaacactagactatcaactccttgaggaaagggtttctggtccatttctttgcatacattatgtcgagtccaaacatttttgttctagcattggagtctgcatcacctgcagtgaaaattgtttttaagtattaatttttttagttgaatgttaagtgaaatcttctcatttaattccctgtgatctaattctaaactgaaaataacatttaaatgttg

SEQ ID NO: 390562 - DNA, 570 bp, Homo sapiens
catcgctcactgcagcctcgaactcctaggctcaagtgattctccggctcagcctcctgagcagctgagattataggtgcattccaccataatcattatttaaagtttttgtagagacaggscctctctatgttgctcaggcttcactgagattaatttgcaatgggaaagacttcaattaagcagaaagaagatctttcttaataaaagattcataagaatttgcttcatgatttattcatttatactcatcttttaaaaattatttgagatgacttaaaagagcataaaataagaaagtaaagataaataaatgaaaaaagggtaaagagcaaacaaaacaggaaacaaagttgaaccagggataaaggtagtgttcctaagaatggattggattcaagtatactagtagggaagaccccatgtgagagaataatcaggaatgtaacccacagattctgggagctcaggagacacagttgtttgtgtactgacatccaaagagggtttctgttgtgcaagtctaaaaagaagacatagtgtgatggcataaacaacatactcaacaat

SEQ ID NO: 390563 - DNA, 570 bp, Homo sapiens
catcgctcactgcagcctcgaactcctaggctcaagtgattctccggctcagcctcctgagcagctgagattataggtgcattccaccataatcattatttaaagtttttgtagagacaggccctctctatgttgctcaggcttcactgagattaatttgcaatgggaaagacttcaattaagcagaaagaagatctttcttaataaaagattcataagaatttgcttcatgatttattcatttatactcatcttttaaaaattatttgagatgacttaaaagagcataaaataagaaagtaaagataaataaatgaaaaaagggtaaagagcaaacaaaacaggaaacaaagttgaaccagggataaaggtagtgttcctaagaatggattggattcaagtatactagtagggaagaccccatgtgagagaataatcaggaatgtaayccacagattctgggagctcaggagacacagttgtttgtgtactgacatccaaagagggtttctgttgtgcaagtctaaaaagaagacatagtgtgatggcataaacaacatactcaacaat

SEQ ID NO: 390564 - DNA, 644 bp, Homo sapiens
caagccactttgtgaattttggtctcttcctcaaggtgactatagctacgaagggagaaagcaatggtgaattacaaacgcaggycccttctgagtactgcctgaagttaaggaattgatcttaatatttgatttcatccttctcttgtttgtgccgtatggactaagtatgcttttccttgtggatattctgaaatcaaaagcaatattgccaactgcctactaattaaacaacaacagcaacaaaatgtgtgatgtctaaacaaaaggatggtgtaacaagagaaatggtataagataagttatcagctactatttgagattgtgtggatctctctataatgtagccaataccacaattatcagagaccatttatatagagagagttttatagtcttgatactagtgacttatttgtgtaggtcatttttgtagttttggcaggactgggcttgctgctattcaaagtgaccccaggtcctttacccattgatagtatgaccagatgacttaataactttttttcctaactgtccaggagcagataaggagttcaatgattggtttaatatcagttattatgaaaaatgtgggactggttgcttccagtgcaaccttagttgtcacaacagtctagcatagg

SEQ ID NO: 390565 - DNA, 644 bp, Homo sapiens
caagccactttgtgaattttggtctcttcctcaaggtgactatagctacgaagggagaaagcaatggtgaattacaaacgcaggtcccttctgagtactgcctgaagttaaggaattgatcttaatatttgatttcatccttctcttgtttgtgccgtatggactaagtatgcttttccttgtggatattctgaaatcaaaagcaatattgccaactgcctactaattaaacaacaacagcaacaaaatgtgtgatgtctaaacmaaaggatggtgtaacaagagaaatggtataagataagttatcagctactatttgagattgtgtggatctctctataatgtagccaataccacaattatcagagaccatttatatagagagagttttatagtcttgatactagtgacttatttgtgtaggtcatttttgtagttttggcaggactgggcttgctgctattcaaagtgaccccaggtcctttacccattgatagtatgaccagatgacttaataactttttttcctaactgtccaggagcagataaggagttcaatgattggtttaatatcagttattatgaaaaatgtgggactggttgcttccagtgcaaccttagttgtcacaacagtctagcatagg

SEQ ID NO: 390566 - DNA, 540 bp, Homo sapiens
tctcttggtaaattgttcattactgaagaatggtcaagaagccagtctcagcataagtcagggtaatcagcaggccatctcagctcaccgcaacttccgcctcccagactcaagcacttcttgttcttcagcctcctgagtagctgggactacaggtgtgtgccaccactgaccagtgctaaattttgtatttttggtggagatggggtttcgccatgttggccaggctggtctcaaactcctagcctcaagccatctgccggcctcagcctcccaaagtgttgagattacaggcaaaagccacaatgcctggcctctgggctatagttttctttttgtatgttaggatcaaatcagaaatatgtacatacgtacatatagatgatagatagatagatagatagatagacagacagatacagatatagttatgtagatatagaaggcacttggtacataaaatttatagaacctagtaaatgttaamgatagatgcatattgttattctaagtattcagatggtaatcaaaaattggata

SEQ ID NO: 390567 - DNA, 421 bp, Homo sapiens
tgtggaaattctcccagatgaaggcattccagataggaaaataatgcatacaaaagcataaatgcatgcaaagtcacagaattgttaggagagcagcaagaatttccttgtgggtagaatgtactcttcatgttacaacatggcaagaaaaaaaaaaaaggctggaaaggcagattgccaagactggaaagctgtgtagtttagctgtcatcattcttttgagcctttcagtaatgtgtgcctttctggaaatttgtccatttcatctaagttgtcttatttgttggcatgaagttgttcatggtatttctttatattcctttttmatttctatgaagtcagtaatgattttctttctcatgattttgatctgtatcttttttatttagtcagactagctaaagatttgccaattttgttg

SEQ ID NO: 390568 - DNA, 645 bp, Homo sapiens
aaataaataaatggagaaaatgtctgatagggaaagtttgaaagtaaacaaataaaataaggaggaaaatagtagtaagagaaagacagaaaagaagaatttatctacagtgaattctgacctacaaaaaatgacaagtttaagatggggaatagtaataattccccttaacatcaatcacatctaccatacattagcatggcctcatcatagtgagacctacaagtatccaaaaggaaaattttccaaaataataaccctctagggaaaaaatagcaaaaacctgggattcatcccactggttccactgattatatggcattgtggaatgaagttggaattggaagtagccagacagggatttaaatctcagctctgacaactcttggctgtgcaagattggtcaaattaaccactctgaatcttagttcccttctgtcaaaaagaaaataatatctamtttcataattgttataaattcttaatataggccttagcatatagtaaacatttaaaattagctttattagtagcaataataaaaatcagtatacattcatctcaacacaatgccacctatttatgctctgctctggtcagaagaaagtgaattttccattggattttttttattattggaaatat

SEQ ID NO: 390569 - DNA, 432 bp, Homo sapiens
caccttggcctctcatagtgctggaattacaggtgcacctggccaatgtatgactgttaaatctgtcttctattctattattgtctttatgattaygattttgtcttgtcttatagatgaggggagagttaatgtgaatgtgatgatggatgaaggatatctttttacaggtaggttggatttttactaactcattattgagcatctatcatatcccaaccttccaggagcttgtgtagttgaggcagaaaaaatacatacaagtaaatgcaataaaattttatagattgcaaaggacctatgcaaggtaaagaaggggcaagatggtcacttgcacctaaggagaagaaattgagaaatagttttgtagagtgggcaacacatgagctgatccttaaaaaatgaaaccatgtttgtcagggagacagtgtt

SEQ ID NO: 390570 - DNA, 579 bp, Homo sapiens
tgtataactttgatagaaaatatgaactaaagttaataaggaatacatgaaggcattgctgagaagtgccaagaggtaaccatagttaaataccattaaaacataatggcaacctttcgtatgattatatgatattcttcagttggaccaaattaggagattctaaggctcatgtaccaaaacaatgaaagcatagagacttaaccgtgtagtccaagaaaatgagtaagtgttctagtgtggaygcagaaagaagtgaggttgtgaacttagagaaaagtgagagaagaggaatgaaattctctataaagatataacacatgtggtataagtaaggaagtaaaataaatggaagaattacaaggtattggccaaaagtcagcatgttagaatttaaggttttagaggtaaagcatttctaggtgatgacaaagtccagaatgtgtgcttgagagttaactagtgtagaatttaagagatagtcattgaggataagaaggtcaagaaatttggaggccagtcattgaatgagttatctgaataaaggctggaattccttataatgatgccaggagtttt

SEQ ID NO: 390571 - DNA, 579 bp, Homo sapiens
tgtataactttgatagaaaatatgaactaaagttaataaggaatacatgaaggcattgctgagaagtgccaagaggtaaccatagttaaataccattaaaacataatggcaacctttcgtatgattatatgatattcttcagttggaccaaattaggagattctaaggctcatgtaccaaaacaatgaaagcatagagacttaaccgtgtagtccaagaaaatgagtaagtgttctagtgtggatgcagaaagaagtgaggttgtgaacttagagaaaagtgagagaagaggaatgaarttctctataaagatataacacatgtggtataagtaaggaagtaaaataaatggaagaattacaaggtattggccaaaagtcagcatgttagaatttaaggttttagaggtaaagcatttctaggtgatgacaaagtccagaatgtgtgcttgagagttaactagtgtagaatttaagagatagtcattgaggataagaaggtcaagaaatttggaggccagtcattgaatgagttatctgaataaaggctggaattccttataatgatgccaggagtttt

SEQ ID NO: 390572 - DNA, 549 bp, Homo sapiens
tattagcaccatttagctgattatgagagttataaaaaaccttttcattgaatataagtaactgtttgtgccatggcatattactacagctaagctttggttctcataccagttctcacagaaaagggagccacaggtctaagcaacctgggaaacacatgcttcatgaactcaagcatccagtgtgttagtaacacacagccactgacacagtattttatctcagggagacatctttatgaactcaacaggtaatctttctggagtcastggcctcttaacctgtgactttgatataaacccaatatcacctaaatttcctctttttttaccctgtgggagaaagattttatcttatttgccctatttaatatgaaataggccaaggaatacatctcttgtttcaaaaagaaaagatattttgatgtgagatgctaggcatttttgcacccacatgattgtgatttatgagaatctttggcaacaaattttcctctcagacttctaggacaaatcccattggtatgaaggggcatatggctaaatgct

SEQ ID NO: 390573 - DNA, 549 bp, Homo sapiens
tattagcaccatttagctgattatgagagttataaaaaaccttttcattgaatataagtaactgtttgtgccatggcatattactacagctaagctttggttctcataccagttctcacagaaaagggagccacaggtctaagcaacctgggaaacacatgcttcatgaactcaagcatccagtgtgttagtaacacacagccactgacacagtattttatctcagggagacatctttatgaactcaacaggtaatctttctggagtcagtggcctcttaacctgtgactttgatataaacccaatatcacctaaatttcctctttttttaccctgtgggagaaagattttatcttatttgccctatttaatatgaaataggccaaggaatacatctcttgtttcaaaaagaaaagatattttgatgtgagatgctaggcatttttgcacccacatgattgtgatttatgagaatctttggcaacaaattttcctctcaracttctaggacaaatcccattggtatgaaggggcatatggctaaatgct

SEQ ID NO: 390574 - DNA, 591 bp, Homo sapiens
attccccaactataaagggctttatgaggctcccctcattgatgtgtagtaggtagatagtcctgacggtgagttggtggatgttctaattttagttttagtttagagcatcactgtccaatagaattctgcagtggtggaaacttctgtgatctttgccatccaatacagtatccaccagtcacgtggactgttaagcgctygagatgtggttagtgtgagtgagaataatgcatttttaatttttatttaatttaatttatttattttgagaaacggtctcactctgtcacccagcctggagtgcagtggcatcatcttggctcactgcagcctctgccttatgggctgaagcaatcctcccacctcagcttcccaagtagctgggactacaaacgtgtaccaccatgcccagctatggtgtatcttttgtagagatgggttttcaccatgttgcctaggctggtcactagctcctgggttcaagggatctgctacctcagcctcccaaagtgctaggattacaaatgtgagctgcctcatccagcctaatttaaattttaaatgcaacatctgggtagaggttactgt

SEQ ID NO: 390575 - DNA, 591 bp, Homo sapiens
attccccaactataaagggctttatgaggctcccctcattgatgtgtagtaggtagatagtcctgacggtgagttggtggatgttctaattttagttttagtttagagcatcactgtccaatagaattctgcagtggtggaaacttctgtgatctttgccatccaatacagtatccaccagtcacgtggactgttaagcgctcgagatgtggttagtgtgagtgagaataatgcatttttaatttttatttaatttaatttatttattttgagaaacggtctcactctgtcacccagcctggagtgcagtggcatcatcttggctcactgcagcctctgccttatgggctgaagcaatcctcccacctcagcttcccaagtagctgggactacaaacgtgtaccaccatgcccagctatggtgtatcttttgtagagatgggttttcaccatgttgcctaggctggtcaytagctcctgggttcaagggatctgctacctcagcctcccaaagtgctaggattacaaatgtgagctgcctcatccagcctaatttaaattttaaatgcaacatctgggtagaggttactgt

SEQ ID NO: 390576 - DNA, 508 bp, Homo sapiens
cccaggtgtgtgtttgctggaccatgtggaggaagctgaagagacatgagcagaaggcagagggtgagtccaaggtgggatcttgggacaggtacgagaagttaggcaaaaatgggataattctagccttcataaccttagataatagttcacattattatttagttaatagaaytgtacccacattaaatttcttaaatttttttaagagataaagtctcactctgtcacccaggctggagtgcagtggtgcaatcatggctcactgcttcctggaactcgtgggctccagcaatcctcctgcctcagcctcctgactaggtgggactataggcacgcgccaccatgcctggctaatttctttgacttttctctagagaccgggtccacctaggtttcccaggctggtctcagacttctagactcaagtgaacctgaacctcccgccttgacctctcaaattgctgggattacaggtgtgagccaccacacccggcctaaatttctt

SEQ ID NO: 390577 - DNA, 508 bp, Homo sapiens
cccaggtgtgtgtttgctggaccatgtggaggaagctgaagagacatgagcagaaggcagagggtgagtccaaggtgggatcttgggacaggtacgagaagttaggcaaaaatgggataattctagccttcataaccttagataatagttcacattattatttagttaatagaattgtacccacattaaatttcttaaatttttttaagagataaagtctcactctgtcacccaggctggagtgcagtggtgcaatcatggctcactgcttcctggaactcgtgggctccagcaatcctcctgcctcagcctcctgactaggtgggactataggcacrcgccaccatgcctggctaatttctttgacttttctctagagaccgggtccacctaggtttcccaggctggtctcagacttctagactcaagtgaacctgaacctcccgccttgacctctcaaattgctgggattacaggtgtgagccaccacacccggcctaaatttctt

SEQ ID NO: 390578 - DNA, 513 bp, Homo sapiens
attatgttgtattttgatatatggccatttttcatgtttatgtatttaattttatcagtcatttcttctgtgattgacttttaagtcctttataagctagccagtgtgtgaagaatcacatatatttagttttctttgtttttctattatttcactttttacatttaattatttatctgaaatayatattgactctttattgactctttttaaatccccatgtttcagaatgatttgatcaaaactacaccaatagttttcagtaattttccccattaactggagtcctcctttatgtacaattacacttgggagataatttattattactgtagcaaatttcaaatcttactttttgacagaataacatgatttggttgttatctctaattcatcagaaatgccaaactctttacttctcctcccagtataaacttcttccagaagtttaattttggaaactattctgttcctgacgcccacatgacttgctgtaaatagcttctttctgct

SEQ ID NO: 390579 - DNA, 578 bp, Homo sapiens
actacccttgcatcctggatcctgtcttgtagtagtatactctgtttctacctcctaatcatttaataattgctttatgtatttaggtgctcaaatgttgagggcatatatatacaattgttatttcctgttggtgaattaacctcttttatcatcatgtaatgaccttctttgtctatttttatagtttttgatttaaagtttattttstctatataaatataggtcccttgctttattttcatttccattttcatggcatatctttttccatccctttactcatagtctatgtgtgcccttactagaaaagggggtctcttgtaggcagcatatagttgtatttttttttactgtatttggccattctgtatttttattggatcatttaatctatttacattcaaggtaattattgataggttagagcttgtgtattaatctgttctcatgctgcttataaagacatacccgagacttggtaatttataaaggaaagaggttaaattgactcacaattccacactgctggtaggcctcaggaaacacaatcatggaggaaggggaagcaaaactgt

SEQ ID NO: 390580 - DNA, 578 bp, Homo sapiens
actacccttgcatcctggatcctgtcttgtagtagtatactctgtttctacctcctaatcatttaataattgctttatgtatttaggtgctcaaatgttgagggcatatatatacaattgttatttcctgttggtgaattaacctcttttatcatcatgtaatgaccttctttgtctatttttatagtttttgatttaaagtttattttctctatataaatataggtcccttgctttattttsatttccattttcatggcatatctttttccatccctttactcatagtctatgtgtgcccttactagaaaagggggtctcttgtaggcagcatatagttgtatttttttttactgtatttggccattctgtatttttattggatcatttaatctatttacattcaaggtaattattgataggttagagcttgtgtattaatctgttctcatgctgcttataaagacatacccgagacttggtaatttataaaggaaagaggttaaattgactcacaattccacactgctggtaggcctcaggaaacacaatcatggaggaaggggaagcaaaactgt

SEQ ID NO: 390581 - DNA, 578 bp, Homo sapiens
actacccttgcatcctggatcctgtcttgtagtagtatactctgtttctacctcctaatcatttaataattgctttatgtatttaggtgctcaaatgttgagggcatatatatacaattgttatttcctgttggtgaattaacctcttttatcatcatgtaatgaccttctttgtctatttttatagtttttgatttaaagtttattttctctatataaatataggtcccttgctttattttcatttccattttcatggcatatctttttccatccctttactcatagtctatgtgtgcccttactagaaaagggggtckcttgtaggcagcatatagttgtatttttttttactgtatttggccattctgtatttttattggatcatttaatctatttacattcaaggtaattattgataggttagagcttgtgtattaatctgttctcatgctgcttataaagacatacccgagacttggtaatttataaaggaaagaggttaaattgactcacaattccacactgctggtaggcctcaggaaacacaatcatggaggaaggggaagcaaaactgt

SEQ ID NO: 390582 - DNA, 620 bp, Homo sapiens
tgaagactcctgtttggaaaaggcttccctatttttactgtcagtctatacccctgtccttctctttgacctcagaacctcgatttggtattcatatatcattagttcagcaagtatttttttcaccacctgccatgtggcaagcactatttttatggtggtgatgccacactaaatcaaaacccctgcttcacagaacctaaagcatagcatttatcaayttgcactgtaattgtttgcttctctgtctcctcccctgctaagtttcagcttcctgatggtagatgcagtatctaatcaaactttgagtctccccctcaatgtgtagtatatggtagacagtcatacatacggataattattgtttacatacagagacccttcttcttatattggtgtgagaaatggaactgagcaccagagatcatattacgcttgtccttgaaacagtttggcactagctgtgtattctttgacttccaaagtgttagtttgaattttaattaggatcagccagtaaaatgtgggagattttacataagaatccagattcccagcttctcttgtaaaagcccacattcctgtatcacacaatgagctgaagctgtggctggtccacc

SEQ ID NO: 390583 - DNA, 620 bp, Homo sapiens
tgaagactcctgtttggaaaaggcttccctatttttactgtcagtctatacccctgtccttctctttgacctcagaacctcgatttggtattcatatatcattagttcagcaagtatttttttcaccacctgccatgtggcaagcactatttttatggtggtgatgccacactaaatcaaaacccctgcttcacagaacctaaagcatagcatttatcaatttgcactgtaattgtttgcttctctgtctcctcccctgctaagtttcagcttcctgatggtagatgcagtatctaatcaaactttgagtctccccctcaatgtstagtatatggtagacagtcatacatacggataattattgtttacatacagagacccttcttcttatattggtgtgagaaatggaactgagcaccagagatcatattacgcttgtccttgaaacagtttggcactagctgtgtattctttgacttccaaagtgttagtttgaattttaattaggatcagccagtaaaatgtgggagattttacataagaatccagattcccagcttctcttgtaaaagcccacattcctgtatcacacaatgagctgaagctgtggctggtccacc

SEQ ID NO: 390584 - DNA, 581 bp, Homo sapiens
cctgatggtagatgcagtatctaatcaaactttgagtctccccctcaatgtgtagtatatggtagacagtcatacatayggataattattgtttacatacagagacccttcttcttatattggtgtgagaaatggaactgagcaccagagatcatattacgcttgtccttgaaacagtttggcactagctgtgtattctttgacttccaaagtgttagtttgaattttaattaggatcagccagtaaaatgtgggagattttacataagaatccagattcccagcttctcttgtaaaagcccacattcctgtatcacacaatgagctgaagctgtggctggtccacctgtttcttgagatggggcatgccttctccatttcactacaacccctaccatgccctatcattttgcacgtgtcgaggaggagcaagggggtgatgtgtggtgaggggagaatgaagtgcttccgattctacataaattcactgaaagtgtgtgttcataagcttatagcaacctaactcccaacattggaaataataacttactttttttccttcagtgatgtggaatgctaac

SEQ ID NO: 390585 - DNA, 581 bp, Homo sapiens
cctgatggtagatgcagtatctaatcaaactttgagtctccccctcaatgtgtagtatatggtagacagtcatacatacggataattattgtttacatacagagaccmttcttcttatattggtgtgagaaatggaactgagcaccagagatcatattacgcttgtccttgaaacagtttggcactagctgtgtattctttgacttccaaagtgttagtttgaattttaattaggatcagccagtaaaatgtgggagattttacataagaatccagattcccagcttctcttgtaaaagcccacattcctgtatcacacaatgagctgaagctgtggctggtccacctgtttcttgagatggggcatgccttctccatttcactacaacccctaccatgccctatcattttgcacgtgtcgaggaggagcaagggggtgatgtgtggtgaggggagaatgaagtgcttccgattctacataaattcactgaaagtgtgtgttcataagcttatagcaacctaactcccaacattggaaataataacttactttttttccttcagtgatgtggaatgctaac

SEQ ID NO: 390586 - DNA, 581 bp, Homo sapiens
cctgatggtagatgcagtatctaatcaaactttgagtctccccctcaatgtgtagtatatggtagacagtcatacatacggataattattgtttacatacagagacccttcttcttatattggtgtgagaaatggaactgagcaccagagatcatattacgcttgtccttgaaacagtttggcactagctgtgtattctttgacttccaaagtgttagtttgaattttaattaggatcagccagtaaaatgtgggagattttacataagaatccagattcccagcttctcttgtaaaagcccacattcctgtatcacacaatgagctgaagctgtggctggtccacctgtttcttgagatggggcatgccttctccatttcactacaacccctaccatgccctatcattttgcacgtgtsgaggaggagcaagggggtgatgtgtggtgaggggagaatgaagtgcttccgattctacataaattcactgaaagtgtgtgttcataagcttatagcaacctaactcccaacattggaaataataacttactttttttccttcagtgatgtggaatgctaac

SEQ ID NO: 390587 - DNA, 597 bp, Homo sapiens
ttcacaactacactgaaggtgtcttggtaccactaacattataagtttataatagactcatctacccgctgaagaaccctcaactcacttcctttcctttyagattttgtactatgaggatgtgatacttcaagccaggacaacagtccactacctcaagatgtaaagccaagaaaatattagaagatgagaatcaaaaccttaacattgttgagctataaaattttccctagactgcctaactctggaaatctacaggtaaaaaatatcataatgcatattaatatatttgttatatactagtatataaacatattatatatgtatatattaatttgttatatagtaatagaaaatatatatttctttactatacaataaattaatatataataaataatacatattcatatctaatatattaatatattattagttatattaacacataatatgtattaatatatgtgttaatacaacatattaatataactaatgtttaattatatattcatatattaatataactaatatgtgatagaatatcctaatatattaatatataatatgctaatatataaacatattttatacatt

SEQ ID NO: 390588 - DNA, 538 bp, Homo sapiens
accaattctaaatctgtccatagtctttttctctatgctatactctcacatcaactcattattatgactcrgtgttaaagatatgatagtatgaagggttacattatttttcaggaactggatacttggtttaacatgactctgccctggacagcctggccaattaccctgactcccctactttcaatcatactgaagatgttatataagtaacgtgttattaaatatatttttaatgtctgcaaatgccattcttctatagctgtcaaattcaagaaagttatctcagaattctgcaaagcctcagaacagatagtcttcaatgacacacactgtggatgctaagatttaccaacccagtaacttcttgggctgactgaaatttttttcaagaaggcagctgtgcacctcctgctggtgggttggtggcctcactggtgcagtcactccactagtggaaaggcccacgtgttccttagaactgtttcttcttctatatggccagaacaatcctctgctcaccctcctgatgtacact

SEQ ID NO: 390589 - DNA, 604 bp, Homo sapiens
aacatagcaagacctaatttctacaaaaaataaaaaataattcaggtgtggtggcaggtgcctgtagttccagctactcagagaaggctgaagtgggagtattgcttgagcctaggagtttgaggttacagtgaaccataacyatgcctggttgatagagcaagaccctgtctcagaaaaaaaaagaaagaaaagaaaagaaaatgaaaaaacaatatagaaaatatctaacaccaaaggtagttatttgaaaagatcagtaaaatagggaaacctccagcaaggcttaccaacacacaaaaatgtagggaaaagacatgaattaccatttcacaaacgaaagaaggatcattacaactgatttcatggacactcaaaggagaaagagggaatactatgaataaatgtgtgcccacaaatttgataagtagatgaaatgatgaaatggactgatttttttgagagacacacactagcaacattcactcaaagggaaaaataataaacttaatctctcagtatatatattaaggaaattaaatcagtaattaaaaaatctttcaagaaagaaagcaccagggcaagatgatttttaggtggattc

SEQ ID NO: 390590 - DNA, 604 bp, Homo sapiens
aacatagcaagacctaatttctacaaaaaataaaaaataattcaggtgtggtggcaggtgcctgtagttccagctactcagagaaggctgaagtgggagtattgcttgagcctaggagtttgaggttacagtgaaccataaccatgcctggttgatagagcaagaccctgtctcagaaaaaaaaagaaagaaaagaaaagaaaatgaaaaaacaatatagaaaatatctaacaccaaaggtagttatttgaaaagatcagtaaaatagggaaacctccagcaaggcttaccaacacacaaaaatgtagggaraagacatgaattaccatttcacaaacgaaagaaggatcattacaactgatttcatggacactcaaaggagaaagagggaatactatgaataaatgtgtgcccacaaatttgataagtagatgaaatgatgaaatggactgatttttttgagagacacacactagcaacattcactcaaagggaaaaataataaacttaatctctcagtatatatattaaggaaattaaatcagtaattaaaaaatctttcaagaaagaaagcaccagggcaagatgatttttaggtggattc

SEQ ID NO: 390591 - DNA, 458 bp, Homo sapiens
  misc_feature (1)...(458): n = A,T,C or G
aaatatctaacaccaaaggtagttatttgaaaagatcagtaaaatagggaaacctccagcaaggcttaccaacacacaaaaatgtagggaaaagacatgaattaccatttcacaaacgaaagaaggatcattacaactgatttcatggacactcaaaggagaaagagggaatactatgaataaatgtgtgcccacaaatttgataagtagatgaaatgatgaaatggactgatttttttgagagacacacactagcaacattcactcaaagggaaaaataataaacttaatctctcagtatatatattaaggaaattaaatcagtaattaaaaaatctttcaagaaagaaagcaccagggcaagatgakttttaggtggattctatccagcaattaatgaagaaataataattattttgaatttcttcccnaaaatagtagtaaatacttcctaactc

SEQ ID NO: 390592 - DNA, 579 bp, Homo sapiens
tggggtatgtccatgaggcatgaaagcccaccaaaagagctctctatggccaaagctggaataatctgagcagcaaaatagcatggtgttggagtaaatgcaaagtacaaaacaaatatccatgattccacacagatataaataaatcattgaataactaacttccyacaccatcagtgtaggctgtgcacagtaacttccacagagagcaatagggaaggggagaaataataattttacactacagaaatctgacaaacacgatctcagccaggtgatcacagttaacatcaagagtgatgtcatgttccaataataagtaatgagactgaagccgtaataaaaagcctcctatcaaagaaaagtccaggaccaaatggcttcactgtgaattctaccaaacttttaaagaagaacaaataccaattctactccaactattccaaaaaatagaggaggtgggaacacttccaaactcattctgtgaggccagtatcaccctgatactaaaaccagactaagacacatcaaaaaaagaaagctacaggtcaatgaacaataggatgtgttttacccagt

SEQ ID NO: 390593 - DNA, 579 bp, Homo sapiens
tggggtatgtccatgaggcatgaaagcccaccaaaagagctctctatggccaaagctggaataatctgagcagcaaaatagcatggtgttggagtaaatgcaaagtacaaaacaaatatccatgattccacacagatataaataaatcattgaataactaacttcctacaccatcagtgtaggctgtgcacagtaacttccacagagagcaatagggaaggggagaaataataattttacactrcagaaatctgacaaacacgatctcagccaggtgatcacagttaacatcaagagtgatgtcatgttccaataataagtaatgagactgaagccgtaataaaaagcctcctatcaaagaaaagtccaggaccaaatggcttcactgtgaattctaccaaacttttaaagaagaacaaataccaattctactccaactattccaaaaaatagaggaggtgggaacacttccaaactcattctgtgaggccagtatcaccctgatactaaaaccagactaagacacatcaaaaaaagaaagctacaggtcaatgaacaataggatgtgttttacccagt

SEQ ID NO: 390594 - DNA, 579 bp, Homo sapiens
tggggtatgtccatgaggcatgaaagcccaccaaaagagctctctatggccaaagctggaataatctgagcagcaaaatagcatggtgttggagtaaatgcaaagtacaaaacaaatatccatgattccacacagatataaataaatcattgaataactaacttcctacaccatcagtgtaggctgtgcacagtaacttccacagagagcaatagggaaggggagaaataataattttacactasagaaatctgacaaacacgatctcagccaggtgatcacagttaacatcaagagtgatgtcatgttccaataataagtaatgagactgaagccgtaataaaaagcctcctatcaaagaaaagtccaggaccaaatggcttcactgtgaattctaccaaacttttaaagaagaacaaataccaattctactccaactattccaaaaaatagaggaggtgggaacacttccaaactcattctgtgaggccagtatcaccctgatactaaaaccagactaagacacatcaaaaaaagaaagctacaggtcaatgaacaataggatgtgttttacccagt

SEQ ID NO: 390595 - DNA, 579 bp, Homo sapiens
tggggtatgtccatgaggcatgaaagcccaccaaaagagctctctatggccaaagctggaataatctgagcagcaaaatagcatggtgttggagtaaatgcaaagtacaaaacaaatatccatgattccacacagatataaataaatcattgaataactaacttcctacaccatcagtgtaggctgtgcacagtaacttccacagagagcaatagggaaggggagaaataataattttacactacagaaatctgacaaacaygatctcagccaggtgatcacagttaacatcaagagtgatgtcatgttccaataataagtaatgagactgaagccgtaataaaaagcctcctatcaaagaaaagtccaggaccaaatggcttcactgtgaattctaccaaacttttaaagaagaacaaataccaattctactccaactattccaaaaaatagaggaggtgggaacacttccaaactcattctgtgaggccagtatcaccctgatactaaaaccagactaagacacatcaaaaaaagaaagctacaggtcaatgaacaataggatgtgttttacccagt

SEQ ID NO: 390596 - DNA, 575 bp, Homo sapiens
gtggccctcttgagtttatgttcccggggtctactktttccagtggtcagtaactcaatgatgacagagtttttactgtcctcacttagtctggtttgtattgtaaccagcagtcttctgtgagtagtacacaacgccactatgttgtgcccagagctggttgattgagctcccattcattgtttgtggtctgtttgtccactacatttctacagaaaatgagaagtatttgttgtcaagatttggaatacatagttaattggatcttcactcaacctgtaccccatctacctgtcctttgtgtcttttcccaacttctttaacccatacgcagaccttcattggccaaaatatggaccaaaactcaggtggaaagttgctctgtgtcattccttgcacattagcacattatctttgtcatatttggcttactttcctctgaatcctatgataaacatggggcctctgagctcaaaagagtcaacaatctgaagggaatcccagtttctaatggtgtattcattataatgctaacttctatgtttattggtttataatctaatatattgctgata

SEQ ID NO: 390597 - DNA, 575 bp, Homo sapiens
gtggccctcttgagtttatgttcccggggtctactttttccagtggtcagtaactcaatgatgacagagtttttactgtcctcacttagtctggtttgtattgtaaccagcagtcttctgtgagtagtacacaacgccactatgttgtgcccagagctggttgattgagctcccattcattgtttgtggtctgtttgtccactacatttctacagaaaatgagaagtatttgttgtcaagatttggaatacatagttaattggatcttcactyaacctgtaccccatctacctgtcctttgtgtcttttcccaacttctttaacccatacgcagaccttcattggccaaaatatggaccaaaactcaggtggaaagttgctctgtgtcattccttgcacattagcacattatctttgtcatatttggcttactttcctctgaatcctatgataaacatggggcctctgagctcaaaagagtcaacaatctgaagggaatcccagtttctaatggtgtattcattataatgctaacttctatgtttattggtttataatctaatatattgctgata

SEQ ID NO: 390598 - DNA, 575 bp, Homo sapiens
gtggccctcttgagtttatgttcccggggtctactttttccagtggtcagtaactcaatgatgacagagtttttactgtcctcacttagtctggtttgtattgtaaccagcagtcttctgtgagtagtacacaacgccactatgttgtgcccagagctggttgattgagctcccattcattgtttgtggtctgtttgtccactacatttctacagaaaatgagaagtatttgttgtcaagatttggaatacatagttaattggatcttcactcaacctgtaccccatctacctgtcctttgtgtcttttcccaacttctttaacccatacgcagaccttcattggccaaaatatggrccaaaactcaggtggaaagttgctctgtgtcattccttgcacattagcacattatctttgtcatatttggcttactttcctctgaatcctatgataaacatggggcctctgagctcaaaagagtcaacaatctgaagggaatcccagtttctaatggtgtattcattataatgctaacttctatgtttattggtttataatctaatatattgctgata

SEQ ID NO: 390599 - DNA, 575 bp, Homo sapiens
gtggccctcttgagtttatgttcccggggtctactttttccagtggtcagtaactcaatgatgacagagtttttactgtcctcacttagtctggtttgtattgtaaccagcagtcttctgtgagtagtacacaacgccactatgttgtgcccagagctggttgattgagctcccattcattgtttgtggtctgtttgtccactacatttctacagaaaatgagaagtatttgttgtcaagatttggaatacatagttaattggatcttcactcaacctgtaccccatctacctgtcctttgtgtcttttcccaacttctttaacccatacgcagaccttcattggccaaaatatggaccaaaactcaggtggaaagttgctctgtgtcattccttgcacattagcacattatctttgtcatatttggcttactttcctctgaatcctatgataaacatggggcctctgagctcaaaagagtcaacaatctgaagggaatcccagtttctaatggtgtattcatwataatgctaacttctatgtttattggtttataatctaatatattgctgata

SEQ ID NO: 390600 - DNA, 623 bp, Homo sapiens
atggtatagtttatgcaaggcatgaatttacttactatggaatgcctagacagatgggctaacattaatttggcagaattttacaattatgaacatgycaacagctgttcaagcaaattaaattatagtacccaatatccttatgaaatgggttgactcatttaatttgtctaatattttaaaataacaattattcttttattttttgaccatcttaattctctaagaaactatttatataataaatttacatgttagatttaatgaagacgtaattgcctcagaaaaaattaataatctttgtaaagtcaacataatccaaattgaaatgtttgtctcatattacagagaaaattttaatatccagaccatgttatgtaaatggattttataagtcattaagaaaaagaaataacttagaaaaatagctaaacagagtgaacagtcaattaatctgagagagagaaactggctaaaaataatttgtaaagacttgatctcactaaaggaagaataaaaaagaaaacaattaaaattttatttgatcagataggcaagcattacaatgatttataatagaattgttgagagttagtaagatgtgcaaatttatttcataagag

SEQ ID NO: 390601 - DNA, 629 bp, Homo sapiens
aattttaccactaaattgttaaattgttaattttgttttgaatcattagggtcacttgcctaagtcaataaataaatgaataaggaagtaaactaatcaaggttagatcatcaaacatttaactacctaatttttaaattgtattattctttacatgtttttccccaatagcatgagcagaaaacttcattaatgaaaactattaatggaaagaccctagcatataaaaattcttgtaatttatttcaatggtmtttacaatgaagcaaatctaaaatgaaaaaaactccctcaaaacataaaattatgtcagcctctttatgtttcccctctctgccttttacctgggacctggtgcctattttctttagccgaatggtggcagcatttgaacactgttactcatggcctgctgggcatgtgccccgattaggcaaaaccagggttagtatgatgtcctcagataggcatggctaaatgagacctctatgctgagaccatatcaagaggctccatagtgcctttgtatgaaaatacctcaaagaagaaaataatatctacctttgattgccatgtatgaaaattatacatattttagaatgttttaatttttagaaagaacttaatat

SEQ ID NO: 390602 - DNA, 629 bp, Homo sapiens
aattttaccactaaattgttaaattgttaattttgttttgaatcattagggtcacttgcctaagtcaataaataaatgaataaggaagtaaactaatcaaggttagatcatcaaacatttaactacctaatttttaaattgtattattctttacatgtttttccccaatagcatgagcagaaaacttcattaatgaaaactattaatggaaagaccctagcatataaaaattcttgtaatttatttcaatggtctttacaatgaagcaaatctaaaatgaaaaaaactccctcaaaacataaaattatrtcagcctctttatgtttcccctctctgccttttacctgggacctggtgcctattttctttagccgaatggtggcagcatttgaacactgttactcatggcctgctgggcatgtgccccgattaggcaaaaccagggttagtatgatgtcctcagataggcatggctaaatgagacctctatgctgagaccatatcaagaggctccatagtgcctttgtatgaaaatacctcaaagaagaaaataatatctacctttgattgccatgtatgaaaattatacatattttagaatgttttaatttttagaaagaacttaatat

SEQ ID NO: 390603 - DNA, 629 bp, Homo sapiens
aattttaccactaaattgttaaattgttaattttgttttgaatcattagggtcacttgcctaagtcaataaataaatgaataaggaagtaaactaatcaaggttagatcatcaaacatttaactacctaatttttaaattgtattattctttacatgtttttccccaatagcatgagcagaaaacttcattaatgaaaactattaatggaaagaccctagcatataaaaattcttgtaatttatttcaatggtctttacaatgaagcaaatctaaaatgaaaaaaactccctcaaaacataaaattatgtcagcctytttatgtttcccctctctgccttttacctgggacctggtgcctattttctttagccgaatggtggcagcatttgaacactgttactcatggcctgctgggcatgtgccccgattaggcaaaaccagggttagtatgatgtcctcagataggcatggctaaatgagacctctatgctgagaccatatcaagaggctccatagtgcctttgtatgaaaatacctcaaagaagaaaataatatctacctttgattgccatgtatgaaaattatacatattttagaatgttttaatttttagaaagaacttaatat

SEQ ID NO: 390604 - DNA, 629 bp, Homo sapiens
aattttaccactaaattgttaaattgttaattttgttttgaatcattagggtcacttgcctaagtcaataaataaatgaataaggaagtaaactaatcaaggttagatcatcaaacatttaactacctaatttttaaattgtattattctttacatgtttttccccaatagcatgagcagaaaacttcattaatgaaaactattaatggaaagaccctagcatataaaaattcttgtaatttatttcaatggtctttacaatgaagcaaatctaaaatgaaaaaaactccctcaaaacataaaattatgtcagcctctttatgtttcccctctctgccttttacctgggacctggtgcctattttctttagccgaatggtggcagcatttgaacactgttactcatggcctgctgggcatgtgccccgattaggcaaaaccagggttagtatgatgtcctcagataggcatggctaaatgagacctctatgctgagaccayatcaagaggctccatagtgcctttgtatgaaaatacctcaaagaagaaaataatatctacctttgattgccatgtatgaaaattatacatattttagaatgttttaatttttagaaagaacttaatat

SEQ ID NO: 390605 - DNA, 503 bp, Homo sapiens
gaaaaacaattttttggtgtgtaacttttatattttagaaatttttggycatgattgttctctatcatgaattttagaatctctggccaagttcccaaatcataacttttggatttgttgggattgaattacattcatcagtcattaaatatacttctaaagtaaaacgtgaacaagtcagtcaaaaattccaaaattggagtgacatcagcaagatggcagaatagaagttctccacctccactctctccccacagaaatccagctagcaactgcccacagacaagaataactgtgggaaatccccgaactcaggagtgaggctgagagatccacttggaccaccaaagcgagaaaaaccatgttcaggagatcagaggaatggttctctttgactgcaccacccataccccaaggcagtacagtgccacacacagaggattcccatggacccatggtttctacagtgagaaaaatgagttggaggtagacattcagtttcc

SEQ ID NO: 390606 - DNA, 503 bp, Homo sapiens
gaaaaacaattttttggtgtgtaacttttatattttagaaatttttggccatgattgttytctatcatgaattttagaatctctggccaagttcccaaatcataacttttggatttgttgggattgaattacattcatcagtcattaaatatacttctaaagtaaaacgtgaacaagtcagtcaaaaattccaaaattggagtgacatcagcaagatggcagaatagaagttctccacctccactctctccccacagaaatccagctagcaactgcccacagacaagaataactgtgggaaatccccgaactcaggagtgaggctgagagatccacttggaccaccaaagcgagaaaaaccatgttcaggagatcagaggaatggttctctttgactgcaccacccataccccaaggcagtacagtgccacacacagaggattcccatggacccatggtttctacagtgagaaaaatgagttggaggtagacattcagtttcc

SEQ ID NO: 390607 - DNA, 503 bp, Homo sapiens
gaaaaacaattttttggtgtgtaacttttatattttagaaatttttggccatgattgttctctatcatgaattttagaatctctggccaagttcccaaatcataacttttggatttgttgggattgaattacattcatcagtcattaaatatacttctaaagtaaaacgtgaacaagtcagtcaaaaattccaaaattggagtgacatcagcaagatggcagaatagaagttctccacctccactctctccccacagaaatccagctagcaactgccyacagacaagaataactgtgggaaatccccgaactcaggagtgaggctgagagatccacttggaccaccaaagcgagaaaaaccatgttcaggagatcagaggaatggttctctttgactgcaccacccataccccaaggcagtacagtgccacacacagaggattcccatggacccatggtttctacagtgagaaaaatgagttggaggtagacattcagtttcc

SEQ ID NO: 390608 - DNA, 543 bp, Homo sapiens
ggtagtttaaatagcagacttgatccagcagaagaaagagtaatgatctcaaagacaggacatttgaaattatccaatcagagaaataaaaagaaaaaagaatgaaaaagaataaataagacctacataaattatgggacaccatcaagcaaaaactatccaccatataataggagtttcagaaggagaagagagatataaaggcctagaaggcatatttaagaaaataatggctgaaaaatctccagatctaggtaaagatgataacattcagatatagaagctcagaaactggcagtaaaattcaaccaaaagagaagttcactaagacacattataatcaaattgtgaaaatttagacaaagaaaatactaacaatagcaaaagataaaaaacagatcacattcraagctttcagcagatttcagattttttcctgctgtgtgcagcctagggacttagtgccctgcgttccagctgctccagtctggctaaaaggggccaaagtacacctcagtccatggcttcagatggcacagacgc

SEQ ID NO: 390609 - DNA, 561 bp, Homo sapiens
gcggcggagggcccccagcagagcgcagagggcagcgcgagcggcgggggcatgcaggcggcagcgcccccttcgtcgcagccgcacccgcagcagctccaagagcaggaagaaatgcaagaggagatggagaagctgcgagaggaaaacgagactctcaaggtgaggagggtggggggacccggctgggggatgggaagagtgggcctgggaggattagggcgtgtaccggcagggatcagaggctgctaacctgttagggagccttgaagagggaggagaacaagaaaggagggagggggtttcctaggccttgyctgaatttgaatctgctctcagtaacgcgaggttttcatttaaattcaaatctgggcctccgtttctctaattataatggtttgtcacacttcttcctggagagaggtagagtaagagaacgagagagggcctaaagtgggcctttttcccccagtttcctcttctgtactcagctccttgtcactcctgtctcgtggagagagagggcaattaaagctgagaatttggaattggaatggggtg

SEQ ID NO: 390610 - DNA, 561 bp, Homo sapiens
gcggcggagggcccccagcagagcgcagagggcagcgcgagcggcgggggcatgcaggcggcagcgcccccttcgtcgcagccgcacccgcagcagctccaagagcaggaagaaatgcaagaggagatggagaagctgcgagaggaaaacgagactctcaaggtgaggagggtggggggacccggctgggggatgggaagagtgggcctgggaggattagggcgtgtaccggcagggatcagaggctgctaacctgttagggagccttgaagagggaggagaacaagaaaggagggagggggtttcctaggccttgtckgaatttgaatctgctctcagtaacgcgaggttttcatttaaattcaaatctgggcctccgtttctctaattataatggtttgtcacacttcttcctggagagaggtagagtaagagaacgagagagggcctaaagtgggcctttttcccccagtttcctcttctgtactcagctccttgtcactcctgtctcgtggagagagagggcaattaaagctgagaatttggaattggaatggggtg

SEQ ID NO: 390611 - DNA, 436 bp, Homo sapiens
ctttttttcttaacttttgtcgagtgcttagtatgtactaagcactgtggcaaacactgttacatacattattatttcatttaattctcaagggaaaaaaaatcctacaatgtagggattattaaggcaccattttataggtgcagaagctacaccttttacagaggttaagtgcccaggcctggaaaacagctaataggtgccaggctgactctccactcagtccaaaatcacaacctgtgtcctaagcctctacaccagwctgctccacttttcttccaaaccctagaatttccaggataatctcaaaatatgaggcaaaaatgcacagtcattcaaaaaataataatctcaaggactaaaactttcctaagattaagcaactggaattcaagctataagattgaaattcaagcccaacccactacttgtaaaa

SEQ ID NO: 390612 - DNA, 631 bp, Homo sapiens
gggtattgaccaattgctctcaggactggtggctgcacaaggtcttgtgcacctcctcacatctatctgtctatcttctccccctgagaggatggagtaggcacctgggagtaagaagaattgagtagaggcaggatagaggtaattagctgcatctattgcatctcattgcttgtattgaaatagctgatgtttgaccaactgcaaacaagagggacctcttcgaatgctgcyttcgaatcttaatagcattgtcatcccaattataaaacactgattgctaccagcactatgctttcttgctgtagaagaatgcctttacctttctgtaacctgtagaaaatggcattctatctttcaacattgcaaatgatcaaagagacagaggtttttaattaaagttatgtcatgtaaacaacaactagctctttgaacgtcatacacaaataggataaagtgaggttgtggaggaggctttggacaatgcattctctgtgagaggtgagtttttgctccagttaaattgaggatcactccctgtcatgaggttccgctgctgtagcagtgaactttattttcaaagctttgaaactccttgtaatcatcaagagaagaagggtcatctggtgtc

SEQ ID NO: 390613 - DNA, 594 bp, Homo sapiens
ctttttatggctgcatactattccatggtgaatatgtaccacattcttctttatccagtctataattgataggcatttaggttgattccatttttaacacaggaagtaagacccacagttatctcgccattgctactcagtactcagggcctgtgttagcgctgtagaaattacaactgaagacctgatatgtgggaatgagtacaagttgaaactccctaataatccaggcatgccttttgatgtggccttggctctacactctaggaagctacaaagaccatgtgataacaaaagaattcatcatctattccagtaaataaaccagggtgttgaatgatggcccctaaacattctaatttctgcagaaaatcttgaggtggggtttttaaccatatgattctwagaatgaaatctgcccctgcttcctgcccctggaaggctgccaggctctcaccgcagaatgtggccattaaccagcactgatcctcagctaaacatccaaatgtttgtattttgttattattgaaatttatttttattccctatgacttctctgatgttttttgaagttgcaagtctttatgttttcaa

SEQ ID NO: 390614 - DNA, 581 bp, Homo sapiens
ttgcacaggatgatacagcttgatcaccctggcatgtgcctcttcttcacccacattcccctctggaccttaagatcatgccttagtatgaagcytgggatcctgcctcacccttttagggaagagagtgaatgtggtcctaagtaagctctctgggcacttcacctgttctgcctctgccagtctgtctgggtaagtgtcaaggatgtaatagaaggaaaagaggaagacttctaggaacaagagcccattctgtccccttccaagacaagttggagacagagcttctacctttttcagtttccttccagcaggcaatccctgggcctccctcccagtgttaccctatagtcacagtatttacagattgatttaagaaccagtaagtggtgtatgtcacttctgctgatccctgtgttgaaaatattaaaacttctgcacatgtgtcatatatgtaacctagtaccccaaaccttgctgtcacgctctgttaccataaaggatatgctcagaaataatataagcctgctatctaaattgcacctttttctgtcgaagtaacagtataatgtagttgttca

SEQ ID NO: 390615 - DNA, 564 bp, Homo sapiens
ggaacatccttatttctgaagacacagggacacagagaacaatttgaacaaacaggctttgctaaggttttcctagtttattaccatcaaatcatactctttttgccctattatatttctccacaactttccactgttcatcaaatctactacaaaaaaaaaatgcccattcatgttaaaatgcttcttcagatcttcattttcttatgaaggttttcatttcctgtgtgatgtgaaacttatattaaatgaatttgtatacttttctcttattaatctgtcttttgtaatagaggccatgaacttaggagagtagaaggaaaagataattttttccccctattctgggaaaactagattgtaagattttcttgctcacactaatactactaataaaggtaaaakcttagtttcaaatccaagatggattctagcccctgtgattttactcaatattagacaattaaagtagttggacttagagttcagggtagaaataagtaccttcatcaaacaggaaagtcaagagtaaggattaaattttcaaaaagcaaaccattaatt

SEQ ID NO: 390616 - DNA, 527 bp, Homo sapiens
cgttctatgatgccatttgaaacaagaaaagtgggaaaaaggacaaaagtacttgattacctttgcttaatttgatgctaccaggcataagatgcttgtgttagtcagtaatatgttgttgagacaggagagttcctttgacccttttgcagatgggaactagagtgcactggctctgggttcagcctgccactttgctgccaacagggatgaacttcactcactcaaacccactgggctcaacccctcacgggagggagcacacaggcaagtgggtgttggagctggggcaaatgcttttgggctccagccccctggcagcgtctaggggtgtgataaaattaatgctcttttagsagttgctgtccatggcagctaagtgttaaccagcttagtggagagtcagggtgacagcctaatactctgccctcttggttcccaggttcttgttcggcatccaggaagaatcaggtcgcacgaatggtttgaaaggtgatgatgcagaggattttattaggcagtggaag

SEQ ID NO: 390617 - DNA, 522 bp, Homo sapiens
aaatttagttggatcttaaaatgacttgagttaactctagcaatggaaatgtcaatcaaagggcctcgagtcaaggctaaatcgaaactggtctttgactcctaagactggataccatggttattattgcttctattatatttatacatttttcaactccaaatgtagaaataaaaaaccgtaagcctgagtgaacaaatatcagggccaagtacattagtaagttaatttgaagtaaggaaaaagaagttggttctaaatccagagcatttgtaccttgtaaatcaagtctagacattaaggtttctagtgatgcctctctgttttttgttgtttttgttttcttgtggaggcgaaggtggagatgatgtgactctgggtggctttgcaaattcacggaggagaaacagcaagcatgttcttcatgtagttatatygtaagatagaaacattatttctggccattcgattctgacatattttaatctgaaaacatatcaacaaatacattatatctattac

SEQ ID NO: 390618 - DNA, 420 bp, Homo sapiens
cttctgttatgtagtcacatttatttaaatgtatgtaaaatttactcttctagtcaaggttctctacagaaaaagaaccaacaggatgactgtttgtttatttatgttagagaatcagctaatgtgattatggaggctaagttctaaaatcaaatggcaagatgaagatgcaacctgggagagctgatgatacagcttcagcctgaaagccagcacacatgagatccaaatgcyaatgtttcaattcaagtctaaaagtagaaaaagattcatgtctcagctcaacagtcaggcaggtggagttccttcttattcacgaaagtgtcatccttcttgtattatgtaggccttcaaaagattgtatgaggtccacccacatcaaggagggcaatctgctttgctcggtttattgattcaaat

SEQ ID NO: 390619 - DNA, 508 bp, Homo sapiens
ttgtggtgttattaaatagttgaatcacaatatattgaatagtttacaaatttttatttttcctaacgtggccgtatacatatacatacaccacagtttgaccactaagggatatctcttagatgtaaaatcraagtagaatattttaaaatttcttcaggtagactgaggggctgcattgaatatctgaaagagcgtctagaatcatcagtgttttagccagttccactctactccttcctggcttagttaattaacatcaaggatttctacttatttgaatgctagatacaccctaggaagtaattcagttgcacttcgctaatactgcccacaaacgatcacattttcaaactttggcatgcataacaatcatttgggatacttgtttagaatgcagagtcctggaccctagcccaggaaattcttatttgtatatttggggtgagaagcagaattcatagctttttaattttaatttttttgtgtggttatatagtaggtgtat

SEQ ID NO: 390620 - DNA, 508 bp, Homo sapiens
ttgtggtgttattaaatagttgaatcacaatatattgaatagtttacaaatttttatttttcctaacgtggccgtatacatatacatacaccacagtttgaccactaagggatatctcttagatgtaaaatcgaagtagaatattttaaaatttcttcaggtagactgaggggctgcattgaatatctgaaagagcgtctagaatcatcagygttttagccagttccactctactccttcctggcttagttaattaacatcaaggatttctacttatttgaatgctagatacaccctaggaagtaattcagttgcacttcgctaatactgcccacaaacgatcacattttcaaactttggcatgcataacaatcatttgggatacttgtttagaatgcagagtcctggaccctagcccaggaaattcttatttgtatatttggggtgagaagcagaattcatagctttttaattttaatttttttgtgtggttatatagtaggtgtat

SEQ ID NO: 390621 - DNA, 613 bp, Homo sapiens
actaactgtcctggctctatataagctagaaaaatacgcatcttatatttaggggactctgtgaaatcatttaggtggccaatccagttacatacctaattcatctaaaaagcattagtcagtggcacatataaataacttttaaatgtacagtaggtggtaaagaaaatggatgtggtgtacaatttgtattctaaatgcacaaagctattacattagaagaaaatcctacaaaacacttaatggattaaacttgaaaaggagtaatgatgtgaaaaaatatacaggagaaraagcaaattgcatgcaataaggcagaaaataaaattcagtgatatttagatttgtacacagttatctcaaagaagttcccattttctgggaactcataacagagctataaaaatgcaataagggttgaataacttgatcctacaaaattaaaatacatgtgtgtgcatatgcatgtatatctacaccatttagatgaatagtattgaaagccatattttaaccatataccagcatttaaaggaaacacagagcaaataaagtagaaatttattcaaaataattcacagcaactccattacagtattccatgatgagctca

SEQ ID NO: 390622 - DNA, 534 bp, Homo sapiens
ccaactagttaccttccaagtaaggtaaaaatgtcaggcctttcrcaattcttgccactctctcaatatatttttgtgaaaatatactctcgtttttaatttatctctctgactgctcctccctcctccttctttcagctgatcatcttctcagccatctctgaaaaattgatgctactcagggctctgtccacggtcctgctttactttcgtttaatatgctcaccttgacaatcttccttttatctatcatttttattctaatatttgtacccaaatgtttttaagcatatattccagcaaattaatctctttcttgagcttcagacttcttttttcaacttcttaatatatacttttagtataacatgctctagacctatcaaacttaatttcatttaatgtaatctcaattaactcatgttcttaagtggaaaatattgtagtcatcctcaaactccctgagtattttatcaatcacacagctaaatatcttaagcctcatattttctttcacagccattccactctcac

SEQ ID NO: 390623 - DNA, 532 bp, Homo sapiens
ccatgacaaacaacaataaagttaaagacaaaatttgcactaaccttgataaaaactcattgtagcagcagtagactcttacaagctgatcgctgtgggaagcttgagtgtacatggctgctatgattctgaaacctagaagtgtgtcattagctgccacaacactgacaaacaatagcaatgtaccgattttcctcaacctctgtaaagagtagctagtgattgtcaggattgtatttctgatggacaagcaatttattttaatctgggatgtatttgataacagcaaaaaagaagcagcattttatttattgtattgctttttgagcaagtactaamggatccaaacaaataagttaggatctagtgttgaaaaggcaccacattatatgttctaaatggtattagagacagaaatcagttactaactgtgaagaaatccaaactgattactggaaaattgacttgggagcaagagaaactggattctgaaacagaatctaccattatttaactctattgacatggaaca

SEQ ID NO: 390624 - DNA, 513 bp, Homo sapiens
gtgaatggataaagtaaatgtggtacatactcataatgtagtactattccatcataaaaaatgaatgagatcctgtcatttgcaacaatgaatagaactgaagacactatgttaagtgaaagccaggcacagaaagacaaacttttttttcttttttacaagggacaaggtcttgctctgttaccagattggagggcaatggcatgaycattgctcactgcagcatctaatttgtgggctcaagcaaacctcccaccttgtcttcctaagtagcttaggactagaggtatgtgccattatgcctgactaattttttaattttttgtagagacgggatctcgctatgtttcacaggctggtcttgagcttctggcatcaagcaatccaaggagatcttgcaataggcagattagatttgggtgaagagataattaatgaactgaaagatggagctgagagaattttccagaaggcagtacaaagagataaacagatgattagtatcagagtggt

SEQ ID NO: 390625 - DNA, 513 bp, Homo sapiens
gtgaatggataaagtaaatgtggtacatactcataatgtagtactattccatcataaaaaatgaatgagatcctgtcatttgcaacaatgaatagaactgaagacactatgttaagtgaaagccaggcacagaaagacaaacttttttttcttttttacaagggacaaggtcttgctctgttaccagattggagggcaatggcatgaccattgctcactgcagcatctaatttgtgggctcaagcaaacctcccaccttgtcttcctaagtagcttaggactagaggtatgtgccattatgcctgactaattttttaattttttgtagagacgggatctcgctatgtttcacaggctggtcttgagcttctggcatcaagcaatccaaggagatcttgcaataggcagattagatktgggtgaagagataattaatgaactgaaagatggagctgagagaattttccagaaggcagtacaaagagataaacagatgattagtatcagagtggt

SEQ ID NO: 390626 - DNA, 548 bp, Homo sapiens
tcttaaataattatcataaaaaccatcaaaacaccacaaatattcatagtgcatgccttaactttttgtgattcctctattcttagaagcagactatatatttgggatcttagcaaaatgccaaaggaggaggacgaagctgtgttcattatggatttgttataacaytgttccatcataaaattcaagagatattttgcaatgattttttaaaaatatattagtttttatatagttagactgggatagttagacttgggtagtatcttagtctatttgggctagtatcataaaatacaatagactggatggcttatgaacaatagaaatttatttcatacagttctcagtgttggaaagccaagattaggctgccagcacagtcgagttctggggagggccttctttctgatggttttttcaccataatctctcatggtagaagagagcacttttcttttttaaggcactaaacctattagagagtgccttgttctcctaagctaatcatctcccaaggacccgcctcctaataccatcacattggg

SEQ ID NO: 390627 - DNA, 359 bp, Homo sapiens
gatgaaagaaaaaaaaaaggaaaaggaaaacctgccatacgaggatacyatatactgcaaattattcttcataaatgaaggagaaagaaagccttcccagagaagcaaagtgagggaattaatctctactagtctgatcttacaagaaatccacaagggagtccttaacctgttaaaagaggccacttaccatcatgaaaacacacaaaagtaaaaaacttattggttaaccaaacacataaattaggaagataaaaaatctcagatgataacattgtagaaaaccaccaaaccacaatgacaatcagaaggaggagaaaaaggaacaaagaatatataaaataaccagaaaacaatta

SEQ ID NO: 390628 - DNA, 548 bp, Homo sapiens
tcttaaataattatcataaaaaccatcaaaacaccacaaatattcatagtgcatgccttaactttttgtgattcctctattcttagaagcagactatatatttgggatcttagcaaaatgccaaaggaggaggacgaagctgtgttcattatggatttgttataacactgttccatcataaaattcaagagatattttgcaatgattttttaaaaatatattagtttttatatagttagactgggatagttagacttgggtagtatcttagtctatttgggctagtatcataaaatacaatagactggatggcttatgaacaatagaaatttatttcatacagttctcagtgttggaaagccaagattaggctgccagcacagtcgagttctggggagggccttctttctgatggttttttcaccataatctctcatggtagaagagagyacttttcttttttaaggcactaaacctattagagagtgccttgttctcctaagctaatcatctcccaaggacccgcctcctaataccatcacattggg

SEQ ID NO: 390629 - DNA, 626 bp, Homo sapiens
aaggcaatgatcaaaatgacaagatagaaaagtttttctttctttatttctttttattggcctgcagaaccaagactttgggccttttgcgaatgtattaggttggctggcagaacattatatccaggaygccaaaccagtgtaaagacctagtccataacctctaatcttacagacatgaactctattattttccattaaaattagaggttaccaaattgcaacagatgtccttaatagatgtctttattaccggggaacattaggtaaatgaacattgaacccagtattttaagtctcagttcatggaaatacaaagctctatggttggagctagcattttaagctcaaattatagaagcctttagacaattggcattaattgatgcattggcaatttttctaaattgctgcaagtatgaaatagtgggaatttttaaaaaaggaagaatcctagctactctaagaaaactacaatagttgacatcccctaatttataggaactatatagtacatttcagtagcaagaatattttaattaactgctaagagagtaagactgagggtggaaatcttccaatagacctataatgaaaacaagctgaaggatgaataactcaatata

SEQ ID NO: 390630 - DNA, 626 bp, Homo sapiens
aaggcaatgatcaaaatgacaagatagaaaagtttttctttctttatttctttttattggcctgcagaaccaagactttgggccttttgcgaatgtattaggttggctggcagaacattatatccaggacgccaaaccagtgtaaagacctagtccataacctctaatcttacagacatgaactctattattttccattaaaattagaggttaccaaattgcaacagatgtccttaatagatgtctttattaccggggaacattaggtaaatgaacattgaacccagtattttaagtctcagttcatggaaatacaaagctctatggttggagctagcattttaagctcaaattatagaagcctttagacaattggcattaattgatgcattggcaatttttctaaattgctgcaagtatgaaatagtgggaatttttaaaaaaggaagaatcctagctactctaagaaaactacaatakttgacatcccctaatttataggaactatatagtacatttcagtagcaagaatattttaattaactgctaagagagtaagactgagggtggaaatcttccaatagacctataatgaaaacaagctgaaggatgaataactcaatata

SEQ ID NO: 390631 - DNA, 543 bp, Homo sapiens
ccacaaaacaaacaccacaggtattgccacactgtctcagaattgatccaggccacttcacatacgccttcttcatgggatggccaatatatgtttccttcttcccactttcaatctcacytctttataactctcctccacatttagccctgaaccaaaagcatagtctcaccccccacacctttttttttttctggtttttccaatttgacctgggtattttatttcaggacagatatttttgtttttgtgatttttgttgttgttgttgttatttactctctggcctagctcacaaataaccatctttgtttttgcaagtctctttctctgtcagtagagttagacaaagaagagaggtgacaatgtcagagttgaggccatagaagtaggaattgaaagaagaggatggtgaaaaagatgctgctttctgttttcaggatgatgtgttgaagtgagaaaagcacaattagcaagcagaaatggagatgaaaagaaatggaaggctagaacgtagctttcaggattccagctctagtgctt

SEQ ID NO: 390632 - DNA, 543 bp, Homo sapiens
ccacaaaacaaacaccacaggtattgccacactgtctcagaattgatccaggccacttcacatacgccttcttcatgggatggccaatatatgtttccttcttcccactttcaatctcacctctttataactctcctccacatttagccctgaaccaaaagcatagtctcaccccccacacctttttttttttctggtttttccaatttgacctgggtattttatttcaggacagatatttttgtttttgtgatttttgttgttgttgytgttatttactctctggcctagctcacaaataaccatctttgtttttgcaagtctctttctctgtcagtagagttagacaaagaagagaggtgacaatgtcagagttgaggccatagaagtaggaattgaaagaagaggatggtgaaaaagatgctgctttctgttttcaggatgatgtgttgaagtgagaaaagcacaattagcaagcagaaatggagatgaaaagaaatggaaggctagaacgtagctttcaggattccagctctagtgctt

SEQ ID NO: 390633 - DNA, 543 bp, Homo sapiens
ccacaaaacaaacaccacaggtattgccacactgtctcagaattgatccaggccacttcacatacgccttcttcatgggatggccaatatatgtttccttcttcccactttcaatctcacctctttataactctcctccacatttagccctgaaccaaaagcatagtctcaccccccacacctttttttttttctggtttttccaatttgacctgggtattttatttcaggacagatatttttgtttttgtgatttttgttgttgttgttgttatttactctctggcctagctcacaaataaccatctttgtttttgcaagtctctttctctgtcagtagagttagacaaagaagagaggtgacaatgtcagagtygaggccatagaagtaggaattgaaagaagaggatggtgaaaaagatgctgctttctgttttcaggatgatgtgttgaagtgagaaaagcacaattagcaagcagaaatggagatgaaaagaaatggaaggctagaacgtagctttcaggattccagctctagtgctt

SEQ ID NO: 390634 - DNA, 493 bp, Homo sapiens
gctttctgttttcaggatgatgtgttgaagtgagaaaagcacaattagcaagcagaaatggagatgaaaagaaatggaaggctagaacgtagctttcaggattccagctctagtgcttcatataccatggtgctgttttctgagattgggaatatagaaaaagaaagattygggataggaagtgaaagacggttagtttaggtttgacttagaacagacagacttacatcatcttcacaattagctgtgactattcctgtctctatatgcactaagcactacatattttctacagggatgctattgttttcaagctatataaagaaaaccgcaaacaaaacccacttgggtgaactctctctgaccagtgtatatccagttttttccttcacataatctagttatgtgtattttataaaggtatcaattccttgaatttagaaacatagcaaggtcatctgatgttccttgtgtcttttcttttcctaaagga

SEQ ID NO: 390635 - DNA, 553 bp, Homo sapiens
gcatagggcaaagtatgggagaaagaccacagacttcacacacaaggtttgrgagagcttccatgctttctcctctcataccactttccaggaacctccatgtgtccagttattcataagctctccataccaatcctcttgggcctaatggagatttcactggattagcatgattgaagtgtgaactgtgtagaaatgtgattcgacaaacaaggaataatctaatactagtagactgaatgggaaaacccagcaaggcctatctgttcagattcttcttggcctctgcgcaacatttcttcctccaggtatgaagcagggccccttctgaaatgaaggtcttatgatgggcaatcagacaagataggtcagagaatgtccttatggccagctccaagacagaaaagaaggggaggcgtcttgccttgggaagaaaaagtagcaggtgaaaggagagaaggagaggaatagagagagattctgctttctgaggtctaaattgtcccacgggagttgttagctaggaagcgtggatgaaaaccaatacatatat

SEQ ID NO: 390636 - DNA, 553 bp, Homo sapiens
gcatagggcaaagtatgggagaaagaccacagacttcacacacaaggtttgggagagcttccatgctttctcctctcataccacyttccaggaacctccatgtgtccagttattcataagctctccataccaatcctcttgggcctaatggagatttcactggattagcatgattgaagtgtgaactgtgtagaaatgtgattcgacaaacaaggaataatctaatactagtagactgaatgggaaaacccagcaaggcctatctgttcagattcttcttggcctctgcgcaacatttcttcctccaggtatgaagcagggccccttctgaaatgaaggtcttatgatgggcaatcagacaagataggtcagagaatgtccttatggccagctccaagacagaaaagaaggggaggcgtcttgccttgggaagaaaaagtagcaggtgaaaggagagaaggagaggaatagagagagattctgctttctgaggtctaaattgtcccacgggagttgttagctaggaagcgtggatgaaaaccaatacatatat

SEQ ID NO: 390637 - DNA, 598 bp, Homo sapiens
tattttttcttatttctacttacgattttttttcaagttgacttagtttttttccaggggtaaagggttcaataatttgagagaagcttcatcctgtgccgctgcgttgttcaatggagtagccacatttaaataaccacaggtggctatttaaagtaaaatttaaayaaattaaaattagagagagttaaaaattcagttcctcatttacactagacacattttaaatattcaatagccacatgtgcctagtggctactgtattgtgagtgcatttctgtgatggagaaagttctcttggacagcatgtaaatctaaagcgtaaagaattttagaggttttctgatggtaatatgtatgaaatatataaatgatatcacagagaaatgggtaactctcaaaaagacgtggtaacatcatagtgaaaagcaggagaggttatagaatgctaaatgcacattttttccttaataaaaatattcatgaccttatgaattgaattatgctaaatttctatataatgttgtgtgctattgtgagatgattttctctgcaatgatattagtcaaaagcatattttttgctataagttttaaac

SEQ ID NO: 390638 - DNA, 598 bp, Homo sapiens
tattttttcttatttctacttacgattttttttcaagttgacttagtttttttccaggggtaaagggttcaataatttgagagaagcttcatcctgtgccgctgcgttgttcaatggagtagccacatttaaataaccacaggtggctatttaaagtaaaatttaaacaaattaaaattagagagagttaaaaattcagttcctcatttacactagacacattttaaatattcaatagccacatgtgcctagtggctactgtattgtgagtgcatttctgtgatggagaaagttctcttggacagcatgtaaatctaaagcgtaaagaattttagaggttttctgatggtaatatgtatgaaatatataaatgatatcacagagaaatgggtaactctcaaaamgacgtggtaacatcatagtgaaaagcaggagaggttatagaatgctaaatgcacattttttccttaataaaaatattcatgaccttatgaattgaattatgctaaatttctatataatgttgtgtgctattgtgagatgattttctctgcaatgatattagtcaaaagcatattttttgctataagttttaaac

SEQ ID NO: 390639 - DNA, 605 bp, Homo sapiens
aaaactatttattctttgtaatacggctatatcagatacagtctagcttaatctttaattcacataaattcacttctgagtgagtaaggtaagtaggtacttagacagacaggtaggtatgtaggtggatagataaacagtcagatagatggattagaaaaaaatgtattacctggctaaaataaggaattgccccttcaaaattcctgaacaaaagaagaagctcttttcactttgctctcagggaaatcactcttagaagctataaatcttgaaatgaccctttgtttatgaccctggagatgtttttacctgrgaaatgcagaaaatatcatccaggtggatgacaaaatagacaaggataattatgaaaggagttttgggaaaggagacctgtagaaagcaaattgttctcagaaagatttattttaggggaaatatatatagaaatggaagatctagaaatgtatttcattagaaatatctatgacctcatactgtatatcctagaatgtcctcccgtggccaagaggttaaggcatcttagtttgcagaccacttgcattgacaagaaaatgctgctatctaaaaatactttatataaa

SEQ ID NO: 390640 - DNA, 623 bp, Homo sapiens
ttggttattgttgcctttatctttctttctttttctacttctgaacaaatatcctatcccacttcctgctaatgttaaggtagaggttagagggtaaaatatacactcgcaactctgtaaaacaagtaaggcaccagatattcagttttggattatcatatcaaactgaagtcagctcattaatctactattttctccctaagattccaaatcgacactcttacgcaatttagtagttaccaaaatgattaataggtttctctggtgctaacctaattgctatgacactaaagacaagaacattacaaaagataaagcattgaggtgagaattacctccctyctaggcaacaatcagcagttcaaggcaattcgccagcttctttgagcaacgaacaaattactgtcaccaactatggttttcgcctttctggattcaaatggaagatgttattaacaaaccctcatgaccaggtcactattttctgtcttatccaaagcttatgttataaaatttctcctccggaaaaaaaaaaattcattaaaaaaattctaattagtattcttacatttcactttcacatagcatcatatttccatatgtgccatagactgagttttact

SEQ ID NO: 390641 - DNA, 629 bp, Homo sapiens
ttttatccttttttgagaaagcaaccacaaaattttgaccttatgaagtatctttgaaactttccaaagctgattagaatagcgttgatgtattttaatcagatacagaaagactttacaaagtatgagctgcacacttgctgtcgtaatgcttataagcactaatttttttgtatacattcatgtacttgtaattgcacaaaatgcgaaggacacatttggcrgtgaggatgctgtgcacaatcaactcctaatcattttcaggaaaggataaacattccgctaaaaatgaggaaagacaagaaatgttcaaaagcatgtcaaaagtgtccagctgttttcatagaatataggtgatttcctggtgctagcaaaatccagaagaaacgttataataactagaaatgtctataattgtgaggaagcccaagtatgaagattcacaaaaatagaataagtggatgaaattagttaaaacaaccttcttagtaatgaggtactctgattataaaagtactttgactctttagaatgtgtcactgaacaccaagctgaaaaaacaaattaacagtctgtcactagagcatgatctcccacagacaatatgctcataaatgaaaagacagaga

SEQ ID NO: 390642 - DNA, 596 bp, Homo sapiens
ggccttataacctactttaaaggaagaacagggaattcttttatggcctatttcaggggaaaagggtctgggaatatcagagtgaccttccggcttctactgtttttctcaatgccatatttcagggtagcgtggttctggaccccaacaacattgtatttgtaagccttattttctatgtttaaagcaaaatgtatttaaaatattttaaacagaggctcaacaaattccctaatagcactagaaaataattatttcacttttaaagggcttgtaagagcttaataaaccaattttcaaaaacaaatatatacagaattcacaaatgaaaatgaataagaatataatactaataacacacttactagaaaacagygatgcattagacacatcttgacaggttgcaagctctttaatttttttaatattttttcttttctttccttccttccttccttctttccttccttccttcctttcttttgctccttttccccttccttccttcctccccacttccttctttctttgaattacttcctctcaaatttttttctatactatgccaagccaatcatagagaaaagtttctataa

SEQ ID NO: 390643 - DNA, 529 bp, Homo sapiens
tgctgtaactggcctacaaattttgctcttgggtagaaaatagaagaacacctagaaaatgcataattcatctttattcattcggtcattcaacaaatatttgcagagttcctttctcctgccagcgacagtgccaggtgcctgatatatgataatgaacaaaagaaacaggacctctgtccccatgaagttcagaatgatattcagccaataaacacacacacacacayacacacaccccttcaagtcacgtcttgcagagagaagttctataaaatgaattaatacaacacagtttatgttcaagtgtttagtctaggaatgaagtctggaattttaccaggcacatgccacccactgtgtgctcctaacaacctttaactcgtatggccacatttgagtttcttttgttgtttagaatgtgtaaaaagctgatatttggaaacgttcatagaaactcaagcaataaacaaatacataatattgtatagagattttcaccacctctagtccgaacttagatgtttaa

SEQ ID NO: 390644 - DNA, 529 bp, Homo sapiens
tgctgtaactggcctacaaattttgctcttgggtagaaaatagaagaacacctagaaaatgcataattcatctttattcattcggtcattcaacaaatatttgcagagttcctttctcctgccagcgacagtgccaggtgcctgatatatgataatgaacaaaagaaacaggacctctgtccccatgaagttcagaatgatattcagccaataaacacacacacacacacacacacaccccttcaagtcacgtcttgcagagagaagttctataaaatgaattaatacaacacagtttatgttcaagtgtttagtctaggaatgaagtctggaattttaccaggcacatgccacccactgtgtgctcctaacaacctttaactcgtatggccacatttgagtttcttttgttgtttagaatgtgtaaaaagctgatatttggaaaygttcatagaaactcaagcaataaacaaatacataatattgtatagagattttcaccacctctagtccgaacttagatgtttaa

SEQ ID NO: 390645 - DNA, 545 bp, Homo sapiens
caggggtggtgattcccaccacagtccattcaactcatctatttggactacatagaagacagagagagattggagaattacaaaaatattatttcaagctttactaggtggtgatcccaactgcagctgctgtaccagatgtgatttcattgattgagcaaatttccacactccgtggtatctggtatgcagctattaatctggaaaatgccttttttcccccatacctatcaataaggttcactagaaacagtttacccttaagctggcaaggccagcaatgcaccttcactatcctaccccaggggcatctctactttccagccctgtgtcgtgatttagttttcatggatcttgattgattgtctttcctttccacaagatatcacgttataaaatgtctgctacactgattatattatgcttatctccctagcggacacaaagtagcaatcactttagatttactagtaggatatgtgcaaktgtgtataaaaatatatccaacaaaaattcaggggccttctacctcagtgaaatttgta

SEQ ID NO: 390646 - DNA, 545 bp, Homo sapiens
caggggtggtgattcccaccacagtccattcaactcatctatttggactacatagaagacagagagagattggagaattacaaaaatattatttcaagctttactaggtggtgatcccaactgcagctgctgtaccagatgtgatttcattgattgagcaaatttccacactccgtggtatctggtatgcagctattaatctggaaaatgccttttttcccccatacctatcaataaggttcactagaaacagtttacccttaagctggcaaggccagcaatgcaccttcactatcctaccccaggggcatctctactttccagccctgtgtcgtgatttagttttcatggatcttgattgattgtctttcctttccacaagatatcacgttataaaatgtctgctacactgattatattatgcttatctccctagcggacacaaagtagcaatcactttagatttactagtaggatatgtgcaatwgtgtataaaaatatatccaacaaaaattcaggggccttctacctcagtgaaatttgta

SEQ ID NO: 390647 - DNA, 545 bp, Homo sapiens
caggggtggtgattcccaccacagtccattcaactcatctatttggactacatagaagacagagagagattggagaattacaaaaatattatttcaagctttactaggtggtgatcccaactgcagctgctgtaccagatgtgatttcattgattgagcaaatttccacactccgtggtatctggtatgcagctattaatctggaaaatgccttttttcccccatacctatcaataaggttcactagaaacagtttacccttaagctggcaaggccagcaatgcaccttcactatcctaccccaggggcatctctactttccagccctgtgtcgtgatttagttttcatggatcttgattgattgtctttcctttccacaagatatcacgttataaaatgtctgctacactgattatattatgcttatctccctagcggacacaaagtagcaatcactttagatttactagtaggatatgtgcaattgtgtakaaaaatatatccaacaaaaattcaggggccttctacctcagtgaaatttgta

SEQ ID NO: 390648 - DNA, 594 bp, Homo sapiens
gggcaggtgttgaggcttaggagcctccacctagatttcaaagaatgcatgcaaactcctgcatgtcctggcagaagcctgctctatgtgtggaggcctgatggaaaacctctatgacagcagtgtggaagggaaatatgggattagaaccttcatacagagtccccactgggcactgccaagtggagctrtgagaagatatctactgccctccagaccccagaataccagatcctctgatggcttgcactgtgtgcctggaaaagcttcaaggactgactgtcagccaatgaaaacagctgagagggctgtgacctgcaaagccacaggagaagagctgtccaaggccttgggagcccacccattgcatcagtttaaatgtgagagatggagtcaaagggtattattttggagctttaagatttaatgattgccttgctgggttatggacttgcatggggcctgtagcccctttgttttgacggatttctcccttttgtaatgagtgcatttaccccactcccatatacccattatatcttaaaagtaactaacttgtttttgatggtataggctcataaacagaaggaacta

SEQ ID NO: 390649 - DNA, 594 bp, Homo sapiens
gggcaggtgttgaggcttaggagcctccacctagatttcaaagaatgcatgcaaactcctgcatgtcctggcagaagcctgctctatgtgtggaggcctgatggaaaacctctatgacagcagtgtggaagggaaatatgggattagaaccttcatacagagtccccactgggcactgccaagtggagctgtgagaagatatcyactgccctccagaccccagaataccagatcctctgatggcttgcactgtgtgcctggaaaagcttcaaggactgactgtcagccaatgaaaacagctgagagggctgtgacctgcaaagccacaggagaagagctgtccaaggccttgggagcccacccattgcatcagtttaaatgtgagagatggagtcaaagggtattattttggagctttaagatttaatgattgccttgctgggttatggacttgcatggggcctgtagcccctttgttttgacggatttctcccttttgtaatgagtgcatttaccccactcccatatacccattatatcttaaaagtaactaacttgtttttgatggtataggctcataaacagaaggaacta

SEQ ID NO: 390650 - DNA, 505 bp, Homo sapiens
taatgactcaaattgcaaagctgctgaatttttagttgaaaaggaagtaagatatccattggcccaacccacgtatgtgctacacatttcaaagtcgtatcgtgagaygataataaataatagttttttttgttttcaaattaattgccagaatgctgtctcatatccagtttcttaaaatctagctcattttttcatggaaatagtgttattactagcaaattatagcttattttgatcaagctgttttaaatattttatatccattaacttattaattcctggcaataaccttagaattcattggtaagccaatttgtagtatcttcaaacacagtaaccatctcatatagtcttctgtttttcagttaaaaatttaacacctgcaatgtgtcagataggcattatgtaccagatgacataatacaaactaggatatctgtctctatatagcttaattctagatgggcagaaaaatatggacatttaagaaaagtagtaccag

SEQ ID NO: 390651 - DNA, 505 bp, Homo sapiens
taatgactcaaattgcaaagctgctgaatttttagttgaaaaggaagtaagatatccattggcccaacccacgtatgtgctacacatttcaaagtcgtatcgtgagacgataataaataatagttttttttgttttcaaattaattgccagaatgctgtctcatatccagtttcttaaaatctagctcattttttcatggaaatagtgttattactagcaaattatagcttattttgatcaagctgttttaaatattttatatccattaacttattaattcctggcaataaccttagaattcattggtaagccaatttgtagtatcttcaaacacagtaaccatctcatatagtcttctgtttttcagttaaaaatttaacacctgcaatgtgtcagataggmattatgtaccagatgacataatacaaactaggatatctgtctctatatagcttaattctagatgggcagaaaaatatggacatttaagaaaagtagtaccag

SEQ ID NO: 390652 - DNA, 598 bp, Homo sapiens
aaatagttccaggtaataaaggcaagctctaggttaccaaagaaagtcagaatgtagaaggaatgatatatttataattgttttgcaattcttattgaaattactgactcatgtaagggttttcaataagtgttaaagcataaggtttatgtttgaaggggaactggacatctgtgtagtatcaaagcaatgccatacaaattacttaccatagtttacaatggagggatgagcctgtcatcatatcatcaattcagctgtcattctaaatatcaatagttgtacattaatcaaatagcatgaaagatactatataaaaawatataacctgtaagtattctagccctaaatgtttaacttgaattcgcctgaaatctttatatctatcttacttgtttcaaagaaagatttcaaataaatatttcaaaaagccatttttacacccaaaatcatagataagatgttctgggttgctaagcaacactgtgaaggcaaaagaataataataaggacatgtgtgcattactgcatcatccttagatgtaagttttgtttttgtttttatttttagagccagtcccctctttctctgttgccc

SEQ ID NO: 390653 - DNA, 598 bp, Homo sapiens
aaatagttccaggtaataaaggcaagctctaggttaccaaagaaagtcagaatgtagaaggaatgatatatttataattgttttgcaattcttattgaaattactgactcatgtaagggttttcaataagtgttaaagcataaggtttatgtttgaaggggaactggacatctgtgtagtatcaaagcaatgccatacaaattacttaccatagtttacaatggagggatgagcctgtcatcatatcatcaattcagctgtcattctaaatatcaatagttgtacattaatcaaatagcatgaaagatactatataaaaatatataacctgtaagtattctagccctaaatgtttaacttgaattcgcctgaaatctttatatctatcttacwtgtttcaaagaaagatttcaaataaatatttcaaaaagccatttttacacccaaaatcatagataagatgttctgggttgctaagcaacactgtgaaggcaaaagaataataataaggacatgtgtgcattactgcatcatccttagatgtaagttttgtttttgtttttatttttagagccagtcccctctttctctgttgccc

SEQ ID NO: 390654 - DNA, 521 bp, Homo sapiens
tttcattaactgatccctaatactgggaaatgcatttaaattccatgagtccttatttcctattctttcccacaccatatttaaaagatgagtgttttcatttctgtaacataggcttgctgtgtgtgaggattctcaggggctgggcatcagtgctacttgaagaaaaactaatttgatttttatgttctcttggggaagtggaaaactctgcaaaatttcattttgtgaagaaagcaaactcatttctsggtgcatgtccaaataatatttattttgtctgatatgtttgagtggtatcttctggattttagaggtttgcctggttctaggggtttttgtatgatatgtagtccaggcctgggtaacaccaaggtttctcatgctaatgtgggctcacagtgattgaaactgtaagagcagactggagcagggaacagggaggactaaagcagctgtgggctgtgtagacatttctctctcttcacatagcctctgactttctccatttggtctttctg

SEQ ID NO: 390655 - DNA, 562 bp, Homo sapiens
cccttttctagagaaacccagagatgtaaaaaattgtactacatttctcagagtgttttaacatagatcagcatcacaggctatctattcttcagatataaattatacatgttaagtgttatatggtataaagtggacattttaaagctagaaataaaatggagtgtatgacagaatcctactcgaagaaatgattatagggaaggtactaggtcagacagttccccattctggtcagcaggtggcactagagtagcttggatgccaaatggaacaaagggyaaaaatagatctggatcaaaacaaactttgggtgaaagtgcaggagaggcaggtgactggttgtttacatttcaatatgtcttatctctctttctaaattgttcattgtttgaagtgaggcacacttctaggtacaactaaaagttgtactgaacctttctgtgccttggactcttacctgaaaatggatacaataataatgcctacctcatagcattattgtgagaacaatgaattaatgcatgtcagtgcaacagtgcagattgcagagtaagtgttc

SEQ ID NO: 390656 - DNA, 620 bp, Homo sapiens
ttattgttttccaaagggctttatctttgataatcaaatcattctcttttgaagtgcctaatcatcatctctgtttattttatcttagtacatgctcatcaggcctaacttcctcatttgtcaatggcttttatgtgatccagtagttttccaacattagttcacttatttcatcaaacacatattatttttcaaagctcacaatccacttagagtcaatttccattacacttgtggatattcatatgcaacattcaggaaagagctgactgacaagcacattgacaggatgggtggggagggaagccagtgttaagctggaggatgtttgggtggggataaatttgataagtggccaggttgttagtgaacatgtctataataggatgactattgctgtcttgggtaacatgrtaactgggcaggcaggcaaataaaatccagataacaataacctaaaagtgaagatgattatctctgggcagtaaaagtccaggcaatttttatttccttcattgtgcttatctgtaatttctaaattttctagaatgaatgcatgttatttttgcaatcagaaaaaaactctgttatttaacaatttaaaaaattgagatatcatt

SEQ ID NO: 390657 - DNA, 547 bp, Homo sapiens
cccaaaaccttcccacacccaaaccttgaagctgatattttgatctttatccatctgactcttattaccatctctcaattgattctgaacaatctcctatgatgaaagatgaggatttaagtggggcatggtggctcatacctgtaatcccagcactctgggaggccgaggtgggtggatcacctgaggtcagaagttcaagaccagcctggtcaacatggtgaaaccccatctctactaaatatacaaaaattagccgggcatggtggcatgtgcctgtaatcccagctactaaggaggctgaggcaggacaattgcttgaacccgggaggcagaggttgcagtgagccgagatcrtgccactgagctccagcctgggcaacaagaacaaaacttcatctcaaaaaaaaagaaagatgaggatttaagtctgtttctctccccacactctccacttacatacatgcgtgcttttccaatctgcatgcctcaaatatagttatacaatcagtattgaattaaattagtattaaataattacatgatt

SEQ ID NO: 390658 - DNA, 582 bp, Homo sapiens
gtttagttttttgaccggactgtaactgaaatgttttcatcagaaaactcaggtccttaaattctgggaaattggtttgtacgtctctaatgctcttccttacatattgcatctgtttgtcttgtttgtgtgtgtgcgtgttttgttttcttgtcttgttcgtgtgtgtgtgtgtgtgttgtgtgttttgggttttttttgtttgtttgtttttaagacagggtctcactctgttgcccaggctgaagtgtaatggtgcaatcatagttcactgcagcctcaaacctctgggctcaaggaatcctcctgcctcagcctcctgagtagctgggactctaggtgtgcaccaccatgcctggcttattttgctatgttgcccaggctggtcttgaactcctggccgcaagtgatctgcccccttggcctcccaaagtgctgggatgacaggcatgagycactgcatctggcatctgtttatctttttgttctttctgggaaatacacttgaccgtatattcaagcttccttttgatttttcatttctaccatcttattttttaatgttgaagacctttagactat

SEQ ID NO: 390659 - DNA, 524 bp, Homo sapiens
atatttattaggactggtataaaactgtgacaagtagaaataaagcattgagtttgttagaagggaaaaatcattttagtctgaggttatttggaaattcaataattaaaaaaaaaattgacatgggcttgaagaatggtaaaggttcagagaaaaatgaaagaagaaaaaaatattccaagtgaagaaaaatagtaagagcaaggtyaaacatgagactgcctaaaatttgaaaggatgcataaatctacttacaactaatgaaataaattagtttttcattattacattggtaaaaactaaaaagtatgctaaaatccatcatgggagagaatgtggggaaacagatattctcatgtacttttgttatgagaatataaatcaggacaattttttgaaggacaattaaaaatatgtatgttttaatccagcaatttcaagactagaaattttcccacagatatacaaatgcccagaaatatataaacaattccaacacagtaataaatctgatgaaaaaaact

SEQ ID NO: 390660 - DNA, 607 bp, Homo sapiens
tgtatttcaaaatattaaaacctatgtgatgggaaatatgttaatgaaaatacaaaaatgatcccatcctaaatataaagccagaaaagtgaatgacagattgcatccatttggtaagtagctcctaaatactgaaggggttaaatactgttgctggatgcctgactgtctcctttttcagtccaaaagagtgagaaccatctacggtgttcctcagcctacaaagtaccagtgatccaccctgcctccaatgctagtttaggagaggcagccttgcatagatactaggagcacagactctggatccagatcacctgggttcaaatcttcgctccaccattaaccttatgcttcagttcccatgccctgtaatatggagataaaaaccatagcttaaaattatatgagttaatttgaaagaacttagaccacttactggcaattasgaagcactaaaaaattttgacaattataaacaaataaaggctatttaataaaaagaaaaatgctttataaatcttgtaggaaagacacgtctaacaaacaaattagtgtcttcctaaaaaaagacaataaaaccagttcagtgtttaataagaacagtgag

SEQ ID NO: 390661 - DNA, 585 bp, Homo sapiens
aatcaccatccaaacagcctcatcctaactccacaacaccatgttgatcacgattccctggagcttggcatgtgagtggtgctcttctgataggaagagctgatccacgctatcatcttcagagaaaaataaaatagagtrcaatgatatgcccaacttctctacaggaaatccaacatggccaagtattttttttccacagtagaaaacttgaatttaaattagattttttacataagcagcacaatgaccaaagaccactgactgagatgaaaacagaaaaacacacgtcaaggaaaacactatgatatccagaagcctagaaaaaatatgacactggtgtggcatcaaattccagatcaaattaagtgcactggtggcaagcatccataacttcctaaatggaagtcggagctaaagtgttcaaaaacaccagagctggcatcttcatttatcttgagagtttcccccacatatcgtactgaagataaaatacaatgagatcataacccttcaaaagcgtagcttattgtgcaatatttttctccagtggttaatggtgattctcacagattggaacagaaa

SEQ ID NO: 390662 - DNA, 546 bp, Homo sapiens
tacatgcatttatataggtggatattctatctttctgtttattcaactctatctacatatattacatatatgtgtgtaaatatatatatgtgtgtgtatatatatatatatatatacaactctatctatctatctatctatctatctatctatctatctatccatccatccatccaattgacccagaattgtggtcacagcaaggcagatactcttaaacattagtgctgtcctctggacatgtacatccagataactatgttacaggaaatacaatttcagtcttctgagcttggctcaccccacaacctgacagtcatgctgtgctgcgctatttttatgtttaatatgtactccttgaagatgatactatgaaattccactgtaacactgatagtgttcaaatgctcactttaagaaaggttakatgccaggaaggaagtgataccgaatcctacagtgcaggaaagcagctacattggtttcggtcttggtgctatttgaatacctcaccttccttttctgttctcttctacatctcataga

SEQ ID NO: 390663 - DNA, 587 bp, Homo sapiens
gttcttaatctttctgaacgttagttttcttttctggaaaaaggtgcaataacactttattggtaatttgtgtttttctggcacagaagaagtcatcaacaagtgattatagtattttatggaacctaccactttccaactcataacatttacttttgaatgctgttggttgtctttcctacctcatccaaatacgagctccattgcttatctgatttgtttgttgatgggtccgcagttccaagaagaatgtgtcrtacacagcaggcatttaataaatagcttttgggtgaaggaatgaactttccaaatgaactgatagactttataaaagctgttgtgtgtcttctatctgtaatccaggaagattggtcatagatttgccaaggaagagagagaatagtggcaagttgtgtttgtctgtaagttgaggaccactgctggcaagtcagttgattttatctgtggttccttcttacaatgcatatattgaataagaatatccactcatgattgtaggactaccaggtttaccttcaaggcattagggcatcatgccccttttgaatgggtaaaatgttagtggt

SEQ ID NO: 390664 - DNA, 533 bp, Homo sapiens
cacatgctatagatgtcctgaatcttctggagtaggaaaagtctataatttaaatgggtgaaatgtcaggtactgttcagctctcagctcctggcatattcacgggcatcccactctgtactcaactggacttggtgagcacaactgcgatcacattaaatgagaaaagaaagctatgtttgggttgacaaargtaatttttgggtcagtgaaatttcacgaggcactgaaactctttatgttttgttgactgaaacatcagtttgattttagtgaaacaaaagtggtttggagatgtgatttccattttgtgctctcattggggatctgactgatcccaggtctccaaggcctgcgacagacagatgtgtgtgtgcataagaaatcttggtccccctgttagggatgtgctctttgtttagatatcgaggacaagtcaatggtcaggggcatcttcacattggaatcttgtcagtggcctttctgtgatttcctggtctaagtatctgactttttgtgaagcctcacagctt

SEQ ID NO: 390665 - DNA, 513 bp, Homo sapiens
  misc_feature (1)...(513): n = A,T,C or G
tgagttcttgcagcttttccaggtgcacagtgcaagctgtcattggatctaccattctggggtctggagaatggtggccctcttctcacagctctactaggcaatgcccagcngggattctgtatggggcctccaaccccacactgcccctctgcattgcctgagtagagrttctccatgagggctctgcactgcagctgacttatgcctcgacatccaggtgtttccatacatcctctgaaatacatgcggaggttctcaaagctcaactcttgttttctgtgcacctgaaggctgaacaccacgtggaagctgccaagtcttcttggcagaaggaagctaccttctgaagcaatagcccaagctgtaccttggcccctatagtcatgtctgtagctggagtggctgggatacagcgcatcatgtcccaaggctgcacagagcacagggaccctgggcccaggaaggtccctcatgggcctccaggcctgtgatgggagggcctgccatgta

SEQ ID NO: 390666 - DNA, 540 bp, Homo sapiens
gtgtacatgtatagagttaattgtagtgaacatgtggttacagcaaataaggacacaattttctatgttgtagaccagtggagacaagtgtgtagcaacwcatacacggggccttattcgactggtacaaacttgtgtttgatttattagagcatgctgaagacagtgtgctgaccttctcagagatattgatatggagggaatggtgacagttgggagcagaagcagctgcttattaggactgtgttgagcttaactagcaaccccaggctgattctcatctttaaattttttaaggaaaactcctataggacaaaaacattgcccagaaaatccccataggatgagagtcttgcctagtggtcaaggcattaatttatggaaagatgcttgctaacgatttatagaactgtgattttggggaacataactattttgtgatctgaaatcctgttttgacagcacgtcccacattatattcctgtgctttggcaatggtggaatgagggtgattcttttaggagctgagaagaggaccac

SEQ ID NO: 390667 - DNA, 540 bp, Homo sapiens
gtgtacatgtatagagttaattgtagtgaacatgtggttacagcaaataaggacacaattttctatgttgtagaccagtggagacaagtgtgtagcaacacatacacggggccttattcgactggkacaaacttgtgtttgatttattagagcatgctgaagacagtgtgctgaccttctcagagatattgatatggagggaatggtgacagttgggagcagaagcagctgcttattaggactgtgttgagcttaactagcaaccccaggctgattctcatctttaaattttttaaggaaaactcctataggacaaaaacattgcccagaaaatccccataggatgagagtcttgcctagtggtcaaggcattaatttatggaaagatgcttgctaacgatttatagaactgtgattttggggaacataactattttgtgatctgaaatcctgttttgacagcacgtcccacattatattcctgtgctttggcaatggtggaatgagggtgattcttttaggagctgagaagaggaccac

SEQ ID NO: 390668 - DNA, 509 bp, Homo sapiens
ctcttcttgcctctgaacattgccgttaatacttgaaaagaaaaaaaaaaaagcaaaaaaactcttggcatatagagctaagcagtgggaagaagatagctttctaaaccatgacccaataggtctgataacataacatttaactggataaattacataattttgtatatatgtaggggggagttgaattcagttttgctgtttacaggctgcaccaatgcattgttaaaagatgtatattttagtgataattgtgataattaattacaaaataattgctaataagcaggtaaataarccaaattataatttagagtgcatcctttgtttaaagtgaaatggatctaaattgaggatataattttgagttttaatctggggaaagttctttaacttttctgagctacagtctcttcacctggagcttagacacaccagcctggcaggggtatgtcagctgtctgcttgaaaggagaaagacagtaatctgtgtgaaatactcaccgagc

SEQ ID NO: 390669 - DNA, 592 bp, Homo sapiens
tggttttcaatcagagaaatatgtcagagttcattgaaaacataccactacagcaaaaggaaaaaggaaggctgatgaggtaagagaaagcactggaccgcgatccaatttacagacttgaaagggcaggctgggttggtctgagctgggtctcagagyggttttggcccttgctggtttcagcacttaattgtgtggatttcgtaatacttcacagttacggttttctagttcttggcttcagcacatgcatggtgatgggaaacatatctaaggaatttttccttctattaagacatggagggctcagtggcaagctgtaaaagactttcttcagcattaattatgtggttagagaaaataaatgagcaaattagagaattagcaccaaattaaaacgaagctggattggacacagcagctagttcagattgtttttgcattttggtgataaaaagatttttcttgcttgtcaacccagcattgaacaatgaaaagtttagggacatacttcgctgttgatgccatctgaagaaaacagtattaaacttaagattttttgttttttaatttggtcaatccatcaacaatg

SEQ ID NO: 390670 - DNA, 567 bp, Homo sapiens
ttctgttccagcttctctgatgagttttatttactttatagagattttatatacctattttgatacatgcctggcttgtgttcagtgaaattcattgaaaggaccagcgataaactttataaatgctaggctttgagggaaactcaaaatacaggaatgtttcagaaacatgtacattattatggctctgtaatctgacttttgttgagcatatggagcttttgttgtctatgkataacaaaaacattgtcacataatatctgctaccacttgtcttccctatcctgtaactgtggatactcaacagggtaaacatacacagaaacttattaatttatgcaatgatttcaagcattcattcttaccctctcttctaaatctgtcttcttctacgcccttttagcccccagcaggccttatcattcttttcaattaatactattttaaggcgtaaggtctttcgttatgaagtcttgctggaatataccagaaggctttgcccaatatgccagtgtataacagcccgtttatgtgactcctagctccatcttgctcaatactctgtac

SEQ ID NO: 390671 - DNA, 596 bp, Homo sapiens
tctataaaacatgaaacaaacgtttaggtggaattcacattcctgagcaagttgcctgcatgccgtaatgcgaaaatgagatgctattttcttctttaggccttggtgcccatcttggacgatgaaagacctgacaggtcattgggactgattcaggaggatttaaaagtcttctttttcatgtgttcaaagaagcgaacattctaaaatgactccagagcattcactaggtttaagccagaatagaacatcagagtttgtcttccaaggcaaaacrcaattggcttggcccagatcattgtataccatgtaaaacagtgacactagggcttaggtatctaaaataagtgaagtcacagagagcccaatatgcacattggattggcttgcacgggtttatactaatcttctttccattactgagttgaaggagcacatcctttcatttctcttttctgagtgtgtagctagaaaattctaaaaatctactgcctgttctgtttttaggaaaatatttttctgaacaatttaaccaattgccatttcactaataattcattgtgaatttcacagttagccaacttttatgggataaa

SEQ ID NO: 390672 - DNA, 539 bp, Homo sapiens
ttttttttttttaatggcacgagagatatttaccraagggattctttattaaatgttcttgataaatatgtggaattatttctagatcaaatattagctggttcctaatgagattgtttctgatttggggaaaagcgattccaaaggctgaattccttgagggcagagacctcccatgtcattgtggtgttatgcacgtcattcagcacaacatccagcatgctaaactgggatgcaggaaaattctctgattggaggttcaagctgatgtggaaagtaaggccatttatttgcttattggaatgcaatattattggatatctataacgatctgattgtaaatatgtgtgtgtgttttctttctctgtgcatttattttgtcccacattttgtgtaaggtctctaatgtgtaagccatgggtgtttgcatcagtgctgtccctgctagagacaccacttcattcagaacctgtttgtctgtgcacagcttggctggggtcctgcacagattctgtattcaggccggtgcgggcaaacca

SEQ ID NO: 390673 - DNA, 625 bp, Homo sapiens
gggggctctgcttctggacctgcaagaatcattgtctgttcctctagcttggctccaactcaaggcctctgctttgtcactatcatttctgttcctgagtgcacgttcccaggcacacatgggtgtgttggtgagcaccctgtcttccccaggcaagggctgaccctcaggagcagaaagtcccaacatggctcacttggctgacaagcccccaggctgttaaartatctttttcactatttatgtaaacacaggcacagtaacaaccctttcgggtggacacccttgaatcctgctgctgagactgatttcctgtttagacatcaaactctgtaggaagctgtgttttcccccaagccaagagagctctgtcctgtgggtattgcttttccacaaggaaggggctgggttttggagtctgttggttgcaccaggactgtctggcggtccaggctgtgggctgtccatgctggattcggcagggatgtcttcttcctgcagtatttgctctctggttgtgttactgattgtgaattcttgcaatgatctttttggccccagtctctttcatttaagagactgacccatattctgcaggtgtggttttgctgtccagctgagggtt

SEQ ID NO: 390674 - DNA, 615 bp, Homo sapiens
accttacctctgtacctctttacaatattagcacttccattaaaatgccatccaagttcccttttcttctatgactctgccattcgttgtcacagatgttttatccctcttttaaaattctcttaacatctggtccaaatataaagattcccatggttttgaaaaatgtcctttctaaatgtcataattgtccaattaatggtcaaagggatgaagggattactatagccagacagacttaaaaaaaggggggtcccctgggcctggaaacatgaaagcagacggaagatatcaccaaatgtatgaaccctgagggggtcagataagttattccagcacagataattcactggaaccacttgaaatgtcaaaggacaaaaaaggaggatattataattcacaccagaaagaaacttactgaattaataattttaggttaagaaatacaaataccttaaaatattatcagataaatttacagtaaatagactgctaataaacttagataaactatttagcagaaaggcttctgatctgatgttttcagattttagtcaggaataacacggtgtatatctgatgaaacctttyaaatccaatggattagacatgtca

SEQ ID NO: 390675 - DNA, 581 bp, Homo sapiens
aagagcagcatctagttgccatccacagagaccccaagacagaaatccactggtagctggttggaagggatcccatgaaaacaaaaagcaatgtgcgcattagaacttgacccaatatcaggaattaaaaacttcaccatcctatgggatgaaggaattagggaatcctgaaastaaagtttttcacgtaggtaatttcttccaaagagacacagggcagcggcccgatgacatgagtaaaagaaaactcggggtctaggattgagggaaggcagcctttttagtggaggagacctctgacctggaagcccagggtcaccctgagaggggaggggtcttgctgggtcactgggtccaggactccaattgcatatagccagtggcctggagggtccatgaccacgattgcggcaatttcccccattccactcgggagcaatagagaggaacctcactggaattatacagaaaggtcccactgagacttgaactctgatcactgtagtcagagtccaaagccctcaccattacaccatggaacctcacactagcttgtaactggaggtaactaagttcatatt

SEQ ID NO: 390676 - DNA, 563 bp, Homo sapiens
aggagtgtgcagtgaaatcagtttattaggttgcaaattgcttttactttttcatgaagactagaccacataactggcctcaagatccctctaccaaaagctcattcagaggcagacttccggatgtctaatgactttgagagtgagctgaattgcatttctccagtctcctgacttggcatcaaagaagaaaaattggagtaaaaaggagagatgacgacaatgtgagagtgaaccaaaatactggggcaggagctgacrgggtgagagagtgatgggaacagaaattagcaggatgctcactgaggacctgtgatcttgcaagtggacccaaaatcttctcctggaaggccaaagcaggccaagggtcacctacaagatatgctaacggatggcaatgggttggggacaggcttggtgcctctgactgctgcagtagtttccttacctctaagttagtgcttgccttctttaaaacatcatgtgttctggttactgaaacaacaaaagagcaccacagagtagaaatcaccagcaaaaattaaccctacttgcttagcatg

SEQ ID NO: 390677 - DNA, 598 bp, Homo sapiens
aatgtcgtggatctggcattcctgcatcttgccctcactcacatggcctggtgtcaactcagaaatgtgcccaaccacacaacttctggcctccgtgtcacctagaagrcatctagaacccatgcaatagcacaaagaagtgaggatgtgcagcctggggatgggggcatttaataatagacaggtgtctgaggcagatgtcctcagatttccaggcaccacttgcctctttgtggagcaatcagggcaatcatcggcaaaaaactaaagactactcgtcctgttccatgcagaggcgtagttaaccttgtaactattcttttctgaccttcattcttccacgtccagatatatgggggtctttgttgcccatctgcttcaagttagatgaagaaaatcctgcctgaaggcttaagggtttgttagaaaaataaatgttgttcagaaaaggtgcattttaggcaaaagctcagttctggagctccagaacctacctatcccaagcccaatacacacctcctttctctccatccccgcatcatcgcacctgccttcgctgattcttcaggctgcacatctctgagacagatgacaatcc

SEQ ID NO: 390678 - DNA, 598 bp, Homo sapiens
aatgtcgtggatctggcattcctgcatcttgccctcactcacatggcctggtgtcaactcagaaatgtgcccaaccacacaacttctggcctccgtgtcacctagaaggcatctagaacccatgcaatagcacaaagaagtgaggatgtgcagcctggggatgggggcatttaataatagacaggtgtctgaggcagatgtcctcagatttccaggcaccacttgcctctttgtggagcaatcagggcaatcatcggcaaaaaactaaagactactcgtcctgttccatgcagaggcgtagttaaccttgtaactattcttttctgaccttcattcttccacgtccagatatatgggggtctttgttgcccatctgcttcaagttagatgaagaaaatcctgcctgaaggcttaagggtttgttagaaaaataaatgytgttcagaaaaggtgcattttaggcaaaagctcagttctggagctccagaacctacctatcccaagcccaatacacacctcctttctctccatccccgcatcatcgcacctgccttcgctgattcttcaggctgcacatctctgagacagatgacaatcc

SEQ ID NO: 390679 - DNA, 429 bp, Homo sapiens
atttagaatgtctgacagatcactcctggcatgtgctgcatagttatgtgaacgtgtcacacctaactttggtccaatgtcttcagacttagcacaggttgccactggcatggtctgagaataggaatagagccatgcccactgacccatcctatgcctgggcttcgaaatggaactatagtttcattcaaacctacatgtgcctataggtcctgcctgcagcaatgacatctctcagtttagtaagggctgcttagtgtgggaatatgactcccatctggaagaccaggtggagacttatcaccatcaaagtaaaaaacctattgtccacttcaagggcmaagctgctgtgctgttccttaaatgagtaaaaggcacttctgtagtgctggaatgagtcaggcagttcaaagtaagttggaggagtcg

SEQ ID NO: 390680 - DNA, 510 bp, Homo sapiens
actccaacagacctgcagctgagggacctgactgttagaaggaaaactaacaaacagaaaggaatagtatcaacatcaacaaaaagaacacccacaccaaaaccccatctgtaggtcaccatcatcaaagaccaaaggtagataaaatgacaaagatctggagaaaccagagcagaaaagctgaaaattctaaaaaccagagcgccacttctcctccaaaggattrcagctccttgccagcaatggaacaaagcaggatggagaatgactttgactagtgacagaagtaggattcaaaaagtcagtaataacaaacctctctgagctaaaggaggatgtgcgaacgcattgcaaggtagttaaaaccttgaaaaaaaaattagacagatggctaactagaataaactgtgtagagaagaccttaaatgacttgatggagctggtcatcaaaccatagcatgagaactacgtgatgcatgcacaggatcggtagccaattcgatgaagtgg

SEQ ID NO: 390681 - DNA, 552 bp, Homo sapiens
tgtgtgaccatctatcttgggaatttttgtaaactgatgctattttgttgtttccattttgttttcccatatactgaaaagaacaggaccacgagcagttcttatggaatatggtttgatatattttgttgagttggactaataccattgatttttggttgcattccactaacagaacatgacaagatcaaggttatggtcagggttgcttgctgatcctcactgttgctgtgcagtagaaggtgagtttgaggtgaaaggcgtgagtaggaaagagtgatcccctgaaccacctcctcactttctcagctttcatcccacctaggttttgtgagcctggaacttgggagaatgttctgtagcccaggtctcctaagattggctgctrgacttgcctgagttgaggatgcagtgggtgtgaacctgggctgcccagcattcatgtggaagtgaaggaaggaggactggatcaatcccatttgaaagcatccctccctgcagcccgcaccatcctccaatgacactatgaggacactgctttgagatgtatca

SEQ ID NO: 390682 - DNA, 564 bp, Homo sapiens
acttcttctatatggaataacaaagtgtggcattttgcatctggttcttagcatattgttctcaagtttttttagcctgcattartactttaacttttttatggccaaataatattccactatatggttatacgacattttgtttattcatcaactgatagtgctttaagatgtttccactttttaactcttatgaataatgctgccatcaacacctttgtacatgtttttgagggaacacctgtttttcattttcttggttgtaaacctaggagtgcaattgctacatcatatgtcactttatgtttaacttattttatgtttaactttttgaggaactcacacactgtttaccaacttcagtagctatgccattttacattcccaatagtaacatatgagaattccatattctccataactttccaaacatgtgttttctttatttttttcctaagtcatactagtaggtgtgaagtggtatctcattttggtttaaaattacattttcctaatgaaaaacgttgaacatctttgcacgtgcttcttggccatttgtgtgtt

SEQ ID NO: 390683 - DNA, 571 bp, Homo sapiens
tggccttccattctctcctgataagcaactgcggatatcaagccagtttcagccatgttacagggactgcacacaaaccgacttggtgtccagcagttcaccttttgacataaaaagccaatttccaccttattttaatgctaaaatcccttcccaatgtgaagatggggtgcatgttacatatatgtttaccctttgcacatgagctcaatacccctcagaaatggcgtttctccaaacctgctgaatatgtataactccattgtgtgatacacaccctgtgaggcactaaaaccaaactgccctctctctctctctgaagagaaagcaccttttcaaagacacacaccagagactgtctcttcctggactgcaaactgatctcaccaatgaaattcttactactatgtagccaccctggaggcctttgagaggatagtcagatggtcagagatgagttgctctgaatcctgctcccagggccaaaaacgtcaacctagaaggaaggggcttaarcacaaaatatgatttaaagagtttatttgagccaatgtgaggatagttgcctgga

SEQ ID NO: 390684 - DNA, 489 bp, Homo sapiens
tacaaatatggaaaaaaaattttaacaaaatagtattgtaaaagtatcaaagtacctgggaggtggtgggcttaatgtaatgaaagtattaaagcttagtttacatcatcactgtctaatagaacgttctgtgatggtggaagtaatttatttctgtgctgtgcaatatggactctgatagccacatgtagcttatgagcacttgaaatgyggctagtacaactgaagaagtaaagtttaattttacctaatttttattaatttaaatttaaatttaaatgatggttttcatattgtacaatgcaggtctagcagacctcttgggaagagtggaacagatttgagtggccaatgaatagcactgctggagtatatgactttttaaagtctcttctagcttaatattgtatggttctttaaacttgaggttatgagatcatatttcctctataaggaataagggacagacatctaggaggaaaagactga

SEQ ID NO: 390685 - DNA, 489 bp, Homo sapiens
tacaaatatggaaaaaaaattttaacaaaatagtattgtaaaagtatcaaagtacctgggaggtggtgggcttaatgtaatgaaagtattaaagcttagtttacatcatcactgtctaatagaacgttctgtgatggtggaagtaatttatttctgtgctgtgcaatatggactctgatagccacatgtagcttatgagcacttgaaatgtggctagtacaactgaagaagtaaagtttaattttacctaatttttattaatttaaatttaaatttaaatgatggttttcatattgtacaatgcaggtctagcagacctcttgggaagagtggaacagatttgagtggccaatgaatarcactgctggagtatatgactttttaaagtctcttctagcttaatattgtatggttctttaaacttgaggttatgagatcatatttcctctataaggaataagggacagacatctaggaggaaaagactga

SEQ ID NO: 390686 - DNA, 598 bp, Homo sapiens
ctttgcgtgtatgcagttgaaggccattatcctaagcaaatgaatgcaggaacagaaaaccaaacaacacgttcttacaagtgagagctaaacattgagtacttacggatgaaaagatggcaacagtagacactggggacggctggaggagtggaggggacaggggttgaaaaactattgagtactatgctcaatttttgagtgacaagttcaattatatcccaaacctcagcatcacactaagtactcatgtaaaaacccacacatgtacccctgactctaaaatgaacgttgayattattgaaaaataaaaaaataagactgggatcatgcctgtaatctcagcactttgggaggctgagtgggtggatctcttgggcccatgaatttaagacaagcctggacaacatggtgaaatcccatttctataaaaaaattcaaacaaaacaaaaaagcaacacatggtggcatgcgccctgcagttccagctactcggaaggctgaggtgggaggatcacttgatcccaggaggtaaaagatgcagtgagctgagattgcaccactccactccagcctgggtagacagggagagacattg

SEQ ID NO: 390687 - DNA, 543 bp, Homo sapiens
ttcacaaatgaacatcaaggtgacttacttttgaatattgtgtggaagaatatgaaaggcctttattctggctgaaagagcaaaaaaagtaaaaggattaaccaaaaaatcatacagttaaaaatttcactgaagacttatgtacacaaataaatctaaaacatctaaactccacagggacaaacttttccagttgaacaagtaacagaagatgctttaatatttgaacccacctgttggtgttggggaaaggggagctacagcttacagatcaggactttgtccagagaaggagaaaccagccaaacttttgatgaactgttgtgctggaatgttgaatttgagtctataacattgcccagcaccaaaagaattctcttcctgaagtaaytgtttcatatgagaattttgctgagtaagtagaagttgaaagcagcactagaaattggaaagagatctcatgatctctgaatctcacaatttccaaatctcatggccctgcagtcctaaggttttcagccccatgttctcatggtatcaatg

SEQ ID NO: 390688 - DNA, 587 bp, Homo sapiens
accctgggtgaaatgagaacctgcctgtttgaagagaagaacccagtcctgggacagtttatcacctgctgactaaagagcccttaggccctgaataaacaatagtggtacccaggaagtactcactgtggatcttgggtgagactgagagaaatattggcttcaggtctgacccagcacttctgcttaagaaaaagagagagaagartaaagggataaagaggacactgtcttgcagcttgggtaccaggttggccacagtgggatagagcaccaactgggctcttagcatctccgatttcaggctttggctcttggatggcacttccagacttaccctgcaccagtggggagccaactgacctaaagagagagtcccagacctggcagcattcaccagagtctgactggggcattgaatgaacattagcaatatccaggcagtacttgctgtggttctggggcattggtggccacagggagacactcctctacttgtgtaaagaggaggaaataatgaggaggattttgtcttccagcttgggtgccagctcagctgcagtagaatagggcatcagaaagattcc

SEQ ID NO: 390689 - DNA, 566 bp, Homo sapiens
ttaatatttatttacagaaccttttatccaattacagaagaatgcatattcttctcctcagcatgtaattctcaagcatagatcataygttaggctgcaaaacaagttttaaaaaattcaaaaaaattcaaattatttcaagtatcttctttgaccacaatggaataaaactacaaatcaataacaagaaaaatgttgggagctatacaaacagttgaaaactaaacaatatgtctccaaataaccagtgggttaatgaagaaattaagaaggaaattgaaaattttcacgaagcaaatgctaatggaacacaacatgcaaaaacctatgggacacagggaaagttttactaagaggaaggttcatggcaataagtgtctacatcaaaaaagtagaaaaatttcaaatcaacaacctaatgatacattttaaaaaattagaaaagcaagaatgaagtgtacccaaaatcagtaggagaaaaaaataataaataataaattttatttatcagaaataaatgaaatttaaatgaagaaaacaacccaaaagatcaacagaatgaaaaa

SEQ ID NO: 390690 - DNA, 545 bp, Homo sapiens
agaaaaacctaaagattccaccaaaaaaagttagaactctaaaaaaaattcagtaaaattgcaggatacaaaatcaacatgcaaaaatcagtagcatttccatatgccaacagcaaacaatctgaaaaagaaattaagggatgtgggagtccgagaccagtagatcacctgaggccaagagttcaagaccagcctggtcaacatagtgaaaccccatctctaccaaaaatacaaaaaaaaaaattagccaggcatggtggtacmtgcctgtaatcacaatcacaactactcaggagactgaggcaggagaatccctggaacccagggggtggaggttgcagtgagccgagatggcgccactgcactctgccctccagcctgggtgacagagtgagactccatctaaaaaataaataaataaataaaattttaaaaaagtaaaaaaaaatcaaggaaaaatctcatttgaaatggctagaaataaaataaaatacctaataattaaccaaataagtgaaagatgtctacagtaaaagctgtgaaac

SEQ ID NO: 390691 - DNA, 607 bp, Homo sapiens
aaactaaaaatagaactaccatataatccagtaatgtcactgctaagtatatgccctccaaaaagaaaatctgtattgaagagatttctgcacttccatgtttattgcagcatgattygcaatagccaagaattagaagcaacctaagtttccaacaacacataaatgaataaagaaatgtagtacatgtacacaatgtaaaatgtgtaaaatgtacacaatggagtactatttagtcataataaatgatatccttcattcaaaactgcatgggtggtagtggagttcatttggttaagtgaaataagccaggcacagaaagacaagcttcacatattcttacttatttgtgagatctaaaaattaaaataattgaactcacagagatagacagtagaatgatgtttaccagaggttatgaagggtggtgaaggttggggaatggttaatgggtacaaaaaaatagaatgaataagatctaatatttgatagaacaacagggtgactacagtcaacaatttatgatacaattaaaaataactaaaaaagtataatttgattgtctgtaacacaaagaaaggataaatgcttgaggtgatggataccc

SEQ ID NO: 390692 - DNA, 566 bp, Homo sapiens
tgctgtggaaactaagcaagaaccttaagcatatattccatctaacctgcctcttctggatacttttgacgggtttagtttttagggtgtgaggcaaggataacattagatttttaccatgatctttaactacttatttaatccaatattgtttttaactttctatacaccaggcactttcttaagcactgagaattagagaacatgacagacaggcatccttgagtgttgagtctttatggatcaatcttgtttccaagtagaggaaaatcatcaatcttgagtgttctctgcctctttaccaatcctccccagagaaggttaaatgttttatctgatggagaatttaggattgagtactaggcatgcatggcttcacccctgtggaagtactcagatttggaatctttctgcttacaggaagcaagtgctcatatctgctttctgttacgcggtaaaaggggcattttccacggatcagagaaggccaatgttaktccagctgtgacaactagtaaggtgagtattagatatctaactcaatgatgtatattatcatgattatt

SEQ ID NO: 390693 - DNA, 566 bp, Homo sapiens
agttggaaatagaagattacagtttgagagaaaagtgggcaggaggtctaaatttgggagtgtttggcatagttagtatttaaatttttagactgaataagatcaccaacagagggattgtagataaagcaaagatcaatggactcatccttggggcactttgatggttggaggtcaaagggatgaaaaatagctggaaaaaggcaaaggagaattcagtgatgtgaagggggaaatgataagtgtgatgtcctggaagccaagacagaagtgtttcaatgaataagaagtgattaagtgtgtcmaatactcctgataggtcaagtaagatacattggctagaatacattacctagatcactagaaatatgtttgagaaaatgtcagggggatgaattaaactgctgctatcttttagccacatgaaaaggcagggagaaaagtgtaggtcaattttcagtggacacaaaatttagtcacagtttcatcccaaatagataaacaatcacccacacataaatatgcactcatactttctttttatatcatgattactgttgacagat

SEQ ID NO: 390694 - DNA, 557 bp, Homo sapiens
gctttaaactcttgagaatcaggatcataagacaaaatagcaaaacaacagcaacaaggatcaattttccaaacatacagggaatttcatacttcacaagaaaattgtcaccttaagagtgtcttacatttatttcaatgacagagctttaaaaaaagtctttgcaaccatttttggaattgtctgtacagctatttggagtgaaatkagtaaataaatcttctatttctgagttacatttttttctgaaatacacccctaaaatgatattatccaagtaaactccctttttcccatcacattggcctctggaagacgtttgagagtctccttaaaataaatatatcctcaaataatatttttgctaaagatgaacctaaatctgctggaacctgtaaaactatcaatttggagaaaaccaaagggacagagaaatatatcaaatgtggccatggaaatgcaatctataaaatcaaggctgaaaaaaaaactcaggataaaaacatctaaatttttcaacaaataatctcttgttctaacttctctgtttggccatt

SEQ ID NO: 390695 - DNA, 579 bp, Homo sapiens
tcagaaaccatgtccaggcttgtaatgtgctaatcagttaatgccagatttgttaaacaggggacacatagtatttctggtaaatatttgttgttaccaatttgtttaactatattctaaagaaagaatgaccagaattcaaaactatgtcatgattccatgcatatactctgttttgtcaaaattccttttaaagcgaagcattcaaaatggagtgcgaggttttcagcactccatttaggagttgtgttcctcctaaattcatctattgaagctctagcccctagtatcacagaatgtgaatgcatttgaagataaaggcttaaaacggtgattaagttcaaatgaggtgatcagggtaggctcaaatctaatctcattggtatcsttataagaggaaatttgtatacacaaagaccagggattcatgtacacaaaggaaagatcatgggaggacatggtgaggaaggggccatctgcaagccaagaagagaggcctcaggagacaccaaacctaccacaccttgattatggacttccagcctccagaactgtgggaaaataagtttctgttattta

SEQ ID NO: 390696 - DNA, 486 bp, Homo sapiens
aagatgctttattattttagtaattagagcaaaacaaattaaaaatacataattatataccattttacacactatcaatttgtaaaatttaagagtgygttactgtggcaaagataagagaaatagccttttgtaagagtatgaattgctaccaaaactttggaaagcaatttgtcagaatcttgtagggctaaagatacccattgattctactacatatctaaaacagtagacctctagatatctacttataaaatttttccaaaacttgcagaagaaggataattattgtatttttaaaatagaagaaaaatgacaacgacctacctaaccatctcttaatagagtaataagtgtgtatctttaattagtaaagtggaatgctgcataacagttaaaatgaattagtcagagcttcatgtatcacaatgcatataactaaaaagatcaatagactgagtgataaaatgatatttaagagtgtga

SEQ ID NO: 390697 - DNA, 514 bp, Homo sapiens
taaggacctgtgtcctctgtaccaaaagcatggaaataacgtaaaattttgaattccttcaagggacattcctggcacctagataaccctgaaaagtaaataatcaacttgataaacaagaaagtaatagtagcctaaaacaatagtcaaggaacctagaaccatgggatgtttggtgcccttatagaaactaaagaaaacatcttaacatatgtttcaaagttgtttttcagraaccgggatcccagtgaattgatccagtggcacatagaactcagataaggaggaagtgaagactcaactctgaccgctcttctttgctctcaatttctgcctgaggggcttgaaaggagtcacacccacaagccagagctaacattttttctgctgaccccaaattctaaaacaaagcttctcctccttaaccaattgcaattcagcaaatctttgaatctacatataacctgtaagctcctgcttcaagccatcctgcccttttaggttaaaatcaata

SEQ ID NO: 390698 - DNA, 576 bp, Homo sapiens
ttttctgaacaatgtgtctacatgttagcagtacggtgtagtggaaagagtatatcctatcgtatcagagacacctaattttaaattccttctgttgytttctaattgtgtgacaagttactagatctctctgagattcaactgtaaattgaaggtgattcctactttatagggctattgttagaattaaatgagataaggaaggaaaatatttaacatgtaggcaatactcaacaaatattaaaaatattttctgctacctaaattcatagacaatagagaaaaattcttttttcttttccctttgctgagttcccaaaatgagcaacattctagacttaaaatcaggggtaaatagtgagaggtatatgggcttctagggtgtaatcgtctgttttcacacttgtataaagacatacccaggactgggtaatttataaagaaaagagctttaattgactcacagttccacagggatggggaggcctcaggaaacttacaatcagggaagaagaggcacatcttacatggtggcaggcgagagagagaagagcaagcaagagcagagaaaactgc

SEQ ID NO: 390699 - DNA, 576 bp, Homo sapiens
ttttctgaacaatgtgtctacatgttagcagtacggtgtagtggaaagagtatatcctatcgtatcagagacacctaattttaaattccttctgttgctttctaattgtgtgacaagttactagatctctctgagattcaactgtaaattgaaggtgattcctactttatagggctattgttagaattaaatgagataaggaaggaaaatatttaacatgtaggcaatactcaacaaatattaaaaatattttctgctacctaaattcatagacaatagagaaaaattcttttttcttttccctttgctgagttcccaaaatgagcaacattctagacttaaaatcaggggtaaatagtgagaggtatatgggcttctagggtgtaatcgtctgttttcacacttgtataaagacatacccaggactgsgtaatttataaagaaaagagctttaattgactcacagttccacagggatggggaggcctcaggaaacttacaatcagggaagaagaggcacatcttacatggtggcaggcgagagagagaagagcaagcaagagcagagaaaactgc

SEQ ID NO: 390700 - DNA, 540 bp, Homo sapiens
aggaaattaagatacagtatgatcaatactttgaaaagcacaagctaagaatgtaagaatggtataggagctcacaagagggacacttcccttagtcttgatgactagtttccaaaagaaggaacacctattgtgacctgaaagatgatcagataactggccaaaaaataactcactgccaaacttactggccatccaatcaaccttggctcctaaatatttcartttaaaccaataaatgcttatgagaatcctgcatgtttctaacactttgatagaaattctaggagaattccagaaaaatataataccaagatgcctgccctcagaagactgcagttctattggagaaagcagaatcaaaacacttgaaccaattaggagacagtaagaagaatattaaagactatgacatgtgttataaataatattattgtatgagagatcctcagagtcactagatagacatcaattgaaaggcagagctaagctgaggcttgacaaatgggtaggcagtaaagtgagaatttttatcttctc

SEQ ID NO: 390701 - DNA, 511 bp, Homo sapiens
taaattattccatctgggatagtaacaacaacaaaactggacaagatatgtaacaactgttttcaaaacacaagatgttagacaatgaagggcagtgatacctatgagatgagaaataaatgaggtggccaaacaattgattactaagtgagtttgcaggccatggtgcgggaacggagatcccagatggactcccttggttttcaagaaacaaaaccagagagggacagctacatagggagaattttatgaatcttcagagtctctgtgggtattcaggagaacacatcagcatgtgcatgtgaagatactatctgaggtagatggaaaaactaactgagaatattagagaaaataccatgccctcacacagggctgggaacagacctgatccctccagtccaactgggaaatctgatttttcacagggcaytgggtggagtactttgcaaagtcttgcttcagtagtatactcagccctagattaaacattgctctggtctcatctaat

SEQ ID NO: 390702 - DNA, 532 bp, Homo sapiens
aaaacttagctcctcacaactacccaaggataattctttcggttagatttaagcaatagcttcacttttaggagaaatggcaaaataaatattatggttttctatgggttagatacatttacaaatcttaatatttttaacaatcctgtagctagttagtagtgtaactgcctaatgggttcttcctgcccactgcacagacaaaatcaattcactgagaccatagcattgcaataaagagtttaatcagtccctcaaatcaaacactcayatcaatctctctgaaaatttggaggctagggtttttttcaggatagtttgttgagccagggagtctgcttctatatggggccacaggaccagttggtgggtccaggtggagccactgattgtcagaaatgcaaaaacctgaaaaaacatttcaagagaccagtcttaggttctacaatacgtatgttatctgcaggagtaattggagaagttgcaaaccttgtgacctccagaataattgctggtaatcatttatgtctac

SEQ ID NO: 390703 - DNA, 532 bp, Homo sapiens
aaaacttagctcctcacaactacccaaggataattctttcggttagatttaagcaatagcttcacttttaggagaaatggcaaaataaatattatggttttctatgggttagatacatttacaaatcttaatatttttaacaatcctgtagctagttagtagtgtaactgcctaatgggttcttcctgcccactgcacagacaaaatcaattcactgagaccatagcattgcaataaagagtttaatcagtccctcaaatcaaacactcacatcaatctctctgaaaatttggaggctagggtttttttcaggatagtttgttgagccagggagtctgcttctatatggggccacaggaccagttggtgggtccaggtggagccactgattgtcagaaatgcaaaaacytgaaaaaacatttcaagagaccagtcttaggttctacaatacgtatgttatctgcaggagtaattggagaagttgcaaaccttgtgacctccagaataattgctggtaatcatttatgtctac

SEQ ID NO: 390704 - DNA, 551 bp, Homo sapiens
gatcaaagatttttctctatggaagggtttgtggtctcatgggcttcaaggaatgaagccatggaccgcagcagcaggtgttagagctcgattagagaaacgcgcggacccaaagagtgctgcagcaagatttattaaagcaaaagtgaaagtaaagcttccatgcagtggaaggggacccagaagggttgctgtttctggcttgggtgtcttatgcttatatccccttatgactcctccccttttcctttttctgtcctataagattagcttattttctatctgcttgtgggttggagggcctgattggttaaaaccatcaggctgcagctatagcttaaactccctatatgattggttgaagtttcaatccccttagcttgcagytatgactcattttggcttagaggaaagtccccttggtgaagtccctactgacccaggaagtccagccaacttagccacttagtacctcagtaggttggttggataatggagatttttgcccacatatggaggtagtttgaagactcagctggaagaatgtaggt

SEQ ID NO: 390705 - DNA, 551 bp, Homo sapiens
gatcaaagatttttctctatggaagggtttgtggtctcatgggcttcaaggaatgaagccatggaccgcagcagcaggtgttagagctcgattagagaaacgcgcggacccaaagagtgctgcagcaagatttattaaagcaaaagtgaaagtaaagcttccatgcagtggaaggggacccagaagggttgctgtttctggcttgggtgtcttatgcttatatccccttatgactcctccccttttcctttttctgtcctataagattagcttattttctatctgcttgtgggttggagggcctgattggttaaaaccatcaggctgcagctatagcttaaactccctatatgattggttgaagtttcaatccccttagcttgcagctatgactcattttggcttagrggaaagtccccttggtgaagtccctactgacccaggaagtccagccaacttagccacttagtacctcagtaggttggttggataatggagatttttgcccacatatggaggtagtttgaagactcagctggaagaatgtaggt

SEQ ID NO: 390706 - DNA, 534 bp, Homo sapiens
tttcaatccccttagcttgcagctatgactcattttggcttagaggaaagtccccttggtgaagtccctactgacccaggaagtccagccaacttagccacttagtacctcagtaggttggttggataatggagatytttgcccacatatggaggtagtttgaagactcagctggaagaatgtaggtatttataaataccttcccaatgatatgttgcaattttggagtatccatttgtcttagtcggctatggctgctgtaacaaaatctcatagactgagtggcttaaacagcagacatttatttctcacagttctggaattatgggaagtctgaaatttgggtaagagcacggttggcctgatgaaggccctctttctggcttgtagatgactgctttcttgctgtatcctcacatggcagagtcagggggaccggggaggcagggagaactctcttgtgtctcttcttataagggcactgaacacattcatgaaggctgcacactgatgacctcatctaaaccccatcac

SEQ ID NO: 390707 - DNA, 534 bp, Homo sapiens
tttcaatccccttagcttgcagctatgactcattttggcttagaggaaagtccccttggtgaagtccctactgacccaggaagtccagccaacttagccacttagtacctcagtaggttggttggataatggagatttttgcccacatatggaggtagtttgaagactcagctggaagaatgtaggtatttataaataccttcccaatgatatgttgcaattttggagtatccatttgtcttagtcggctatggctgctgtaacaaaatctcatagactgagtggcttaaacagcagacatttatttctcacagttctggaattatgggaagtctgaaatttgggtaagagcacggttggcctgatgaargccctctttctggcttgtagatgactgctttcttgctgtatcctcacatggcagagtcagggggaccggggaggcagggagaactctcttgtgtctcttcttataagggcactgaacacattcatgaaggctgcacactgatgacctcatctaaaccccatcac

SEQ ID NO: 390708 - DNA, 556 bp, Homo sapiens
cttttcatacttatgctctgggttgggttcatctgctagctagaaatagtaataacctggtgaggcattacacctttatactctatttgaacagctctgatggccttactaagtctctgagagttgtggttttatcgtaaactgtgacatgaaatccaataggatcttttcataaaaatttggcagttcaatatttatcatttgtaaatgtaaacatgtatagctaagtcttttccctcttactctaaagcctgtattagcatgttgtcatatccaaaaaaatacaaatccaattttaaragcactgaaggtgttttggtttacaaatggatttacaccacccattacacagaaaacaaccctaagattttcccttaagaatctccttctctccaaattccactccatttaacagctatctaaagctcagtttttcttatctctcccttccagtccccctccagctgctcagtctttggtatggaaagctgaggtcacgatttgataacctgcagtctgaatatagccctcgggcatctggagttttgccttcaca

SEQ ID NO: 390709 - DNA, 569 bp, Homo sapiens
ttcttggaggagagaggggcacggttgatgcttggctgttttctacctaaatctgttaaatacccttcctcacaatgggacagtctatctcactcctgttttacttcttcatgcccttacatgtaggtagaatcaagacctcagtttcctagagggtctctatatgtgagaattttcatattttctcaccacacgtaatataatgattttctctaaagttcagcatataattttttcttcacaggctagcatctgaggcattttgcaaaggcagttttgagtgatgacgtttccttaaacaacttaagctgaaacccaacaattgatgccaagrgaaagagaagtaaacagctgtagctacttacctgggtcccccataagagaagcaggggagatgtggatgttacaggttagcaaagaggggataagaagatagttagatagcataatacaaaatatgcacgcatataatttcaagcattgcagtctcagagataatagcaaaatcaaaattttttaaggtttaaaatcttgtggatgtttatttatcaagcttctggaagttaatc

SEQ ID NO: 390710 - DNA, 569 bp, Homo sapiens
ttcttggaggagagaggggcacggttgatgcttggctgttttctacctaaatctgttaaatacccttcctcacaatgggacagtctatctcactcctgttttacttcttcatgcccttacatgtaggtagaatcaagacctcagtttcctagagggtctctatatgtgagaattttcatattttctcaccacacgtaatataatgattttctctaaagttcagcatataattttttcttcacaggctagcatctgaggcattttgcaaaggcagttttgagtgatgacgtttccttaaacaacttaagctgaaacccaacaattgatgccaagggaaagagaagtaaacagctgtagctacttacctgggtcccccataagagaagcaggggagatgtggatgtwacaggttagcaaagaggggataagaagatagttagatagcataatacaaaatatgcacgcatataatttcaagcattgcagtctcagagataatagcaaaatcaaaattttttaaggtttaaaatcttgtggatgtttatttatcaagcttctggaagttaatc

SEQ ID NO: 390711 - DNA, 437 bp, Homo sapiens
taggcattttctaacaattgggtctttcttttattttcttttccagttactttaaatttcttatatttttgtcattcttttaatctatttcattccaaatttattttcctagtcatttatttttcttttctttctttctgattttcatatttagtgatagtgcttcttcctttcctttctttttgtttcttttcattccactctcttcctttgctttttcttcctcctcattcattcttccactcatttatttatattatttacttattcattttacttattttatgtgtgtataaaaaaacaactgccatgtatgctgtcycactaattttcataaaatgtgacaggatgcaaccttgtagataggaaaggaattgtgtataaccaaagtgttcccacctgcatggtgtccacccaagaggcagcaggatcccgtg

SEQ ID NO: 390712 - DNA, 534 bp, Homo sapiens
atataatcaggttaacatgaggtcatacgaattagaatgggtctgaatccaatatgactggtgttcttataagaagagaatcagagacagacacaccaagaattagtatgatgtgaaaacacacagagagaatgtcatgtgatgatggaggaagagattagagtgatgtgtctataagccaacgggctccaaagattgccagtaacaccagaagctaagagaaaggcatacaacagattcttttactgagccttcagagaaagcatgaaagtaaatgacamcttgatttcagacatttaacctcccaaactgtgaaggaataaatttctgttaagtcacctggtttgtggtactttgttatggtagcccaacgaaactaatacacaaactgggcgtgttgactcctgaaagaaatttggcatgtgtgaatactgtaaatgaataatagctttaagattgtgtggaatttcaagtgatatgaaaagataaaggattcagcagcagggcaaggttgattgaccaaagggcgttatt

SEQ ID NO: 390713 - DNA, 610 bp, Homo sapiens
tccttgcttccttcttttctatctctctttctttcctttttgacagaatctcactctgttgcctaggctggagtgcagtggcacaatcttggctcactgcaacctctgtctcccaggttcaagagattctcctgcctcagcctccagagtagctgggattacaggtgctygccaccacacctggctaatttttgtatttttagtagagacagggtttcaccatgttgtccaggctggtcttgaactcctgatctcaagtgatccacctgccttggcctcccaaagtgctgggattacaagtgtgagccactgcacctggcctgtatgtcaatatttctttaaagtcccaaatttccctaagcccatttgaattcagggcatgtattagtcaacataataacactttcctactttgaaccatagggaaactatgttcagaattttctgagtaaatttaaactatgtaatagtttaactcagcatgcatgacagaaaagttctgcttcatttatataacttgaatacatcaatgacattttctgctcttcaagaatgaagctgctagttttaataatcagaataaagttgatttttaaaacttcaccacgtg

SEQ ID NO: 390714 - DNA, 610 bp, Homo sapiens
tccttgcttccttcttttctatctctctttctttcctttttgacagaatctcactctgttgcctaggctggagtgcagtggcacaatcttggctcactgcaacctctgtctcccaggttcaagagattctcctgcctcagcctccagagtagctgggattacaggtgcttgccaccacacctggctaatttttgtatttttagtagagacagggtttcaccatgttgtccaggctggtcttgaackcctgatctcaagtgatccacctgccttggcctcccaaagtgctgggattacaagtgtgagccactgcacctggcctgtatgtcaatatttctttaaagtcccaaatttccctaagcccatttgaattcagggcatgtattagtcaacataataacactttcctactttgaaccatagggaaactatgttcagaattttctgagtaaatttaaactatgtaatagtttaactcagcatgcatgacagaaaagttctgcttcatttatataacttgaatacatcaatgacattttctgctcttcaagaatgaagctgctagttttaataatcagaataaagttgatttttaaaacttcaccacgtg

SEQ ID NO: 390715 - DNA, 610 bp, Homo sapiens
tccttgcttccttcttttctatctctctttctttcctttttgacagaatctcactctgttgcctaggctggagtgcagtggcacaatcttggctcactgcaacctctgtctcccaggttcaagagattctcctgcctcagcctccagagtagctgggattacaggtgcttgccaccacacctggctaatttttgtatttttagtagagacagggtttcaccatgttgtccaggctggtcttgaactcctgatctcaagtgatccacctgccttggcctcccaaagtgctgggattacaagtgtgagccactgcacctggcctgtatgtcaatatttctttaaagtcccaaatttccctaagcccatttgaattcagggcatgtattagtcaacataataacactttcctactttgaaccatagggaaactatgttcagawttttctgagtaaatttaaactatgtaatagtttaactcagcatgcatgacagaaaagttctgcttcatttatataacttgaatacatcaatgacattttctgctcttcaagaatgaagctgctagttttaataatcagaataaagttgatttttaaaacttcaccacgtg

SEQ ID NO: 390716 - DNA, 613 bp, Homo sapiens
cccatgctttcccagacattctctggaatctaggtggaagctgccaagcctcctttattcttgtattctgtgtgccagcaaacttgacactatgtgaaagccaccaaggtttatggaagcttgcaatctccaaagagatatctcaaacctgtctctgcgcgtatgggccacagctggagccagaggggctggggatgtaaagagcagtgtcccgagtctgagcagggaagtgttgccctgttcctggcctgtgaaaccagtcttttctcttaggcctctgggcttgtgatgggaggggctgcctgaaagatttctgaaatgcctttgaggtcttkttcccattgtcttaaatattaacacttggctcccttttaattattctaattgtttagcaactggttgttccacagcctgcttggattctttaccacagaggcagactgcaaatttttcaaacttttatgctctgcttttattttaaataaaagttccagctttaagtcatttattttctctgcatctgaaatagtctataggatattagaagcagctaggccacatcctgaatgctttactgcttagaagtttcttctgccagataacctaaattatc

SEQ ID NO: 390717 - DNA, 541 bp, Homo sapiens
cattgctataaagatatacgtgaggctgggtaatttaaaaataaaagaggttcatggttttacaggctgaacaggaagcatggcactggcatctgtttggcttctggtgagggcctcagagagcttacaatcatggcagaaggtaaagcaggagccagtgtgtcacatggcaatatggtggggagrtgccacactcttttaaacaaccagatctcatgtgaactaccagagcaagaattcactcatcaacaagtggatggtgctaagctatttatgagggatcttctttcatgatgcagtaactcccaccagtgttatactggggagttctctcaccctctaaatcactgagcttcttagagatcaccacagcatctatatccttattttaaatcacaggccaactgaaggttgaggtaccttgaggtccagcattctatgcagacactatagttgtcttccttgtagacaaggaagggttggttaaatgaaggaatgattgaatgaatgtgtaaatggaatttgaaccttctaatgcaga

SEQ ID NO: 390718 - DNA, 534 bp, Homo sapiens
atcaattgcagaaaagatcaactaaaatggatgaaataaatyaaacaagaaccaatttagaagtcatgtagagattagtcatttgtattcacattttgccacgtacctctatttctatttcaatgcaaagtcaatgctaataattttagtataattaagattatttatatttatcatctttattatgcaagctttgaaacaggcagatattgttattatatttctttttacagacaaagcagttctagaaagaaaattaatttatcaaagccagttagccttcaactaagtagaatctcctagtttctattaaaagctcatccactagacttcactaattccaggacctagacctagacctaaaacagcgatatgttaatttacctggccctacctatggacaaaattgcatggctggctttcaaatcatgagttgatagcccttgctttaaaccatcacaactaatcagccttgtaaatagtaagaatatccacagggatcagcaaatattttctgtgatttaccagatagta

SEQ ID NO: 390719 - DNA, 534 bp, Homo sapiens
atcaattgcagaaaagatcaactaaaatggatgaaataaatcaaacaagaaccaatttagaagtcatgtagagattagtcatttgtattcacattttgccacgtacctctatttctatttcaatgcaaagtcaatgctaataattttagtataattaagattatttatatttatcatctttattatgcaagctttgaaacaggcagatattgttattatatttctttttacagacaaagcagttctagaaagaaaattaatttatcaaagccagttagccttcaactaagtagaatctcctagtttctattaaaagctcatccactagacttcactaattccaggacctagwcctagacctaaaacagcgatatgttaatttacctggccctacctatggacaaaattgcatggctggctttcaaatcatgagttgatagcccttgctttaaaccatcacaactaatcagccttgtaaatagtaagaatatccacagggatcagcaaatattttctgtgatttaccagatagta

SEQ ID NO: 390720 - DNA, 584 bp, Homo sapiens
taaaattcatatggaaatgtaaaaggcagagaatatttaaaataactttaaaagcgcgaataatttcttgtttcaagacttcttgtcatattacagcaataaaggcagtatggtattgtcataaaaatagaaaaataaacaattattggaagatggcagcggaagaagcaccaggaatccctctcccaacctagacaacaattgcactgatgtgactattttgaaactctggagtcttttgaaagattgcaacctccagaggaaggyttacatggtaagttgcatctagttccagtcagttttaactcttaccacaatagcagctatccatgccctacctccacctccattacaagcagctgttcgcaaaatccaggagcagtttgcacacagtttgtgggtgccagggtgggcaaaaagaacctttgttcttcaaatattgagtatcagttctgaatactgattgctccttatgctcacagagttgcagacaaagaggaaggtggccattgttacgcctccctcaattgttccaaatccctccctctctggtcgaagtgacttctagaaaatatgaagggcca

SEQ ID NO: 390721 - DNA, 587 bp, Homo sapiens
ggcatctgtttggtgggtttgatggatcacagcaccaactggcgacagggtccgtggctcccttggtcccaaccctgaaaatctctcctccactatggatatgtaggagtaattatcccaggtcccagacttcaagatgggtcaaaagataaataaattatgggttttctacaaaaggagcctgacagtggtatcttggttccagataattttaataaggtccatggtcctctctataagctgtagaaaagagaagtactgtcagtttgtcagacaccttyatgctaactcactggtatatgaagcaattagaactaacttgtgcttataccatttcacagccacacctcaaaatgctgctaacctttagctagaacaccatgctcaatcatcctctaatattaccggtgccaaaaaaactaaaaattccctaagagataacaataaaaagtcatccatttatgctgcaaaatgcatctccccatgcatatagcacagaatgcagaagctaggaggactttaattaataggatgcttagattctgattcaactgacataaagaagtgaaagatacaggaggttaaat

SEQ ID NO: 390722 - DNA, 587 bp, Homo sapiens
ggcatctgtttggtgggtttgatggatcacagcaccaactggcgacagggtccgtggctcccttggtcccaaccctgaaaatctctcctccactatggatatgtaggagtaattatcccaggtcccagacttcaagatgggtcaaaagataaataaattatgggttttctacaaaaggagcctgacagtggtatcttggttccagataattttaataaggtccatggtcctctctataagctgtagaaaagagaagtactgtcagtttgtcagacaccttcatgctaactcactggtatatgaagcaattagaactaacttgtgcttataccatttcacagccacacctcaaaatgctgctaacctttagctagaacaccatgctcaatcatcctctaatattaccggtgccaaaaaaactaaaaattccctaagagataacaataaaaagtcatccatttatgctgcaaaatgcatctccccatgcatatagcacagaatgcagaagctrggaggactttaattaataggatgcttagattctgattcaactgacataaagaagtgaaagatacaggaggttaaat

SEQ ID NO: 390723 - DNA, 575 bp, Homo sapiens
tggtttatcatatgtaggagtccttaagatastaacagaattatataaataattatagtttaggatatgaaagtggttgtgtatatatacctgtttatcctacagttttataaatggcatatagttaattctataaaatgggtgttaattctcatctttatgtggtctttttgaaaactcaaactaaaataacttttcagaaattgaaaagaaacttaattaaatggatgccagtgataaacttaattaaatggatgccaggatttcagtgtccagagtgggcaaataaatctagaagtcttcctgtctcagtcatagcatcacttgaccaagggcttcctatcagtctccagcttagtgcatcccccccttcccctgctctgtttttgttccacaagaaataatatttcctaggatcttctgcctctgggcctctggatagatttggccaataagaagacagtggcaggggattggaggataggatgaggaagtaagctgaggtacttctccgccttctctatttcctgtagtgtcttcagcagtggctatgtttcctccatgacaatagctcc

SEQ ID NO: 390724 - DNA, 333 bp, Homo sapiens
aagacagtggcaggggattggaggataggatgaggaagtaagctgaggtacttctccgccttctctatttcctgtagtgtcttcagcagtggctatgtttcctccatgacaatagctcctgttggacaaatggactgtggtccagttcctgtggaacmtcctctctgtctatctagccaggtgatagggacttcctgctaattctgattgcttgattgcctcactagctatttggcttcccagagattctagcacctgttgaatcaattccaagagttaattttcttgttttagatatatacagtgatctcagtatttggactttgccttata

SEQ ID NO: 390725 - DNA, 542 bp, Homo sapiens
tgatctcagtatttggactttgccttatatacaaggcttgttctgatgtaagtatactatacatttagatatgtgctgtgcatatgtctgtgtaaatgctgtgaacacagataaaaaattaacttatgttatatccaacacattacctgggatgcagtaggtatttaatgtgcattacttggtgaattgactgtatatggtatcagggaaaatagcataaaacgtaattcaaatgtgaaaaatacatactaaytataatcattttatgacttaaaaccatttatgcctcttcactgttgtgacagtaatacatgtgtcaaatcaacagtgttcagtttcaattgaataggtatataaactatacataggtccaccccttcatttttcactcatttgaagtgattgccttctcaacacttaaatatttatattgctgccaggcacagtggctcatgctagtaatcccagcactttgggaggccaaggtgggcggatctgagatcgggagttcgagaccatcctggccaacatggagaaacccc

SEQ ID NO: 390726 - DNA, 590 bp, Homo sapiens
tactttcttttccttcttaatttatatccagtccagcaggaaattcagatatcagaagcaaaatgacattcattttattacccacatcttcttagctgggatcatgtagggctttamaattatcatttaattatgaccaaagaaaggcacacttttgggaagattaaaggttctggcatggtactttagagaaggtgattatcagggaaacttagcaagtatatattagagacaaatttgattgatgacagatatagaaaatgaatgacacaggatgaaatgaaagaccactgaattagagaaggcattctatagtccatggtgttatatattgtcaggctgagagatgtttttaagatgaaacatgagcactttgtcttcaaatataagttatattagtctgttttcactctgctgataaagacatacccgagactgtggaatttacaaaagaaagagatttaattggacttacagttccacatggctggggaggcctcacaatcatggcagaaggcaaggaggagcaagtcacatcttactcggatggcagcaagcaaaaaaccagagcttgtgcagagaaactcccg

SEQ ID NO: 390727 - DNA, 559 bp, Homo sapiens
agggcctctgcccccccgaacacacacccgcactggagaaactgaaggtctaggttaaaagagaagattccaaccttacctgaaactgagttaatttagagaactgagcaaaatacaggggtagaggaagcagtgggaaaggtgctgtgagctagctgggtcctcaagcaggccatttctacctgacatcacagggatccttcgggggcagggggcagccagaggcatggggggaaatgccacagagagaaggaaatctccagctgaactttgtaacaatttgaactggtcaagaaacctcctggccagaactcaggggagggcacaaatctggcgtgcagactccacaggcagaggaagaactaaaccctactttctttcacagcctgggacaagttctcagccttgcttgcccacttcctgaaaacagaaggtaggccatggtcagaatgagactggccyttttgattgtgtaggaacaaggtgaggtctgtgactgctgggtttcccctactttgctgacaacctacctgactcaacagagccagccataattcta

SEQ ID NO: 390728 - DNA, 514 bp, Homo sapiens
tcttcttacagcatatttcagcctataaaggaggaaggaatattatagtagtaatgtcagcattacacaaactttaatgaattgatctatcattagtcatcaacagcagctaacttaacaaaaagaaagatgatcaggagtcatgtcactcttattggaaacaaaagactgtctactgaaggagacttgccagaaaaataaaaaatggaaaaatgtgatcaagcttctaggtgagatacaagcacaagtacaatttacaggaaacagagaggtcagacaattggtagctttccatgtgtgakagtgaaattttgagcatatgaaaaaataatctttaccttttagtgatgtgaactaatatatttgtagaagaaatgacatctgtggcttacttcagatattataagaggcaaagtctctggaggtagagataaaccaaaattagcaatgagtttgtaattattgaacccacatgatggggacatgggttttcattatacaattttgtttactg

SEQ ID NO: 390729 - DNA, 536 bp, Homo sapiens
tctcacccagtgctttctcatttggatgttattattagacatcaaatattctgaatgctttgaaatacaatagttgataatattcttcctacctcaaattgagtactgaatagttctttccaatgctaaccttagatttctgtattttttgatgtttagtattactccataaagtttataagcagttccactaataggcatatcgacatgggatcattttataagatctgccaagtgaggtggcagagaagagacgatgcgaagttgtgtccttcacagcatttatgtacctataaatattccgaaatatctcctcgaaagttcattcagagggggtggttgtaacttgtttacaacaatcttgcacacaccttgataaatagaactagcagatgaaccaaatggggaatcaaatccttctagaawctattaaattacagcaaaggacttattatagtgcatctaatctctatttgaaaattgtcatttctctaaagcatagccataaaccaaattaacttgaaacgatcctccaa

SEQ ID NO: 390730 - DNA, 530 bp, Homo sapiens
ttttttaattcattattgcagattcattgtgagtgttcccctcccctccagactctacacttacacattgtactaatcagggttctctacagggacagaaataatagaattgatgtataaatgtaggggcgtttattaaggagtattgactcacatgatcacaaagtgaagtcccacagtagtccatctgcaagatgagaagcaagaaagccagtcagagtcccaaaacctcaaaagtagggaagccaacagtgccgctgttagtttgtggctgaagggctgagagcccctgaaacaccactggtgtaggctgaagagtccaaaagctgaagaactcagagctcgatgtctgaggacaggaagcatccaacacggacacgggagaaagatgaagcctggaagactcagccagtctggtccttccactttcctctgcctgcttttattccagctgcattggcagctgattagatggtgcccacccagattraggataggtctgcctctcccagtccactgacacaaacgtt

SEQ ID NO: 390731 - DNA, 559 bp, Homo sapiens
gttctgaacaatgatcatatcagcagcaacattgttgttcattatactgtaaatgtatgttagacctctaagatccttatataaaattggaacggaaagtaaactgctataatgactgagattaaaattcccacatgatcgttgagatattggcatagtactgatttcaggttggatttatttttacgatttctttttcttaaaccattactttttaacactttgagtatccagtctaagcaatacatctgttacatacatggaggcttatataaaattgctaatatttaaaatagttgcaggcaaattacccaatttaaagtatcattaaagttgatatatttaaggacacgtgtcataacccktacaggcttttttttgagacagagtctcactttgtcatgtaggctggagtgcagtggcacaagcagggctccctacatccttggcctttcaggcccaaacaatcctcctgcctcagcctcctgagtagctggaactacagatgtgcaccaccacgctcgactactttttgtatttttttgtagagatgacgttt

SEQ ID NO: 390732 - DNA, 536 bp, Homo sapiens
cctgttgaaccatactttatattgggagttcttgcctaccagtccaaagtcatataaagacccagttactagaacactgtaatgcttgctcaggttcgcaggaagagccctccagccacctcaggtaagcgtgcagctgtgaagttaccagctgcaggcatggtggtratcctccctgtcttgttcagcctcttctcaacagacaaaattccatccagaacctgcctgaatgtggaagttcctgttctatcattgcactacatcctcttacaggatttcctttcctgactacagtttagtttctggactcagaggccaaagggctatgcaagcagctactgctcatcaccagattttttaattctatttaaattctgtgaagatgcttaatatttaaatataattttactacttctgctgctgtgtttgtagtgatgatggtgctgcttgtagtggtagaaggacacagcacaataaaaagaacaaagatgtcacttaattaatattagctattaggatcctccttttccaaccag

SEQ ID NO: 390733 - DNA, 608 bp, Homo sapiens
tttatttccagctaatgtggaaaaatatataaagagagtagctatgattctgcataatgtcttgtatctctgaaggggctcaaatccctataattagggtaaattattttcattaaggtctctgtacagaactgcttcaagggaggattacataatttgaagaaacagaacggawggttatgccacacctatgcatgtaactccgatcttctgtactgaaagaatcagtatctatgtgaaatagcatcttcttcatagcattatccaagtagttaatatgcatatgcaagagatgtagtgatgaatgtttgtttatttttatctgtccaccttaatccactcttattagtccatgacattggagaccaggtttggaagtttcagcttctattctgcaactcttctggatgtccagagacccactttgtctttgcaagatgatgaaacgtcctaagtcattgcaaaggggagattttgacatagggtcagatttataaagtgacttttacttgaaagattgatgggattcttgcaagcaacaatcagatgcctgtgtcaagaagaactggttatctgtgtgggcaatgtgtagtattcacagaagtgaa

SEQ ID NO: 390734 - DNA, 608 bp, Homo sapiens
tttatttccagctaatgtggaaaaatatataaagagagtagctatgattctgcataatgtcttgtatctctgaaggggctcaaatccctataattagggtaaattattttcattaaggtctctgtacagaactgcttcaagggaggattacataatttgaagaaacagaacggaaggttatgccacacctatgcatgtaactccgatcttctgtactgaaagaatcagtatctatgtgaaatagcatcttcttcatagcattatccaagtagttaatatgcatatgcaagagatgtagtgatgaatgtttgtttatttttatctgtccaccttaatccactcttattagtccatgacattggagaccaggtttggaagtttcagcttctattctgcaactcttctggatgtccagagacccactttgtctttgcaagatgatgaaacrtcctaagtcattgcaaaggggagattttgacatagggtcagatttataaagtgacttttacttgaaagattgatgggattcttgcaagcaacaatcagatgcctgtgtcaagaagaactggttatctgtgtgggcaatgtgtagtattcacagaagtgaa

SEQ ID NO: 390735 - DNA, 594 bp, Homo sapiens
tactgttgtcttagttgtaaattaattaatcatgtatgtgcttctctttgggattcaattttattccaatgctcagtgtatttaggcttacagcaattacaacaatgccacaatgccttatatactgtaattttataataagtctggatatcaggtagtgtctgatctcccactttgttcttgtaatttgccttgattagtcatrgcctttgacatttccatatacttagagttagatggtaaattttagcaaatgcttgttgggatttgatgaagaatcatgttaagtatatttatttgggggaaaataaataatctttttacaatatcaagttttgtaattcatgaacttggtatatctctttgtttattaaaatattttacttctaccaagaaagttgtgtagtttctgaggtaaatatttgtattttatcagatatttttcttaatatttaattttttgaattattcatagtagctttatttctgacagctgtaagctggacacaaatcatcagtagctgaataaataataaaaattgtggtacttccatacaatagaacactatttgaatttaaaaggaacaaattaat

SEQ ID NO: 390736 - DNA, 562 bp, Homo sapiens
gcccctaacttactacacaccttaacaatttcacagttattttttttccattccctactctgacttcactcaatttaagctatttttattttaacatttaatgatctgtatcaaagagaatagatattcctaagaatgcatatctagaagctgtagttctttcattaatatgctcattttcagatttccttgttttaaatttacctaataagagtcttgaaaattcagtctttgcaatcggtagtcagaggcaggtattttacacgtgagtcatacatgctaaactcagtgagtttcttctgaaactttgactacattttgccataactttatgattcttcaatatttatgattttttacatgaagacaaaatgattagtttattattaccttttgtgcagtagaatatcaagaataagtttgaaaacttgaatttttaaaagtaataagtgagagttcatatttcaaattygacatctttaatggattacaagaacattaagaaataaaatcatatgtgctagtgagagaataatatacaagttttcttagaactccataa

SEQ ID NO: 390737 - DNA, 362 bp, Homo sapiens
ggccacttctgtttgatattagggtttcgatctcagtccctgaacattttaatccctatttgtttaagtaacacattttattaaggctttctctagtacataacatactgacatttaagacagttatgttgtgtaaaattcatggctcctttcttctgtgggacaaaaagctactacttttgttgtggctgaccttcacttccttcactctctgtttttgttcartattctctctgagctctctagtcttgtagaatacttaattccttcttttgcaagaaaagatacatttcctggatgagtgtgatccgactaaaaacaagacaagacaagacaaaacaaacagaaaacaaaacaaaaac

SEQ ID NO: 390738 - DNA, 572 bp, Homo sapiens
ggtcatggattagacttgagacaacaatgttaacttattcccttaacttatgttaacttattttgccttgatagaaatggttacatatatgtatatttatgtatatgtatatataagtacattattatttgaatgtactttttttttactctgacacctgaaggctgtgcagcaataacattacagtaggaaagagaatactttgaggcctggcgcggtgtctcatgcctgtaatcccagcactttgagggctgaggcgagcagatcacttgaggtcgggagttcgagaccagcctggccakcatggggaaactctttctctactaaaaatacaaaaattagccatgtgtggccatgtgcatctgtagtcccagctactcagaaggctaaggcatgagaattgcttgaacagggaagaggaggttgcagtgagtggattttgcacctgggtgaaagaatgagactctatctcaaaaaaaaaaaaaaaaaaaaaaaaaaaaaaaacctatcacccaaatcttggtttctgatactattttacaataaaagagtccttgaagaaagtgctaatg

SEQ ID NO: 390739 - DNA, 572 bp, Homo sapiens
ggtcatggattagacttgagacaacaatgttaacttattcccttaacttatgttaacttattttgccttgatagaaatggttacatatatgtatatttatgtatatgtatatataagtacattattatttgaatgtactttttttttactctgacacctgaaggctgtgcagcaataacattacagtaggaaagagaatactttgaggcctggcgcggtgtctcatgcctgtaatcccagcactttgagggctgaggcgagcagatcacttgaggtcgggagttcgagaccagcctggccatcatggggaaactctttctctactaaaaatacaaaaattagccatgtgtggccatgtgcatctgtagtcccagctactcagaaggctaaggcatgagaattgcttgaacagggaagaggaggttgcagtgagtggattttgcacctgggtgaaagaatgagactctatctcaaaaaaaaaaaaaaaaaaaaamaaaaaaaaaacctatcacccaaatcttggtttctgatactattttacaataaaagagtccttgaagaaagtgctaatg

SEQ ID NO: 390740 - DNA, 593 bp, Homo sapiens
gaagaaaaacacctgaagctggtgatcggcaactttctgataagattgcaggagtgaggcgagtggactcaagcatgagcactaagaggtaaaatggtggagtttaactggtctatgacattcctctagggatactcgactggtaagggaaaaacatcacaaatgagcatgcacacaacttccataaccacactgtgcatgtggcccytcccaagtgctggcaggccactgcccgtgcagacagcccaccccaggggaagaataaggggagaagaaacacaaccccagcatcataccactgtataatacccccaagtcaaaaactacatggcatattttgaacattcaagttgcctgcttggccttcttccaagtgtaccttacttccttttgttcctgttctaaaactttttgataaacggtcactcctgtttggaaacttgcctcagtctctcattctgccttatgcccttggacaaattccttccttcgaggaggcaagaattaagttgttgcagacccatatagatttgctgctgctaatgccactataatatgaagaaatttgacatagaaatgtaggggctgctttt

SEQ ID NO: 390741 - DNA, 613 bp, Homo sapiens
ggcaatgaggggcaccccagttgctatacatatggtgggattgggtcacagctggggaatactaaatttaggaaaacatgaattatgtaggggtaagagcaatcttgcccaacgtttctctggagaaagggaatatctttattatcctgatcacraaacaaaattatggtttttgtccaagaaggacgtactatgtttatgttccaatatttactatacaaacaatttttagataaacagtctgaaaaaaaagctgccaatggcttttcacaagacatttggaggtgcaagacacacaacaagaattgtccctcagcaagagtattcaggacacatatgcacatcaataacaataataatttttattgtaaatcttatgggtgcttttcctgggaagtataaacaattaataatggctatgtaagaaatattctgataactaagttttgacatttatttctgtttactaataagtatgagaatctcatacatgaattaaattactggagagttaagaaataatcacaatttatgaaaaagtttgacatttatttgtaatttctaaatgaaatgagattcaccattactcgtgtactacttatcttgaaataag

SEQ ID NO: 390742 - DNA, 589 bp, Homo sapiens
aggtgactattttttaaatgtctatctctacaagttttctattctcacacaactgaaatttgcttatgtccaacttaaattatcaggtccattcgctttacagagaaataagggatttaaaatgtaatgggggagaacagctctcyacattctcagttttgcagctgatctctcttaatttgatccctaattctaaaaacctaagtggtactttgcacttctttgtgcgctacttcccatatatgctgtgttggcttgatacatgttttagattccaaattttttctagcagatttgttacctgctgtgaattggtcaatgatgatgttctttcacctggatacttgagttcctatattttgctttaatgactgacatattttttttattctacacacaccttaacaagtagactattgccagatgttgaacaatattgctaatttgtagtaaatcttatcatagtttgcatagctttaacacttttaatatttagtaactaaaataacattgagaatttgagattaccattctataactgagtaaattaaacttgagaatgttacatgatttgtctgtattgcatggc

SEQ ID NO: 390743 - DNA, 538 bp, Homo sapiens
gatttaaaatgtaatgggggagaacagctctccacattctcagttttgcagctgatctctcttaatttgatccctaattctaaaaacctaagtggtactttgcacttctttgtgcgctacttcccatatatgctgtgttggcttgatacatgttttagattccaaattttttctagcagatttgttacctgctgtgaattggtcaatgatgatgttctttcacctggatacttgagttcctatattttgctttaatgactgacatattttttttattctacacacaccttaacaagtagactattgccagatgttgaacaatattgctaatttgtagtaaatcttatcatagtttgcatagctttaacacttttaatatttagtaactaaaataacattgagaatttgagattrccattctataactgagtaaattaaacttgagaatgttacatgatttgtctgtattgcatggctattcaatgtcaggaccaatacttaaaaccagattttgtttattgcatttcttgaggtcaat

SEQ ID NO: 390744 - DNA, 604 bp, Homo sapiens
tattgcattcaattgtattgttttattttgttttttttttcaaacattttttatctttggttgattgaatgcccagatggagaacccatggacacagagggcctactgcaattctcttctgctgcagttgatagtggtctagtatctaatgggaatgtagttttgagctcaaacattctgagagagtcatagcacctctcctggaaatcagtagcactgttcattgggtgctasgagaacaatgttctttgtttattctttgagttctgtgataaggtaatgtgctaagggttaactggaatatggacaagcattcaatatagaaaattagtaagaaaatctctctgatgagagtatgtttgatgcaaagttcttgaattgtttttgagggaaatattactcttataatgtccattgtaaagatgagaaaactgtccaaggatacaaaaagttgttttgggtatcacaggttcttcatagctcattttaaatttataattaatttgccaatgaataaaaaaagatacaaaaatgtcttctggaatttttgtatggaattgagttgaatctacagattaattaagggagaactgacaccatagcc

SEQ ID NO: 390745 - DNA, 604 bp, Homo sapiens
tattgcattcaattgtattgttttattttgttttttttttcaaacattttttatctttggttgattgaatgcccagatggagaacccatggacacagagggcctactgcaattctcttctgctgcagttgatagtggtctagtatctaatgggaatgtagttttgagctcaaacattctgagagagtcatagcacctctcctggaaatcagtagcactgttcattgggtgctaggagaacaatgttctttgtttattctttgagttctgtgataaggtaatgtgctaagggttaaytggaatatggacaagcattcaatatagaaaattagtaagaaaatctctctgatgagagtatgtttgatgcaaagttcttgaattgtttttgagggaaatattactcttataatgtccattgtaaagatgagaaaactgtccaaggatacaaaaagttgttttgggtatcacaggttcttcatagctcattttaaatttataattaatttgccaatgaataaaaaaagatacaaaaatgtcttctggaatttttgtatggaattgagttgaatctacagattaattaagggagaactgacaccatagcc

SEQ ID NO: 390746 - DNA, 621 bp, Homo sapiens
attccatttttcattcatctcactctattctgcacatcagttctagaagcatgaaaattcagggacatcccacgcatccctgggtctagggataaaactttagaccarctattagcacaggtttaaaaaccagttgtagccactagctccaggatttctgtaatgatacatggatgaacttcgtggattgctggcgaacccactgagactacccgctcagaggtgtgtgcatattttgacttgtctggggaaagaagaaaaactttcattagtttttcaaagggatttattatgaaaatgaaaaaaaaaacccagcagaattctgcatttaatactgaaggaattgacacaaagatttatatgaggcagtctcaaaggagccaaagagcaagctcaaaatccaaaacacttatccacattgctttctgggagaaacacaggcccagatagaaattaagcaaacacttctcatttcacacctaactagtacagtggctccaaatctctctggaattaacactggcatgcaagatagtaatgtcatttaattgtaattcagaatcaattgcctatagtgttgatttttgaaatttctatatatctccctttttcctacaaagg

SEQ ID NO: 390747 - DNA, 609 bp, Homo sapiens
aacataacagataaaagataggaaaatttgaggatttatcttggaggaccaatagcttaccactagtagtcataggaagcaaaaacagaaaaaagtaggggagaaaattaaatgacaaaaaagtttccaaaaaactctcaagggcatccaaatcaagattggtagggcataccaaatgccaaagacaataaatttttaaaaggkttatatcaattttatatcatgtgaaatttcagagaaacaagaataaggtgaagatcataaaagctttcaataaaataaaccagctatgtacaaataaattagaatggctttagatttctcaatatcaatactggaaattggaaaataataaggccaagtcttcaaaatttttaaagaaaatattttccaagcttgaattttatatttagtggagctgttaatcaagtataatgagggaaaataaagaaatatttatatatgttaaaactccaagtttaactcatatcgccctactctcagggagttcctagattagacgctttagcaaaatgagagcgtaaactaagcaataggaagacttgggatgaagaaaacagagaattctgcacaggaaaacaacaacga

SEQ ID NO: 390748 - DNA, 590 bp, Homo sapiens
ggtggtttccaggagttggagaaagagggaaatgggtagttactgccagcaggtatgaagtttatttggggggctgaaacttctggaattagtgttaatggttatacaacctcaatatactgaaaaacactgaattatattcctttaaagggtgaattttatagtatgtgaatgatatctgaatacatktttttaactatgccaatatggaagatgtatatgacataacatggaggagaaaagtaaggaacaaaattatataaagagtagcaaaaatttctcaagtataaaagaagttttttaaaagaacagaatgtactgatacactaataggaaaaacactgataggaaaaaaacagaaacactgaaggaaaaaaaagtatttttttcaggcagtttatacaaagttaggtgaaatatctttattaacgcacaaccatattaatgcaaagctgtgttttggtaggagttctgggaaccaccccgtaagagtccccgtgacttagtcccccggaacaaatgccagtttatacttagaatttatttccctgggcatcacacacaaacactcagttgataagctggctgaa

SEQ ID NO: 390749 - DNA, 590 bp, Homo sapiens
ggtggtttccaggagttggagaaagagggaaatgggtagttactgccagcaggtatgaagtttatttggggggctgaaacttctggaattagtgttaatggttatacaacctcaatatactgaaaaacactgaattatattcctttaaagggtgaattttatagtatgtgaatgatatctgaatacatttttttaactatgccaatatggaagatgtatatgacataayatggaggagaaaagtaaggaacaaaattatataaagagtagcaaaaatttctcaagtataaaagaagttttttaaaagaacagaatgtactgatacactaataggaaaaacactgataggaaaaaaacagaaacactgaaggaaaaaaaagtatttttttcaggcagtttatacaaagttaggtgaaatatctttattaacgcacaaccatattaatgcaaagctgtgttttggtaggagttctgggaaccaccccgtaagagtccccgtgacttagtcccccggaacaaatgccagtttatacttagaatttatttccctgggcatcacacacaaacactcagttgataagctggctgaa

SEQ ID NO: 390750 - DNA, 590 bp, Homo sapiens
ggtggtttccaggagttggagaaagagggaaatgggtagttactgccagcaggtatgaagtttatttggggggctgaaacttctggaattagtgttaatggttatacaacctcaatatactgaaaaacactgaattatattcctttaaagggtgaattttatagtatgtgaatgatatctgaatacatttttttaactatgccaatatggaagatgtatatgacataacatggaggagaaaagtaaggaacaaaattatataaagagtagcaaaaatttctcaagtataaaagaagttttttaaaagaacagaatgtactgatacactaataggaaaaacactgrtaggaaaaaaacagaaacactgaaggaaaaaaaagtatttttttcaggcagtttatacaaagttaggtgaaatatctttattaacgcacaaccatattaatgcaaagctgtgttttggtaggagttctgggaaccaccccgtaagagtccccgtgacttagtcccccggaacaaatgccagtttatacttagaatttatttccctgggcatcacacacaaacactcagttgataagctggctgaa

SEQ ID NO: 390751 - DNA, 590 bp, Homo sapiens
ggtggtttccaggagttggagaaagagggaaatgggtagttactgccagcaggtatgaagtttatttggggggctgaaacttctggaattagtgttaatggttatacaacctcaatatactgaaaaacactgaattatattcctttaaagggtgaattttatagtatgtgaatgatatctgaatacatttttttaactatgccaatatggaagatgtatatgacataacatggaggagaaaagtaaggaacaaaattatataaagagtagcaaaaatttctcaagtataaaagaagttttttaaaagaacagaatgtactgatacactaataggaaaaacactgataggaaaaaaacagaaacactgaaggaaaaaaaagtatttttttcaggcagtttatacaaagttaggtgaaatatctttattaacgcacaaccatattaatgcaaagctgtgttttggtaggagttctgggaaccaccccrtaagagtccccgtgacttagtcccccggaacaaatgccagtttatacttagaatttatttccctgggcatcacacacaaacactcagttgataagctggctgaa

SEQ ID NO: 390752 - DNA, 645 bp, Homo sapiens
accaaggtgacaggagatttctattaccaagatgctcagcaccttgtgaactgttaataatatcattttctttttctctctttttttttytctctctctctctctttctctctttttttttgagatggattcttgctctgtcacccaggctggagtacagtggtgtgatcttggcccactgcaacctcggcctcctgggttcaagcaattctcctgcctcagcctcccaggtagctgggattacaggtgcgcatcatcacacctcgctaatttttttattttttggtggagacggggtttcaccacgttggccaggctggtcttgaactcctgacctcaggtgatccacccaccttggcctcccaaagtgctgggattatagatgtgagctactgtgcccggccaataatattattttcatacacaactcttttttctgtgggacttttgggtaagacatctaaaatatggtatgtccaggattttagagacttcttttaggaaactgaaatgcttctgccctggcatttcctcatgagaggagttgttgattgtgcttatttaaatgaagaataaagatgcatgaattgtgaacatcgaggagttctcttacctgggtattggtctgaacaataataaattgtg

SEQ ID NO: 390753 - DNA, 579 bp, Homo sapiens
gattgattggttgtatttgaccattgaattccttcaaatcttgagaccctatgattttaaacttctgcatgcttcttgcagaggtaaataagtgtttcagaaattctcaaaccatcatgggtcagcagttgcctactccaggttcactcctgtgatagaggagttgaattgctccgtaggaaattctaatcgttagttttaagcatagacagtctaattagcctggaaaatactgtttgttgttgtcttttttctttttttttttwaaaaaaaaacctcattcaacaagcatgtttatgcaaacacagcattacttaaaaactctgaggtgatcacaaagattgataaaaattcagtatagctatcttagcccttttaaaaatggcttcctacagtttgtccaaaatcagaactttcttccccaaaagatttgattcacttcaggtagcatacagggtgttatatttgacaacaattaattgagtttatcaaaagcaaaagaaaaaatggagctctattatagaaaacagtatgatgtggctacaatgctaattttttagaattgattttgaagtattg

SEQ ID NO: 390754 - DNA, 479 bp, Homo sapiens
  misc_feature (1)...(479): n = A,T,C or G
nnnnnnttcttttcctgcattgtttaatttctttctaaaatttaagaattatacagataacacaccaatattttcttataaatattcattacaaaaacatgttaatgtttcctccactgcatgcagaggagaggctgcattcagaacttgtaggaatacatctatgaacttcacatayacactttgatttctcttttagatgtgtttattgcaatacaaatgtaatcatatgatgtgtatataatgtgacttgctttttgcaagagcaccagcatactttggacctctttacatgtcggtatgtatttatctttcttattcttttttactactgtgcctccccaaatgtaccataatttatttaactataaatctttatttatgtatagttacaaggttttatatttatacatttatttattcatttatttaacatatatgatttttagttatatacctttttattatttcagagaagg

SEQ ID NO: 390755 - DNA, 425 bp, Homo sapiens
cggctcacgggctggttacaaaaatttctggggtttaaataccctttagggggttccattggttacttggtgtacacggtatgtaaatgaagaggctamagtgaagttacaaggttattttcttggtgtacaccctacgtaaatgaagaaagaggatgaagtaaagttacaaagtcattgacttggtttaggctctatgtaaatgaagaggatatttcctgtcatagctgaagtgtttccgtttgatttggttctaggaattccttaggttccctgcctccaggccctgttctcctgcctcaggcttacacagagatgttcaagaaatgtcctgactttcagccccacttcttattcttacttctaccataatggacaattctctaggccaagtctctccttggattcagtggggcaactgatct

SEQ ID NO: 390756 - DNA, 425 bp, Homo sapiens
cggctcacgggctggttacaaaaatttctggggtttaaataccctttagggggttccattggttacttggtgtacacggtatgtaaatgaagaggctaaagtgaagttacaaggttattttcttggtgtacaccctacgtaaatgaagaaagaggatgaagtaaagttacaaagtcattgacttggtttaggcyctatgtaaatgaagaggatatttcctgtcatagctgaagtgtttccgtttgatttggttctaggaattccttaggttccctgcctccaggccctgttctcctgcctcaggcttacacagagatgttcaagaaatgtcctgactttcagccccacttcttattcttacttctaccataatggacaattctctaggccaagtctctccttggattcagtggggcaactgatct

SEQ ID NO: 390757 - DNA, 644 bp, Homo sapiens
ttttgttatattcagaattatatttctttctaattttaaaaaaatggtttaccgtattcatttttttctggaacctttcttttcaggcatttcctgcttatccaaattcaccatttcaagtcgccactggatatcagttccctgtatacaattatcaggtaatgtcagagggagtaaaatgatttgcttttaggtattattgaggcctttaacttgttcatacaaatttcctgaatagttgctcattttaaactagtgaattgtacctaaaatttaaggaaacacttagtgtagaatgaagacctctgtgttatttagaataatgaggtagtattttgacaggaatatacttggcaataacttttctgtagaacagatttctgagatttggtgttctcttcttcatttctggatgtagttttcatctttactgtcaaatagctaaatgaaacgtccaaagtgtctttcatgaattttcttagggagatagactgaaataaaattatgctgcacttttcagagcacagaatcccaattacattttcattttagctggctgtttgamgatagtaatgctctggatctcttttcatagatacaagtgtatctgtgacccataattatatctacggtaataaactgaa

SEQ ID NO: 390758 - DNA, 563 bp, Homo sapiens
ttcactaaatttttcttggcttttttttaaaggtaaactgataaaaatgggctgccacattgcttaatcgccttgcctgctttccttgctgtcagttgagggtaatgaggagcagcaacgataaggcagcgtgccaccttgctttcacaaagatgccaatagagaaagtggggaaacataagggagaaaaaagtagcagtattttacattgaccaagtcttgtgaatgggccagctattgagtatgatcatttggaatccctagataaggattgctcctgtacatattttgataagtgtaatctatcccttcccaacatgtgtagtatgtctctgtatgtaactgattgttgtgagcaattccttgccactcaccaaagacagaactttccatctgtagacagtacattttgtagtagaaaacaatagacataagaagttcaaactataaacatgtttttgaatgctcatgmaagataatctgcatagcaaagaaataatagacaattcaacattgcatttagagttaaaaacatctgtccagtatggatgtagctgtgggcc

SEQ ID NO: 390759 - DNA, 591 bp, Homo sapiens
tttactgtgaaatagctgaatgaaacatccaaactgactttcatgaattttcttagggagatagagtgaaataaatttatgctgcacttttcagagcacagaatcccaattacattttcattttagctggctgtttgaagatagtaatgctctggatctcttttcatagatacaagtatatctatgacccataattacatctatggtaagaaactgaaagaggtagtatctttgaggtttccaccttgccaactcccgaaaatttggagaaaggtgaagtttccaatataaaagtaacaagaatgtcatggactagaaacataaagtacttaagttttcctttctgttacttttattataatgaaaaaggagacagcyggataagtacttcaatgttgtatttctcatgtgtttttgaaaatgtgtaggaatacatataatactttcggtgtcctttttttttctttctttttctttcttttttttttttaagatgccaccataaggtcctgttggggagcaaaggattatgttgtccttgacgttaagtgaattagccaaacatagattttctgttcattcttgattttt

SEQ ID NO: 390760 - DNA, 577 bp, Homo sapiens
agtgcatgtatggtatgctatttatttagtacattttgtattttttcaatttyagaattctatttaatccaatttttttgtttacttattgactattttactctataaagttgacagaattgagtttattaattttattgggccaatatatttaagtaaacaatagaacgtttagtaagtcatgaggtctttttgacatacacatgaagtaaacaaatacaatactaggtatgtaatggaagctatgtaattagaaataaatattccttttaaaattagcctgtggtctcaagtgagaaatttaaaatatctatagtaaataaatgacattaattctgcatacgaggagagcataattgtaaccaatgctgcactagtgaatctcacaattgaaacaagattaagagatggacattttagcaaaactaagtgaaaacgttgtaaaattttcagattatgtttctgcatttaaacatttagtgagagaagtagtgcacaagtctatccagtcaaacttgaaatggctgacacatgttaaccgtattcaccccaggtattgacacctaaaatgccctga

SEQ ID NO: 390761 - DNA, 621 bp, Homo sapiens
acttatttttatagctgttgtaaataatttttttcttgaacttttctttcagatggctcattcttggcatgtaaacatgctcctaattttgtatgtgaatttgatataacgccactttactgaatttctttattaattctcaagatttttagtgtactatttagttctgctatataaaaaattgtatgatctgtgatcagagacaatctgaatttctcctttttcatttggatgtcttttatttctttctcttgcaaaatgatcaggctgagaattccagtactctgttgaatgaaagtggtaaaagtagacatcattgtcttgttccagatctcaaawgaaaaactttcctattttcctgttcagtgtgatatcagctaatgaatttcatattttgccttaattgtattcaggtagataccatctatacctaatttcttctgttgttttaatcacaaaggcatgttagatttttccaaatactttttttgcatctagaataaaaaataaaggtgcctagcagtaaaactaattaagaaataaacactgtctacactgtaaatcataaaacacttataaagaaagtaagacatgaaaagtttgagagatatttttgctcat

SEQ ID NO: 390762 - DNA, 618 bp, Homo sapiens
ttggtttccttttatttattgattgattttttaagattccaccttaggggcctgttgggtagcaaagggattatgttgtccttgacgttaagggaattagccaaacatagacttcctgttcattcttgatttttttccatgtcatatatgcctacaaatatttttaagtgactttttatgttaatttttttttgttgttgtttccttcttgttaacccgattataaactcccatggcagcaacagtgccttttttgtcctcaggtttttatgtgcttaagcaatggcaggtctacataatgatagactatataatcaaagaaagggagtattcacgtgactttagaattagcatgtgtctgcatagaatatgcctctggctttaccagcagtagaaaatttatagaagagaaacagaaatgctttgctgttaatgacgcctaaataagaagaggagtaaaggagagtattacctccaaatcaccggagctgctttcccccttataagcagttcctaaagtgaatgaaagcagctctccttatgtgtctgcctactttattcttcggtaagtttagcagttyatctagctatcctttatttgaaatgatttccagatgc

SEQ ID NO: 390763 - DNA, 500 bp, Homo sapiens
ctacaacctactgtcattcatgtttacagggtctaaraactttgattttttccttatgttgcatacagtttttttttagctgtctatgcatatataattttagccatcttccatttaaaatactttttagattgcatatttaacattatacatttcaggtaacgtgtttgcattttaaaagaagtcatgtagaagtaaagtttagtcccagtcatgactaacagaatttgatttggggttccgtggcagtactagttccatggatgctattatgaggattggttttcattttaaaaaagttttcaaatataacctgtttgaggtttttcacctgttctgttgtcatctcaagtattttttgccacctacatgattattgttattttaagtatattttcatattttattatgcatgggatgcatgcggaaccatgtggttatagctgaatgtgttgaacacttcatctccctttcttttcacctgccatctcacttccaag

SEQ ID NO: 390764 - DNA, 585 bp, Homo sapiens
acaaataattaaggctaaggacatcagacttaatttattagcaatggaagccataaaggctgtttagaaaaggtatgacatcatcaaaattatgctataagattactctgttggcgaggaagagatcaaagggcaataaacaaaagaaaattcatcacaaggccgtgaaaaattaaaacatgatgtaatatgagccactattcaagtatcgttacccttatacttacatccagtgagtcaagttccatcagttgtacttcctaaatactagttaaaagcatcattttatcattttctttatccaccattatcattgtcatagctgttggattgcattgattgaacttttacttccaagacttttgtaacagtctcttaatgggtatctctgtctcctctacattttattattggttaactatacacaattttatacaattatatacawacaattgtgaagatttgtttcacagcttttttactgccagacccaaccagactgatgggacatttcctgtatcctcaaaggggagggaaagaagatataaaaacaagggaattttcattcagacaactaaaacagta

SEQ ID NO: 390765 - DNA, 504 bp, Homo sapiens
tgttgttgatactgtttttgttgctttctgtttgtttgtttgcttttctttcaatggtcaggtccctcttctgtagggmtgctgcagttttctgggggttcacttcaagccctattcaactggtttgctcctctgcctggagatgttactcaaggaggctggagaataacaaagatgggtgcctgctccttcttctaggatctctgtcctcaaggaacaccaacctgatgccagtagggttgctcctttatagggagtctgacaacccctgttggaagatttcacccagtttggtggcagggggaacaggacccatttaatgaagcactttgactgtcccttggtggaaggggtgtgcttcactagggggaaacccactcatctgggctgcctgtattcctcagaactaccaggaggaaaggtgaagttgcctaattcgcagagactgtggccactccttcccctaggagctcaggcccagggaggtccaggttgtgtccctga

SEQ ID NO: 390766 - DNA, 536 bp, Homo sapiens
tttaaaaattttattgtgcatatacttttaccagtgatttttatactttcatgttttcattttactaattagctttcttttcttttagtttgaagagmcttctttaacattttttataagacaagtctgatggccatgtacttcctcagcttttgtttgtctgggaaagtcttcatctcattttcatttcttaatgacagctttgccaactacagtattcctgtttgccactttttccttcagcacttagaatatatcatcccacatttttctgacctgtaagatatctgctaagaagtctgttgctagccttataagaatttctttacatgtgacttaattcttttcctagtctgctttcaggattctctgactataatttttgacagtttgattatatttcttggtgtagtcctgtttgaactgaatctgattggagaccattgagttttctgtatctgaatattcatatttttcccaagatttggaaagtgttctcttattatttatttttttttaaaataagctttctaccc

SEQ ID NO: 390767 - DNA, 610 bp, Homo sapiens
tctgttctattgaactatttggctgttctttcaccaataccacactgtgctgattatagtaattttatagtaagtcttgaagttgggtagtatcagtattctaactttgttcttgtccttcaatagtgtgctggctattttgtgtctttagcttctctatataaactttagaatcagtttgtatggaaacagtttccacaacgtaagttgctaagactttgattggagttgcattgagtctatagactaagttgagaaaaactgacatcttgacaatattgagtttttctatccatgaacatgaagtatctcttcatttatttagttcttcttttgatagttttttcaataaatggtgctggaacaactagagaaaatcatgtagttttactcatatagaccttgaacatattttgttagatgtttacytaagtattttattattttggtgctaatgtaaatggtaatgtgttcttaaattcaaattccacttgttcattgctggtttataggaaagcgattgacatatattaaccttgtatcctgcaaccttgctataattgtttattagttgcaggagggcatttttagtcaattcttttgaattttc

SEQ ID NO: 390768 - DNA, 606 bp, Homo sapiens
ttttagtcaattcttttgaattttctaattagacaatcatgtcatctgtcaacaatgacagttacattttcattttcaattaatgtatattttatttcttttcttgttttattgcattagctaggacttccaccacaatgttgaaaaggagtggtgacaggtgacattttttgccttgtttctgatcttagttacaaaggctctagttttcatttttaagtataaattttccygcaggttttttggtaaatattctttatcaagttgaggaagtttgccgctattcctagtttagttggttttttttaatcattaaagggtgttatattttatcaaatgattcttctgcatctactgatataatcatatgacttttcttctttaccctgttggtgtgatggattagattaatttatttttgaatgttgaatcagccttgcatacctggcataaatcccatttagtcatggtgtataattccttttatacatcgctggatttgatttactaatattttgttgagaatttttgcatctttgttcatgagatatattggtctgtagttttcttttcttgtaatatctttgtctggtgttggtgttagga

SEQ ID NO: 390769 - DNA, 496 bp, Homo sapiens
cagcaacctgttgattctggactgctaagtactcctggctggcataggaggctgcagggtgacttaactgtggtagacagacagaattgtttccaatgtacacctaaggaggccctcagcaaagcaaacattgattttggaggggcattttttttttctctattagcttgctgccagaagcctctaaataggatccctattttttttcctgttaatsttaacccatttagaggctgaatgataaagttcaagccagtaagtcctgcaagatgttataagacgctgtcacctccctaaacagaatacctcctagtgaggattcagtaggtgattgaacatgaactaaaatcttggaggcatcctgagtgcctgggtggcctctggtttactgctggttcactgggttcctcttgcctcaatgggccaactcccagtattataaatcatatagatgtgaacttcttcctgaagtaacttgtttgctttatttatttgg

SEQ ID NO: 390770 - DNA, 584 bp, Homo sapiens
ctacttgagaaaactgttcccttttttgtgccaacctcgagtttgttatattaaatatctttgaaatatacacatactatatgtattttaatatttatggtgtctttatattcttattcataacttttgtatttcatatctatgaaaaggccagcaggcattttayatccaagtatctagtaacagtagtagtagtagtagtagcagtaatgataatggtgatgatttttaatgttgttagctatcatttattcaatacttatgttccaggcactaccaggcactttacatgggttatttctcttaatccttacattgactttatagtgtacccattatttttattctctttttaaaaatgatgaaactgagacctaaaaagtttaagtaatttttccatggtcacaagctagcaagtgttgaactaaagcttcttactccatgatatggttttgctgtgtccccagtgaaatctcatcttgaattgtagctcccataatccccatgtatcatgggaggaacccagtgagaggtaactgaaccacgagatctgatggttttataaagggtagttcccttgcaca

SEQ ID NO: 390771 - DNA, 589 bp, Homo sapiens
caatgtgtgcccaagtggaatagcagcactccctcctctcccctcaaatcttatgtgtgttgaatataataagacatttgaagrtataaatcttatagcgagccaggagagagatacttttgatcataggattgtgaggccagtaaaaaggctcagaggatgagcaatggcatgtgtagtgcagggttaaactaaagcaaattatatatatacatatatatgtgtatatatgtatacatatacgtgtatatacacataaatacaagcatatatatgtgtatatatacttgtttgtgttatgtatatttgagtgtgtgatatatatcacatgtgacatatatatttgatatatatatctctctcacacacacacgtatgtataggcttgaatagagatcatacatggaggcagatgttaagtcaggaggccagcaggtgggagaggggaaatatttgagtaagcagtgctgagtgtggcaaaggaaaggatttatgtgaaatgctctgaggtgtaagtcctgcctaatggatttctgtctatgctgtggtacctaaggagagagagacttgtaacagggttctaagcaca

SEQ ID NO: 390772 - DNA, 555 bp, Homo sapiens
gtagagaggaagaaataagtatcctttttaaaacattaaatatcagagtgaaaccaaagcaattgaacgatagcaattgcctcagtctaatgacctcatttctgtcatgcaacctggagaaacaagatgtcaaaaataatccgttaaaaagtagagcaagatacatacaagacctatatgaagaaaactataaatctttatcaagaacataaaataagacaaataaatagggcatgtaccatgctcttggatgtaattattcaatattgtaaagaactcaaattactcyaaagtactatataaatgttacataatttcaaagctccaatgaaatattttatgaagcttaattaatagtttctcaaatttatctaaacttgcaagaataactaataggaaaatagtttaaatagaaaaattgtaggggtctcgatcaattaaactaagggttactggtgtcggaatagagacagtgatcattgaaatagaacaaagtttagtaatcaactttttacacgtaataaatatgactatgataaaggtacattttgaatg

SEQ ID NO: 390773 - DNA, 578 bp, Homo sapiens
atggagcgtggatggggcaaagagaggcatccatcatctgctgctaagcacattattgaatctggtgcttcgctattgytcttcttctgtgtttgcatccattgaggtgactgaatgcccatctgctgagggtatccttttattcagaccatgagacctttgggtcttccaattctcaatatcacatctgatcatttaccatgaaaaaatatttggctgtatccacatctttgagggagtctcagggactctgggagggtacctaaggtctatctcacttagatacaccatgcagcaatttcagttcctctctcttatgcatggtggagtagacaagtttggagcttgctcaccttccacccctggaaattaccttggaaagtgagggcatagcaggatgaaagtctggctcagagagcagcataagtaacttactctctttcttcctgtccagctcttctttcctcaacccaaacttaaaggatcttgttttaatctgatgagttgatacaagagatgaatagaactagttccacccaaacacatattctcagatatttaaattaatccttccaata

SEQ ID NO: 390774 - DNA, 585 bp, Homo sapiens
ctcactctgttgttcaggctggagtgcaagggcatgatctcggctcactgcaacctctgcctcccaggttcaagtgattctcctgccttagcctcctgagtagctggaattgcaggcatgtgccactatgcccagctaatttttgtatttttagtagagacagggttttgccatgtyggccaggctggtctcgaactcctgacttcaggtgatccacctgcttcagcatcccaaagtgctgggattacaggcgtgagccaccatgcccggccttctgtatgattttcttaataacattttcttttctctagcttacttcattaaaagaatacaatatataacacatacaacatacaaaacagtattaattgactgttcatgttaggcttctggtcaacagtaaggtcaattgtatatattttataagctatgactttaatgagatgagctttgtccagctgaaatgcaataagtttcccacttctttgggaacatgaaaataaagaaaagttgctgtgttacaactcctttttagaaccaaaagtttgcttttgcattgatttgattggttaatgagtcttagga

SEQ ID NO: 390775 - DNA, 605 bp, Homo sapiens
tatgttccaaatgaagcatccctccctgttcccctcaggattcctgtaactacatcatcaggaacactttctscatatagtatatcttttcagttcaagagtgttgcaactggctggtgtctctgagtcactatgtttaagaccaaaacacttggactggaagcaacaggggtgaaaagaaggtcagtttaaaactgtgatttcattgtctgttaagtggaggaaacactgtatgtatataataatatttcttttcctcacagagtcgtggtgaggttaaatgagataactcacattcagcacttcagtagattacctggtacaaagtaaacaataaatgttagtttaaggaatgacagtataatagagtcttagagatcatttaacacagtctcctcccgcccagtgcaggaagggccttggctgagggttgggcacccagcctatgtcagaccacccaatgggcttgaggcagcccctccatatgtggatggtcctggtgagaaagttcttcctctgagagggatgaaatctgccttcttcacacatcaagcctactgttctctatagagaaattgaatttcattttctttttgttttacttg

SEQ ID NO: 390776 - DNA, 635 bp, Homo sapiens
ggatgaaatctgccttcttcacacatcaagcctactgttctctatagagaaattgaatttcattttctttttgttttacttgatttgatctgtataagttaacataaaattatttccctttcttaaaaaattaaagcagtatagccaaacccccctttctctactttgcttttaactgtggatcccacttctttgtatgtgtcaactggctagcagccagccctctgtttctctcccttgtctctgccctttctatttcaaatcttctttggctaaatccgcatttcctttctcatgttatatgacttcttttaggatagtttttactatgctaatggccttcctctgactatatccaaatcaaaataatcaatgttagctttttgcaatgtgttttcatttcttaagggttttgctgaagtgcctacccctcaatgaaactggaaaacagaagaaaaaacwtcctcttcaatacaaccttgcaatattaatcaaaatttaaaatgtataaattctttgacccagaaattccactcatacaggtacactaaaatatacatgtaatacacacacatacacatatagatgttcacatatttgcttgcttagtacttattccagtgcatatccaaatg

SEQ ID NO: 390777 - DNA, 562 bp, Homo sapiens
ggagcattcagctctcactttctctctagaaggtgcttatgacacacagtcccagtggctgcttgatgacatggtttctaatgaacttacagtgggagctaacagggcacacaaacartaatttttaatagccagagccagagttcagcacttcatgagatctcctttgggttcactccagagataaatccaggcctgtccaatcttttaggaagaagtttgatcatgcacagagcaccacaacttccatagcccccatttaggggactgtctctttgatgacctagctctagaattccaggggggctttgcaatccagagtggtccaagacaacagaaaacacaggtggatgcatattgagctcgtttccagcagctatccctccaggatcagaaggtgtagcctgaaagtgaatacagatattttccaaagatcctctccctagcttagcccagagaaagtaggaaataaacacctacacccagcccaccctcactgtcaagatagaaaaaaaaaaaaaaactggaactcacatacagctcccaaaatcacagcactcaa

SEQ ID NO: 390778 - DNA, 562 bp, Homo sapiens
ggagcattcagctctcactttctctctagaaggtgcttatgacacacagtcccagtggctgcttgatgacatggtttctaatgaacttacagtgggagctaacagggcacacaaacagtaatttttaatagccagagccagagttcagcacttcatgagatctcctttgggttcactccagagataaatccaggcctgtccaatcttttaggaagaagtttgatcatgcacagagcaccacaacttccatagcccccatttaggggactgtctctttgatgacctagctctagaattccaggggggctttgcaatccagagtggtccaagacaacagaaaacacaggtggatgcatattgagctcgtttccagcagctatccctccaggatcagaaggtgtagcctgaaagtgaatacagatattttccaaagatcctctccctagcttagcccagagaaagtaggaaataaacacctacacccagcccaccctcactgycaagatagaaaaaaaaaaaaaaactggaactcacatacagctcccaaaatcacagcactcaa

SEQ ID NO: 390779 - DNA, 535 bp, Homo sapiens
ccaagacaacagaaaacacaggtggatgcatattgagctcgtttccagcagctatccctccaggatcagaaggtgtagcctgaaagtgaatacagatattttccaaagatcctctccctagcttagcccagagaaagtaggaaataaacacctacacccagcccaccctcactgtcaagatagaaaaaaaaaaaaaaactggaactcacatacagctcccaaaatcacagcactcaacctttccagctacatctaaggagcatgatgcctatcataccagtctcaggttactgacaaaatgtggcacaccctaagccccagggggccacaaaaaacagagatagcagtctggacaaacacaaagatttggaatgcaacttaaaatctctagcagcatggatyggtgaatcttcttctccacaagtgcagtctaacaagatggaaaaaggtaagtgtcttatctaatgtgcagaaaccaacacagataatcaaggaaaataaccagggtaatatactccaaacaaaggagcaagat

SEQ ID NO: 390780 - DNA, 614 bp, Homo sapiens
cagctaattcaaaaacaatggtcataaagatgctcacagaggtaaagacagcaatgcaggaataatatgagaacttcaacaacaacaacaaaaaatagaaagtataaaaaagtgctaaacagtaatcatagatctgaaaaatgctataacaaaactgaaaaattcatttgaagggtccaaaatggactagattaagcagaagaatcagagaatctgaagatagatcactgaaaatcttccaatctgaggagaaaaaagaataaaaaggagtgaagataacttaagagacttatgggacaccatcaagcagaacaacttatgtataattggcatgccagaaaaagaagaaagagagaaaggggcatggagagtattttttaaatgatgacagaaactccccaagtctcaggaaggaattaaaaagccagatccaggaagcccacagaacaccaagtaagatgaatccagagaagtccacaccacaacacatcataatcaaattgtcagaagttaaasacaaagagcaaggggaaaagcaaattgtcacatgttggggaaccctcatgagactatcagtggacttctcagcagaaatcttgcaagcaaaaggaagt

SEQ ID NO: 390781 - DNA, 620 bp, Homo sapiens
tcaagggtctataatcttaatgattaaacaaaactatctctctgagatattaaaatttagtacaatttttattatgggattctctaattcttcattatcaccatttcctttatttgctaaaaagtaggaacagttagataatgaggttggcaagccttttgccttttctatgtgagtcaaacctttttgaaaaccacaacagtagatgatgagatgtttgtaaacagagcgtgtcttaaattcctacctccagtgcctagcagagggcctgtyacatagtagaagctcagagaaggggcagagaggaggaaatgaggacaagaagtcttagagaggagagaaggggaggagaaggaatagggtggcagtaggagaaaaagaaagaaaattcgagatgaaaggggaaataatcctagcaatcaccacatagtacagacaaatatttgttgattgatccaatatcagtaacaaaatgaccataaaggcaatctctgctcaagaaaagtaggtacttggtgtttagattctatttggctatgaccccagggtcctctcatttaacttggatgtctcaaaacacctttttcattgcctttttagatgtattctgtcccaatacg

SEQ ID NO: 390782 - DNA, 620 bp, Homo sapiens
tcaagggtctataatcttaatgattaaacaaaactatctctctgagatattaaaatttagtacaatttttattatgggattctctaattcttcattatcaccatttcctttatttgctaaaaagtaggaacagttagataatgaggttggcaagccttttgccttttctatgtgagtcaaacctttttgaaaaccacaacagtagatgatgagatgtttgtaaacagagcgtgtcttaaattcctacctccagtgcctagcagagggcctgtcacatagtagaagctcagagaaggggcagagaggaggaaatgaggacaagaagtcttagagaggagagaaggggaggagaaggaatagggtggcagtakgagaaaaagaaagaaaattcgagatgaaaggggaaataatcctagcaatcaccacatagtacagacaaatatttgttgattgatccaatatcagtaacaaaatgaccataaaggcaatctctgctcaagaaaagtaggtacttggtgtttagattctatttggctatgaccccagggtcctctcatttaacttggatgtctcaaaacacctttttcattgcctttttagatgtattctgtcccaatacg

SEQ ID NO: 390783 - DNA, 492 bp, Homo sapiens
gttgctccattgactacaaaaatcatctatggtagagcatctgccttacccttctttgtacacacaacaccaacaataacgtgtggcatatagaagatcttaaataaatatcygttcagcaaaactgaaatttgagcagttaagttggtttcttcaagagaattgaattagaaataaaattctcaaattgacagttttctaacagaactaacaatcacagagaacagcttcagaagcttcttctatcaaatcgctggataagggaatgtaatgaagcatagctaatttaataatttcagtaacctccaataactttccactgctcacagattgtctaaacttagcatggcatgcagggccgtgcagctctattaccatcctcttcggataataaactctctacagcttcacctcaacaatgctagcattgctcaatgcacacttcactctgaccacgctgcactctgtggccaacacatttgctatcacatc

SEQ ID NO: 390784 - DNA, 492 bp, Homo sapiens
gttgctccattgactacaaaaatcatctatggtagagcatctgccttacccttctttgtacacacaacaccaacaataacgtgtggcatatagaagatcttaaataaatatctgttcagcaaaactgaaatttgagcagttaagttggtttcttcaagagaattgaattagaaataaawttctcaaattgacagttttctaacagaactaacaatcacagagaacagcttcagaagcttcttctatcaaatcgctggataagggaatgtaatgaagcatagctaatttaataatttcagtaacctccaataactttccactgctcacagattgtctaaacttagcatggcatgcagggccgtgcagctctattaccatcctcttcggataataaactctctacagcttcacctcaacaatgctagcattgctcaatgcacacttcactctgaccacgctgcactctgtggccaacacatttgctatcacatc

SEQ ID NO: 390785 - DNA, 492 bp, Homo sapiens
gttgctccattgactacaaaaatcatctatggtagagcatctgccttacccttctttgtacacacaacaccaacaataacgtgtggcatatagaagatcttaaataaatatctgttcagcaaaactgaaatttgagcagttaagttggtttcttcaagagaattgaattagaaataaaattctcaaattgacagttttctaacagaactaacaatcacagagaacagcttcagaagcttcttctatcaaatcgctggataagggaatgtaatgaagcatagctaatttaataatttcagtaacctccaataactttccactrctcacagattgtctaaacttagcatggcatgcagggccgtgcagctctattaccatcctcttcggataataaactctctacagcttcacctcaacaatgctagcattgctcaatgcacacttcactctgaccacgctgcactctgtggccaacacatttgctatcacatc

SEQ ID NO: 390786 - DNA, 590 bp, Homo sapiens
taataattcattatgcttaaatcctgtataacagccaaattttaaattcaatggatataatattgctaacattagttttttggtagacagtgagtatgtctgctatatccttatccatccttttagcatcatttcatcttaagtgggtctcataaagagcatagagctagatttgtttaaaatctggggtttcccactttaaaagaaaagtttatcccttttgcatttattatgattcataataaattttaacctatttctttcatctttttttgttgttttttttaccatactttttccttgtttcttctacttgtatcttcctctttctgtcttccaatggaatagggtgttttcttggatctattttttctatttgctggatttcaatttaaagttttatttcttattttttaactattacacaaatatttaacatgaaytatagttttcattttcttagcaaagtctcaaaatgggaagtttatgggtaaagaaaatttatattttactagtaaatgccatctgtgttgtatttgaggtttttttcttctctgaaaaaatttaagcttaagaagaaaagtttgaaa

SEQ ID NO: 390787 - DNA, 592 bp, Homo sapiens
caactgtatgatattccaaaaaagacaaaactatggagacaataaaaagatcagtggttggcaggtttttagagaaaggaaggaaatagttaagcacagggagtttgtaaggtgataagataactctgtgtgatactataatggtggatactagttgatatggtttggctgtgtccccacccaaatctcatcttgaattttagctcccataattccrtgttctaggagggaccaggtaggaggtaattgaattatggggtgttttcccccatactgttctcatggtagtgaataagtctcacaagatctgacggttttataagggaaaccccttttgcttggttctcattctctcttgtctgctgtcatgtaagatgtgtttttcaccttctgccgtgattgtgaggccttctcagccacatggaactgtgagtccattcaacctccttttctttataaattacccagtgtcaggtatgtctttctctgcagaatgaaaacagactaatatactagtcatcaaacattagtcaaaccccacagaatgtacaatataaagagtgaaccctattgtgaacattttagttaataa

SEQ ID NO: 390788 - DNA, 570 bp, Homo sapiens
aaggtacattactgaaagtcagaaagtggaagtgaagagtggaggccacacttctgctcctcctgcctactagcacaattatggaagtgtttgtgctttctgcccagtgcccatttgcctgtgtttatgcatattgcaagccgatcattgggcattgatttgctggcttgaatcatggttgcaacagtgaggtcctgaagcaatagtagtggcagcagtttcctgatacctcagcttgttgaccataaaaagagggagcaggccaacactgtagtgttctggagattttcccagaagcccatctcacagtttattttcctagttgaaccaactgttttggaaacatgtaatttcctatatttgttctttttttcaaactagccagagaggtttccattatctgtaactgaamtttaacatatagtatttggtactagaaacggttgtgggcaacaggttttcaaggtcaagaatgtctgattgttaatatttgacctagttggttttgagtaatgtcaatctgggtagcattaaaggatacaaatactgataatctaaggaaacttaaat

SEQ ID NO: 390789 - DNA, 621 bp, Homo sapiens
tcttacaagtactagtaaaatcaaataatgcttttccacttttttccaaggaaagccaccaaaacaaaaggtaaaaacaatagaaaagagaacaatgatgagaaggcaccaaaatcagagcaaaaataataataaaaagggcaacagatacaaagaaagggaggcaaaatcatagaaaggtatccataagataataaaggtagagcagatgaatgaaaacattttcaaatgcgytttcctttaaaataataatgtgacagtataaatgaaaatttcagccaccacatagaaaaatcacagtaagatgccccacagtctttacttgaaagcaaatcacctgttaggatcataaaatcaatgattattagagcacaaagggacctcagagtttatctaatgtaaactctgcctttgtattggtggtttatatcctaaagtgctatataaggggctctgtaactcattttcactaacctactttcttgtgttagcaaataatatgtatgtgaatggtcgaaggaattctcagagattataggtaaatcaatatcatgtactactaatcattataatcctagtgtaacagtaaaaataattgatgaaacttttcagagtaggaat

SEQ ID NO: 390790 - DNA, 582 bp, Homo sapiens
aagcagcatctgttttggccaagaagcaaattgtttaaaggcctgctaacttagccatattcatttatagtggtttttcatcaaaagagatcccatagttaattctaacatgtttatgtctggtaatggaatattaatcaagaagatgtcacttttttctgaagactttatttagtttacatacccagctggcacttagcattgcctcactactgtcatcattcactttgcagatcttgtctcatttccgtgtagtttatggcctaaggaattacaaggaacagattgcctggaaacttttttataaaaatttgattatatggtgtatagygaatattacagtaatattcgctaaatttgacaagaatgtactgttcacgtgaaaaaatcctgtatttacataaaaattcctcatgattactgtaagattataactaatgttaaatttttaaaaatcatcaaattggactcagtctttctcataaagttaccaatcagaagacaaaatgattgaataaagatattgatctggattgctgaatagtgaggagggggcactgtgtaacgtacatttgggaccta

SEQ ID NO: 390791 - DNA, 600 bp, Homo sapiens
gtttgggggaggtcacacacgtttctgagtgggaatggatgggcgtgaatgacgtgccctcttaaaaagcacaacartcctttaagaggagcaaaattgagttttcccattttggccaagattttgaagacagttcaatgtattctacatttgacataagatgagaactttctaaagtattctctccaagagcgtaaacgatgactaccccagccctgctgcccctctctggacgtaggataccacctctgaacctggggccgccttccttcccacatcacagggctaccttgagactttctgagaagtttattcttctccttattcttagtgccttcatcactctgtgttttggggcattctttttccttccagactcttcaaaacacaaacgctttgatttgggtttagaagatgtgttaattccacatgtagatgccggtaaaggggctaaaaaccccggagtcttcctgatccatggacccgatgaacatagacacaggtttgtttatttcagaagttctggtactaacatttggcagagcaaggtacggtgattggatcgaatctgtcttttttttttcttgcagtaaaatgtaa

SEQ ID NO: 390792 - DNA, 547 bp, Homo sapiens
gggatatttcatgatacagaagggttacagatacttctatctaaaaagggtgaatggagtcttcatcaggtgatggagaagatgaggaaatcgaggaaagtggcagaaaagcaaacctcttatatatatagatgcagacagaaagaaaactatgaaataccagaatagtatctgcatcaaatacattaatttactcttcaacaagatcagttccaccttcatctaaaytacgtgttgagattccttgtaccattttgtttttaaagagttgtactgaggggtattcaaaaaggcttgaaaaccattgatctatttcaattccctcgatttaaatcaattacacagacattaattaagcacctgctacattttgtgaagtatccttgtttctagggatataaaaataaataagacacactttctgctctttagaagtttatcatcttgtgggaaaaacagactcattaatcaccacaacagagatgataagagctatgggaacacagatgaaggaacaattaattcagccggagagagccaaataaag

SEQ ID NO: 390793 - DNA, 547 bp, Homo sapiens
gggatatttcatgatacagaagggttacagatacttctatctaaaaagggtgaatggagtcttcatcaggtgatggagaagatgaggaaatcgaggaaagtggcagaaaagcaaacctcttatatatatagatgcagacagaaagaaaactatgaaataccagaatagtatctgcatcaaatacattaatttactcttcaacaagatcagttccaccttcatctaaactacgygttgagattccttgtaccattttgtttttaaagagttgtactgaggggtattcaaaaaggcttgaaaaccattgatctatttcaattccctcgatttaaatcaattacacagacattaattaagcacctgctacattttgtgaagtatccttgtttctagggatataaaaataaataagacacactttctgctctttagaagtttatcatcttgtgggaaaaacagactcattaatcaccacaacagagatgataagagctatgggaacacagatgaaggaacaattaattcagccggagagagccaaataaag

SEQ ID NO: 390794 - DNA, 547 bp, Homo sapiens
gggatatttcatgatacagaagggttacagatacttctatctaaaaagggtgaatggagtcttcatcaggtgatggagaagatgaggaaatcgaggaaagtggcagaaaagcaaacctcttatatatatagatgcagacagaaagaaaactatgaaataccagaatagtatctgcatcaaatacattaatttactcttcaacaagatcagttccaccttcatctaaactacgtgttgagattccttgtamcattttgtttttaaagagttgtactgaggggtattcaaaaaggcttgaaaaccattgatctatttcaattccctcgatttaaatcaattacacagacattaattaagcacctgctacattttgtgaagtatccttgtttctagggatataaaaataaataagacacactttctgctctttagaagtttatcatcttgtgggaaaaacagactcattaatcaccacaacagagatgataagagctatgggaacacagatgaaggaacaattaattcagccggagagagccaaataaag

SEQ ID NO: 390795 - DNA, 547 bp, Homo sapiens
gggatatttcatgatacagaagggttacagatacttctatctaaaaagggtgaatggagtcttcatcaggtgatggagaagatgaggaaatcgaggaaagtggcagaaaagcaaacctcttatatatatagatgcagacagaaagaaaactatgaaataccagaatagtatctgcatcaaatacattaatttactcttcaacaagatcagttccaccttcatctaaactacgtgttgagattccttgtaccattttgtttttaaagagttgtactgaggggtattcaaaaaggcttgaaaaccattgatctatttcaattccctcgatttaaatcaattacacagacattaattaagcacctgytacattttgtgaagtatccttgtttctagggatataaaaataaataagacacactttctgctctttagaagtttatcatcttgtgggaaaaacagactcattaatcaccacaacagagatgataagagctatgggaacacagatgaaggaacaattaattcagccggagagagccaaataaag

SEQ ID NO: 390796 - DNA, 607 bp, Homo sapiens
aaattgacagcaggttggaaaagagttttaaactctaacaatatcatggtttgttaagatgcaggtggaagtataaactggtataataaccacttcaggggctgtaaacaaaaaaatttagagtcaatgatacacataccctacaacccagtaactatagttctaagtttttaccttggagaaaaacacatgtgcccaagaacatatgtacagaatgtttttgcaacaacaacaaaaaaaactaaaaactaaaaatctatcaacagggaaatacacaaataacttgaggtttaatcactgaataggcagataatataattatataattgaaccagagcccaaamgtgaaattgtaaagataacatgaaggggaaaacaacttgcagaatgataaataatgtttaaaaacatgaaaaactgtatataatttatatcaacaaatacacgttatggaaatataaaaccatgcactgacaatgacaatgtccaactcagtataggaatttacctcaagaagggtaatccagccaaaataagaaaatgttaggatttgacaaagctaactagtagttacactgacattcagtaatattatccactaagactt

SEQ ID NO: 390797 - DNA, 568 bp, Homo sapiens
catctacctataaccaggaagcccccccaccccacttgtcccacctttccatactgaatccatatacattgtacatatattgattgatgtctcacgtctttctaaaatgtataaaaccaagctgtgccctgaccaccttgggcacatatcatcaggacttcctgaggctgtgtcacaggtgcgcatccttaacattggcaaaataaacttcctaaattgactgagacctgtctcagttattaggggttcacaaggaagaaggtggggtcggagtaagcrcaatgtgggagttaactggagggggaaagagaaaataagtaggaggaatggaggatagaatcaacagaaacagaatgtagttcttttatgtctcttgctgcaaatgctacacgtgcctgtaaggagaccattacctctgacttagcaggagatctcagagctgaatcatgcatcctacagcatcatggatgctgatcaaagaggcccaagctggccccacttcttgactccctgtattgtattttctttaatttagggcatggccagcagagctgtgaggacagccaag

SEQ ID NO: 390798 - DNA, 587 bp, Homo sapiens
catatataactagtggctatggtactggacagcgcacaggtttgagtgattacgtctagcacaatgccacacagctagttagtagaactaagatgcagccttatttataactccaatgcctttgaggaaagtatcaaaggtaaacatatacctgaccctcaagtattcaattcagactaacaaagttctgactggagggtgaaacttattagctattcagataaacagctcataagctgggtttttttttttttaactcacaaagcccatctataaatgccattatataaaacaaatgtcagttttaaaaaaaaaagtttttaattattgagatctattatgtacacaaagtatacttacgtatattactttatgtatattagcrtataacaacatgtatattataacaacttctggttttgggtactgcaaaatcatagatactataaataaccataatcaacaccaaactacacatttgatatatccttatcatctataaagtgtatctacagtgtttgaaaattctggattatttatgaactacttaatagaagggaacatattggtttcctcatgaaaatata

SEQ ID NO: 390799 - DNA, 520 bp, Homo sapiens
ttgtctccagtacaccttcatgtgttttttcctccagtatatcaatatatttattattacagctttatgttctatacttaatatctgccacagtgagttctgccctatttctcttttgtcatctctccctcttgtcatgaactcattattttcaagattaccagctatttataaactttaattccatgtatatgtttaagatcttaaaatattaaaattacagtaggcagattaagttggaggagaaataacctctttataattttgaactttccccattcattaacatggtatgtctttttatttgtgcataaacatttaaatcctttaatagagtttttaaattttctctatgaggttmtttttttaggttaactcttagatatgttattactttgttgctattgaaaatagtattttgtttatattatatttttcagctggctgttgctagcatacaggatgcttttttgtgtcctttcaattttggaacccggtttatatataaatgagttgggta

SEQ ID NO: 390800 - DNA, 507 bp, Homo sapiens
ttttctctctctttcagataggaaaagttattttttgcataaattttatgtaaaatttgcatacattttttccttgattcttaaagttattagctacagaaccaagaacagtcctgccttttgccttccaactagattttaaattccttggtggcctcttatttctggatatcccctttcactacaattaatgcagtactgagcaytcagcaggtgctttagaaatgctcactgaaataagaaaggacaaaacaaaaaaaggcaaattttcacatagggtataataggttgtcacaaaggcctagggggctaggagaaatgattcttatctctctctgatctgtcacttctaggtgactttggacaagatacttaggtaggaaaggttgagaaatgaacctcctgtctccacagctgtggaggaagaccaggcatatttgtcacggtcatcaacacacctccttggcagggaggtttggaggagaaggaagataacatctatcaatt

SEQ ID NO: 390801 - DNA, 419 bp, Homo sapiens
ggtacatgacatgtgcagtgaatgtgtatggctaggcatttcatattctctcgcctttcctcagacctcaaattcatttaccacaatttgcactcagctgttggtcttactacttgttccactgtgaaaatagaattaatctgaagagaacatccacacactcccacaacaaagtcaaccagcccacgtgcaaccttatccacagggctccttcccactcatcacmattcagcttgtcccagctgctgtctaaggctaaccctcccaactgtgcaatggatattacccttcctactggttgactcttctgtctcctgcatgatcagttttgcctctcaatgggataattcccatcagtatacagagaagttctggaggaatccctgaggtggaaaagcaaagaggtcctctggtgtgtg

SEQ ID NO: 390802 - DNA, 609 bp, Homo sapiens
tgtgttcactccacatatatgttcttagctaaagcctagttctcctctatttgggaaggttgtcttttcattcgggattggcaaagttatgaccaataacaaacaacttttaaatctcagtggcttttaacagcatggtttatttctggctcattctatgtgcccatcatggtttggcataagctcagttccatatgaaccttcctccaggccccaggccagtggaccacttccatctagtcttccattaccagtctcgcccagagggagagaaagcacaaccaagcatgcactgcctctcacagcctcctcttggagatagcccatgtccctcccattcatatttcattggctaaagcaagttacatgaccaatcctgctgtcaacagggtagcaaagtacaatcctccygagaccttagggacagcaaatattgggaacatttcatcctccatcatcgtcctttctgttgatgtgcagctttgaaaaagcacacacctggagccagaagcaggctggggagcccatctcaccaggtaggccggcacatcatcactggcctgtgatgatgtgtctcagagccaaattaaccccacacccaacctttct

SEQ ID NO: 390803 - DNA, 500 bp, Homo sapiens
cagcctgaacttcccactcatatatctagtgggaaaaaacaaaacctgatagatttcttgaacagagttcccttggagagttttgtttcctagaaatgccaaagagagtcctgaaaaactaaggaagacaaattttttgagcaaagaaaatatagtcaaatcatattatatggcatagctgtacagtaaatttatatagtcataataaagaaatctctgaatactgatttaaccaaataaagggattgctaagcaggaggtgaaaggagctaaacattcatcttctataggaggaagacaatagataatatctacattttaaaaatcaaggtgaaatataygtaaaacccagaattacagacatgaaagcccagaataaacatctaaaggagttgaaggtgttttctctaagcacggaaattcctaggaaaatgataaggcagggctctttacattttatttggttttttaaattatgcaaatgtaaattttgattaaaa

SEQ ID NO: 390804 - DNA, 508 bp, Homo sapiens
agtgaaacttctgggttatatggtaattccatctttaatattttgagaaacacyaagccattttccaaagtcggtgcacattttacattctcacaggcagcctatgagaagactccaatttctccacatcctcaccaaattttgtttttgtctgttttttttttttttttttttttgagttgcagtcatcccactggttgggaagtgggcttgcacagtagttttgatttgcatttccctgatgactaatgtcaaaaatctttttatgtgcttgctggtaattttatatcttccttagagaaatatctattcagattatttgcgcattttaaaattgagttatttgtcttttgattattcacttcaagttcttcatatatactagacaagcttcttatcagatatatgctgtgcaaatattttcttcattattacagatttattatatactttgcaactaattctttgggttgtttatttcactttcttgttggtgtgctttgaaata

SEQ ID NO: 390805 - DNA, 576 bp, Homo sapiens
agtttttacctatatacattgccwtgctttaatagatttataactaatatttcacattttcagtgctaataaaatagtatttaaaagttttaatttccattggttaatcactagtatatagaaattaaattattactcatttaacttctatcaaacaaaattaactaattcacttgttatttctaatagcttttatgtacagtcatggaaattttctgagtagataattatgctatctgcaaatgagagtttatttctttccttctgattgttgtgacatttgttacttagccttattatctgtttttaccctgatttatatgttggattacttagttttcccatttgactaattttgttgtgccacccagttgtaatgcataacaacttctttccagtcatcacctgtctattttctgactagacagctatgaggtctttcttgtatgagtcatgtctatttccttgatcaatttatataatttagacatatctttgccatatgaatatttttcaaagaagaatttttatggaatgtttatcccaatgaatatctgttgttaaaaaattggcaag

SEQ ID NO: 390806 - DNA, 574 bp, Homo sapiens
acaactcaacagtacccagaagaaaatgatttctcagtaagagaaatgtttatctatatgaaaataactgcactgttcaacaaaatataataatccaaatctgtagcttgatcattctagcttttcataaccaggttaatatcctgggtcaataactcagcagggccactataaactgtagcatgtccttggaaggaagagtgactagaatagcagtgagtctataaggcaaagcatgtaagaaacagtcgaagatcccaagaagggattttgtgcatatatttcctcaggactcaagaggccttcattaactttggctgatttttttaaaaaatgataataatgggatctatcaataaaagtacaaaactcatggtcattaaaagcatctatttggaagttgactaatgttctgccagctaatttttttaggtgtaggacattcctagtatagccaaggctgtcttcaaggatcaatytctttcttactccttataataaaagaggccccaagttttaaatatataccttgatattcagatagagcatctatttgccagcctcttttgcagtg

SEQ ID NO: 390807 - DNA, 610 bp, Homo sapiens
attaatgagtaaaggtttttcccctttaaatatttttgagttattattttggcctaatgaatgacttatgatgacctggaattatattttgtgatatccagtgttttaaacctttaatatttgacaagctttccaaaataaaattacaaagtatgtcttcttctgacctaattaatctcttagctattaggtggcctaaagtccaaaatggcatattcaggttatttggtataaatatcatacaggaagcatagaaaaatatgaaatggtctttgctttctttggactgtatttgtawaaatatgttattggtttgtgttccaaaattatgggaaagtcctgtaattctgatatgacttagtgtacattatcagtaatagttataattgtcagtaaaatcattgtatgtcacagaactaaccaaaatttctttatcaattgtggctttaatatatgtcgttctaaaactttttgtcatccatagaaaattgttgacctgttttaatcctctttaaaaagtaagtttagagtcagctataggattttgacaggtgctcttgaatgcacgtttctaataactttgaagattgtgacattagaagagaggata

SEQ ID NO: 390808 - DNA, 610 bp, Homo sapiens
attaatgagtaaaggtttttcccctttaaatatttttgagttattattttggcctaatgaatgacttatgatgacctggaattatattttgtgatatccagtgttttaaacctttaatatttgacaagctttccaaaataaaattacaaagtatgtcttcttctgacctaattaatctcttagctattaggtggcctaaagtccaaaatggcatattcaggttatttggtataaatatcatacaggaagcatagaaaaatatgaaatggtctttgctttctttggactgtatttgtaaaaatatgttattggtttgtgttccaaaattatgggaaagtcctgtaattctgatatgacttagtgtacattatcagtaatagttataattgtcagtaaaatcattgtatgtcacagaactaaccaaaatttctttatcaattgtggctttaatatatgtygttctaaaactttttgtcatccatagaaaattgttgacctgttttaatcctctttaaaaagtaagtttagagtcagctataggattttgacaggtgctcttgaatgcacgtttctaataactttgaagattgtgacattagaagagaggata

SEQ ID NO: 390809 - DNA, 667 bp, Homo sapiens
ctaagaataattggtgttcccaaggaagaagagaaatctaaacgtttggaaaatctatttgagggaataatcaaggaaaacgtccccaaccttgctagagatctagatatccaaatacaagaagctgaaagaacacctgggaaattcatcacaaaaaggtcattgccaaggcacatagtcatcaagttatctaaagtcaagatgaaggaaggaatcttaagagctgtgaggcaaaagcatcaggtaacctatgaaggaaaacctgtcagattaacagcagatttctcagcagaaaccctgcaagctagaaggaattggtgtcctatccttatcctccttaaacaaaacagttattggccaggaattttgtatccagtgaaattaagcttcctaaatgaaggaaaaatacagtctttttcmgacaaacaaatgtttagagaacttatcaccaccaagctagcactacaagaactgctaaaagcagctctaaattttgaaacaaatccttgaaatacaccagaatacaacctccttaaagcataaatctcacaggacctataaaaaaaaaacacaatttaaaaaaaagcattcaggcaacaaatagcatgatgaatagaaaggcatctcacatcctaacactaacattgaatgtaaatggcctaaatgc

SEQ ID NO: 390810 - DNA, 667 bp, Homo sapiens
ctaagaataattggtgttcccaaggaagaagagaaatctaaacgtttggaaaatctatttgagggaataatcaaggaaaacgtccccaaccttgctagagatctagatatccaaatacaagaagctgaaagaacacctgggaaattcatcacaaaaaggtcattgccaaggcacatagtcatcaagttatctaaagtcaagatgaaggaaggaatcttaagagctgtgaggcaaaagcatcaggtaacctatgaaggaaaacctgtcagattaacagcagatttctcagcagaaaccctgcaagctagaaggaattggtgtcctatccttatcctccttaaacaaaacagttattggccaggaattttgtatccagtgaaattaagcttcctaaatgaaggaaaaatacagtctttttccgacaaacaaatgtttagagaacttatcaccaccaagctagcactacaagaactgctaaaagcagctctaaattttgaaacaaatccttgaaatacaccagaatacaacctccttaaagcataaatctcacaggacctataaaaawaaaacacaatttaaaaaaaagcattcaggcaacaaatagcatgatgaatagaaaggcatctcacatcctaacactaacattgaatgtaaatggcctaaatgc

SEQ ID NO: 390811 - DNA, 470 bp, Homo sapiens
gattgttgtataagtgactgaataaataaattgctcttgcagttaaattacttaaacttgtattttacacaagtttctactttctctgtaaatttgaaggtgttaagaaataagtaaaattgagtgtgtggcttgtcatggtcgtcccgcctgtaatcccagaactttggtaggccgaggtgggcggatcacttgaagtcaggagtttgagacgagcctgggcaacaaggtgaaaccctgtctctaccaaaaaatacaaaaattagctgggcatggtgatgtgtgcctgtagtaccagatactcgggaggctgaggcatgagaatctcttgaaygtgggtggtggaggtttcagtgagcccagatagtgcctgggctccaacctgggcaacagagcaagactctgtcctttatctccaaaaaaaaaaaaaaaaaaacattgagtctatcaggagtggagttgataaaaat

SEQ ID NO: 390812 - DNA, 604 bp, Homo sapiens
aaatttgtgtctgacttcctctgtttggcatgatgtttttgagatttgtccatgttattgcatggagcaatgattctgttctttctttggagcagtattccatagtgtggatgttttcccatctttttgttgatggacacctttactatttctagcttttagatactatgaatcaagttgctatgaacatctgtgtacaagtctttttgtagacatatgttttcattcttcttgggtaaattccttggaagcgaattgctgggttgtatggtatatgtatatttaacattacaagaaactgccaaccagttttccaaaattgttgtaccactttacactaccacctgcattgtatgagagttctcgttggtctgcattctcatccacacttggtatttagtcttttacattttagccattcaaatgagcatacggtgatatcacattgtggtattcattaataggcktagtttaaaggaaaattctatgtcatttactatataatatagtaaatgatatagtctatgtctatttcatttactataaatgaaaacacaggattatctagcatatttagaaaaatcaacacaatggaaaaaaatca

SEQ ID NO: 390813 - DNA, 577 bp, Homo sapiens
caatccctatgtgttccttgatgccagtgtctgcagtaacaccttcccgtagaaaggctggctatgagttggcttttttaggcattgctcaattcccacatttaatgggcatgaaagccacctygtggttttgcagcaagtgccctaaggcagttgggaagaatggacacaggaatgaatctgttttcagtgcacctcatctttccactgggcttaaacgattctggtatttaactgtgcatttaatgacatgattagatggtttcggttgataaagccactcacctgattcaacagtcagagagagagtaatgactcttcagcattggcctaatcccagctggaagccaggccagccactgggcctttaatcttgccactggcacaaggggctgggcataagttaggacccacccttgtagatcatggcatctgtagcactcggtatcgccatgcttggtgattaaatgttttgaagattgacttaactttttttttttccaggaaaatgacattattgttttgtagaaatgatacaaaaatttacattatatataaaagcacaaagaagaaacga

SEQ ID NO: 390814 - DNA, 577 bp, Homo sapiens
caatccctatgtgttccttgatgccagtgtctgcagtaacaccttcccgtagaaaggctggctatgagttggcttttttaggcattgctcaattcccacatttaatgggcatgaaagccaccttgtggttttgcagcaagtgccctaaggcagttgggaagaatggacacaggaatgaatctgttttcagtgcacctcatctttccactgggcttaaacgattctggtatttaactgtgcatttaatgacatgattagatggtttcggttgataaagccactcacctgattcaacagtcagagagagagtaatgactcttcagcattggcctaatcccagctgraagccaggccagccactgggcctttaatcttgccactggcacaaggggctgggcataagttaggacccacccttgtagatcatggcatctgtagcactcggtatcgccatgcttggtgattaaatgttttgaagattgacttaactttttttttttccaggaaaatgacattattgttttgtagaaatgatacaaaaatttacattatatataaaagcacaaagaagaaacga

SEQ ID NO: 390815 - DNA, 577 bp, Homo sapiens
caatccctatgtgttccttgatgccagtgtctgcagtaacaccttcccgtagaaaggctggctatgagttggcttttttaggcattgctcaattcccacatttaatgggcatgaaagccaccttgtggttttgcagcaagtgccctaaggcagttgggaagaatggacacaggaatgaatctgttttcagtgcacctcatctttccactgggcttaaacgattctggtatttaactgtgcatttaatgacatgattagatggtttcggttgataaagccactcacctgattcaacagtcagagagagagtaatgactcttcagcattggcctaatcccagctggaagccaggccagccactgggcctttaatcttrccactggcacaaggggctgggcataagttaggacccacccttgtagatcatggcatctgtagcactcggtatcgccatgcttggtgattaaatgttttgaagattgacttaactttttttttttccaggaaaatgacattattgttttgtagaaatgatacaaaaatttacattatatataaaagcacaaagaagaaacga

SEQ ID NO: 390816 - DNA, 452 bp, Homo sapiens
tttccctccctctaatatggggtagcatggaagcggactcaccttgcctctgcgggttgtatactatggtttagggagggatgaagcagtactctgggccctactaaggctgcatggagaactgtccacccagtgaccttccctgaaggctgctgtgtcactgcagatggctttgaagtacagaagccacacttggttggttttggcaagaggccatttagaggytactgatgagaaggagtcaagtacagagaggccattctattttaaaatgaccccttctctttgagttgttcgtctccccaaatatcagcagacagaatgtgctgctggaacttcatgaagaaaagtggctgctagtttcaattgaccttttcaatcccacagagatgtggtttcatctccgtggcttatgaatggtacaatagttatataaagtagaccaaatctga

SEQ ID NO: 390817 - DNA, 589 bp, Homo sapiens
ttatacaattaaatctgaatactgagacctaacaagtctcttgcatatgctgggtaatgaagttgcatttcttcattgtccctgatgtggattaaatgtgagcaggaaatgaaaatgaaaaatacagtaataggacagatttcaaacttctcatctttgtggggaaggagagaagggtggaaaaaaataagcagggaactgtagctcaattcactttttgattgaataagaasttaccgccatattccaaatatgtacatattttaatctagtaataaattcaaacagtagacatttaaataaaaacatgccccccgcaaaaggcataaggatataaagagaagaaaaagagcactacccacacatttttattagtgtttatgggcttagagaaatctaataagaaactaggctgcatatttaacatatattacgtcttgcccagaatagctattcaataaatattcactgagttttctcccaataatggcattcagggaaaatacaatgccaccaacttcagtgcagctgttgccaataaatatctttcctgattactgaaaaatgaagaatttaaaatagagcaata

SEQ ID NO: 390818 - DNA, 589 bp, Homo sapiens
ttatacaattaaatctgaatactgagacctaacaagtctcttgcatatgctgggtaatgaagttgcatttcttcattgtccctgatgtggattaaatgtgagcaggaaatgaaaatgaaaaatacagtaataggacagatttcaaacttctcatctttgtggggaaggagagaagggtggaaaaaaataagcagggaactgtagctcaattcactttttgattgaataagaagttaccgccatattccaaatatgtacatattttaatctagtaataaattcaaacagtagacatttaaataaaaacatgccccccgcaaaaggcataaggatataaagagaagaaaaagagcactacccacacatttttattagtgtttatgggcttagagaaatctaataagaaactaggctgcatatttaacatatattacgtcttgcccagaatagctattcaataaatattcactgagttttctcccartaatggcattcagggaaaatacaatgccaccaacttcagtgcagctgttgccaataaatatctttcctgattactgaaaaatgaagaatttaaaatagagcaata

SEQ ID NO: 390819 - DNA, 589 bp, Homo sapiens
ttatacaattaaatctgaatactgagacctaacaagtctcttgcatatgctgggtaatgaagttgcatttcttcattgtccctgatgtggattaaatgtgagcaggaaatgaaaatgaaaaatacagtaataggacagatttcaaacttctcatctttgtggggaaggagagaagggtggaaaaaaataagcagggaactgtagctcaattcactttttgattgaataagaagttaccgccatattccaaatatgtacatattttaatctagtaataaattcaaacagtagacatttaaataaaaacatgccccccgcaaaaggcataaggatataaagagaagaaaaagagcactacccacacatttttattagtgtttatgggcttagagaaatctaataagaaactaggctgcatatttaacatatattacgtcttgcccagaatagctattcaataaatattcactgagttttctcccaataatggcattcagggaaaatacaatgccaccaacttcagtgcagctgttgccaataaatatctttcctgattactkaaaaatgaagaatttaaaatagagcaata

SEQ ID NO: 390820 - DNA, 605 bp, Homo sapiens
tactagtgactgagtggaatgtcccataayaatgggctcaatttgaaggaagctttgaagaaaaaccatgcatattctctaagctttaacagaggccagggggactgcaatgggccagaacaccaccgggattggtcacccatctcagactaatgtgctttaaagatgttgcaatttcatgtattcatttgttcatcatgcattcatatattccacaaatatttactaagaacgtcccgactgcctggctatttgctaaaaaaaaactgggatttctaagatctcggatatggttcaaatgtgtttttgtttgtttgggatttttttttttttcccacaggcttactttaaaatattttcttagggaaaaactcatctcgggactgttttttattttttaaattttactaggctttgagatttcatcccatctgttcctccttaggaaatgacatcatgcctggtaagttgaaccatgaaataaacaatcagaaggaatatttgctagttgtcaggtataaccatttctagctacatatgttgtgaatctgtgtccacggggcacgctcaagggagcttctttacttggtagtttatggctaaca

SEQ ID NO: 390821 - DNA, 605 bp, Homo sapiens
tactagtgactgagtggaatgtcccataataatgggctcaatttgaaggaagctttgaagaaaaaccatgcatattctctaagctttaacagaggccagggggactgcaatgggccagaacaccaccgggattggtcacccatctcagactaatgtgctttaaagatgttgcaatttcatgtattcatttgttcatcatgcattcatatattccacaaatatttactaagaacgtyccgactgcctggctatttgctaaaaaaaaactgggatttctaagatctcggatatggttcaaatgtgtttttgtttgtttgggatttttttttttttcccacaggcttactttaaaatattttcttagggaaaaactcatctcgggactgttttttattttttaaattttactaggctttgagatttcatcccatctgttcctccttaggaaatgacatcatgcctggtaagttgaaccatgaaataaacaatcagaaggaatatttgctagttgtcaggtataaccatttctagctacatatgttgtgaatctgtgtccacggggcacgctcaagggagcttctttacttggtagtttatggctaaca

SEQ ID NO: 390822 - DNA, 605 bp, Homo sapiens
tactagtgactgagtggaatgtcccataataatgggctcaatttgaaggaagctttgaagaaaaaccatgcatattctctaagctttaacagaggccagggggactgcaatgggccagaacaccaccgggattggtcacccatctcagactaatgtgctttaaagatgttgcaatttcatgtattcatttgttcatcatgcattcatatattccacaaatatttactaagaacgtcccgactgcctggctatttgctaaaaaaaaactgggatttctaagatctcggatatggttcaaatgtgtttttgtttgtttgggattttttttttttycccacaggcttactttaaaatattttcttagggaaaaactcatctcgggactgttttttattttttaaattttactaggctttgagatttcatcccatctgttcctccttaggaaatgacatcatgcctggtaagttgaaccatgaaataaacaatcagaaggaatatttgctagttgtcaggtataaccatttctagctacatatgttgtgaatctgtgtccacggggcacgctcaagggagcttctttacttggtagtttatggctaaca

SEQ ID NO: 390823 - DNA, 605 bp, Homo sapiens
tactagtgactgagtggaatgtcccataataatgggctcaatttgaaggaagctttgaagaaaaaccatgcatattctctaagctttaacagaggccagggggactgcaatgggccagaacaccaccgggattggtcacccatctcagactaatgtgctttaaagatgttgcaatttcatgtattcatttgttcatcatgcattcatatattccacaaatatttactaagaacgtcccgactgcctggctatttgctaaaaaaaaactgggatttctaagatctcggatatggttcaaatgtgtttttgtttgtttgggatttttttttttttcccacaggcttactttaaaatattttcttagggaaaaactcatctcgggactgttttttattttttaaattttactaggctttgagatttcatcccatctgttcctccttaggaaatgacatcatgcctggtaagttgaaccatgaaataaacaatcagaaggaatatttgctagttgtyaggtataaccatttctagctacatatgttgtgaatctgtgtccacggggcacgctcaagggagcttctttacttggtagtttatggctaaca

SEQ ID NO: 390824 - DNA, 582 bp, Homo sapiens
tgacttttatcattttcagttggcatacacaatcaaagcaatacatggaaatggatttctcatgcttgagtaaccagacgttctcctttcttagaactgttttccctacttgctgttttgaaattctaggctattattttagataagtttatggtagctgttgtaacagaaagacccctgaagctcaatggctttatacaacagaagcttattttgggcccacatgaattccaactggtgacaggtgtgaggatgggcttctgctccatttagtcatccaagratctctactaaacggattctgacatatttaactcttggtttctaagatatccatattgacatccagctggccagtaagagaagaaagagaaaggagggttgtgtgctaggatttcatgcaccatgcctggaagtggtgcacatcacttctgttcacttccactggccagaactgagtcaatgcagcctaaccccaatggaggttaggaaatgtagtctagccctgggtctacagtaaagagagttgagtgtgccgagctgctagctgctctctgccaaagtttccttgttggttcactt

SEQ ID NO: 390825 - DNA, 588 bp, Homo sapiens
cttttaggacaaatggaggggcagctagagagaaactaagaaagttctgggcaagaagatctcactttgttgacccttcttcccaaattggtggcctgttagcatcctacatagctttgctcatttatgagactcagcttacaacgaaaacataaatcaatgccatttttgtcattttatcaaaaagcaaaatgccttgcagagagagtactgtcaatgtcatctttcctattcyaatcatttgttttcctcctctagctggtagcacaggccaatcctctgttcacgatgaagtgagggtgtcatcagcataagtgctctttcaagtcaggggacattagttttcaatggatgtgtaccatttctcttctgtttcctgctgacacaggttggctcttctggaaagacctgaagttgttcttcagggctgaattggtgagttttctgatgaagcttattaatcaatgcttggcataaaaccagacagcaaaatatatcatagaatgcaagacaaagacacattaaaatgccagatgttaaggcactggactgctcttaccttacacgagtcaggctcgaaactactct

SEQ ID NO: 390826 - DNA, 601 bp, Homo sapiens
gggggtaggacataaactgtacaagttctctgggacagaattcacaagatgtatcgagacttttagttacatacatgtcatttgacccagcaactgcatttctagaaatttagtcaaagaaaacaatcacagatgtcagcaaaattaagacacaagcattrcttatagtagtaaaaaactgggaacaatctatcagtaggggattagttaaatcaactgtggtagagtcaaatgatgcaataaaactagccagtaaaaatgatctgtagacgaatattccttaataattcatattaagtgactacaatacattgttgagtgaaaataactggtaacaaaatagtattgtcccatgggagggggtaggaatacagacagaccacacacaccataaaaaattcagaagatacacaccaaaaatttaatagtggttatctgcatgatgtgatgacaagtgattttttttgttatctttaacttctgtttgttctataaagataatgttacttgtgtaacaaggagacacacatatatatttattgaataaataactcaacttaaaaggatatggtcactctttttagagctcacttaattttaa

SEQ ID NO: 390827 - DNA, 612 bp, Homo sapiens
cagtctctgtcatttttaagcactatttgccaagcactattctaaaaattacataaattaataaatttaattttacagcaatatgagaagttagtagtacttacattttacacatggggaaactggagcacagagaaactaagtagattgtccaaggttacagagctagtaagtcaatggcaaagctgagatttgaacccaggcagtttggcttcagagtcgctggccataatcacttttctacrtggtctctttaaacgcaatgaagggtgaagcctggttcctgctaccagggaccttagaatgagggagatgcgaaagaaacataaaaagatgaataaaatagcaagcagcaattatttatgcttctattttggtgcattgtccgtcttctcttggcagaagaggctgtcttcctctgctctgcctctgctgccgactctttctctccatcatatattctggatgccctcttccctgcaacctgagcccctgaactcatcctcctctgcctccactcagaccccattcccttagttaccaagctctcttctcttacaacaacaacaggcagcacttgggtgagtgtttcctctaggctgagcactgaat

SEQ ID NO: 390828 - DNA, 520 bp, Homo sapiens
tcctcaattttattttccagatattctatcaaattttaaacttctggcattatatttttagtatctatgagcttacttttgttcttgttcttttaaaaaatatcattctgctcttgttcatggatacaaagtcatctttactttcctgagatttttaattatcattttgttttattttaaactttcttcttgtattgtatttattttctccaagttctcatttttatgtttttggtttctttcttctgcattacaggttttcttggtggaggctggttaagtatttatgtttaagagtaaagcactaaggctgagtgcagtggctcatgcctgtaatcccagcactttgggaggccaaggtgggaggattatttcagcccaggagctcaagaccagcctgggtaaaatagtgagacctcatctaaaaaaaaaaagaaagaaagaragagagagagagagggagagggagaggtggagagagagagagaaaaacagagagaaagcaagcaagcaagcaagc

SEQ ID NO: 390829 - DNA, 588 bp, Homo sapiens
tgttttatattttataagatggcttcactgtcaaaaattaagagaaacaagtcaagagtatggaaaagacagcattagagctcccatttcacagacatctgtactacgtggatcagtttgttctaaaccttaaggcctctctgagtgtcccttatttcttttccttttccttatctgagaaaaatamaagaccttcaaatgtagtgtcacaaaaagttatgtcttttcacaagccatttcacttggctctttttgtctgtcaacattaataatcaaagctaccatttgttgaatgctttttttcaacaggtactttttacatatatttgcatatttaatctcctaaatgccattattagttccatttaaagagaaggaaccaaaggctcagaaaggttaaataacttgcctagagttagtgaatgcagaaccaggacaatttcagatctgtctgaaaacaacatcctcacttttgatggtacagtatactatctcagtactcatacactggataactgcttgttgaatgactacatatgtaaggcaactgtgcatggcacatgatcatgtctgccctcatataatgtt

SEQ ID NO: 390830 - DNA, 607 bp, Homo sapiens
gtattttccttttgtcttctgaacagcccttagtgacaaggaaaccaaactccctcctttaattttggcttcatattattctcagatgaatcatattcaatcagtagagctttcattctaaattcaaggaaggtgctgacccatcatgttaagtaacactcyatcaatagctttctttctctcagtgtggtttataatcaatataaactgctgggatctatcttttgggttttacattaagctttggcaaaatgaaaaaggtctcaggtggggttgggggtgggggtgaggggctcacagctctctgttaagcaccaacctttgcttctggaagtctcttaatactattattactgttatcactgttatcctctttggcactaaacgggtcacttcagatggctcaggaagaacccaatccattttggaatgaccatgacttttatgtggcaaaagaatagatgcccaccaagataaactagaattttcttctcttcttattcccttattcctgtcagtttcttttttaaatgatatatttttcctttttatttgacatgtaataattgtgcatatttatggagtacagagtgatactttgatacat

SEQ ID NO: 390831 - DNA, 607 bp, Homo sapiens
gtattttccttttgtcttctgaacagcccttagtgacaaggaaaccaaactccctcctttaattttggcttcatattattctcagatgaatcatattcaatcagtagagctttcattctaaattcaaggaaggtgctgacccatcatgttaagtaacactccatcaatagctttctttctctcagtgtggtttataatcaatataaactgctggratctatcttttgggttttacattaagctttggcaaaatgaaaaaggtctcaggtggggttgggggtgggggtgaggggctcacagctctctgttaagcaccaacctttgcttctggaagtctcttaatactattattactgttatcactgttatcctctttggcactaaacgggtcacttcagatggctcaggaagaacccaatccattttggaatgaccatgacttttatgtggcaaaagaatagatgcccaccaagataaactagaattttcttctcttcttattcccttattcctgtcagtttcttttttaaatgatatatttttcctttttatttgacatgtaataattgtgcatatttatggagtacagagtgatactttgatacat

SEQ ID NO: 390832 - DNA, 607 bp, Homo sapiens
gtattttccttttgtcttctgaacagcccttagtgacaaggaaaccaaactccctcctttaattttggcttcatattattctcagatgaatcatattcaatcagtagagctttcattctaaattcaaggaaggtgctgacccatcatgttaagtaacactccatcaatagctttctttctctcagtgtggtttataatcaatataaactgctgggatctatcttttgggttttacattaagctttggcaaaatgaaaaaggtctcaggtggggttgggggtgggggtgaggggctcacagctctctgttaagcacmaacctttgcttctggaagtctcttaatactattattactgttatcactgttatcctctttggcactaaacgggtcacttcagatggctcaggaagaacccaatccattttggaatgaccatgacttttatgtggcaaaagaatagatgcccaccaagataaactagaattttcttctcttcttattcccttattcctgtcagtttcttttttaaatgatatatttttcctttttatttgacatgtaataattgtgcatatttatggagtacagagtgatactttgatacat

SEQ ID NO: 390833 - DNA, 607 bp, Homo sapiens
gtattttccttttgtcttctgaacagcccttagtgacaaggaaaccaaactccctcctttaattttggcttcatattattctcagatgaatcatattcaatcagtagagctttcattctaaattcaaggaaggtgctgacccatcatgttaagtaacactccatcaatagctttctttctctcagtgtggtttataatcaatataaactgctgggatctatcttttgggttttacattaagctttggcaaaatgaaaaaggtctcaggtggggttgggggtgggggtgaggggctcacagctctctgttaagcaccaacctttgcttctggaagtctcttaatactattattactgktatcactgttatcctctttggcactaaacgggtcacttcagatggctcaggaagaacccaatccattttggaatgaccatgacttttatgtggcaaaagaatagatgcccaccaagataaactagaattttcttctcttcttattcccttattcctgtcagtttcttttttaaatgatatatttttcctttttatttgacatgtaataattgtgcatatttatggagtacagagtgatactttgatacat

SEQ ID NO: 390834 - DNA, 553 bp, Homo sapiens
tggggccagaaccaggcctkccacttacaagttgtggcaattaacttaacctatttctacctagttaaaatgggaataataacagtattttctcacagaattgtagaaaatgaaatactgtataaaaagtggcaaatagaatgaaatagatgttagtcagaattaacttagtgtcaccatattgccatcattataattgttaagccagctgctacgtgctggaaagtcagtgcagagactactgtcatttaaaggagacagacacatcaacaaatacatacagaaagggggtccctatttaaatgaggaaataacccagtggctgagggtctgaaggagctttgaaagcccaataattctcccttgctgccatatcactgtgtatggctgtggcaagtgatgaagaaaaataaatgttttaaaagaaccatgcttggatgaggcatctgaattcctgtttcctggatccaggaattctaagtatctcattacaatggcctttctctgcagatcacggaggcagaaggccactacaaagatgtcttggtgccat

SEQ ID NO: 390835 - DNA, 553 bp, Homo sapiens
tggggccagaaccaggccttccacttacaagttgtggcaattaacttaacctatttctacctagttaaaatgggaataataacagtattttctcacagaattgtagaaaatgaaatactgtataaaaagtggcaaatagaatgaaatagatgttagtcagaattaacttagtgtcaccatattgccatcattataattgttaagccagctgctacgtgctggaaagtcagtgcagagactactgtcatttaaaggagacagacacatcaacaaatacatacagaaagggggtccctatttaaatgaggaaataacccagtggctgagggtctgaaggagctttgaaagcccaataattctcccttgctgccatatcactgtgtatggctgtggcaagtgatgaagaaaaataaatgttttaaaagaacsatgcttggatgaggcatctgaattcctgtttcctggatccaggaattctaagtatctcattacaatggcctttctctgcagatcacggaggcagaaggccactacaaagatgtcttggtgccat

SEQ ID NO: 390836 - DNA, 499 bp, Homo sapiens
gaaaaaaaatagaataaacacaccaacatatgtatagccaaaaggactcaaattaaagggagcacttctagttaaagagacatctaaaaagtgtttttttgagggctggggctgggcttaggtacagttcagtaggggagcttgttgacctccgaagcatcttcctgaactgggattctattgactgtacttgcctgtttaccaaaagacatgcacactgtgtttcttaatcaacaaaaagtattataatagrcatcccttgagctaaggcataccttaatcaacaaaattattaattgatgcatacattattatgttaatttattataataaagaagaattggggatgggaatgacgtggtttaatacaacaacataaccatgcaaatctctgcttctggtgatcattttcaaagacatgttgcaaaaatagggccattgcctataagccaaagctgtgtttcatcatgtcccatgacttaccatgtgtgcctggaaa

SEQ ID NO: 390837 - DNA, 499 bp, Homo sapiens
gaaaaaaaatagaataaacacaccaacatatgtatagccaaaaggactcaaattaaagggagcacttctagttaaagagacatctaaaaagtgtttttttgagggctggggctgggcttaggtacagttcagtaggggagcttgttgacctccgaagcatcttcctgaactgggattctattgactgtacttgcctgtttaccaaaagacatgcacactgtgtttcttaatcaacaaaaagtattataataggcatcccttgagctaaggcatmccttaatcaacaaaattattaattgatgcatacattattatgttaatttattataataaagaagaattggggatgggaatgacgtggtttaatacaacaacataaccatgcaaatctctgcttctggtgatcattttcaaagacatgttgcaaaaatagggccattgcctataagccaaagctgtgtttcatcatgtcccatgacttaccatgtgtgcctggaaa

SEQ ID NO: 390838 - DNA, 499 bp, Homo sapiens
gaaaaaaaatagaataaacacaccaacatatgtatagccaaaaggactcaaattaaagggagcacttctagttaaagagacatctaaaaagtgtttttttgagggctggggctgggcttaggtacagttcagtaggggagcttgttgacctccgaagcatcttcctgaactgggattctattgactgtacttgcctgtttaccaaaagacatgcacactgtgtttcttaatcaacaaaaagtattataataggcatcccttgagctaaggcataccttaatcaacaaaattattaattgatgcatacattattatgttaatttattataataaagaagaaytggggatgggaatgacgtggtttaatacaacaacataaccatgcaaatctctgcttctggtgatcattttcaaagacatgttgcaaaaatagggccattgcctataagccaaagctgtgtttcatcatgtcccatgacttaccatgtgtgcctggaaa

SEQ ID NO: 390839 - DNA, 328 bp, Homo sapiens
tgggggcctgctttgttttcagtcccaaggaaggcatcattgaaccaagtggagtccaagctatccagatctccttcagctctaccatcctgggaaactttgaagaagagttcctggtcaatgtcaatgggtcacctgagcctgtgaaactgaccattaggtaaggtacatttataatgaatgtagaaactaacagaagttttaacctrttgcctttttagctttttaagtagatcctgtcttggatgctgatgactatctttgttgatatgaacacatcagcataatagagtgtgttaaatttccatcagtgtttccctagtgaaca

SEQ ID NO: 390840 - DNA, 570 bp, Homo sapiens
atgccattcaactcacagccatggacataatgaaaactcctagctcatttcccatgcatggttagttcacaggcaattatttgcagatgcaattctgcatgttggcttaattgacactttcccttgtttatcaagggtaatttctctgggaaattaacaacgrtttacacctgcagctgctcaggcatgcagctagcaatccaactgtgactttataacccgatccttagactatctaagggttaaaaatcagcattacttaaggtcatgtgttcaggaatgtggcacttcagagggatttctctttctcatcaagggaactcaatggaagaataattaatactgaagaaggagaaaggaactcacctgaggctggacctcatagaatcctgggaggtcatcttgatcggcaagctggagtgttttctcatacgggtacttcaggaagcagtgcccaaagtccacctctgtattgaccaggtggagggcaggtacaacacacctgctcggaggagcccatcacacaattcaaaacagagagcttgtttacatacagaacacgcagagccc

SEQ ID NO: 390841 - DNA, 610 bp, Homo sapiens
gaaacacattcatgtatcctttgtgataacacacctgccaacctacttggaagatatctttcatggaaaaagaactgtgagattgagtgcacttaaaggrttattcttggaaattccagaggaactgcttggaaggcagcttcacaatcatgctacatgtgactttcctggacttaccaaataatgactctggaaactgtagatggcttagccttatttgatctgaccatttatgagttagacgatctgtgaatgtggagcgtattatggaaagtgggtattataaagagtcacgtggtcttccaaaccattgcccagactgcttccttaaagccagaactttttcacagaataaagccaattatgacctcctagttacaacaatttcttgtactagtacctgtaatatcccatattgcttgtcaagaagcctaaaggaaggggatgctgatttgttaaagactgaaggtcattaataagaatgttacacctaggtttctaattgcaaccaatcctaatactattctatctacagttccacctgaatgcaagtactttacagttgtagacctctatgctcccttttatagggtctagtagataaaaagtc

SEQ ID NO: 390842 - DNA, 610 bp, Homo sapiens
gaaacacattcatgtatcctttgtgataacacacctgccaacctacttggaagatatctttcatggaaaaagaactgtgagattgagtgcacttaaaggattattcttggaaattccagaggaactgcttggaaggcagcttcacaatcatgctacatgtgactttcctggacttaccaaataatgactctggaaactgtagatggcttagccttatttgatctgaccatttatgagttagacgatctgtgaatgtggagcgtattatggraagtgggtattataaagagtcacgtggtcttccaaaccattgcccagactgcttccttaaagccagaactttttcacagaataaagccaattatgacctcctagttacaacaatttcttgtactagtacctgtaatatcccatattgcttgtcaagaagcctaaaggaaggggatgctgatttgttaaagactgaaggtcattaataagaatgttacacctaggtttctaattgcaaccaatcctaatactattctatctacagttccacctgaatgcaagtactttacagttgtagacctctatgctcccttttatagggtctagtagataaaaagtc

SEQ ID NO: 390843 - DNA, 610 bp, Homo sapiens
gaaacacattcatgtatcctttgtgataacacacctgccaacctacttggaagatatctttcatggaaaaagaactgtgagattgagtgcacttaaaggattattcttggaaattccagaggaactgcttggaaggcagcttcacaatcatgctacatgtgactttcctggacttaccaaataatgactctggaaactgtagatggcttagccttatttgatctgaccatttatgagttagacgatctgtgaatgtggagcgtattatggaaagtgggtattataaagagtcacgtggtcttccaaaccattgcccagactgcttccttaaagccagaactttttcacagaataaagccaattatgacctcctagttacaacaatttcttgtactagtacctgtaatatcccatattgcttgtcaagaagcctaaaggaaggggatgctgatttgttaaagactgaaggtcattaataagaatgttacacctaggtttctarttgcaaccaatcctaatactattctatctacagttccacctgaatgcaagtactttacagttgtagacctctatgctcccttttatagggtctagtagataaaaagtc

SEQ ID NO: 390844 - DNA, 563 bp, Homo sapiens
ttgttgggaatctcagagcagaccacttcacagaatattctcatacctgcctggggcagctaactcaggataaaaatggtatgcttacgctgaaagggaatcagtacttgaggatctctcagttcctgtgtggctggagaaggacacaggcattacacatggatacatggcacccttcctcccactcatggttctggaaggtagttgggttgagaacagtgaacttgccatgggtctgcaacagggctgccatagcaaaaggccaggcaaccatacctcaatggctatgaagggagaagagagattarcttcacactgtccaacggaaatacaatgcaaaacacaaataggtgacattaattttaacaacatagtgcatttaacccaacatgtcagaaatattatttcaacatgtaatcaatagtattttacacttacagcacatctcagtgtgctcagtagcttcatgggggaagcacaggtctagctctagggagaatggagtcagtggaagccaagtcagtgttggctctgctggagctgaaaggacaagccatcagtgt

SEQ ID NO: 390845 - DNA, 534 bp, Homo sapiens
atatgatagcttgagaatagttttttgttttttgttttttttgtctctgaaaatgaatcagaatgctttcaacattaaattgtaatatcccagtccccagaatagtgtctagaacatagctaaactaatattactaaatatacgttactaaatgaataaaggtccccattaaatacattttcccactgtaggttttttctatttttcattcatcatattaaggaattcccctcctactcctagttttctaagaayttttatttctcattatgaatgagtgttggattctgtggaatatttttctcagcatgaactgagatgatataaattgtggtaaattacatgaatggatttcctgttactaaaccatttttggatttctgggataaattctacttggtcatgatgtaattttaaaaatgcatctctatgcatgtgatttgctaatgctttaaaatcaatgttcataagagagatgggtctatatttttcttttcttgtgttgttttactgtgaatatatttgtctcctaaa

SEQ ID NO: 390846 - DNA, 582 bp, Homo sapiens
ctgtatttcctagccttatgtgcagcttggttgtggccacacmactaagtactcaccaatgggatataaccatatgtggcgtgtacaacttctaggaagtgtccttaaaaggaaggggtgtactcttttcctgtctcttcctcctttctgctggctggaatgtgagtatgacggctaaggttagggcagaaaacttgaccaagacatagaagctacatgctacctatgatggagttacagaattgaaagagcatccagttgcacactataaggacaaatgtttttcttcagtttagaaattctcagccgccatctcttcaaatattgctctttggccattttcattctttctccatctagcatttctgttagatacaagttagaacttttaaacctttaaacttagaacttgtatctattagatacaagttagttagttagttagaacttttaaatcttactttccatgtccctttatttcgctttcatgtagtctaactcttttgctttcagtgctacattctggatgaatttctcaacattagttacttgtcaatatataagttttatgcctgactgtca

SEQ ID NO: 390847 - DNA, 582 bp, Homo sapiens
ctgtatttcctagccttatgtgcagcttggttgtggccacacaactaagtactcaccaatgggatataaccatatgtggcgtgtacaacttctaggaagtgtccttaaaaggaaggggtgtactcttttcctgtctcttcctcctttctgctggctggaatgtgagtatgacggctaaggttagggcagaaaacttgaccaagacatagaagctacatgctacctatgatggagttacagaattgaaagagcatccagttgcacactataaggacaratgtttttcttcagtttagaaattctcagccgccatctcttcaaatattgctctttggccattttcattctttctccatctagcatttctgttagatacaagttagaacttttaaacctttaaacttagaacttgtatctattagatacaagttagttagttagttagaacttttaaatcttactttccatgtccctttatttcgctttcatgtagtctaactcttttgctttcagtgctacattctggatgaatttctcaacattagttacttgtcaatatataagttttatgcctgactgtca

SEQ ID NO: 390848 - DNA, 584 bp, Homo sapiens
ttatgtggactctgttttcttatgcagggcaatcagatatagggcacatgttctgaatgtccttgtgctggacttcctattccagtgctgtggaacgggggttctttgtaaaccttcctccttccacgtagagaaaaggaatcctattcaatttctaatttaaaatggaaaaytactcaccaaaggaaacatcaccaaagtgcagagctggaacattaaaatggaaggtaggtccaatgacacagcctctggaaggaggaatacaaggtgggggagagggagagaatccagtgaatcagagtcacaatcaggaagtagggcaaggataagtacaaaaaccataccttgactttatgtcaattatagtatccaggatttaaagaaatgatgacatgatggtctatcacagtggttcttaaaattctttttcatgattcaaaccatgggttttgacaaacaatgctgtggttaacttattatcttatttctaccaatgaataggtgagaggcagagcagatggatcaccaaacaagggcacaaaatgttgttattttgaatgagacacatatcatgtaaagttatt

SEQ ID NO: 390849 - DNA, 523 bp, Homo sapiens
tccttgtgctggacttcctattccagtgctgtggaacgggggttctttgtaaaccttcctccttccacgtagagaaaaggaatcctattcaatttctaatttaaaatggaaaattactcaccaaaggaaacatcaccaaagtgcagagctggaacattaaaatggaaggtaggtccaatgacacagcctctggaaggaggaatacaaggtkggggagagggagagaatccagtgaatcagagtcacaatcaggaagtagggcaaggataagtacaaaaaccataccttgactttatgtcaattatagtatccaggatttaaagaaatgatgacatgatggtctatcacagtggttcttaaaattctttttcatgattcaaaccatgggttttgacaaacaatgctgtggttaacttattatcttatttctaccaatgaataggtgagaggcagagcagatggatcaccaaacaagggcacaaaatgttgttattttgaatgagacacatatcatgtaaagtta

SEQ ID NO: 390850 - DNA, 584 bp, Homo sapiens
ttatgtggactctgttttcttatgcagggcaatcagatatagggcacatgttctgaatgtccttgtgctggacttcctattccagtgctgtggaacgggggttctttgtaaaccttcctccttccacgtagagaaaaggaatcctattcaatttctaatttaaaatggaaaattactcaccaaaggaaacatcaccaaagtgcagagctggaacattaaaatggaaggtaggtccaatgacacagcctctggaaggaggaatacaaggtgggggagagggagagaatccagtgaatcagagtcacaatcaggaagtagggcaaggataagtacaaaaaccataccttgactttatgtcaattatagtatccaggatttaragaaatgatgacatgatggtctatcacagtggttcttaaaattctttttcatgattcaaaccatgggttttgacaaacaatgctgtggttaacttattatcttatttctaccaatgaataggtgagaggcagagcagatggatcaccaaacaagggcacaaaatgttgttattttgaatgagacacatatcatgtaaagttatt

SEQ ID NO: 390851 - DNA, 523 bp, Homo sapiens
tccttgtgctggacttcctattccagtgctgtggaacgggggttctttgtaaaccttcctccttccacgtagagaaaaggaatcctattcaatttctaatttaaaatggaaaattactcaccaaaggaaacatcaccaaagtgcagagctggaacattaaaatggaaggtaggtccaatgacacagcctctggaaggaggaatacaaggtgggggagagggagagaatccagtgaatcagagtcacaatcaggaagtagggcaaggataagtacaaaaaccataccttgactttatgtcaattatagtatccaggatttaaagaaatgatgacatgatggtctatcacagtggttcttaaaattctttttcatgattcaaaccatgggttttgacaaacaatgctgtggttaacttattatcttatttctaccaaygaataggtgagaggcagagcagatggatcaccaaacaagggcacaaaatgttgttattttgaatgagacacatatcatgtaaagtta

SEQ ID NO: 390852 - DNA, 581 bp, Homo sapiens
aggaatacaaggtgggggagagggagagaatccagtgaatcagagtcacaatcaggaagtagggcaaggataagtacaaaaaccataccttgactttatgtcaattatagtatccaggatttaaagaaatgatgacatgatggtctatcacagtggttcttaaaattctttttcatgattcaaaccatgggttttgacaaacaatgctgtggttaacttattatcttatttctaccaatgaataggtgagaggcagagcagatggatcaccaaacaagggcacaaaatgttgttattttgaatgagacacrtatcatgtaaagttattaatgtgtcaagaaataaaaattataggtctaatcatgtaatacacatcaaagactatcattgatactagtaatccctgtccatgctttcatataaactgttccaattccactcttaccactgtgacattcctaccactgtgacattcactcactgtgatgttggccagccactttatctctatcagcttctgtttctcttcctcgtgtataaaagagaggactggactaggtgacactgaatgactctttact

SEQ ID NO: 390853 - DNA, 489 bp, Homo sapiens
gttggtctatttctctctcagtgtaaggctttatgatcttggagagatgctgtagcttaaaataaataatagagagattctatgacttctagcttagaaggtattgtaggtagaataatggctcccagagatatctatgtcctaattcccagaacctatgaatatattaggttacatggcaaagaggaattaaggtagcagatggaattagggttgctaattaactgaatttaagatgaggagattatcctgtcttatcctagtaggcccactgtaatcacaagggtgattttaaaaatagaggaaagagacagaagaggaggtcagagtgctgcaatctgagaactcaacctggctttgaacacagaagaaggaaactttgaacamagaagaaggaatccaggaatgtgagcagcctcagaaagccaaaaaaggttaggaaatggttcccctctagagccttcagaaggaaacacagccctgccaaca

SEQ ID NO: 390854 - DNA, 489 bp, Homo sapiens
gttggtctatttctctctcagtgtaaggctttatgatcttggagagatgctgtagcttaaaataaataatagagagattctatgacttctagcttagaaggtattgtaggtagaataatggctcccagagatatctatgtcctaattcccagaacctatgaatatattaggttacatggcaaagaggaattaaggtagcagatggaattagggttgctaattaactgaatttaagatgaggagattatcctgtcttatcctagtaggcccactgtaatcacaagggtgattttaaaaatagaggaaagagacagaagaggaggtcagagtgctgcaatctgagaactcaacctggctttgaacacagaagaaggaaactttgaacacagaagaaggaatccaggaatgtgagcmgcctcagaaagccaaaaaaggttaggaaatggttcccctctagagccttcagaaggaaacacagccctgccaaca

SEQ ID NO: 390855 - DNA, 568 bp, Homo sapiens
ttagcaattgatcatgagtttggtgataaatccccataaagattctttccatagtcaggtttgttgaaggaaactagaaatgaacatccaaaatcaagaagtggcatgtgaattttggtaaatggaaatgtccagaagatagaacaagaggcttaccctgcacagagcaggtggagtactaactagtcsaagttcacttgtgagcagattcctgggagatccctaaatcctattattcccaatggaaaacccaagtacaccttaacctatttagacattgcaagtgacatgcatgactactctgggatctttaggagaacagatcagagatttaaaaaattcacccaggaaattacagaagtattattcactattacagcctcctggaatttttttttaaatgacagcttcattgagatataattcacacatcatacaattcacacatttaaagtgtacaaatcaatgttttttgtatattcacaaatatatgcaaccatcactacagtcaatttgagaacgtttttatcacctcaaaaagaaacctcatgccctttagctgtcaccc

SEQ ID NO: 390856 - DNA, 568 bp, Homo sapiens
ttagcaattgatcatgagtttggtgataaatccccataaagattctttccatagtcaggtttgttgaaggaaactagaaatgaacatccaaaatcaagaagtggcatgtgaattttggtaaatggaaatgtccagaagatagaacaagaggcttaccctgcacagagcaggtggagtactaactagtccaagttcacttgtgagcagattcctgggagatccctaaatcctattattcccaatggaaaacccaagtacaccttaacctatttagacattgcaagtgacatgcaygactactctgggatctttaggagaacagatcagagatttaaaaaattcacccaggaaattacagaagtattattcactattacagcctcctggaatttttttttaaatgacagcttcattgagatataattcacacatcatacaattcacacatttaaagtgtacaaatcaatgttttttgtatattcacaaatatatgcaaccatcactacagtcaatttgagaacgtttttatcacctcaaaaagaaacctcatgccctttagctgtcaccc

SEQ ID NO: 390857 - DNA, 568 bp, Homo sapiens
ttagcaattgatcatgagtttggtgataaatccccataaagattctttccatagtcaggtttgttgaaggaaactagaaatgaacatccaaaatcaagaagtggcatgtgaattttggtaaatggaaatgtccagaagatagaacaagaggcttaccctgcacagagcaggtggagtactaactagtccaagttcacttgtgagcagattcctgggagatccctaaatcctattattcccaatggaaaacccaagtacaccttaacctatttagacattgcaagtgacatgcatgactactctgggatctttaggagaacagatcagagatttaaaaaattcacccaggaaattacagaagtattattcactattacagcctcctggaatttttttttaaatgacagcttcattgagatataattcacacatcatacaattcacacatttaaagtgtacaaatcaatgttttttgtatattcacaaatatatgcaaccatcactacagtcaatttgaraacgtttttatcacctcaaaaagaaacctcatgccctttagctgtcaccc

SEQ ID NO: 390858 - DNA, 617 bp, Homo sapiens
tttcatttatctttggctactatgaatgatactgttataaacattcatgtacaagtttttgtgtggatatatgctttcattcctcttgggtatatacctaggagtggaattgctggtcatatggtaactcagtgtttacatgtttgaggtgctgataaatcattttctaaagtggctgccatgtcttacattcctaattaccagtgtatgggagttctcattcctccaccttttcaccaatacttacagtagttccttatctgtagttttgattttctgttgtttcagttacttatggtcaacacggtccaaaaatattaaataaaaaatttccagaaacaaatcagtcakaaattgttaagtgcactttgcgtagtgtgatgaagtcttgtgtcatccactctctgtccagccgaggtcatgagtcacccttttgtccagtgtatcgatgctgcatatgctacccgctctttagtcacttagtagctgtcttggttatcagatcaactgccacagtattgcagtgcttgtgtctgagtaaccctaattttacttttgcgctttggggcctaaaaatgcagataaagggaaactactgtattttccattttaagatt

SEQ ID NO: 390859 - DNA, 549 bp, Homo sapiens
tgtagcatctatcagtgcttcattttttttcattcctttttatggtcaaatagtattccattgtatagatataacacatttcatttatctttggctactatgaatgatactgttataaacattcatgtacaagtttttgtgtggatatatgctttcattcctcttgggtatatacctaggagtggaattgctggtcatatggtaactcagtgtttacatgtttgaggtgctgataaatcattttctaaagtggctgccatgtcttacattcctaattaccagtgtatgggagttctcattcctccaccttttcaccaatacttacagtagttccttatctgtagttttgattttctgttgtttcagttacttatggtcaacacggtccaaaaatattaaataaaaaatttccagaaacaaatcagtcagamattgttaagtgcactttgcgtagtgtgatgaagtcttgtgtcatccactctctgtccagccgaggtcatgagtcacccttttgtccagtgtatcgatgctgcatatgctacccgctct

SEQ ID NO: 390860 - DNA, 617 bp, Homo sapiens
tttcatttatctttggctactatgaatgatactgttataaacattcatgtacaagtttttgtgtggatatatgctttcattcctcttgggtatatacctaggagtggaattgctggtcatatggtaactcagtgtttacatgtttgaggtgctgataaatcattttctaaagtggctgccatgtcttacattcctaattaccagtgtatgggagttctcattcctccaccttttcaccaatacttacagtagttccttatctgtagttttgattttctgttgtttcagttacttatggtcaacacggtccaaaaatattaaataaaaaatttccagaaacaaatcagtcagaaattgttaagtgcactttgcgtagtgtgatgaagtcttgtgtcatccactctctgtccagccgaggtcatgagtcacycttttgtccagtgtatcgatgctgcatatgctacccgctctttagtcacttagtagctgtcttggttatcagatcaactgccacagtattgcagtgcttgtgtctgagtaaccctaattttacttttgcgctttggggcctaaaaatgcagataaagggaaactactgtattttccattttaagatt

SEQ ID NO: 390861 - DNA, 576 bp, Homo sapiens
ttggtagtaatgtcctttcttttattcctgttgggtagagtgtgctgtagatgtctgttaggtctaggtggtttatagtgttcaactcttctatttcctttgtgatcttctgcttagttttttattattgaaagtggggtattgacatcccttactattttgctgaattgtctatttctcccttcaattctatctttctgcacttcacagattttggtgctctgttattagatgtgtgtttataattgccatatctttttgatgaactcactatcttatcattgtaaaatgcccttctttgtcttgagtaacaatttttattttaaagtctattttgtctgatataacatagactctccagctttcttttggtactgyttgcatggtgtatatatttccatccttttggtttcaacctattcatatctttaaatctaaagtgtggtatcttgtaaaaagcatatagatacaagatagatatcttgtaaaaagcaaaaagatatagatttttggcggggttgtttgttttgttctaatccattctgccattctctaacttttaattgaagtatttaa

SEQ ID NO: 390862 - DNA, 485 bp, Homo sapiens
gaagcttcatctgtatttacagccactccccaccactcgcattactacctgagctcttcctcctgtcaggtatccagcggcattagattctcacaggagcacaaaccctattgtgaactgcacatgtaagggatccyggttgcatgctccttatgaggatctaatgtctgatatctgtcactgtctcccatcaccccctgatgggaccatctagttgcaggaaaacaagctcagggctcccactgattctacatgatggtgagttgtataattgtttcatcatatattacaatgtaataataatagaaataaagtgcacaataagtgtaatgtgcttgaatcatcctgaaaccatccccccaccaccccacccagtccatggaaaaattgtcttccatgaaaccagtccctggtgccaaaaaggttggggaccactgctttgcaggcacgtttcccccactcttcttccattctttctcccaggc

SEQ ID NO: 390863 - DNA, 563 bp, Homo sapiens
agagtgaacgtgtgtgcctcaagggttctgtggcatgaccaaagcarcctgtcacaatcataatcttttttatttttaagtctcaagacttatctgaaacattcacaagacatttacgttctcttccataatacatgtgtgtttgttataagagaaaaatgagggttgttttccaaatatttgaataacattgactcttcacgaatatgtgccgtgcttatcccagcccatggttaacatcctttgggtatgtatacaacatgagaagggtgggaatacactttcatttatatgaacttcagcccacttcctaccttcataacatctcatctctcatgacaagcagtgaagggtggttctctgaagaagtaggaagaacaaacttgtgaatataaccttgtctccaattcacggatcctctagtcccatgagggcctttgatatgatccagcagatcaactcttggaagctgactactgggcatcaggaagtattgctctgagtcataagcacccttgacaacatccagtatcataagcaagccttcatacataagcagcaaa

SEQ ID NO: 390864 - DNA, 654 bp, Homo sapiens
attaaaagagtacaaagacaaggcaccaacagagagcagttttggcatacaaaccacctgcagatgatcagtctacatactacataaagaatgcccttgaaggaaaagacagaawtcaactaaaacccaggagagaagaatgagcaggtatttcacagaagaacagatatgaatggccaataaagaataaaaagatgttccacctcattagtaatcttgtaaatgaaaattaaaacatttacaactagacaccaccagactggacaaaattaaatatgatcgtaccaagtgtttccaccagcatttcctccacagtgtttcctggatctgccttgcctttcatcatctttcccaggaatcctccctccaggctccctacctcactctgctggtggctttcttccctctggtctcccctggctgcagaccaacctgagattacttttctttgagctgttgctttcaccaccccatttccttccctgtgactcaagaggaaaatgagcctttcactttttagaaatacatgaatgttttcaaatctacagttgtctttcaggtatccactgaaggttggggcccttgagaataccaaaatccacagatgctctagtctcttatataaaatggtgttctatttgcctatagccttcc

SEQ ID NO: 390865 - DNA, 654 bp, Homo sapiens
attaaaagagtacaaagacaaggcaccaacagagagcagttttggcatacaaaccacctgcagatgatcagtctacatactacataaagaatgcccttgaaggaaaagacagaaatcaactaaaacccaggagagaagaatgagcaggtatttcacagaagaacagatatgaatggccaataaagaataaaaagatgttccacctcattagtaatcttgtaaatgaaaattaaaacatttacaactagacaccaccagaytggacaaaattaaatatgatcgtaccaagtgtttccaccagcatttcctccacagtgtttcctggatctgccttgcctttcatcatctttcccaggaatcctccctccaggctccctacctcactctgctggtggctttcttccctctggtctcccctggctgcagaccaacctgagattacttttctttgagctgttgctttcaccaccccatttccttccctgtgactcaagaggaaaatgagcctttcactttttagaaatacatgaatgttttcaaatctacagttgtctttcaggtatccactgaaggttggggcccttgagaataccaaaatccacagatgctctagtctcttatataaaatggtgttctatttgcctatagccttcc

SEQ ID NO: 390866 - DNA, 460 bp, Homo sapiens
gtaactgaattggactgtttttcatttcaattgtgagtgttataaaactttttctcctgcttttgtgttgttatagaactctagtcaccttattatagcttctttctttttaaggcattttcccgatgtttccagtatcagtggagggcatcagacttccagagattcaatgtgagctaagccagcttctaatgaaatcagcggaaactatcagtacatatctgarcctaagtcagggttgtgtccgcttggttcatggagtgatgttcgtaaaaagggctcatttggttggtctacatgttcatattaattaaaatcctcccaaagctagctacaatctactgaaagccagacattaaaagaaattgactttaaaaaccaacctgttttgaaagtatttctaaagagctatgaagctgataagggagatttcacagcctacctgtttggcagcctttct

SEQ ID NO: 390867 - DNA, 460 bp, Homo sapiens
gtaactgaattggactgtttttcatttcaattgtgagtgttataaaactttttctcctgcttttgtgttgttatagaactctagtcaccttattatagcttctttctttttaaggcattttcccgatgtttccagtatcagtggagggcatcagacttccagagattcaatgtgagctaagccagcttctaatgaaatcagcggaaactatcagtacatatctgagcctaagtcagggwtgtgtccgcttggttcatggagtgatgttcgtaaaaagggctcatttggttggtctacatgttcatattaattaaaatcctcccaaagctagctacaatctactgaaagccagacattaaaagaaattgactttaaaaaccaacctgttttgaaagtatttctaaagagctatgaagctgataagggagatttcacagcctacctgtttggcagcctttct

SEQ ID NO: 390868 - DNA, 595 bp, Homo sapiens
  misc_feature (1)...(595): n = A,T,C or G
ctgctccctttagaaacagcagtcaggggcttgcctaatctggagcagatttgcgatgtgtagagtcagaggaaggaaggaaggatggatgagaggcagggggtttacaaaatgagaaaagcaaagttagatagctgagarcaagaataggaatttgggaagccacctgataagatctgacaagtaaagatgcatggtttgcatcagattataaattaggaacaatggaaatatgagattggaactgcaggagaaaataatctcagcaatgaaattaattcacagaggccactagcgcacactcagacctttgaagtgctggatgttctcataactggacctctgaccatgcaaggcaccagtggctactgtggatcattttctcattttgatatcagtgatttataagggtgatgaccagcttgcaccactaagaatattgacattttctttccatatacttgaaatgttttcattccacttgttcattctgtagttgtttattgagggtaattgtgcaggacactgtgctagggagaataaaaccaannnnnnnnnnnnnnnnnnnnnnnnnnnnnnnnnnnnnnnnnnnnnn

SEQ ID NO: 390869 - DNA, 595 bp, Homo sapiens
  misc_feature (1)...(595): n = A,T,C or G
ctgctccctttagaaacagcagtcaggggcttgcctaatctggagcagatttgcgatgtgtagagtcagaggaaggaaggaaggatggatgagaggcagggggtttacaaaatgagaaaagcaaagttagatagctgagagcaagaataggaatttgggaagccacctgrtaagatctgacaagtaaagatgcatggtttgcatcagattataaattaggaacaatggaaatatgagattggaactgcaggagaaaataatctcagcaatgaaattaattcacagaggccactagcgcacactcagacctttgaagtgctggatgttctcataactggacctctgaccatgcaaggcaccagtggctactgtggatcattttctcattttgatatcagtgatttataagggtgatgaccagcttgcaccactaagaatattgacattttctttccatatacttgaaatgttttcattccacttgttcattctgtagttgtttattgagggtaattgtgcaggacactgtgctagggagaataaaaccaannnnnnnnnnnnnnnnnnnnnnnnnnnnnnnnnnnnnnnnnnnnnn

SEQ ID NO: 390870 - DNA, 535 bp, Homo sapiens
gtaaattctgtgcaattctctgtgtcttttcaagagctgctgatgattccttactattatcttcaatgagttggtaaaacctcttggtcttaggtcactaagaaatacttgttagacagataaaaaatctccttcccttgttttgttttgttttcctttgctttaagatamacgtggcatgtagaagcaaatacatataaataattctttcctcctcatgtcgttttgcgtaaacgacagtatactttacataatggttttaacattgcttttaaaatatttcccagggattatatacaatactaaataaaagatgtcattcttttcatgattgcataggaaccctttgcatttacatactgcaatttaatttttaaccttgtgtcattattgaatagaatgcagattcagaaattacataatacatttagtggtaagcacagaagtggcctcccaaagatgtccaggtcctgacccccagaatctggggacatgttacattaaatggcaaagacgaatcaaggcagcagatgga

SEQ ID NO: 390871 - DNA, 535 bp, Homo sapiens
gtaaattctgtgcaattctctgtgtcttttcaagagctgctgatgattccttactattatcttcaatgagttggtaaaacctcttggtcttaggtcactaagaaatacttgttagacagataaaaaatctccttcccttgttttgttttgttttcctttgctttaagatacacgtggcatgtagaagcaaatacatataaataattctttcctcctcatgtcgttttgcgtaaacgacagtatactttacataatggttttaacattgcttttaaaatrtttcccagggattatatacaatactaaataaaagatgtcattcttttcatgattgcataggaaccctttgcatttacatactgcaatttaatttttaaccttgtgtcattattgaatagaatgcagattcagaaattacataatacatttagtggtaagcacagaagtggcctcccaaagatgtccaggtcctgacccccagaatctggggacatgttacattaaatggcaaagacgaatcaaggcagcagatgga

SEQ ID NO: 390872 - DNA, 563 bp, Homo sapiens
agagtgaacgtgtgtgcctcaagggttctgtggcatgaccaaagcaacctgtcacaatcataatcttttttatttttaagtctcaagacttatctgaaacattcacaagacatttacgttctcttccataatacatgtgtgtttgttataagagaaaaatgagggttgttttccaaatatttgaataacattgactcttcacgaatatgtgccgtgcttaycccagcccatggttaacatcctttgggtatgtatacaacatgagaagggtgggaatacactttcatttatatgaacttcagcccacttcctaccttcataacatctcatctctcatgacaagcagtgaagggtggttctctgaagaagtaggaagaacaaacttgtgaatataaccttgtctccaattcacggatcctctagtcccatgagggcctttgatatgatccagcagatcaactcttggaagctgactactgggcatcaggaagtattgctctgagtcataagcacccttgacaacatccagtatcataagcaagccttcatacataagcagcaaa

SEQ ID NO: 390873 - DNA, 595 bp, Homo sapiens
atgccttgacttcccctctcatccttgaaggatttgctcactggatatagaattctgagctgacagttctttcatcccttgaaatatatgccactttcttctggcctccatggtctaatgagaaatccaatgtcatttgaattattttttttcctctgtagggragatttcatctctctctcactgctttcaggaatttttctgtgtcttagtttacagaagtttgactataatgtgtcttggcataaatttctttggtttattgattttgggatttgctgagtttcttgaatctgttgatctttatcttctttccaacttggaaatttttcaggcattattcaagtacctttttcagcctcatgctctttctactctccttccagggctcaaatgacactcatattttgttttgttacagttttacagttctttgaggctcttttcttttttttaagtctattttctctgttatccagagtaagtaatttctattattttatcttcaagttcgctgattttcttctccatccatttcattctgcccacatattgagtttttattttggtaactatatttttacgttctaaaatt

SEQ ID NO: 390874 - DNA, 595 bp, Homo sapiens
atgccttgacttcccctctcatccttgaaggatttgctcactggatatagaattctgagctgacagttctttcatcccttgaaatatatgccactttcttctggcctccatggtctaatgagaaatccaatgtcatttgaattattttttttcctctgtagggaagatttcatctctctctcactgctttcaggaatttttctgtgtcttagtttacagaagtttgactataatgtgtcttggcataaatttctttggtttattgattttgggatttgctgagtttcttgaatctgttgatctttatcttctttccaacttggaaatttttcaggcattattcaagtacctttttcagcctcatgctctttctactctccttccagggctcaaatgacactcatattttgttttgttacagttttacagttctttgaggctcttttcttttttttaagwctattttctctgttatccagagtaagtaatttctattattttatcttcaagttcgctgattttcttctccatccatttcattctgcccacatattgagtttttattttggtaactatatttttacgttctaaaatt

SEQ ID NO: 390875 - DNA, 360 bp, Homo sapiens
gggggcactgccttcttactgccagatgcagataatagtctaggttccctccttggccttctttgacaaacagtaggaggagctcttcaytactgctgggcaggagtggtatttctggctctccgcaaggcctccattgataccttcctggctgggaggggcaggagtgccttgttactactctccacacagactccactgactctgcatggaaaaatagaggggtagccgtactacccaggaccactgggtaatgacaaaagttctgactcccactagacctcagctgacaccaccccagcagaggggaggaggggcatttctttaccaccagatggacgtggaagtccaggctcccta

SEQ ID NO: 390876 - DNA, 550 bp, Homo sapiens
gtatattagttttaaaacaagaagaaaacatatttccacaggtgaaatgcccaggctgaaatggagcaaaataaagatcatgtatccccacaggctcagagctcagccctacttctgacacctctccaaagggccccactctttgaaatccagaaagtatttgtacaagtctcagcctcaggcaggagcaggagttttataaaatcagtgagcagacccacttagagctgcagggagatttctagtgagaccaacaggattctctttctcccctcgagcagatcttgcggaagctgaagggctatgattcctacaacaccctgctgctgcctccccrcaaccctggggagaagctgcccccagaactgtacgagtacttcaaagagataaagaagtcaaaagaggagcagatgagggcgaaatatctggagaatctggcacaggagaatggtgagaactcaatgtggagaacacctcgtgctaaccattgcctttgcccctctgaattacccctgctctgggaccaacctgtttctgagtacctgccagg

SEQ ID NO: 390877 - DNA, 550 bp, Homo sapiens
gtatattagttttaaaacaagaagaaaacatatttccacaggtgaaatgcccaggctgaaatggagcaaaataaagatcatgtatccccacaggctcagagctcagccctacttctgacacctctccaaagggccccactctttgaaatccagaaagtatttgtacaagtctcagcctcaggcaggagcaggagttttataaaatcagtgagcagacccacttagagctgcagggagatttctagtgagaccaacaggattctctttctcccctcgagcagatcttgcggaagctgaagggctatgattcctacaacaccctgctgctgcctccccacaaccctggggagaagctgcccccagaactgtacgagtacttcaaagagataaagaagtcaaaagaggagcagatgagggcgaaatatctggagaatctggcacaggagaatggtgagaactcaatgtggagaacacctcrtgctaaccattgcctttgcccctctgaattacccctgctctgggaccaacctgtttctgagtacctgccagg

SEQ ID NO: 390878 - DNA, 568 bp, Homo sapiens
gaatagcagtagacccaatagtgcccaataaatgggtgctatgtgagtgaatgcattaatggattgaatgaagttatttttcctgcccttggacctgtctcattgtccaggaaatagaagctaatcagagaccactagtttggcttaaaaggagaagatgagagaagacagctgccacccaccccgtctcctagtcacgttccttgagtttgctagggctgccattgcaagtaccacacactgggtggcctaaccaacagaagtttcttttytcccaaatctgaaggctagaagtccaaggctgagtggcagcagggttgctttcttctgaatcccatcttgcagttggctgtcttctccctgtgtcttcacctggtcttccttctgtgtgtgtctgtgtcctaatctcctctcctcataaggacaccagtcctactggattgggacccacccatgtgacctcatcttaccttaattaccttttcaaaggtcctatctccaaatgcagtcacattctgagatactcgggtgttaggacttccacatatgaattgggaaaggacaccat

SEQ ID NO: 390879 - DNA, 489 bp, Homo sapiens
cagccatttcccttaatgctgcagatttcactagtttctaatattttgcactgtaagccatcctcctctccacacaaatgtcctttctacttttcagcaagagagattccccaaaatgaaagtggggtcaaaaaatctgtttttttattttagtagctataaacaaattattagcccaaaagggccttctcrtacactacaagtggggactgctgcaatatttgccatttaaaaaaaacagcatttaaaaagaaatatccattcccatttccatcagtacccatgtaaattccgtctgtgtagcatgcatgccatgtgtgcacacacatatattttaaatttgcagctgacaagcttcagagcattgacagccactccatggaggaagttggagaggtggaaaacaacccagtgagcaaagcaatcgctcgccacctgggcattgacatttctgcagaaggccgcctggccaagaaccggaaaggcatc

SEQ ID NO: 390880 - DNA, 489 bp, Homo sapiens
cagccatttcccttaatgctgcagatttcactagtttctaatattttgcactgtaagccatcctcctctccacacaaatgtcctttctacttttcagcaagagagattccccaaaatgaaagtggggtcaaaaaatctgtttttttattttagtagctataaacaaattattagcccaaaagggccttctcatacactacaagtggggactgctgcaatatttgccatttaaaaaaaacagcatttaaaaagaaatatccattcccatttccatcagtacccatgtaaattccgkctgtgtagcatgcatgccatgtgtgcacacacatatattttaaatttgcagctgacaagcttcagagcattgacagccactccatggaggaagttggagaggtggaaaacaacccagtgagcaaagcaatcgctcgccacctgggcattgacatttctgcagaaggccgcctggccaagaaccggaaaggcatc

SEQ ID NO: 390881 - DNA, 643 bp, Homo sapiens
gcttccagagtggcaacatcagctgtgtggtcatggcaaatactaatgactttatttgaggaactgcatagggtagtgaatatacattaatagctgtgtgcctttgggaaaattaactaaattgtctgtgctcagtttccctgtccgtaaagtggtattaacgctgtctattttatagggtagtcatgagaatttaatgagaacatttatataaaatgcttatctcaatacttggcacatagtaaatactcaaacgaaaagctgttgatgttatcattrttattactatgatgactgttggcattcacaattataaccatacctgcagtgtgaatcctcattgaaaagaaacttccatcacatgctaaatattctcaaggaatattttcctaaccataaaccagtcaagggatgagcccttgataaagaaaggattttttaacgagaatcctttattacctccaaaattacatgtgctaactttaccataaacccaaaggagcagaatcacctacattgggaaaaaaaaaatcttgtttgtatagtaatttgcagttcacagagctccttcccatccatttgtctatctaaacttcgtaaccactcagaaaagagaatttgatttcccctaccttatgggaag

SEQ ID NO: 390882 - DNA, 613 bp, Homo sapiens
aatactaatgactttatttgaggaactgcatagggtagtgaatatacattaatagctgtgtgcctttgggaaaattaactaaattgtctgtgctcagtttccctgtccgtaaagtggtattaacgctgtctattttatagggtagtcatgagaatttaatgagaacatttatataaaatgcttatctcaatacttggcacatagtaaatactcaaacgaaaagctgttgatgttatcattgttattactatgatgactgttggcattcacaattataaccatacctgcagtgtgaatcctcwttgaaaagaaacttccatcacatgctaaatattctcaaggaatattttcctaaccataaaccagtcaagggatgagcccttgataaagaaaggattttttaacgagaatcctttattacctccaaaattacatgtgctaactttaccataaacccaaaggagcagaatcacctacattgggaaaaaaaaaatcttgtttgtatagtaatttgcagttcacagagctccttcccatccatttgtctatctaaacttcgtaaccactcagaaaagagaatttgatttcccctaccttatgggaagctaaggtt

SEQ ID NO: 390883 - DNA, 643 bp, Homo sapiens
gcttccagagtggcaacatcagctgtgtggtcatggcaaatactaatgactttatttgaggaactgcatagggtagtgaatatacattaatagctgtgtgcctttgggaaaattaactaaattgtctgtgctcagtttccctgtccgtaaagtggtattaacgctgtctattttatagggtagtcatgagaatttaatgagaacatttatataaaatgcttatctcaatacttggcacatagtaaatactcaaacgaaaagctgttgatgttatcattgttattactatgatgactgttggcattcacaattataaccatacctgcagtgtgaatcctcattgaaaagaaacttccatcacatgctaaatattctcaaggaatattttcctaaccataaaccagtcaagggatgagcccttgataaagaaaggattttttaacgagaatcctttattacctccaaaattacatgtgctaactttaccataaacccaaaggagcagaatcacctacattgggaaaaaaaaaatcttrtttgtatagtaatttgcagttcacagagctccttcccatccatttgtctatctaaacttcgtaaccactcagaaaagagaatttgatttcccctaccttatgggaag

SEQ ID NO: 390884 - DNA, 513 bp, Homo sapiens
accttttcttctatgagatactgctgatcaaattctaaggaataaaactcaatggggaagttgcagggattcttcactatcacctcggcctcgtctccaggtgcacaaagtagcagtggccccagatccaggactgaaggactaaattccaggcgtggctctagaccttgcccacgtgccaggagggtaagcttttgagcactctgggcaatctgaaacaccagggtttggctgtagaatttctggaaaacataaaaacaaaacaagcatctgartttatttccattacatgtcatgtaaaacaaaacaccgctgaggggaaaaaacttatctatttagattaagggagaaaacttattataaaattgcataagagtaatttttattaccgaattaacataagtactgggtatttagcatgccaagcattgtaccaagtgctagatatcaaataaattctgggtatctagcattctagcacttgtatcaagtgcttcatcgtttgtagcaagc

SEQ ID NO: 390885 - DNA, 513 bp, Homo sapiens
accttttcttctatgagatactgctgatcaaattctaaggaataaaactcaatggggaagttgcagggattcttcactatcacctcggcctcgtctccaggtgcacaaagtagcagtggccccagatccaggactgaaggactaaattccaggcgtggctctagaccttgcccacgtgccaggagggtaagcttttgagcactctgggcaatctgaaacaccagggtttggctgtagaatttctggaaaacataaaaacaaaacaagcatctgaatttatttccattacatgtcatgtaaaacaaaacaccgctgaggggaaaaaacttatctatttagattaagggagaaaacttattataaaattgcataagagtaatttttattaccgaattaacataagtactgggtatttagcatgccaagcattgtaccaagtgctagatatcaaataaattctgggtatctagcattctagcacttgtaycaagtgcttcatcgtttgtagcaagc

SEQ ID NO: 390886 - DNA, 562 bp, Homo sapiens
ttgtcctctgacagattacaattcagcaggtctcaggagttagatttttaacagccttcccaggcaattctaatgggcagccagatttaggagctgccgtgggtaggaayggcagcatgacagctgaggatggagctgataattaatatggggctatcactgcagccttaacagctagggacagtgaaaatcagccgaggacaattctgaacacttatgaaatcactccaggtcagcagagacgcctggcgaggctttgccggctcgctgccccacataatagcactcacccatccagcctttgcacccctgtgggatgtgctgcataaagagaaaacaaatgggaatttctgtaatggaaaaatacaaagctgtagagggtcttcatacctgaggaaaaacaacacctcagttgacaatgctacctggacaattgggaagtaagaggtctttctggaaatcaatagaggaaggcagagcgccctccgtgcttgccccttgagccacaggagacagtgaaacatttactgtaatgaggactttacgttattaaaaccagaaa

SEQ ID NO: 390887 - DNA, 562 bp, Homo sapiens
ttgtcctctgacagattacaattcagcaggtctcaggagttagatttttaacagccttcccaggcaattctaatgggcagccagatttaggagctgccgtgggtaggaatggcagcatgacagctgaggatggagctgataattaatatggggctatcactgcagccttaacagctagggacagtgaaaatcagccgaggacaattctgaacacttatgaaatcactccaggtcagcagagacgcctggcgaggctttgccggctcgctgccccacataatagcactcacccatccagcctttgcacccctgtgggatgtgctgcataaagagaaaacaaatgggaatttctgtaatggaaaaatacaaagctgtagagggtcttcatacctgaggaaaaacaacacctcagttgacaatgctacctggacaattgggaagtaagaggtctttctggaaatcaatagaggaaggcagagcgccctccgtgcttgccccytgagccacaggagacagtgaaacatttactgtaatgaggactttacgttattaaaaccagaaa

SEQ ID NO: 390888 - DNA, 608 bp, Homo sapiens
cagcaatgtaaattcaaatgcttaaaaatctttagaaaaagggcaaggaaaacatagcaattatgataaaaagatcgaatagaaagaaaacactgagtaaatttaaaaaatagacaagatacratgaaagaaataatagcaagcatttcagttttgctaatcataagaatgtgttaaatgttcctattgaaacttaaggactctcagagaagattaaaaaataaaatccaaataagtatgttttatgaatgataagcctaaaacaaaatgaaataagactatgggcaaattatgtaaggcaaaaagaaagcagcaatcacaatattaagaccaaacaaaggggaattcaaagaagagcattcaaagggaacaagaaggcaattgaaggtagacagaacacacagtccatgatgaacacttaatagtcatgagatcttctgtgtcaacacagaaacgaaagggtataaacaaaaaggtgtatgtatttgtagaaaacaatagagaaatggacaaaagttttatataccactcttgagtcttagaaaaattaaacagaaaaagatatagaagattttaatgttataattatttgggttaatttagtagag

SEQ ID NO: 390889 - DNA, 522 bp, Homo sapiens
ccactttctctgtttgcttctgaaaccagtttggctcagcgcagtctgctagtgttttcacacctgctgaagtcagtggagaggaagccctcgggaattacaagagcagcgtgaagacatcggtggaaataaattagtctcattatcatggaaaaaaaatccatgggttgcatctgtcttgttgattgctgtatccctggtgcctggaaactggttactgtgggactaaataaatatttgtttaataaatgagcgaagtggcttggatttattttyttttttctgcttctgagagttctttagttttaacaaaaagaaaaaatcacacttgtaatcctggtcgtgaatactcacctgcttcggagtggggctcgtaggtttgaattcaggcccctcccaccatttacttacagacacaggcaggattagtggcactccagggagaaggttgtctggagaagactggtggtcagtcagaaccttgaactcaaagccaactttccccatgttcgtcagcgtgat

SEQ ID NO: 390890 - DNA, 592 bp, Homo sapiens
atatattagtttctgggcctcaatatattatcaaggaagaaacaaagcaaatacttagggagtcaataaagtcattaaagattctgatcacttctataaaccctcagtggttcccctccccgsaagctatcatgattactattcagaccaatgaactgtgtttctaaccattagaaaatcagcagcttattgtggcatactgtgtgtgggattgattgggttacactactttaaatgaatgtgagatatgaaatcattatttcaatattgtttaaaaattaattagaacttttcagaattgttttagaatgtcaaggtttaattaacttatttatttaacagactcatatgtgaccttctttgcagagagcctgtggatttcttcagcatttaatagtctagtggcgaggaggagtgggtttttgttttttattggagagctgaaatacactcattgtctttttatcactttaatagttctttgtgttgcaggtaaagcattattaattcatgtccaatgagaaatatacaaggtttttgacgacatagcaaaaactaagcaataaaaacaatcatccgaggagaaggggag

SEQ ID NO: 390891 - DNA, 645 bp, Homo sapiens
ctgtgggttttttttgtttgtttgcatttgactttttgctgattactttaatacacttatgtttctgattattctaagtcaatgctagaccaccactattcaagattttatttaagattttgattcacattagaagataggtttttcattttcattttaaaggtaaggaagtatttgaaataatgaggacragagtttatgggtttttttccttcattcattgtacaaataatttcttcattcattctacaaatattgtttaaagtgcttcctctgtgtcagcaccaacctagaacctgggaatataatggtccttgctctcccaaagcctacagtctgttgggagaaatagattttaatgaattaactgcacaaataaatgtaaaattccaattctgacacgtgctacaaaggaatcatgaataacatgattcacagaggcagatgatcacatgacggaggtcagggatgatgtttctgaagaagtgattcaggagctgagacctcaaaaacgaatagaggcccaaaaggcttccagcagatgaacaacatggacaaagggcctgtgaggggtgggagtgtgatgggtactgaggacagaaaggagaccagtgtggtgcttacacagaaagcagggtaggccgg

SEQ ID NO: 390892 - DNA, 574 bp, Homo sapiens
tgaaaacaatacaaatctattttcatttaaaatgtaaataartgtaataagcacgatttctacaaactccctcccccaaaacaaagcaaaaaatcagttataccagtttgtcaccaactgttgagaaccgttttgaagcttgtgactttgtatgtggccattagattctatcttccacccaatttctacctttccttttctcagctcccctgccacacaccattatggcatattataaaggctgataaggaaagaggctggacctttctttattcaaaagacagttctaattctagacaaaagatatgatctcctagaaacacgggtttatttaagatgacttcacttgagttgataccacatgggtcttcttcattcaatgaacccttaatcttttgttgggcatagagattggcttctattttttttttatcacaaatgaaaagatgcgatagtatatgttggaacccatgacttgccttataaataggcatggcaggtaattaattgcatgaataattcagaaatggcataattatggccaagtctatccttttctttacctcctttgcct

SEQ ID NO: 390893 - DNA, 574 bp, Homo sapiens
tgaaaacaatacaaatctattttcatttaaaatgtaaataaatgtaataagcacgatttctacaaactccctcccccaaaacaaagcaaaaaatcagttataccagtttgtcaccaactgttgagaaccgttttgaagcttgtgactttgtatgtggccattagattctatcttccacccaatttctacctttccttttctcagctcccctgccacacaccattatggcatattataaaggctgataaggaaagaggctggacctttctttattcaaaagacagttctaattctagacaaaagatatgatctcctagaaacaygggtttatttaagatgacttcacttgagttgataccacatgggtcttcttcattcaatgaacccttaatcttttgttgggcatagagattggcttctattttttttttatcacaaatgaaaagatgcgatagtatatgttggaacccatgacttgccttataaataggcatggcaggtaattaattgcatgaataattcagaaatggcataattatggccaagtctatccttttctttacctcctttgcct

SEQ ID NO: 390894 - DNA, 656 bp, Homo sapiens
ctgccatgattattacccttaaacacaattggttggcttttgccacagagtcaagaaagagactatatagtttgcttttggtcattcccaaatcattaatccagaacactaagggctcatccaaagaaactctcatgtatgaatagatagaatagtttacaatgattaggtaagtccatatccaatgttttgaagaactgattttagctctctttcatatatatacaatcagtctctctttagattttcaaggaagaatctcagataccaaggacttggataagtcacataggttttggtgactgagaaaaatttagacccactccctgctgtagaaaataaaatctaggatttgtttaaccatccctgttattggcttgaggaagttatgaatagcttatagtctaagaaactgacttacctccttagaataaatcatgcctaggttataaactttacttagaaaaattaggatttaaaaaaaatcttacgatctttctaaactaaaatactaaatacatatataaaatcagttgcagagctatcattatctttaaaacacaamgaatagtcatacacctatggaataagggcagaaatatagggaaattattatttcttatttgaggaattgtgagaggatttcttattatact

SEQ ID NO: 390895 - DNA, 629 bp, Homo sapiens
tttaaataattttgctactcagacacattttctctagtagaacacaagtataaatatattgaggattctctagagtaattgcaattagtgctcaataggggtttaattaacaacaaagaaaacatatattaatgatgcaggctgtttttgattaatagcatatctaaattaattacaaacattatgttaatattaactgtatattgtttaaaaacatgactagaatttataaatggatagaaaaattattttgtttcattttatttacttattttagtcttaaaaaatgaaaataccttttatgagttaaaatatttaaggctaaaatatattaacattaacagtatttattttgattggttatttttacttctctttatttatcatctgtcatatttgttaaatagctatattatcaaagatgccttcctgatataaaacatcaagttacatttgatctctcaaacatacaatcagtgattgctagaagaattatttatttctaaatgtagacaaggacttaagagtcctggaatttctcaggytattaaataaaaatgataattactgcataaagctcctgagaaagtcttctttctcttactcttttaatcaacaaatattaatgt

SEQ ID NO: 390896 - DNA, 491 bp, Homo sapiens
cgtacttactaacaataacatcaaatatcgatagacaaaactcttcaataaatagacatagagtggttcaatggaaaaaaaaaagacacaattacctcatacctacaagaaacacacttcacctgtaaagactgacagagactggaaataaacaagagataaaatatatttcatatgaatagaaatgaaaaaagagcatgagtagctttacttctaccagacaaacgagattgcaagataaaaactacaagaagagacaaagaaagtcattatataatgataaaaatgtcaattcatcaggaggatataactgttgtaaatatatkcacccaatactggagcacccagatatataaaggaaaaattattagagccaaagagagatatagattctaatacaaaaacagctggagacttcaacaccttgttttcagcattgaacagatctcctagacaaaaaaaaaaaaaaaaatcaacaaagaaacatagga

SEQ ID NO: 390897 - DNA, 629 bp, Homo sapiens
aattatttaggcatggtatatattcacttatttgattggctattttgtttattattcacttttatatcaaagggcctataatttttctttcataaaatgttctaaggtacgcatcaaattaatgctgccttcataaaacaatttataagtgttcacatttctctttttcaggaaaagttttttttacaaaaggttgttagtacagctgtcccttgaacaacatgggtttgactatgcagattcacttatatgcagtttcgttcagtaaaagttataatgagtgtgcctacttctcctaccttcccttctgcctctcccacctcttgtgtctctgccatctctgagacagcaagaccaacccctcttctttgtcctcctcaacccattcaacrtgaagacaataaggatggagaccttatcatgatccacttctacttaatatattctctcttccttatgattttcctaataacatttctcttctctaccttactttattgtaagaataaagtatataatacatataacgtacaaaataagtgttaatcaactgtttgtgttatcggtaaggcttctggtcaagagtaggttattagtagttaagcttttgaggaattaaaagttgtagg

SEQ ID NO: 390898 - DNA, 572 bp, Homo sapiens
aggtcaaggcaatgtttcagtttcagtaagactcaaatcatctctggtttttccttgtttcttggtatgaccctcatcacattcgaaaaggtgtcagaaaattatttgtcttcccagttctgaaagacttctgaagttatagtcattatttccagaatttccttgctccttcaacctaccactcacctcacctwaagtctctgttaaatacctattgaaagatcagcaattgttttgtctgaggccctatttcagaaaggcgttttttttttttcctcaacattgtataatggaggaggctttgctcttcattgcagaagatttcagcctacctttccactctactgaaattcttgattagcattattttacttaaggctggtctgtttcctaaaaccagaaggaagttttcacatttggttaaataaggaaagcatgtgttacataaaagtaaattctatgtagttttcattttttatgtataatccttcaattctataacaaagataatgaacgttttttagatttattagattgttcataactgaggaaacaatcagtgaacttcaaga

SEQ ID NO: 390899 - DNA, 572 bp, Homo sapiens
aggtcaaggcaatgtttcagtttcagtaagactcaaatcatctctggtttttccttgtttcttggtatgaccctcatcacattcgaaaaggtgtcagaaaattatttgtcttcccagttctgaaagacttctgaagttatagtcattatttccagaatttccttgctccttcaacctaccactcacctcacctaaagtctctgttaaatacctattgaaagatcagcaattgttttgtctgaggccctatttcagaaaggcrttttttttttttcctcaacattgtataatggaggaggctttgctcttcattgcagaagatttcagcctacctttccactctactgaaattcttgattagcattattttacttaaggctggtctgtttcctaaaaccagaaggaagttttcacatttggttaaataaggaaagcatgtgttacataaaagtaaattctatgtagttttcattttttatgtataatccttcaattctataacaaagataatgaacgttttttagatttattagattgttcataactgaggaaacaatcagtgaacttcaaga

SEQ ID NO: 390900 - DNA, 566 bp, Homo sapiens
actattgtataatagtttctttttcaatactttattaattatttcaaactgtataattgtgacccaatggatatgcattaaaatcaaggtcaaagaagaaatggaagtattagccgcaaaagcaacaaaatgattgtggcaagcacataatgtttccctttttcaaaatattcttctcttaatctaaaagacatatttatgctatatccaatcttacaaatcacatatcccttctttggtgaagattttcacaaatctccccttctagagtaaatatgcctccacttgcttagtaactctcttattctcttaycatgatgcacttgccactattttagattattgatcagttggttcattgattattaattcttacagatttctacaaaaacttaagctgcataggaataagcactttaaatttttcatcactgctttcctagaaatattccctcagacatggtagtcctttaagaaatatttattgaataaataaaaactgcaaaaagaaaggttgcaaaatttcacttaatgcttgaatagctatcttacaatgatggtaaaaa

SEQ ID NO: 390901 - DNA, 514 bp, Homo sapiens
ggaaaactgaggcatcatgaaattatcacatacgtttaattttgcttctgatatttattttcatgacttttttttaagtgtgggaaaataagcccctttctgtcatcctacctttcctgtcctgtttaaatgcacttatgcagacatttatttgagaaaagtctargtgtcatttgcccatgtactttaaggcgttaagtacctaggacataaaatcacctaaagtttaagcagttagtggtaacgtgtttgaaaataaactcctgatcttttcctttaaaattgatcccacagattctttaccatgtcaatcaatagctgctctatcatcttagattttcaggaaaaacagtgtatatataaatcatccttgactcttttcctctcacatttcacattattagtcagtaaactgtattgactttaccttagaaatacagtcattccttggtctccacaggggcttggtttcagaaaccctgtggatactaaaattcatggttgctcaagtcca

SEQ ID NO: 390902 - DNA, 529 bp, Homo sapiens
tgtgctaatattagcactaggatgcttamacataatgtttcttctgattcacacaaaaattgcctaagaattgccagtgctccatcccccgattgcatgcaaagatactgagaaaggtaaagagaacttgtgacattggtatcacttattattgatattatttggatatcttaaaaacaatagctagtaccccaccttttttacatgtacacaaaatcctttacatgaaggtttaacaaaccttttctggtaaacagacacatagtaaatatttttactttgctgatcatgcaatatctactacaactattataattcaggaattttagagaatcataagaaagaaatgaatgagcagtgtgttccaaaatctttatttctaaacacatatgggccaggcacagtggctcatgcctgtaatcccagcactttgggaggccaaagtgggcagatcacctgaggtggggagttagagaccagcctggcaaatatggtaaaacccagtctctaataaaaatacgaaaaaaaa

SEQ ID NO: 390903 - DNA, 460 bp, Homo sapiens
tcctgtacagaattcagaaccatgagctaattaatatcttttctttataaattacctggcttcaggtatttctttgtagcaagtcaagaacagcctgacatagaaaattgatactgagsagtgggacattgctataagatacctgaaaatgtggaagcaactttggacctgggtaatgggtacaggttagaagagtgtggcaggttcaggagatagaaagatgagggaaaatttaaaacttcttatagactggttaaataatcatgaccaaaatgctgatagtgatattcagagtgaaggcaaggttgatgaggtttaagatggaaatgaggaacttatgggaaactagagcaaaggtcatgtgtattatgctttagtaaagaattctgctgcattgtgttcatgccttagggatctgtgaacgtttcaacttaagagcaattacttagggtattgggag

SEQ ID NO: 390904 - DNA, 636 bp, Homo sapiens
tccaaaacttatatggttattttttatatgctgatagatcacatgtagatatagaatgtgtatttaaagctgaattccacccacacttactaaggtctgcccattccmgaacattcatctttgatgttcttccatttcatattttaaaactggtaatgcctgtcccactcttgaaagctcaagttttcagttttccatttccagattgctactgtagcactacagtaactcttttaaccaaccatgacactgaataacttatatagtgaacaaaaagggggaatgactaattcatgccaggagaaaaagtccagtgtaccactcaacatggaaataatgtgttcatggactggaacaggaaatactatgactactattctacttcgtgtgcatctgattatatgatgttgctctggttgagataaatatgcactaattaaaatgcagatgttttgcatttaatctctttcaaaagctaaactgctgagagatgactctagaaatggtctttcattttaaacaaatcattgtttttctacatattagcaataaataggatatataattaaataaataattatcgtagcatgcaaaatatcatataccaactattaaatctattaaatcaattgctct

SEQ ID NO: 390905 - DNA, 585 bp, Homo sapiens
acgctatattaatttctgacaaattagactttaagaagaaactactatatatacttttgcatgtgtgtgtatatgtataatacatctcgtatatatatatacatatgtactatatatattcagactattacacaggaataattagatattttaacaaacttttctcagaaactgatagaacaaataggatcaaaaactttgaggatacattttatataaaaagccatataaacaaaatcatgataactgggacttataagaaactgcatctgacaactgcataatgcatattgtcatcatgtacacatagagcatttacacaaattgactgtaagatggaccttaaaggagttttcaaaatattcaaagaattgaagtcatgcaaagaatattatttgaccacgatggaatcaatctaaaaaccaatttaaaaagayatgaagaagatccccatgtctttcaaaaataactaatacacttacaaatatcacagtaatgaagagaaaactacagtgagtattggaaaatattttgaactgaaagaaaaaaaatacctcacatttgtgagattcagctaaagccagg

SEQ ID NO: 390906 - DNA, 634 bp, Homo sapiens
ggacatgccagcctatatattatacatatacacatgtgcatrtacgcatacccacacacatacacaaacacacacacacacacacacacacacatcctgttgtttctgtttctctggagagccctgtataatacggatgacataatctgataagaatagtataaaaataaaaattatgcaaaatacaaattgatataaatttaaaagtcacccacttgagaaaataaaagaaatatgctatattttggtctcaatagaccaagaacaaacttttgttaaaattgaacattcatttgtgactaaacacttagaccaatagtaaggcaatttcatattctgataaataggatctacaaaatgtctatggtaagtattatatttaatattaaaattttctaaaattttcttgtttctctaggaacaagtcaagaatcctggtattatcatatccattaaattttcccagaaatcttagtgaaattaagtacaatttaggacaaccattaagggaaaaaaaactaaacaaacatttatagagataatattatttatttcttaatatctaaaaacaatctaataagacattatgggatttaaaaagtgagtttagcaagattgctgaacatgaaaagtc

SEQ ID NO: 390907 - DNA, 634 bp, Homo sapiens
ggacatgccagcctatatattatacatatacacatgtgcatatacgcatacccacacacatacacaaacacacacacacacacacacacacacatcctgttgtttctgtttctctggagagccctgtataatacggatgacataatctgataagaatagtataaaaataaaaattatrcaaaatacaaattgatataaatttaaaagtcacccacttgagaaaataaaagaaatatgctatattttggtctcaatagaccaagaacaaacttttgttaaaattgaacattcatttgtgactaaacacttagaccaatagtaaggcaatttcatattctgataaataggatctacaaaatgtctatggtaagtattatatttaatattaaaattttctaaaattttcttgtttctctaggaacaagtcaagaatcctggtattatcatatccattaaattttcccagaaatcttagtgaaattaagtacaatttaggacaaccattaagggaaaaaaaactaaacaaacatttatagagataatattatttatttcttaatatctaaaaacaatctaataagacattatgggatttaaaaagtgagtttagcaagattgctgaacatgaaaagtc

SEQ ID NO: 390908 - DNA, 634 bp, Homo sapiens
ggacatgccagcctatatattatacatatacacatgtgcatatacgcatacccacacacatacacaaacacacacacacacacacacacacacatcctgttgtttctgtttctctggagagccctgtataatacggatgacataatctgataagaatagtataaaaataaaaattatgcaaaatacaaattgatataaatttaaaagtcacccacttgagaaaataaaagaaatatgctatattttggtctcaatagaccaagaacaaacttttgttaaaattgaacattcatttgtgactaaacacttagaccaatagtaaggcaatttcatattctgataaataggatctacaaaatgtctayggtaagtattatatttaatattaaaattttctaaaattttcttgtttctctaggaacaagtcaagaatcctggtattatcatatccattaaattttcccagaaatcttagtgaaattaagtacaatttaggacaaccattaagggaaaaaaaactaaacaaacatttatagagataatattatttatttcttaatatctaaaaacaatctaataagacattatgggatttaaaaagtgagtttagcaagattgctgaacatgaaaagtc

SEQ ID NO: 390909 - DNA, 597 bp, Homo sapiens
tgtgcagccagctacacctgcatgagagtccacttagctactatttactcaagtatatcaccggatggttgcttatcatctgacaaaggagggagtgaaaaacattcagattcttttttttttttaactatctactccctattcaactgtattttctaagaggattttgatctctaggctctggccacccctactcctcctcctagaaagccgacttgactgggaagatcatctccaaatgtctacctggaatggagagtgagagatcttgtgaaatgagccatcttgtcacaatgggtctcttccagtggtttctttcttcaccactaccccctttaatacaaggataccgacatggactcctctctacaccccctccacacaaacatccctacgtctgaggccagaatgagctgaatgccatcctttggccwccacagctcagttcagctcctggtgtctcgtgatcatttccccagctcatttactgacttttttcccctttcagatgtttgcacatgcccctctttctatactgtaaatagatatttttgagatctattttaaaataaatctttaacttgccatgtgttttaa

SEQ ID NO: 390910 - DNA, 645 bp, Homo sapiens
attgactaacttggagaatgatctgaattctaggcatgttttcacttttttttttttaagcaattttgggctggtgatggaatagtgataagggtcatttaagggtaaagtgtaactattccagaaaagaataatcagttaattatgggtagataaagtgttaacaacaacaacaaaaaatatgacatgaatctagtctagccctgaggcactgagggcctggactacacctgaaagaaataaatacagagtgtattacraaggaagcattttgtgctaggaaagaccctcaaaaataacttatgaataaattatgtgtgaattaacatggatagaaatgcagatcacaataaaattgtatcactgttttcctgacacattcctgatacactccatgttttaaaaacccatttctcattttcctaccattcttttacttgagttctctgacttctttgctcaaattaagtcttatttctgattctaatatgtgtagacagaacttgcttatctatgtcacttgcattaaagttaagtttcctgtttctaggatttactactcgtgtgtttttgcattttaataataaattatctattaaatgagagatgtagatgaagatgacagagatataaagagataaatag

SEQ ID NO: 390911 - DNA, 592 bp, Homo sapiens
tgcttaaatttaatgtctttttaaagcaataggatgttagtttgtcttcagtaaaaatactacctccaaagaacatcaaagacagcctttgtgtttaaaattataaagcacataataaaatgaatgtcttgatagtctgtttaatgggtacctgtaaatatgtgtgtgtgtatgtaamttttgtctgaaatcataggctgtcattcaccaggatcttatcttaagcactttgttttctcataacacatgctatcccttgatggttttctaataatgacaatggcaacaataattattattatttataaaatgatgactatgcaccaagcactgtttaagacacttaagtaatatgttaaattaattgtcattaataatgtacttttaattttttattgatatacaatagttgtacatatttataggatccatagttttatacagtgcataaggaaaaaatcagtaattatgatatgaattacctcaagcttttatcatttctttatgttgggaacattccaaattttctctgctagttatttagaaatataatatacattcttgttaatgatagttaccctactgtcttatt

SEQ ID NO: 390912 - DNA, 576 bp, Homo sapiens
aataaatctctgctgtgatcataatttttctctttcatgacctgatcttgtcaccatgtctacgatcctaacctggatcttgttcatactgacaagacaattatcaatccatcttattgaatgttcaccattcaacaagtgacatttattgttcacctcatcactgggacacctagtratacaagggcaaatacaatgtaattcctactgtcacagagctgttgcaatcctgtgttagacacagattgacattaagaggtaactgcctcatcaaccatacatcatctgcaaggctgttcttggagagaagggctttgcatctgggtaaattttgtgtgtgtccatattgccctgctggacacatttcatagtattctatgtgcctatcccttgatactacagccatttaattatgctccgtttttttggcacagaatttagcgacatgattttatacttggtgaggaatggctgatatataagttaaatatcccagctaaatatgagttaaataacataagcttctcctttctcttaattttgccatttcccataagaaatactaaaagaaatgcc

SEQ ID NO: 390913 - DNA, 581 bp, Homo sapiens
actgttttctatagaggtcatatgaatttacatttgtaccagcagtgtagaagaatttcattttcaccacatttgtgctaacatctattgctttttgtttgtttgtttgtttgtttgtctgtttgtttgagacaggatctcacttcgtcacacagggtggagtgcagagacatgatattggctcactgaagccttgacttcctgggctcaggtaactctcccacctcagccccccaagtagctgggataagaggcatgccaccacacctggctaatttttgtattttttctagakacggggttctgccatgttacccgggctcaaactcctgagctcaagcaatctgcctgcctaagcctcccgaggtgctggaattatatgtataagtcactgtgcacagtctattttatttttgacttcttaataagggccattctgattctgacgaggtggtatctcattgtgtttcaatttgcacttctctgatgattagtaatgttcaacattttttatatgctttttgaccatttgtatatcttcttttgagaaatgtctattcatgttgtttctcattttttaa

SEQ ID NO: 390914 - DNA, 481 bp, Homo sapiens
gtgtctgaggctgtcatatattacccagtgtttctttttttttttcagttgcaaactcacagtgcaaccaatagtatcattaatgctaagatgattaaatggaaatctatccaaatctaacaaatayatttcaattatgaacaaataattccaacagtgtatactagagttatgggacaacatgtgagttgctatgaaggtagaatgtatgtgtctggatgtgctgtttagtgaagtcactattaaggagctggtctttggaataattcttcaaaactaagcctttatcatcagaaaatgaagttatcacaggcattctagtcatagacttttgatagaataatgtgggctgtttttagtataagttgtgtgtaaaataggtacaaagttggcaaaaaaattttttttgaagaacaattacttcattgtaactggctaaatagtaaaaaaatgatctgctcattgaaatatgcttagacat

SEQ ID NO: 390915 - DNA, 617 bp, Homo sapiens
acaatttcaattaaaaaagagaagtaagcccagctcatcattggcacaaccaacattagccagcaccactcaggacttagagggtcatcctgtcastgccgttgccatcatgcatgccacacaagtgtcccaagaacccaagaaatcaccaacctgctggttccatggcttccactatcagtatttgagtaaggcacctggaggcccaagaattggcctggtttgacctaacactggtgccagtgtatactgccctgggacacaatgatgggcatacttagcccattgctaacaccacttgggctcagagactggcttacttggcatcccagtcaccagcaaaactgcatcatagctcccattaataactgtacctaggccactgaggaaatgtcagatggcacttatgccagtcatggccaaaaaaatcaaagaaactacactactactgcaaccagaataaaagccaaaggaccctgcccaaccaacactatctattcatccttaggaaacattctccccctacaaaaacaaatttttaaaaattggaagaagcaactgaaacatcagatgtatatatattaacataagaacacaggaaacatgaaaaagccagg

SEQ ID NO: 390916 - DNA, 617 bp, Homo sapiens
acaatttcaattaaaaaagagaagtaagcccagctcatcattggcacaaccaacattagccagcaccactcaggacttagagggtcatcctgtcactgccgttgccatcatgcatgccacacaagtgtcccaagaacccaagaaatcaccaacctgctggttccatggcttccactatcagtatttgagtaaggcacctggaggcccaagaattggcctggtttgacctaacactggtgccagtgtatactgccctgggacacaatgatgggcatacttagcccattgctaacaccacttgggctcagagactggcttacttggcatcccagtcaccagcaaaactgcatcatagctcccattaataactgtacctaggccactgaggaaatgtcagatggcacttatgccagtcatggccaaaaaaatcaaagaaactacactactactgcaaccagaataaaagccaaaggaccctgcccaaccaacastatctattcatccttaggaaacattctccccctacaaaaacaaatttttaaaaattggaagaagcaactgaaacatcagatgtatatatattaacataagaacacaggaaacatgaaaaagccagg

SEQ ID NO: 390917 - DNA, 574 bp, Homo sapiens
ggtaccccctcccctcacaggcctggaggccttaggaggaaaaactggttttgtgggccaggccatggccctactgctctgtgcagccttggcacatggtgctctgtgtcccagctgctccagctccagctgtggctatgaggggccaaggaacagctcaggctgttgcttcagaaagtgcaagctccaagccttggtgacttccatatggtgttgggcctgcaagtgcagaaaaagcaagagtttgggagcctccacctagattttagaagatgtagggaaatgcctggatgtccaggtggaagtctgctgcagagacagaaccctcatggagaacctctactaaggcaataaggagaagaaatgtggggttggagcccctacacagagtccccactgggacactgcctcgtgtacctgtgagaaaagggccaccatcctccagatcccagaatggtagatccaccagcagcttgcaccatgtgcctagaaaagctgcaggcrctcaatgccatcccatgaaagcagctgtgagggctgtaccctgcagagccacaggggtggagctgcccaa

SEQ ID NO: 390918 - DNA, 556 bp, Homo sapiens
atgttatggaaagaacagcatttactcagttcttccattggataaatagttcagcaaagatgatatattgggctcaaaagctttcaaacagagtgaggaatgagaaataaatgcattgtacacacagtyttggaaccacagccttgagttaatagacatagttatccattccactcagtgacacagtacaaaactagtaatctaaacaaaattaatttgtttagattgaggaaattacgtgagttctgaaaagagttatttatttcaatattgtattttaaaagcagtttatttcatcaaaattgctaatgattattagacattattgtggtatactaacaaagtgattaaaatcagcatattcacatataattttataacatgcaaaaaaattggaaggctaagaaaaaataaaagctacaatcctaaatattaatggaacaggaattctaagtaaaggagccatttagagtgtattttacaactgagcaatgacagagaagtacactgagaagaaaaacaggtttggagtcagctattgattacaaaaaattaa

SEQ ID NO: 390919 - DNA, 615 bp, Homo sapiens
agctttgaagattttagatgactattagaaaaaagttggaaacacttcaaactcagaacataatggtagtaatagaaataaagatgctgaagtacatgagtttccatcaccatcaaaattttttgcatgattttaacagagctttatyattgaattaatacatctcactctgtaggtgccataaattatttctctttagagttattatttagtcaaagtagacactgacattccaaaaacaattaagtatatactcaagcaggcagctgttttgatttttaaggtttgatttttggatagcatagtatagatagattttggttagatatgtacagtgctagacctctgagagtaaatgtttgacattttgcagttgaatgaaagaagaaaaggaatgagcaaaatataatcactgatttttaattcctaaagcattctgtaccttaggttatccagtttcaattttgaaaaacttccctaaattttggtactttaacccaacacagaggtcttgttagagagcactgataattaaatgatttttggtaacagttccttgccaattatttttaacaaattttatggtaaattttagttatcatgatgataaattat

SEQ ID NO: 390920 - DNA, 513 bp, Homo sapiens
gtatttattcaactacagaggcactttctaagattatttttcctcgagatctatagactccaaactacagacttagctgaaagcaaaagttagcctcagaaaagtctttatcatcataagctctggttatcaaattttaattgatgcctgaaaatttaatactataaatgccaaagaagtaaaaaaaaaaaaaaaaattaaaataartaagccaccaccctcaattggtttgaatttttatttctagtggcctaaccaagtaatcaagagtgtaaagaaccaacattattgcatattgtttgtcaagaaaacctatgcccagtattgcatttaacatagctgtatttgtgaacagactcattttacagaaataatgtaatttccccaagatcatagtcaaaagatgtattataaacaggagcatttcactaagaacaggatgcctataaaaagcattgcagttttgcattggaaacataaaagtatttgagtatttttcattttattattttt

SEQ ID NO: 390921 - DNA, 513 bp, Homo sapiens
gtatttattcaactacagaggcactttctaagattatttttcctcgagatctatagactccaaactacagacttagctgaaagcaaaagttagcctcagaaaagtctttatcatcataagctctggttatcaaattttaattgatgcctgaaaatttaatactataaatgccaaagaagtaaaaaaaaaaaaaaaaattaaaataagtaagccaccaccctcaattggtttgaatttttatttctagtggcctaaccaagtaatcaagagtgtaaagaaccaacattattgcatattgtttgtcaagaaaacctatgcccagtattgcatttaacatagctgtatttgtgaacagactcattttacagaaataatktaatttccccaagatcatagtcaaaagatgtattataaacaggagcatttcactaagaacaggatgcctataaaaagcattgcagttttgcattggaaacataaaagtatttgagtatttttcattttattattttt

SEQ ID NO: 390922 - DNA, 513 bp, Homo sapiens
gtatttattcaactacagaggcactttctaagattatttttcctcgagatctatagactccaaactacagacttagctgaaagcaaaagttagcctcagaaaagtctttatcatcataagctctggttatcaaattttaattgatgcctgaaaatttaatactataaatgccaaagaagtaaaaaaaaaaaaaaaaattaaaataagtaagccaccaccctcaattggtttgaatttttatttctagtggcctaaccaagtaatcaagagtgtaaagaaccaacattattgcatattgtttgtcaagaaaacctatgcccagtattgcatttaacatagctgtatttgtgaacagactcattttacagaaataatgtaatttccccaagatcatagtcaaaaratgtattataaacaggagcatttcactaagaacaggatgcctataaaaagcattgcagttttgcattggaaacataaaagtatttgagtatttttcattttattattttt

SEQ ID NO: 390923 - DNA, 568 bp, Homo sapiens
tcaatatgaatgtcttaagaaagccttgttctttaagattcatgtmatgctgtgtttgagaacctaggatatcccagaaaaactttaggaagcttgggtctcaaatattgtatcttacacaaattgaaatccagattctaacctgtagagggactcattgtccagaaaataatgaatactacagtccagcttctcatttaaaaaataatgttatttatttcaaaaacctatctatttacagagagagtgtgatattatacattgtaatcaggtaacctgggttctagcctagactggactaatttattgtgagaccttctgaaaagcacttaatctctttaaaaatctgtttactcattctattaaatgaggagtttggataagacaacttctaatatccatattaacattaccattttgtgagtctaccttatgggaataattcttaactgtttggcagtcatgaagcaccttgaaaacctggtaaaactgtagagccagcctccaagaaattaatacatacatagtttgccatggagctctttaaagttcatgtatggatcttcaa

SEQ ID NO: 390924 - DNA, 530 bp, Homo sapiens
aaggcagtatagcctaatggttagggacataggctttaaagttggacaactttaaacatgaatctgatgtttccatgtatagctgtgtgacaccagctttccagctagtgatttattgtaagrttattcagcttttcaccagtaaagtgggtatacaatatcttataggattgttgtgagagttaaatgagataaagtataggaatgaatatagtagtgaatatgctttcaaccgcactatccttaataataaaaaattaatgactcaatataaaatatctgcactacaattagaagttatttactgagtattacacacacacacagatgcatgcactcatctctaatccttgcaataatgatagaagataggaattactgtattacaaatgaggaaattgcatttcaaaggttattggcttgccaaggccacatagataatacataataacaatgctggcatttgaatcaaagtatatctgactctaaagtttatgttttatctgctagtaaaagtagggaagcctact

SEQ ID NO: 390925 - DNA, 597 bp, Homo sapiens
attaatttggtattacaattctctgtttgcattatttgttccctcacaagactgttaactcctccagagactctcctctacctctctttcaatcctcagcacatggcacacagtgagcactgaatacatgtaggaaaaaaaagagtgtactctttcactggttctctatctcctggcatgtatataagattgtatgatagaatatgctcagctacatcaacatatctaaaatctaaggcattgctaataagaaaaggacatgccatttctctcttgtagagctgagtgtagctgaccaagtcattttcttcaggtgtcagtttgtgtatgggtttatagtgttatttacatttgacttatacataaaatacatacattaattaaaaagcacggttttttgagtatatataaaatagttacttttgtattttggatgtaggtagaggcattaaatatttctatttgtaaagatattctgtcctaatgactggggacaggaataagggrgccaaataatataatcatttataacaataagaaacaaataaattgcataataaaacattctatccttaaaagtcgtaagaaaaaagttac

SEQ ID NO: 390926 - DNA, 528 bp, Homo sapiens
taacaacaataagtaggagtagtgactatcaaagaggaatatagcacattaagatgctgcctacctgaaaaatgtcagaaaagaaaggtcatcagggtttgcagttcttattcatggttatgtcagttataccttagtctctttttcccctccaaaaatctcctccactaacacagagctggttcctgtctttgctctaggtatcattactatgggattggcatcaaagagagcagtgcatattaccactccgtttattctggaaagggcttgacaaggtagagttacaccatcttcaagacaaattctctgtgtttctttaaatatgcatgatacctattgaataaaatratttcttaattttgcttatcaagatgtttccatttaagcatcagaccttaatgtccgctttgtatggatgattatataatctagattactgggaaaattatataacttgtcataattagtgagaaattaattgtgaactagtgttccagagagatgaagaggagaaatcaaggaagc

SEQ ID NO: 390927 - DNA, 470 bp, Homo sapiens
taaccattttctgtggatacctgaaggcaataatagtgtaccattactttgatgattatagaaattaacacaactaagagctttctaaaggctcagaactactctaaataagtttaaaatgataataaaatattttcataacacaattgaaatttttaaaaattattttctttgggaggctgaaaaatacaaaaaattatttgggcatggtgatgtatgcctgtaatcccagctactcaggaggctgaggcagcagaatcacttgagccctagaggctcggaggttgcagtgagccatgattgtgccactgtattctagcctaggcaacagtgtgagaccctatctcaaaaaaaaaaattgtatttagggcgaccaaccatcgttggtgtgctcagacatgactttcagtgcaaatcttcatataygtcagttcatttgaacattcataactgtgaggtatggtgtcagc

SEQ ID NO: 390928 - DNA, 606 bp, Homo sapiens
gcttcactaggcaggaaggagtagaagttggtgctggacttgaagagcctgggtatcaagataaggarttttgacttattatagatttttaaataatttagtaacatgaagggatttttactatagaaagagatctagtggaagtgaatagaaggtttatccataccttctctatatttagagtaaaacatttgaggccatagtcaaatgagaaggctattgcaacaatctatgaaagaggtgatgaagaccaggattaaggaagtgatgacagggatacagattatgtcaaggttttgagaaaatgtaggtgttagaaaataaatacaggtgatgaattaaaggtgtaggacagtgaagcaggcagcagagtcaaggatgcatcccaggggcctaactagcccaaaagtggtactattacatactgagaaataaaaaacaggaggaggagaaggagaaggaaaatatgggttaaattttatgcatattgactttgcagtgtgagagggaacaagcagccggattggttggagagtgacctgggccagagatatggtttggggagtcgtttgggtcaaagttaagacacagagctgggtaatattg

SEQ ID NO: 390929 - DNA, 474 bp, Homo sapiens
gcctaactagcccaaaagtggtactattacatactgagaaataaaaaacaggaggaggagaaggagaaggaaaatatgggttaaattttatgcatattgactttgcagtgtgagagggaacaagcagccggattggttggagagtgacctgggccagagatatggtttggggagtcgtttgggtcaaagttaagacacagagctgggtaatattgtagcaagacagtgtgttacaggaaaacagatgtaggttgaggatgaaactctgggaagtactcacatttaatagtcaagtggaggaagacaaatctgccaaagagttaaaatgcaatggccagggtatcagagtagaaccagaaaagcctttgcatcagacttaagagtttgactcattgaaggctttataaattatagagggaaccaggaaggggaatttygatgaggaagagttagatcagaaatgtaattaagatt

SEQ ID NO: 390930 - DNA, 590 bp, Homo sapiens
aaagaccctggaaacattttattctggaatgtggcatctcctaaggcttattcatatacttgacattctttttcgaggcaaagttttagatacacttgtggcattttccctgcatatgtgtgcaaatgcttgtgcctgaagatctttgcttttctgccaggttgcagacttgccactagagctgggattggtcattgtgacattgccgctcatggagtccagtgaagcaggactcagggcaatgctgctcacactatgggaagaataactgtagatcatcttgagaaaggcagactttgtgttaatctcttgcttacaaataataacatagcatttggggatgaatgtgcaatacaggattccatagttagatattaatatgacaataatctccacagcyggtacatatttgccaaatgtggtagcatagatagggatgaatgtgatccaagctatgaagtaaatgagcatgccaaatgtaatgaatttggcttcattgtaattctcatatttgcctttgaaagcaaatatgaagcaaatgaaggccaggatggcaatgtagcccagcatggtgccaaatgcaagtatgg

SEQ ID NO: 390931 - DNA, 504 bp, Homo sapiens
gtaagcaaaaagaataggcatttggggactattccagttccggagttctcagcttttctacaagatgaatgggaatgctctaataaacaacaacatctgatgcttttaaattaggcttaactccagggaaagtgctcatagtttctttttaggctcctaaggctgctgacctcactcttgtactttaatttgtgtattttgctttcattttgtgaaatttttaaagatagggttggcaaacagtcatttactagcatctcatccctgttgatagttggtcccttgtctcacagaagtttcttttaggtttaacttttgtttcctggtagaaataataaragtgccaggatgtgcacacctgtttcttaactccgggtgcctctgggtttctattatgtttagttaattcaacatttacttatttgtattttttttgtacctcagttacaagccaagcacatctgtatagggatacatggacaaaattgacagagaacttgcatc

SEQ ID NO: 390932 - DNA, 504 bp, Homo sapiens
gtaagcaaaaagaataggcatttggggactattccagttccggagttctcagcttttctacaagatgaatgggaatgctctaataaacaacaacatctgatgcttttaaattaggcttaactccagggaaagtgctcatagtttctttttaggctcctaaggctgctgacctcactcttgtactttaatttgtgtattttgctttcattttgtgaaatttttaaagatagggttggcaaacagtcatttactagcatctcatccctgttgatagttggtcccttgtctcacagaagtttcttttaggtttaacttttgtttcctggtagaaataataaaagtgccaggatgtgcacacctgtttcttaactccgggtgcctctgggtttctattatgtttagttaattcaacatttacttatttgtattttttttgtacctcagttacaagccaagcacatctgtatagggatacatggacaaarttgacagagaacttgcatc

SEQ ID NO: 390933 - DNA, 635 bp, Homo sapiens
taagaaaatagcaaatggctagatttttataatctttgaaagaaagtttttatcatgctgtcaaggagcatgtcctgtctaactccaaaaaataaaaaaaaaagaaacattttgagtttaaaataaaatttaaaatttaatactctaatttaatattagaatattagatttaaaagacaggcctaaatatatactatttaaataatcttgagaattcaagttataatttgcatgtcacaatttgaatcactgcagcgttctacttttatggaaccstagctggtaattctttgcatttcagctatgttattctccattcatagtccctttctcacagcatatcttgtgagagaaatctgctttgtcatgtcacttttacccttggagcagagcagaatggttaaatgagtctttctcaagattctcttatccataatttcctactctggaacacaactgaagtactaagctatccagtctttctctggaagatgcaaatgatctgtctgagagagaaatgaaaagattcagtaggccctgggtctgcaagcactggttttcttcttctctccagttattgctgacctgggttttcagcaggcagtatatatgccttgggaattccccagggcaaa

SEQ ID NO: 390934 - DNA, 574 bp, Homo sapiens
caaatgtatccattattctaatgataacactgccttataaagcatatcacttaaaaatgagggaaaaaagattataaatcactggttggagaattcttaactatctggcaacaatttgagaatgaatttcacttgggtcctagcctcatttctgcctaacttttgctatataaatttgggaaagcaagttaatttctatagatggttgtttctaagtatcttcgtttatcctacagaattttagaatgggtcccctggtatagacacctgggatctaactctggttccatctctcatcaatgcaagtacaattactttctatctgattatctccaatggttcttaagtttgtttcaatgattgagtatgtagtaaagtgatctctaaattatatttctaagctaattcacaaaatgatttattttttaacttgagaagaaagaaatataaggataaattacctgtcttgctacctaatttgcacagtgagarcttgtatactatagagttaggacaaaaaatattttgtttacaaatgggatagccatactgaggttgtgctgtagtggaagaa

SEQ ID NO: 390935 - DNA, 494 bp, Homo sapiens
tatatatattaaaagagtgtttgcaattgagaaaaggtcctaatctctagttttacctccttattagatttttggctttgtattcataaggtgaaaagtagtttaaaagtgagcaatttaaaataccctcccaccattgcatgatcctcccaaatgttaactggtcatatcagacctcgaatatggtagttttgggtgtttaaagtaaaaaaaaaaatgacaaaagtagaaaaaacttgttctagatacccacttgtatgatcagaagaattgtctcatttcttttaccttcttttctcttacaaatttaaaacttatatattttgtaacatgattctgcctcaggacatacaagtttgcctttgaatacatattattgagacatttatttstaataagtaaaacatcattattaaaagaagcaatttacttttcaatgccttgttcaagggcatttgagaaagcacaatggaaaattctcactaaattaaagc

SEQ ID NO: 390936 - DNA, 535 bp, Homo sapiens
aatttactgctaggcactgatccacaattcagttgactaccttcacattaataacagatgatgaccatggttcttgtataggtagataaacctttctaagcatgcttgatgcagaatrcaagactaaaaagactatttcctagattttctcattcagaacaaaaaatacaaagtatagtctgattttgctactcatagtgtgtattttctactgtgtgattatgccattcttcatatactatacgtatctggaaactgagtctaatagtttacagtattggcagcctaaatatgaagcaaacctactattttcttcatcaatagatcacaaaggggaaactgggtatgtataaaaatcataagaacattttactaaactacaatatcacttttacagctttacaccattttatatgctaaaaccattcccacattggggtaggcagggatgttggacatgagcaagtggaaaatttccggttaattctggcaactccccatggtcagcagccaatgcttcattcctctgatttaa

SEQ ID NO: 390937 - DNA, 633 bp, Homo sapiens
aatgaatgtcattttgcttctgatatctgaatttcctgctggactggatataaattaagaaggaaaagaaagtatctttttgtagataaatgtatgaaataaagtttttgatgataattacagttttcctacctgtttctgaagttaaaatttcatatagaaaattgtaatttttgaaaggagacayaatgtctctctatataggtaacccagatatcacttatagccttgactgagtggtcctggtttttctgaagaatattagagcaagacttagtgtacatggagacatagcacctgcaaattgtttaatccttcattgctcagaagagtactatatgattataggtcatacaattctgcaagcgcaatgtcatctcccagatttagccagatattttccctttgatgatggtgtatgtttataaatattagtaagtcaattgggttctcaggtatctgacaatatgacactggaaagaatcttagaatttagaatcttagaaattatggcattattcagtcagaatctggtctgcttgaatacttgtaagactgtgggctctggcacatgtttaagccctcaaacacctcccagacattccctgggggtgactcatccagttttaagta

SEQ ID NO: 390938 - DNA, 571 bp, Homo sapiens
aggagctatgggttgagctgtcccatggttaacattacacaggaacactactattttctttcattcttctctggaaacaatcttgaatcatattcttccagttacttcacaaaatgtggtgcttgtgagaaattacatgttattgagatgtggtattcagtcattgagatgtataatttgacctgaagtaaaggagctcacacaaagctttccacctagactgtaacctagtcatttgacatagtcttaggggttgtgaaatgggagatgacacatattcctcttcttttttatctgtttattggtaaaacagtgcataccgagcttggctcagaacattctttattctgtacataactgattatatccttcagtgtttccactycacgtactgcagattccaaagtcctgagtgtggcctaataggaccctcccagcatggcttctagctcctttatccagcctccttcttccttaccactcctcccaatgcagatgcctggttttgtcattaaaagtgtctgtaattcttgcaaggttctcacaggtacatgtcggcagatgctttctc

SEQ ID NO: 390939 - DNA, 571 bp, Homo sapiens
aggagctatgggttgagctgtcccatggttaacattacacaggaacactactattttctttcattcttctctggaaacaatcttgaatcatattcttccagttacttcacaaaatgtggtgcttgtgagaaattacatgttattgagatgtggtattcagtcattgagatgtataatttgacctgaagtaaaggagctcacacaaagctttccacctagactgtaacctagtcatttgacatagtcttaggggttgtgaaatgggagatgacacatattcctcttcttttttatctgtttattggtaaaacagtgcataccgagcttggctcagaacattctttattctgtacataactgattatatccttcagtgtttccactccacrtactgcagattccaaagtcctgagtgtggcctaataggaccctcccagcatggcttctagctcctttatccagcctccttcttccttaccactcctcccaatgcagatgcctggttttgtcattaaaagtgtctgtaattcttgcaaggttctcacaggtacatgtcggcagatgctttctc

SEQ ID NO: 390940 - DNA, 482 bp, Homo sapiens
tagatttgaatatgagaatgatcagaataataaggtataaactcaaaataaaatcctaaggccaacaccaactgaataaacacccctgtggccaaggggaccccaggacaaccttaaaattgaattcctaggcatgacagtatgggggatcagacatgcctcactataccccactcccttttatgatttagatacagtractgatcagcattaatgtcaaaatacagatcataagactgacagaacagtctctttgtaaaagataccaatttataaacaggacctaaggccatgcaggcaagggctacatcatgcacctctattaatacatttaaagaataagctatgctctaactgccgttaagatttttctttttctctcccagataaacaagcactgttcatgagataagcaatattaaaacaacttgtaacttcaccagatgctgactaactgacccctagctcctgttccaccagct

SEQ ID NO: 390941 - DNA, 473 bp, Homo sapiens
cccccaggtcctcagaggtcatacatcttccgtggtgcctggctgagatttgcttctttatttctcaatatatctttccatttaggcttgcctaaatggttcattattatgaaattgccttgactaaaacaccagaatctgagacacaagttgctaactgctgaagaaaacgctttatacaattgtagtaaatttctgggccatacaaattaaaatatactttraaggtaggtactcaatggaagatagatttttttttttgttcttcacaataatgtatctttttttttaaaatctactactacaaacactttaaacaggactttccataagtgctattccctttaaaaaattggaaggatcatttacattactatttcaagcaagtaaagggtgcaggaaaatagcttgattacatccacttgtcctaacttttaacaaactagctgtatggctgtgggccatcactttct

SEQ ID NO: 390942 - DNA, 564 bp, Homo sapiens
ttcaaccatgattttaaaaatccaaaagtaattgcccccaaaaggcttaagtctcagcaagttctttgaagtctatgagctgatagatgcaagtacacatacagagaggaagcagtggttgaggtaaaagaaaaccagtaacatttttcctaaatactatatggtgatttttaaaatgtttactctttccccaaagcaagataaaaaaaaaaaaagcttgtcatttgctttttaaaactaacagagcagaaaagacactctgccatgaaaagtagaattactcagtaggaagaattaataagaacatatagagtgaataaaatttggttaccccatatgccatatgcaccccccmcacacacacacaaacagacacagacacacatacacaagcaaacatatttataacaaaataaataagaaatactcataacattatagttcttatttctacaatgggtcaaatgtttatagcttatacttataactaggttcttccactaccaggtctatattatctttgccctcagcaagtacctcagctggctgtgtttctttgcctat

SEQ ID NO: 390943 - DNA, 597 bp, Homo sapiens
ttcaataaaattattgttgtgtctcctgggagaggcattctttcctttagtagtaagacctctagaccaccagagcataagatcatgcgggaaaaataaaaaatttactagtgtatcaataagtgtaatagtgagtggcsctactcctattccacctcttcattcctgatcttttgtatcttggctataggagaaaaagcatcatatattagactctgatttagaccacacacagctttctggagcacgttgtcccagtcaagtaagtattgacataaagctagcattaaaattgagtcttcataaggccattccaaaattttatcggcagtttcttcaggataatggggaacatggtaaggacagtgaattccactagcacagcccattgccatgcttcattcgctgtgtagttagttttgtgatcaaaagcaatgctgtgtggaataccatgacggtagataaggcatccaataaatgtacagatggtagttttggcagaggcattgcatgcagagaaagcaaatccatatccagagtgtctatgccaataagaaccaagtatttctcctttcatgatggaagtcatccaatgta

SEQ ID NO: 390944 - DNA, 597 bp, Homo sapiens
ttcaataaaattattgttgtgtctcctgggagaggcattctttcctttagtagtaagacctctagaccaccagagcataagatcatgcgggaaaaataaaaaatttactagtgtatcaataagtgtaatagtgagtggcgctactcctattccacctcttcattcctgatcttttgtatcttggctataggagaaaaagcatcatatattagactctgatttagaccacacacagctttctggagcacrttgtcccagtcaagtaagtattgacataaagctagcattaaaattgagtcttcataaggccattccaaaattttatcggcagtttcttcaggataatggggaacatggtaaggacagtgaattccactagcacagcccattgccatgcttcattcgctgtgtagttagttttgtgatcaaaagcaatgctgtgtggaataccatgacggtagataaggcatccaataaatgtacagatggtagttttggcagaggcattgcatgcagagaaagcaaatccatatccagagtgtctatgccaataagaaccaagtatttctcctttcatgatggaagtcatccaatgta

SEQ ID NO: 390945 - DNA, 597 bp, Homo sapiens
ttcaataaaattattgttgtgtctcctgggagaggcattctttcctttagtagtaagacctctagaccaccagagcataagatcatgcgggaaaaataaaaaatttactagtgtatcaataagtgtaatagtgagtggcgctactcctattccacctcttcattcctgatcttttgtatcttggctataggagaaaaagcatcatatattagactctgatttagaccacacacagctttctggagcacgttgtcccagtcaagtaagtattgacataaagctagcattaaaattgagtcttcataaggccattccaaaattttatcggcagtttcttcaggataatggggaacatggtaaggacagtgaattccactagcacagcccattgccatgcttcattcrctgtgtagttagttttgtgatcaaaagcaatgctgtgtggaataccatgacggtagataaggcatccaataaatgtacagatggtagttttggcagaggcattgcatgcagagaaagcaaatccatatccagagtgtctatgccaataagaaccaagtatttctcctttcatgatggaagtcatccaatgta

SEQ ID NO: 390946 - DNA, 549 bp, Homo sapiens
taatattctaaatacttggttgtcatttcaacaatgttcaaagcatctttaccaggcatatattccatctcaagaaaccgctttctttgctcatccataaaaagcaacttcttatctattcaagttttattatgagattgcagaarttcagtcacatcttcaggctccacttctaattctatttacctttttatttctacatctgcagttgcttcttccactaaagttttgaacccttcaaagtcatccatgaggattggaatcaacttcttccaaagtcctgttaatattgatattttaacctcttctcatgagtcagaaatgttcttggtagcatcaagaatggtgaatcctttctttccaggaagctttcacccaccttgcccacattcatcaaaagaatctatctatggcaactatagccttatgaaatgtattatgtaaataataatacctgaaacttgatcatttctagcttttggtttaaggtgagagatgtgctactctccttttcccttgaacacttagaagccattataaggttattga

SEQ ID NO: 390947 - DNA, 549 bp, Homo sapiens
taatattctaaatacttggttgtcatttcaacaatgttcaaagcatctttaccaggcatatattccatctcaagaaaccgctttctttgctcatccataaaaagcaacttcttatctattcaagttttattatgagattgcagaagttcagtcacatcttcaggctccacttctaattctatttacctttttatttctacatcygcagttgcttcttccactaaagttttgaacccttcaaagtcatccatgaggattggaatcaacttcttccaaagtcctgttaatattgatattttaacctcttctcatgagtcagaaatgttcttggtagcatcaagaatggtgaatcctttctttccaggaagctttcacccaccttgcccacattcatcaaaagaatctatctatggcaactatagccttatgaaatgtattatgtaaataataatacctgaaacttgatcatttctagcttttggtttaaggtgagagatgtgctactctccttttcccttgaacacttagaagccattataaggttattga

SEQ ID NO: 390948 - DNA, 538 bp, Homo sapiens
aacttcttatctattcaagttttattatgagattgcagaagttcagtcacatcttcaggctccacttctaattctatttacctttttatttctacatctgcagttgcttcttccactaaagttttgaacccttcaaagtcatccatgaggattggaatcaacttcttccaaagtcctgttaatattgatattttaacctcttctcatgagtcasaaatgttcttggtagcatcaagaatggtgaatcctttctttccaggaagctttcacccaccttgcccacattcatcaaaagaatctatctatggcaactatagccttatgaaatgtattatgtaaataataatacctgaaacttgatcatttctagcttttggtttaaggtgagagatgtgctactctccttttcccttgaacacttagaagccattataaggttattgatctaatttcaatattgttgtgtctcagaaaatagggagaccacaagatagggagagacatggaaaatgaccagttgatagatcagtttaaacac

SEQ ID NO: 390949 - DNA, 590 bp, Homo sapiens
ggaatctgttgcctctgaaatccagaaaggtccatttgacatgataagttgtatgttagatgagatatctcatcatgctctacacaattgtactttctaggcattgcactgagatgggagacctcagaatatttgtttatattttatcttctgacatgcaaatgtcttataaatatactacagtagtttctactgtccaattaacataacaatgtaatgaataattatgatgtcatgtgaaaaggaaagataaccgaggtttgtgcmgactacactatgacatacgaaaaagttaatttatctgtagttaggacaatgagggtgtgtttttggtccttgccagttgataacaaactgattctggtgatctatactgggagatgtcttttaaattcactttccagatccgtagctgcaaaccgattactagggggtgttataatttactttggcggtgaaaccccctctgggaaagccgctgcagtttaagtcataattcaattaagtttacaataattcatggtcattctccaagctctatctgcctcctgcacaaaccaaattggtaagggggaatatggtggaaatca

SEQ ID NO: 390950 - DNA, 535 bp, Homo sapiens
tctcataatcataggaattagctaatatattttaacatcagatcaactgataacagggaaaaaacctcagaggtattgagtaatgttcacaattttacatctctaggaaagggtagagttgggatttgaacactcaaaactgcctgatgcctaaatcctattatattgcctactggggaagccatacataatgttagaccttggaaaacacaatttacrtcacttatagtgttgacttggaccaatggttttgtctagacagtattaaaatgtatatttttgtgttataataaaatggtaccttgaaagaaaccaaacagaagttacagttgtcagcacatttatgctaaaaaataaacaacctaagccatattttcttgcccttgccatgataaaagaaaattttgagttctgtgcaaaggaaaaatgccaacaaaacatgctctgggtagaaactacctggttagaaaacttgatttacggcatatataaaataagcgctgaagcaggtattgctatttgacatcagaagcta

SEQ ID NO: 390951 - DNA, 537 bp, Homo sapiens
ctctgtaatcagaggttctgacaatccttttgcaagcatcttctcctggaaaggttggatcatatttacatatagcccaagctactcagtgaaaagacatgctccaagttaaactcattacctacaactagcagtcactgttacctatttttctctgactactcctgcttactaaaaacttatgctaccttccagcaccctccaaagtagactgccttgaaattggcattggcttgaatcaaacccccatgtgtaaattctgtkagtagagtactgtgaagtactgattgcctgtattcaataaactctggcccagatccccagcaacttcagtatgttcaacatcacaacagtccttggcttatatcctaattccctgactatggaaaattttagaaattggttgaacgaatttaggtactatgccaagacctctcaagagcaaagaaacttggaatttgcatgttttgatcatactttatggacttggtattttattcattattccatttaatccttacaatagtcctgtgagtg

SEQ ID NO: 390952 - DNA, 537 bp, Homo sapiens
ctctgtaatcagaggttctgacaatccttttgcaagcatcttctcctggaaaggttggatcatatttacatatagcccaagctactcagtgaaaagacatgctccaagttaaactcattacctacaactagcagtcactgttacctatttttctctgactactcctgcttactaaaaacttatgctaccttccagcaccctccaaagtagactgccttgaaattggcattggcttgaatcaaacccccatgtgtaaattctgttagtagagtactgtgaagtactgattgcctgtattcaataaactctggcccagatccccagcaacttcagtatgttcaacatcacaacagtccttggcttatatcctaattccctgactatggaaaattttagaaattggtkgaacgaatttaggtactatgccaagacctctcaagagcaaagaaacttggaatttgcatgttttgatcatactttatggacttggtattttattcattattccatttaatccttacaatagtcctgtgagtg

SEQ ID NO: 390953 - DNA, 249 bp, Homo sapiens
tgggtttttcatagatggctttttattacattgaggtatgtcccttgtatgctgattttgctgagagttttaatcataaagggatgctggattttgccgawtgttttttctgcatctattgagatgatcatgtgatttttgtttttaattgtttatgtggtgtatcgcatttattgacttgtgtatgttaaaccatccctgcatccctggtatgaaacccacttgatattggtagattatctttttgat

SEQ ID NO: 390954 - DNA, 460 bp, Homo sapiens
ctttccttttagactccaaaagtttggtggaaccaatatgcatgtactttaaagaagcatttgttgtagaaacatctgtctaattccaatctcagsctacgtgggcccagttgagagctctgccaagtaaacttgtgccagtgttgtgtcccagggccaaagcttgggtaaatttttcttctgtgtgtagccagggttggaagaactagagagataaatctgagcctgtttccttctgagtgccaagtattgatctacaagtcaaaaatacaagaagagcaaaaacagttgacaaactaaagtttaggaatcaattaaaacaggaatactcaaatgaaatttgaacaattaaagtaggagaatagctggaaacaagctaattggggtacattttagcgaagtacctgggatttatctttagttattatattcattaaaagtctttattgagcatctgtta

SEQ ID NO: 390955 - DNA, 620 bp, Homo sapiens
gctgaaatatgccttaaccataggaggcttgaagtgtttttaggttgaattggcttgaaggtaaaagagtatttgaacattatcaaagcttactgactcatctaatttctgagtggcttccccgagtgtttaacgttagtcatctgtgttatgtccattagcttcctagagcttttgctgtctgactttctttgtaagactcagatgctattgttcctgggagacaactgagaatctgcttctrttcaattgaaggtccacgagcaacttaccaaacactgttctgagagtagaacagattcagatggacccattcagtttattatatgtaatggtcaccaaaaatactcacatccacaagcccagaacctgtgagtatgttgccttacatggcaaaagagagtttgcagatgtgactcagttgaggattttgaggagagactatttctagttatctcggtggctgcaatataatcagtagagtccttataagagggtggcaggattgtcagtgtcagaaagagagagatttgaaatgcacatttatggctttgaagatgaggaaaggagcccaaaccaagggatacagatagtctctagaaggtgaaaaaggcaaggca

SEQ ID NO: 390956 - DNA, 620 bp, Homo sapiens
gctgaaatatgccttaaccataggaggcttgaagtgtttttaggttgaattggcttgaaggtaaaagagtatttgaacattatcaaagcttactgactcatctaatttctgagtggcttccccgagtgtttaacgttagtcatctgtgttatgtccattagcttcctagagcttttgctgtctgactttctttgtaagactcagatgctattgttcctgggagacaactgagaatctgcttctgttcaattgaaggtccacgagcaacttaccaaacactgttctgagagtagaacagattcagatggacccattcagtttattatatgtaatggtcaccaaaaataytcacatccacaagcccagaacctgtgagtatgttgccttacatggcaaaagagagtttgcagatgtgactcagttgaggattttgaggagagactatttctagttatctcggtggctgcaatataatcagtagagtccttataagagggtggcaggattgtcagtgtcagaaagagagagatttgaaatgcacatttatggctttgaagatgaggaaaggagcccaaaccaagggatacagatagtctctagaaggtgaaaaaggcaaggca

SEQ ID NO: 390957 - DNA, 620 bp, Homo sapiens
gctgaaatatgccttaaccataggaggcttgaagtgtttttaggttgaattggcttgaaggtaaaagagtatttgaacattatcaaagcttactgactcatctaatttctgagtggcttccccgagtgtttaacgttagtcatctgtgttatgtccattagcttcctagagcttttgctgtctgactttctttgtaagactcagatgctattgttcctgggagacaactgagaatctgcttctgttcaattgaaggtccacgagcaacttaccaaacactgttctgagagtagaacagattcagatggacccattcagtttattatatgtaatggtcaccaaaaatactcacatccacaagcccagaacctgtgagtatgttgccttacatggcaaaagagastttgcagatgtgactcagttgaggattttgaggagagactatttctagttatctcggtggctgcaatataatcagtagagtccttataagagggtggcaggattgtcagtgtcagaaagagagagatttgaaatgcacatttatggctttgaagatgaggaaaggagcccaaaccaagggatacagatagtctctagaaggtgaaaaaggcaaggca

SEQ ID NO: 390958 - DNA, 620 bp, Homo sapiens
gctgaaatatgccttaaccataggaggcttgaagtgtttttaggttgaattggcttgaaggtaaaagagtatttgaacattatcaaagcttactgactcatctaatttctgagtggcttccccgagtgtttaacgttagtcatctgtgttatgtccattagcttcctagagcttttgctgtctgactttctttgtaagactcagatgctattgttcctgggagacaactgagaatctgcttctgttcaattgaaggtccacgagcaacttaccaaacactgttctgagagtagaacagattcagatggacccattcagtttattatatgtaatggtcaccaaaaatactcacatccacaagcccagaacctgtgagtatgttgccttacatggcaaaagagagtttgcagatgtgactcagttgaggattttgaggagagactatttctagttatctcggtggctgcaatataatcagtagagtccttataagagggtggcaggattgtcagtgtcagaaagagagagatttgaaatgcacatttatggctttgaagatgaggaaaggagcccaarccaagggatacagatagtctctagaaggtgaaaaaggcaaggca

SEQ ID NO: 390959 - DNA, 528 bp, Homo sapiens
ataccttgagttggacacacaagtccactatggtgagatgttttttaatgtctctactaaacctaatttgattctgcagaatatctgccttaaagtaacattacatttaggtctatctaactccattcttttgaaatacaaattggcctacccacttagttctccatatgtaatatgtcaggaataagaatttttctttgtaataactagtcacattaataaacatttcttagtatcttttgatacatagaacagactcytgcttgagtattaggaaatatgaagaaagtttattgccctgtgagaaattcgtaattggtcacttggtgaatttgtactttattgcttttcctctgagaaatgcattccttggtttataagaccttgaaatctctaagataaagaaattttgtttctattaatgttgagaaacgtcatcactattatgtttttatggttggatctttggtggttacccattatcattacagacaacaatttcacactgtgcctctaacattctcaaat

SEQ ID NO: 390960 - DNA, 577 bp, Homo sapiens
ctaggcaataacacacccagaggaaaaatactactgttttgcctcttcttgaactttatacaaatggaatacataatatatgctttttgtagttgattgacttctttcaacatccggtattttagattcgtcggtgttgttgagtttattaacagtgcattctgttttaattgctttatagttacatgatgcatgtttgggtagttttccaggtaattcttaagtactataatattttaaaatctttcacttatagctttgaaggaatattctgtggttgatcaggacagcctgccaccaaaatagaagtttcaaatgttctatcttctaaacattttaccatgaaatttcaaatttaaatcactcctttttttgatttaaccatagttacagaggctgaatttacattaaaacaaatgctgtctgataggactttctatgcatacattttatagaatattttatcatattaccatgtatacgtttataggattaactggcataaagaaggttaatagacacagagtgataggaagaaccarcggagaaaaggcaaatagatgaagccttaggaaat

SEQ ID NO: 390961 - DNA, 554 bp, Homo sapiens
aatgctgtggttcttgtagactcatagaggtaccatcttgatggtcttggacaagatacaagagaattatctggattatcaagaagagactcttgttctcttcccttactttctcccaaacwtacagagtctctctctctttgttctgaaccatctaaagctggtaatggagtgatacaagtaccactgtggctaccaccactatggctgcacggggtcagacctgaagtcagtatagtgctgggtctcacccaaggcctactataaccataccctatacttcctatatgtgctcaaggccttggggtaatgtcagccctatctgtttccttcccttcagggcagtgaagtcccccaggttccatatgggtccaaaagtgccatctaggagtcagggactatagtcaaaaccttagaagtctacctggtattctattgtattgcagctgagccggcattcaaaccataagacacactccttcccactcttccttcccctttccaaagacagagaagcctcatcccatagtcaccaccaccactggccacaagga

SEQ ID NO: 390962 - DNA, 585 bp, Homo sapiens
ctgggtctttttcttcaaggcagtggcttcccttctggtacagggtatgcctagagatgtcatgggggaggtagggcctggaaaggtttcctcatgactctagccaatgccctatcctgctgtggctgagctggaattctagatgaaagacaaagttctccctactcttctctctcctctcctcaagcagaatcaaggggactcttagagctctaagctttatagcctggagttagaggagacggtttcacctcctctaactctagtagagcaaggtagtgctgacaacacagccagcactaccttggctgcaccagctggtgtctcagtatgtcacatgcccccacagtgcactgtctctgggactagttcagcactacgagtgcagtccttatggcttagattgcctttcaagtttatctaggggcacagagcactttgggccctggtggcgmggtttgtgggctctcaagtttggattattgggatctgtgattcccctctgattatggctggtttaaatgcttcctccgtggataatcatcagctgagtttggtctgtctgggcaggcatcagctgagttt

SEQ ID NO: 390963 - DNA, 585 bp, Homo sapiens
ctgggtctttttcttcaaggcagtggcttcccttctggtacagggtatgcctagagatgtcatgggggaggtagggcctggaaaggtttcctcatgactctagccaatgccctatcctgctgtggctgagctggaattctagatgaaagacaaagttctccctactcttctctctcctctcctcaagcagaatcaaggggactcttagagctctaagctttatagcctggagttagaggagacggtttcacctcctctaactctagtagagcaaggtagtgctgacaacacagccagcactaccttggctgcaccagctggtgtctcagtatgtcacatgcccccacagtgcactgtctctgggactagttcagcactacgagtgcagtccttatggcttagattgcctttcaagtttatctaggggcacagagcactttgggccctggtggcgcggtttgtgggctctcaagtttggattattgggatctgtgattcccctctgattatggctggtttaaatgcttcctccgtggataakcatcagctgagtttggtctgtctgggcaggcatcagctgagttt

SEQ ID NO: 390964 - DNA, 556 bp, Homo sapiens
tgcatgagctcacagcacaccataaaaatcaaatattttacaggtagtctgaagagagaaaaatgtggtaggaagattgtgttttaatgcaagacagaatcacatcaatactgcaaactgaaaagttaaatctatactagagaaaaacgtcctcttttttgcaggtggtggaaatgttaacatgaaacaaaaacattttgttttccaaattgcgtaagtaatcaaaattgatgtatttttaatgcacattttaataatgtagcagtgctaactttactttcatgtgaacaagtttaaagatttatcaattgctattacatttaaattagcacctgcagctcactggtaaattctgattaaggatgtgtgctgattgaagtcattgctatcaccacattagtattattaaagtcaaaatgcagwtattgcttaagcacggaactgaacctgaggtactatttccctaccattaaaaccaacatcagctattaactttcaaccggacaagaacaaccattacaatatattgatgttggttttaattttattagccttg

SEQ ID NO: 390965 - DNA, 539 bp, Homo sapiens
ctttttacattttttgtagagatggggttttcccatgttacctaggctggtctcaaagtcctcagctcaagtgatccacctgccttggcttcccaaagtgctgggattacaggcatgagccactgctcccggccttgttgtttctctaagagcaatctatgggtgtgaggtgatatctcatagtggttttgatttttaattcctttctgattagtgatattaagcactttttcatatatctgatgggcatttatatcctctttggagaaatgtctattcaagtcatttcctcaatttacagttgggttatttgtttttcagctattgagttgtaagkggtctttataaatttggggatattaacactttatcaggtatgtggtatgaattatactttcccatgtgttggttgccttttcatcttgctgattgttcactttgctgtgctgaagctttttagttacatggagtctcatttatttgttttaattttgtagcctgagattttgatgtgatatccaaaagaattattgccaagg

SEQ ID NO: 390966 - DNA, 557 bp, Homo sapiens
ggttgccatgcaaacttgactcattcattacaaattcacagaaaatttcaaatactaattggagcttccacaaatgtttgagaaagaaataagtaaacctactagtgaatgcagacaagaagccaaatttgtctttctttgcttatgaaaggttaaattgatagaccaccattttacttmaacataaaattaattttgagctgggcaagtggatgcctgcagctaatttacagtcaaatcacatccacttggaatagtagggttaaatgaaaacatgttaataggctatttacctgttaggccttggtaagtgcagggataacaaatgtaattcattttgttaacatgatgaagttaccataattaagcagttggtaaagaaacaaatctgttatgagtttacgtttccagcctttcagtgaaatctgatgttccagtaaatggatatcacagggttcggccaccaggtatactaaaggactcagccagaaaagtcactactctaatgctgatcagatcttttcaaccagcagatttttgtccattcctggcaactc

SEQ ID NO: 390967 - DNA, 582 bp, Homo sapiens
atttccctcattactattatatgcattttatgatttgactttgcaattactcccataaaaaggaggagtcaatttctcctccttttaatatgtgctggccctgtaacttgctttaccaacagaataatagagtaatatgatatgcttcctaagtccaggactcaagaggctgtctagcttctctcttgtcctcttagaaatcagatgctatattaaaaaagtccatagtagcctgctggagatagaatgtggatggtattgacataccctggctgacagtgtcagccagttgmcagcaatgaaagtcatccaggaccaaccagatgacctgccaaatgacccacaacagcatgaatgagtccagctgacaccgtataaggagcagagatgagccatgccctctgagcacttcctgtgttgccaatcactggtatcctgagcaagtgaatgattgttgttttatatcactaagttttagggtagtaaaacactcagaaataaataaaaatagtaattaatgcagttgatacattttaaaattcatttacagctccatctttttcttatgcctctttccaaaca

SEQ ID NO: 390968 - DNA, 477 bp, Homo sapiens
caaggagataaaatttgaatgcctaatatatgtatattattaagatgtggttctctaattaggttaaagtaatggttgaatgttcagactttccttacagagaaaagacagaaaatmcagaacatttcgggggatatccatgtctccttttctctgtcaaatgcttctaattatttatctgtgcttacagtttcatttatcttgtctacacttactcttttcaccctagtctgtttctgccttcagtacttgccgagattattttctaaactatcataaaagtctagctaattgccaaattctgcttgacctctctacaatgtctgacattactgtctattttattgccttgaaattctctttttccttgcattgcattctcctaatggtccttcttctttactggaaacaattgcctatgtgaaactggactttgttcattacagcatgtgcagctaatagctatgttaggcaaat

SEQ ID NO: 390969 - DNA, 477 bp, Homo sapiens
caaggagataaaatttgaatgcctaatatatgtatattattaagatgtggttctctaattaggttaaagtaatggttgaatgttcagactttccttacagagaaaagacagaaaatccagaacatttcrggggatatccatgtctccttttctctgtcaaatgcttctaattatttatctgtgcttacagtttcatttatcttgtctacacttactcttttcaccctagtctgtttctgccttcagtacttgccgagattattttctaaactatcataaaagtctagctaattgccaaattctgcttgacctctctacaatgtctgacattactgtctattttattgccttgaaattctctttttccttgcattgcattctcctaatggtccttcttctttactggaaacaattgcctatgtgaaactggactttgttcattacagcatgtgcagctaatagctatgttaggcaaat

SEQ ID NO: 390970 - DNA, 570 bp, Homo sapiens
tagtaatattgtatctcaatgtttatttccatcttgaaatctttgggtattgccccactgtatcctggtgttgaatgatgttgctggcagtgtgtctgaggacaatctaagttttttgttgttgttgtttgcttttttaatggatgacagaattcttttttattttttttaagtccagtaattttattgggatattttttggtgcttataactctacatamttttttttctggcatcaagtatactctttcaatttgtaaattcaactttttactttcagaaacatttctaatttatatgtcatttaaatatattttctctaggaagaataattttttttcttgggagtagttatagtcatgtgatatctcctttgactgtcttccctatctcatattttctctatacacccttacattttcacttcattattctctatgttttttatccatgtctatgtaaatattgccttatgttatgatttttcttttctctctctctctctctttttttctactgacgattgttagctcatattttgtgtcctcctgtctcaccattgctaccttg

SEQ ID NO: 390971 - DNA, 508 bp, Homo sapiens
attttatttctgtttgaaaaaacttgcttcagacattattttaggaaggcctgttgatatcaaattctcttagatttttttcatctgagagtgtcttcatttaacctttgtttctgaaggatatttttgctggatatagaattccaagttgacatggttttttgttgcttgtttgttgttgttttgtcagcagtgaaaaatatgccatttccttttgacctccatggtttctgatgacaaatttgctctcattcacagtgttgttcctctatagataaagaaacatttctttatggctgctttaaagatatttttgtttttaattttcaaaagtttcactatgttgagtgttggcatcgatttctttgggtttattctgtktggaatttttctcagctttttggatctgtaagtgtatgtctttttgctaaagtttgaattcctcagtcataggtttttgggttttttttaatgctttttaagacccaccacatttcttttttctttt

SEQ ID NO: 390972 - DNA, 556 bp, Homo sapiens
gtttcatttatagaacataggcagactaggtgtagtataaaattcttaaggatttttagaattgtaaataagcattggttctagcttaaaatcattagctgcattagcccccacagaagagtcagccttccctttgaagcttcgaagccaggtgttgacttcttttctctagctatgaaagtgctagatggcatcttattctaatagaaggctgtttcatctacattggcaatttgttgtgtagtgcaggcaccttcatcaatgatcttagctakatcttatggatcacttgcttcagcttctacatgaacacttattaattcaccttgcaattttgctatgaaggcagcctctttgtttaatcctcatgaaacaacgtcttctagcttcaaattatttttctgcagcttccttacttctgtcagccttcacagaatttttttttaaaagttagggcctttgtttatattaggctttggcttaagggaatgttattactgggtttgaccttctattcagaccactcaaagactgtccatatcatcaatacagctag

SEQ ID NO: 390973 - DNA, 556 bp, Homo sapiens
gtttcatttatagaacataggcagactaggtgtagtataaaattcttaaggatttttagaattgtaaataagcattggttctagcttaaaatcattagctgcattagcccccacagaagagtcagccttccctttgaagcttcgaagccaggtgttgacttcttttctctagctatgaaagtgctagatggcatcttattctaatagaaggctgtttcatctacattggcaatttgttgtgtagtgcaggcaccttcatcaatgatcttagctatatcttatggatcacttgcttcagcttctacatgaacacttattaattcaccttgcaattttgctatgaaggcagcctctttgtttaatcctcatgaaacaacgtcttctagcttcaaattatttttctgmagcttccttacttctgtcagccttcacagaatttttttttaaaagttagggcctttgtttatattaggctttggcttaagggaatgttattactgggtttgaccttctattcagaccactcaaagactgtccatatcatcaatacagctag

SEQ ID NO: 390974 - DNA, 625 bp, Homo sapiens
aagtgacagaggattatggaaaagatgggggtctgcgagtcagaatatctatggatgagtcttggctatgctacatgcaagttgtatgtccttaactaatgcctggttaactaatgcctctgggtttcagtttccttatctatgaaataaagtcactgggataaaaaaaatctctaattatcttcacagtttgatatgctatacttttatgtcaaaacttctagatgatagctaagcagtagcttagcagtttactccccactctgagagcagtcaatgatgatgattataacaaggttttacagatacatttttataatttaaggagatagaatcaagatatagtttagagaaaagctagcagatggagcttttaactgtaagtctgtaagtggtagttaactgttggcattttattttcaggacagttgttccmatatagccttgtcagtaataaaataatgtttcattgtgctattaaaaaaaagatatattttaaatggacttgatgattattttaagtcagtatctttcaatgaaaccacttgaaaattttcaccttttgaactccagtttttaaggttatttttcaagagccataggtaaagtgcaatacaaagacgta

SEQ ID NO: 390975 - DNA, 579 bp, Homo sapiens
ctggctattttgaaatgtacaataaattattctgaactatagtcaccctactgtgctattaaayagtagaacttactccttctatgtaagtgtatttttgtcaattcaggtaaaacatttcaaagaaatgttacttgagttgaaatatgactgatgaattttaataaatataccaatacatgaccatttatatgagtgtttttcctttggaagtatggaagtatttctttaaggaagcctacttatttattcttacagagatgttattactcaaaatatttaggtaacttcttgaaaattgctctctgtgcctaaagcacatgtacttaaatatcaataatggtgaaaaatatctgtctcttgagaaccagtttaatttttaaagcatctcagaattatctggaggcaagcattaggaatcaatttgatgatcaagccaaatgttagcatctgggtcagagataaatctaaagtaatgaaaactaatttagttgcacagtttataacctacttttatggtaagactccttcccccgcaaaaaaaattacaaaataattttgggaatgggcagcgttttt

SEQ ID NO: 390976 - DNA, 579 bp, Homo sapiens
ctggctattttgaaatgtacaataaattattctgaactatagtcaccctactgtgctattaaacagtagaacttactccttctatgtaagtgtatttttgtcaattcaggtaaaacatttcaaagaaatgttacttgagttgaaatatgactgatgaattttaataaatataccaatacatgaccatttatatgagtgtttttcctttggaagtatggaagtatttctttaaggaagcctacttatttattcttacagagatgttattactcaaaatatttaggtaacttcttgaaaattgctctctgtgcctaaagcacatgtacttaaatatcaataatggtgaaaaatatctgtctcttgagaaccagtttaatttttaaagcatctcagaattatctggaggcaagcattaggaatcaatttgatgatcaagccaaatgttagcatctgggtcagagataaatctaaagtaatgaaaactaatttagttgcacagtttataacctacttttatggtaagactccttcccccrcaaaaaaaattacaaaataattttgggaatgggcagcgttttt

SEQ ID NO: 390977 - DNA, 581 bp, Homo sapiens
gggatggcctcaggaaacttacaacaatcagggcagaaggggaagcaaacatgtccctctttacatggtggcagcaaggagagatgtggagcaaaaggaggaaaagccccttataatgccatcagatctcctgagaactcactctttatcaggaggcgaacagcaggagggtaaccacccccatggttcaattacctctcactgggtccctcctacaacacctgatacgtggggattatgagaactacaattcaagatgagatttaggtgggacacagccaaaccatttcaaggactattcagtttctagttagttttgcttaaaagaactatttgtcaataattttctattgctgatagcaatgtttacaaaatcattcctttcaaacatggcccttttttggacctacattacttaccaaatttatttatttattttactttattcttttaaataaactgcaactaaaagagaactaaagttttaaagagctaaatattagttttcttcttatygactaattggcatcaatcataatagaataagtatatatgttttaagaaagtatattacttaagtt

SEQ ID NO: 390978 - DNA, 569 bp, Homo sapiens
aaattaaacttggagagataaagaaacttggctaagaccataactgataattggcagcatcagatctaacttcaaatgtatttattccaataactgaatcagcatacagaaacagaagaaagataacaaataaaaaatattttcwtttcaaataaaagttttattaatagtctgttattaaacagtaaaaatgttatttgcatactttctagttttcttttaaaatttcaatatttcacaattaagatttaaaataagttcaaatatacggagacagcttctgcaaagtccattttaccccatctccctgaaagtgttgtgttatcagattgtatgtttcgaaaattactttcccaaaagggaattatggtggaagtgaaccaactcaaataccagcactgccatttactagctggtggatgtacatccttaataatgaacataaaataataacaatagctaaaatgtattggaaacttgcagagaacttcatgtgtgataacttaatcttctcaacagtcctaagaattaggtatttttattgctccatttttttcagatgtgaacca

SEQ ID NO: 390979 - DNA, 590 bp, Homo sapiens
aataataaactttattataaattattttgccttctctttttatatgtaaataattgaaattatattatacataatttttgttatgcattttaaattaaatatataccatcagcatttcttcatgtcattaaatattctctgaagtcatttttaataatattgtttaatataaaagtattatgatttatttaaacaatgtcaattcatttgtaccctatattacacatatgtgtactgtgtttctatttacagataaagattcacgtaggtctctagaaatggaattacaccaacactctattagagaatccacctattgtgtcctcttataaaatgtttagttttcaattttgtttttacctgtatgtctagatgaaataaaagttaaagaatcttcctttgaaccaagacacacagttcccttcccctgaattatttagtagaaacaaattctactgatctttctaggaatttccattttgtatatacwtattgggatagtattttcccttctacctgcctttcctttcttcctcctttgactcctcctttctttgttccaactagataaaaagagataatatttaatc

SEQ ID NO: 390980 - DNA, 511 bp, Homo sapiens
catttcaggccacacacagaaataaactaccaaaataggggaattagtaatgcaacaatggaaccacatacaccagaaaaatrtgataaagattataaaagtaaatatgcttaaaatgtccaaagtaattgcaaaaataagaggacaatatttttaaagcaagcgaagttctaaaacaacagtataataaatattcaaataagaacagaagccaataaaacagatacacaatgtgtcaataatacactaaatttagacaatgagataaagacaaatgattaattagaagctgaacaatcctttaccgtccctcttcccctcttcaattattattattattattttttgagacagggtctctgttacccaggctggagttcagtggtgtgaccatagctcactgcagcttagaacatctgagccaaagccatcctcctgtatcagcctgatcagcagctaggactacaggtgcatgccactatgcctgcataatttttttgtttcaactttt

SEQ ID NO: 390981 - DNA, 487 bp, Homo sapiens
aaaaatatgataaagattataaaagtaaatatgcttaaaatgtccaaagtaattgcaaaaataagaggacaatatttttaaagcaagcraagttctaaaacaacagtataataaatattcaaataagaacagaagccaataaaacagatacacaatgtgtcaataatacactaaatttagacaatgagataaagacaaatgattaattagaagctgaacaatcctttaccgtccctcttcccctcttcaattattattattattattttttgagacagggtctctgttacccaggctggagttcagtggtgtgaccatagctcactgcagcttagaacatctgagccaaagccatcctcctgtatcagcctgatcagcagctaggactacaggtgcatgccactatgcctgcataatttttttgtttcaacttttttagagataggatcttgctgtgttgcccaggatggtctcaaactcttggctc

SEQ ID NO: 390982 - DNA, 555 bp, Homo sapiens
ccaataaaacagatacacaatgtgtcaataatacactaaatttagacaatgagataaagacaaatgattaattagaagctgaacaatcctttaccgtccctcttcccctcttcaattattattattattattttttgagacagggtctctgttacccaggctggagttcagtggtgtgaccatagctcactgcagcttagaacatctgagccaaagccatcctcctgtatcagcctgatcagcagctaggactacaggtgcatgccactatgcctgcataatttttttgtttcaayttttttagagataggatcttgctgtgttgcccaggatggtctcaaactcttggctccaagcaagcctcccacctcagcctcccaaagtgctgaaattacaggcatgagccactgcacccagcctcttgcaatgatgtttgagcccacgtatacagtcacgatgtggggattgctggccaagggagctgccacaccagaaacatttactttgtactttgcatgagtgagaaatgtcttttgtgtatgtaaagaaattaat

SEQ ID NO: 390983 - DNA, 592 bp, Homo sapiens
gaaaactgagaaaatagccaatcaaataatctccaactgagctaattttctcatggaatccagtttaagaaggtcatgtattaccaaaggtaaatgtttagcttcacaacttgtctgactaattggcacaataaacatccttttcaagtataagattaggaatagatcttcagatggtaataagaaatataaaaaattcccccttttcaaaagagcaaatatgttatttaatgtcaatatcagtgatctgaggaagcaattctcatgagatctcaagtccctgaccgtctgactttggtaaaggcaatatggagggacaatgcttggagttagtttaactcctagctgacctggtgggagggtacccaggtgaggaaactgagcaaactggtctttgtttgcagacrcaattacaaggactcttggggaccattgtgtgtccttgcccttttccctccctgttaaggaagaataaacaacaccagtatcactgcagaagctaagggaattcaaagcagcctcaagaagctgagaaactgacatttctaagaagaaaaataatcctgtattccctatagtagacagtaatgtc

SEQ ID NO: 390984 - DNA, 383 bp, Homo sapiens
tggtatacatacacaatggaatactactgagacttaaaaaaaggaaattctgtcatttgtgacaacgtgggtgagcccaaaagacattatactaaataaaataataaatactacagaatcttatatgtggaatctaaaaaagtcaaactaatagaagcagatagtagaatagtggttaccagaagctgaggtgggtggatggtgatgggggacagatggggagatgttgaycaaaaggtataaaatttgttagaaataactctttgagagccatttcacagcatagtgactatagttaaaaacaatgtcatgtatatttcaaaatcattaaaagcagattttaaatgtaacacaaaaataagcatgtgaggtgatatgttaat

SEQ ID NO: 390985 - DNA, 588 bp, Homo sapiens
tccacacacttggtgggggggcggttagcggggaatggatgaaactgttccacctcagattatctaacattagattctcataagaggcacacaacctagatcccttgcatgtgcagttcccaatagggtttgtactcctatgaaatccaatgctgcagctgacctgacrggagatggagctcaggtgctaatgctcactagctgctgctcacctcctgctgtgtaccccagttcctaacaggcgacgaacaggtactggtccacagcctcagaattggggaccctgctataaagtaaggtccaaattcaatttctcaatttttaccaaaaatctgagcaaaaccttgatcatctcctacagccatttagataccagtgctttcttagctaacagctctttttcacatatgacaacgtagctccttgactcaagagctggtttaactctaacatgttttctgcagggtatcctacacataggcggttttcaataaatatttttttgagttgaatgttgacacaggtttataattatatccagtacattatatttataaaagaaaacggaagaataaggagataccttct

SEQ ID NO: 390986 - DNA, 607 bp, Homo sapiens
ttcttattgctaactaagagggtacatataaataaatagcttttgacagaagtatgatgttcagagtaaaggagacattattttgaattaacaaaaatgtatcttattttcttcttcatcraaaaagctctcacaaataatgtattaagttggctagaatctttaatttaatttgggcaaataaattttttaggaaaatatgagcactaggaatgctgatgcttacagagaaaagtttacatacttcttaaaatattttgtttttcttcatatttaattcaatcacttattagactgtaacgtccctgagagtagaagatatttcttcagtgatgtgtcttcatatagcactttgggaaatttgcatggagttctctaaatacagaataaactcaaggcattatagtgctgttaggaaatcaataatatcaatgaactttattatgaaaaattatgtagactaaatgggcatatatttatgccccttcagattgacaatagcagacatctacttaaattgcattacataaaatacataaatatcttaaagagctctgtcacaacctgaaaggcaagatggtttgttgacctgatgagggactgggac

SEQ ID NO: 390987 - DNA, 647 bp, Homo sapiens
tatttccttctgctctaactctgaaactttaatttaaaatttaagttaaaatgtcccactttttaaaatcaattttcttctatcttttattttccccccttacaaggttaatttctttgatttcttatcttctctctctcacttccmcttagtactaatttatgtcaccagctactattgagaatactctcaaactccttcacctttttagttaaaaccatgtagtaactacctgtgcccaaagatcattccagtgcttttataccaaacctgtgactttctaaaaattatcatacttcaacctccacattcttacaatggttggccctttctctcttgcatgcttaaatcatactcctgagtcattctccttatttatagccttctttaactcctttaatctggtttctatacctctttatccggttatactgttttctgaatctactcttgttataatgtctttctcattataactgtaaacttgtctgtatttcctgttatacttgtcagttctgaaaaaataaactttctttcttcattgatgtaccctgaaggcctgtcttattgcctgacacataattagtttccaataaatatttgttaaatgaataaatgatgatgggatgagtataagcatatagcaa

SEQ ID NO: 390988 - DNA, 674 bp, Homo sapiens
tcaaggctgacatggctattaccacagctggccagaagcagagatcaacactgagttcctgatgtagcatcatttcccagggtgatctgccagctacctgatgacaggttgagcacattggactgcttccactaaggaaagagcagcattttgttcttaccagaacagacacatgtttctgtcaaaactgcaacccatgtaattacagaatcctatattcaccttcatgatattccacacagcattggttctgatttaaaaaaataaactcwcttcaaagaaaaaatcatgtagcaatgggtccattttcataaaattcactagtcttatcttatttcccactattctaaagcagtcaatttgctagaatggtggaattgccttttgaagtctcagttatatcaccgaagggatagtactttgcaggcatggttcatttatttcacatcatactatttaagttatggaatatgaaggagatgagcaaatataactactttgcctctctatctggggaaagggtttgtgaatttgggttgtacactgaatagttgtatcatgttaggcagaattatgaccttattattgcctttgtttagagattgagtatggcttaaggaaatatgtgtgagtgccaagttgacatagggtagacttggatggctaattttata

SEQ ID NO: 390989 - DNA, 533 bp, Homo sapiens
gggaaaagaaaactcagaggcaaggtatgtaataaagtaataacacaatcacccaaaatgatgaagkatgttacttaaatttaaatgaacaacaatacaacattttatgcttaaaaagagtaaaaataaaacttaaaccataaaataatggttgtatttgattgggtaaagtttactaaaacctttatgatatttaggagaaagagatatttaatattattagataccttgttataaaaatttataaaattctcagtagccactcagaaaagatgtaaaattaaaagaagaaaaaggagaggttttagtacaaatttatcaaaaaccatttgatgaaacaagaaagaaaagctgttgcaagactagaatagtttagttgccaaattagcaaaatacaactatgagttagtgttttagtctgttttaatatgctataaagaattgcttgagactgtgtaatttataaaggaaagaggtttaattgactcacagttcagcaaggctggggaggcctcaggaaacttacaatcgcc

SEQ ID NO: 390990 - DNA, 603 bp, Homo sapiens
tgctgcgtcaaatagcataatatrtataaagtaataagcaaaaaagtaaatgctcaataattgtgaaaaataagcttaagggcatatagtctaattaggaaaaaattttaaaagcttctaacacttagcatttggacttaaaatattctctgagttaattggcaatattgcagcgttgagataaaggaaataaagaagacattcattgagcaatacctgaagtgacgatattaaaatgacctcattttgttagaatataacgactttggtgctgatagtaaagtccaaatacccatgcaggacattttcctcttacatttcttaatgcagcttcctgagaagtaaaataaaaatccttcctgtttcaaaatatttactgagaggtccaatttttgtatattgttacctgtccaatgcatattattagatagaaaaggatgcatatatattcttgacaaggaaagaatacagataaataaacataaccaaaaagcaaccataggcttgtagtgaccctttttccctccatatttctatctctttagtaggccgtaaaaggtggactttaaaagtggttttgtgttatctcctcaatagcctagt

SEQ ID NO: 390991 - DNA, 605 bp, Homo sapiens
catcagtaaacaatgttctcaacttcaggacttttgttttttaagtggggaatgagtgaacaaaagaaagaataatgaggtttgtagaaagtgccagaagttggggtttctaaattaaaagttagaaatcaattaactatagttttttyttaagatagcagagtgaaaagaaacttaatcctccctctctctcttgtgaatgcataaaaagatgtttatactcatacatacgtacacaagcacatatcagttcaaaatgcacaggtgtgcataaaaccaagagaatcatctcaacaagccagaaaaagagaaaaaaataccattttaaataagaagtgaccatatggcccatcagaagaagagactaagttcaagaataaggagaaaaaaaactcaaagcttggtcaaaaaagaaatagggctggaggttctcacaacctcccaagagttgaggaagaaagagaggcagccatttagaacgggaaacttggccaatgctggcacagaattaccaaccaatgtatgattactggttccacctggagagatggacccaggcaaatggaaactgcataccagaaaacactttcatgataaagcctcaa

SEQ ID NO: 390992 - DNA, 569 bp, Homo sapiens
aagtaatgtgaggcaaggcacagtggcccacacctgtaatcccagcattttaaaaagccagggctggaagatcacttgaggccaggagttcaagactaccctgggcatcacagtgagaccccatctctataaaaaatatataaataaataaaaaattagccctatgtgatggcatgtgcttgtaatcccagcactttgggaggcaaagacaaaagttaaatgaaataattagctaggcacagtggcacaaatctgtagctccagctacttgtgaagctgagaagggaagatcacttgagcccaagaatttgaggctgcagtgagctatgatcacgccactgcacccagyctgggtgacagagcaggacactgtctctaagaaaaaataaaaagaaaaataataatatggaccattaaaagagtaacaatgcattttccgaggacatagagatttcacagcggaattagtattttagcacattcttaaatagaacaaactcatagtagatcctcaaatttgaaaatgaactcaaacagtaatgtaaaaattttccttaacttcactagag

SEQ ID NO: 390993 - DNA, 515 bp, Homo sapiens
aactagatctatgcaagacaccacattactagactactagaactacaaatggacattaagtaaacataaatctgaataaagtatgaccttataaagtaatactaacaaaacatattaacattggtgcattgttaacatatacatcatataaatgtgacatgctaataatagcaaacattgagtgtgtaggataatgcaactctatagttcttcaggaaatatattttytaaaaaataaagtttactaagaaatagaattttaaaaaataagcagcagtctaaaattcttttccattagaagctgcattttaaacaatgtaagtgaaaattgacagcagttttataaattgcttatagaaaagggaattctcacactgtggtcctatcaaagtcttcttgacagcaaaataaaccttaatgacatgacaaaagttcctttattgaggtgttagtgacacagaaataaaccacatttgagtcctaacttcttagcttctctatattaaacttttaat

SEQ ID NO: 390994 - DNA, 545 bp, Homo sapiens
ttgcagaactgcaattgctcaaaaatkcaggaagacatttttcagttgtttttggtaatggtttcttactaacttttaccttatgttgatgtgatatacttttaaatatcatacttttttccccggcttacttaaattgcttactctaacattttgtcccaggcaagggttgttcattttaaatgtattacacattgtttagaacagttgtgaaaaaaagtagaaattatatcttatttctacttactttgaaacttcaggatttgagtatacatactttattattgtttttgccaagcattattccaagcctcaaatagaatatagtcaatatctagccattttcctactttgtcatgcctctttcctacaaagcctcttctcaattttccaaaataagcacactgtaaaaaccttgcagaaatatcaccatttaacactttcatagcaaaatgcctctttacttttccatatcctaattttatagaaggtatatctgccaaagcaatatttttggtcaatttttatattgaccaaaaaatgta

SEQ ID NO: 390995 - DNA, 432 bp, Homo sapiens
tgtgtctgtgttaaattgatctttttaacccccagcacctaggacgtgaggmtgccaagcttggtattcaataaatattgatggatgaaggaacaatggaagaaaggagtgcatgggtaaacaaatgacaaatatgtcaaagcacggatgcagattcttagaatgggctaatgctgttttctgctggatttttggatgtgtacaaacgagttctctcacaatacagatccacagtgtctgggtcagaggagaactgatgctccgcatggcattttaccatcctgcctgcctgcctggggccctgggcccacaggctttggggagagtgtatggccaggctgcagccttcctgggataaagctctgccttttagtctcttatcctactttttagaagccctttaaggtctttgttaaaggaaatctaatgtga

SEQ ID NO: 390996 - DNA, 432 bp, Homo sapiens
tgtgtctgtgttaaattgatctttttaacccccagcacctaggacgtgaggctgccaagcttggtattcaataaatattgatggatgaaggaacaatggaagaaaggagtgcatgggtaaacaaatgacaaatatgtcaaagcacggatgcagattcttagaatgggctaatgctgttttctgctggatttttggatgtgtacaaacgagttctctcacaatacagatccacagtgyctgggtcagaggagaactgatgctccgcatggcattttaccatcctgcctgcctgcctggggccctgggcccacaggctttggggagagtgtatggccaggctgcagccttcctgggataaagctctgccttttagtctcttatcctactttttagaagccctttaaggtctttgttaaaggaaatctaatgtga

SEQ ID NO: 390997 - DNA, 596 bp, Homo sapiens
aaccagaaaaattttaaatcagttcatttcaatggcaagtatcttacagcaacataataaaaatggctgttttatgaagaatgtttctttaaatgactctgcccctctaatgcatctcattaaaaactgtcagccaggcgcggtggctcatgcctataatcccagcactttgggaggcctaggcgggtggatcacctgaggttaggagttcgagaccagcctgatcaatatggtgaaaccccatctctactaaaaatacaaatattagctgggcatggtggcaggcacctgtaatcccagctacccgggaggctgagacaggagaactgcttgaacctgggaagcagaggttgcrgtgagccgagatcacatcactgtactccagcctgggcaacagagtgagactccatctcaaaaaaaaacaaaaaaaaaaactgtcaaaagataccttctcttgaaatgtggctaattatatcactctcctgctcaaagtcctctctcactgccttgaagataattttcacatttcttagcctagaatctctctccaaagcttctgtttcaagcaaaacaaaccactccccattccctacata

SEQ ID NO: 390998 - DNA, 529 bp, Homo sapiens
agattagagagccgcccagcagctgtcctctgcagggactccttaagagggaggagtcatgactgacccccagctttccaacacaggttgggtgagctgtgatgccaccaaccaaggcaggaatgcaggcctgtatgtcagtgggttgtggggaaggctgggttttgaataaactgaatgtgagatggcctcagaacatccatgcagaaacgtaagcaggcagtggaaagtaagggctagagagagatctgagtgttactgacattagggtgtagctgaaacccgaggcatggaygacaacgcttcaggagaaaatccagaatgacggagatgctggagacagaagctggtacgcatgagcacggagggccagcctgacagaggagtgcagaggcagagaaggaaaaggcagaaagaaaaacccaggagtgcattattgcatgtggcaagagtccagaaggggtagtgatcagtaaatgaactggaaggatcaataatgtgggggctaaaagtacatcacttgaaatgg

SEQ ID NO: 390999 - DNA, 595 bp, Homo sapiens
  misc_feature (1)...(595): n = A,T,C or G
gggggtggcggccttggttcctcccgcggggctgggcttgccggggcccggagcccgccgggaagagttcggaaatcacacgtgtcctttttcccgctctgtgccctccttgtttagtgcgttgccggtgggcgctttaggaaattggtaggaggaaaagcggcttcttttgaaaaggtaacccttaacagagatgaaagtgaaagccaggtttcattgggaagccgatctgcacctaccgagggctgtaacttaaagccgctgtaaacgtggtagctgatccttgtatgcaaaggtttaggccctaagcttagaaactgttccttgcttgccttctaccccgctcctctttttctagaattctcttaggaatctctrgcttcattgaggacacaggtgtaagcagaagctgtgttctcagctccaagaggccgaccccacgaaagcctaagcaggtgaatttcgtaaagacgttgacagttggaaaacctngctttcagcacgtgataaatctgcagagtcagcagacaatgaagatttggcattcaagaactcctcaaatacttctcgatagtagctattcagagcctgcctt

SEQ ID NO: 391000 - DNA, 556 bp, Homo sapiens
agtggctcttatgatccttattttataggtaaggggatacggtttaagaggatgagtaaattacccaaagtcacacaaccagtaggggacaaagataggatctgaggtcagttcacttgatccacactccttccattataccaggctgcagtaaggaagacacgagaaaagtgccaatgtagccactgctcttacagtctgttttgctccaatacgttgtttcagtaacatgaattggctcccatgagaatggtaaacaggataatgatggcagtgcaccaatgacgtcatactgaattttccccagcaagctaatttctgtgccaccaagtaatgtcaagtgaacacagaggacatcaacaagggaacacaggaaaccagaaggaaccacagctgagtacagaatgcccaccttcccatgctcttcttgtaccagtttggccatgtgctgtttrtgctccccaattttgattcattgggtctgtgtctccaccgtatcttgacagaccccccccttctaaaccagctgctttttaaaagtagaggttgatattta

SEQ ID NO: 391001 - DNA, 581 bp, Homo sapiens
gggaacacaggaaaccagaaggaaccacagctgagtacagaatgcccaccttcccatgctcttcttgtaccagtttggccatgtgctgtttatgctccccaattttgattcattgggtctgtgtctccaccgtatcttgacagaccccccccttctaaaccagctgctttttaaaagtagaggttgatatttacttgtagaattctttcttttattacaaattatacatatccttttaactgttgtggaagttttactggatttttttttagtactctgattacaaaatttcaagtagtctgctactcatttttctcatatgccctgaaatattttcttgtacaattatttaatgctaaggttttcagtatatcacaatataggtaaaatgcctccatttaaaaaaaacttataagttccttaatgtgggtcaggcactaatttacatgattctcattcaatcctaacaactcgaggacayaggtagttttattagccccttttacaaacagggaagctgaggtaggagggttaggtagcttgcctaatatcacacagccattaagtggcaaagcatgaag

SEQ ID NO: 391002 - DNA, 521 bp, Homo sapiens
atcaaaattagaggagattgtagcttgttagtgttttaatttggtaccatattagatttttaaaaaatggttgtgcagtgttaacagattttggtctactttattctgtcctgtgtccaagagaaragcaattggaacaggaaaaaaattgcactttagtttagtagagcaatagttggtgatattctgtacttcttagagcttagaagatgtgtgtgtcaacatggtttccagctgtagatctgagaagggaattctgtaaaccccagaggttagggtggcctggtacactcaattgttaactactcatgtattttcagtttggatccacggggggaaaagccatgctataaagggacctgtgtgtatgtattcttgctcctatgctaatttgttacctattacaagaacatgagtcttaggttatctgttatttcttttcaaactacctggcaactggtcttcctcagtgagcagataatagagcccaagagctacacaccacattgtttgtcagtgta

SEQ ID NO: 391003 - DNA, 600 bp, Homo sapiens
gattcacctatttcttcttgcagttctatcagtttttgcctcatgaattttacactctattgttaggaacatacacatttaggactgttatgtattcttggggtattcatcccttcatcattgtgtaatattcctcattatccccgtatctgttccttgctctgatgtctgctctgcctgaaattaatataggtactctcacttttgtttgattcgtgttggcataatataatacataacgtttaaaaaacattttattgttacatagtatttgtacatatttacagtatatatgtatttatgatttctatgtcttgggaacatttcaagtcctctcttctagctatttttgaaaaataccatacattgtagttaactatagtcaccctactctgtaatcaaacattagaacttattatttctatctacctatatgtttgtactcattaacaaacctttcttcatcactgccccgaccaccacmacacacacccttcccagcctctggtaactatcatttttctctctaccttctttagatctcacatatgaatgaggacatgcaatatttgtctttctgtggctggcttatttcgctta

SEQ ID NO: 391004 - DNA, 597 bp, Homo sapiens
tgtttatttaggtggaaaatgtatgagatcattaaagtcctcattaagggctgccttggggacattagttttcacttaaatcaaaatagcacagtaggggacttctagtttctagtccagcatgcaagaaacttagaagtcgccaccctgtcctaataacaagtaaaaagctaaacaaacggaaaaatcagcaactcaaaatctgtcagagaaatgaggtcacaggacaaaccactgccctaaaaattggaaagacagacaggcagatatagagaatcagagctttaccagagcagaaactcacaagcagaaacttccacaagaaccagtgccagggtaaggagacctgaactgcaactgatgaattgttggaggctgagtgaggacaagtctgtaagttaaaagctccaggggggtccagtcataggtgggccacatgsttttttgaattttacctccaggagtcttaccaggttctcacagtgaatatcagagaaaagttccattgtccttttggagagaaggtataaatgttcccattttgtgatatatttgttcctattttatatgttcctatcttctgatatatgtttatat

SEQ ID NO: 391005 - DNA, 541 bp, Homo sapiens
gtgattcctgcctgcttcatcactattatgtttatctctttttgactctgatctctagcagtagtgaattctttcaaattattgaatatgacttgtaacattgagaytttctatgcattcacatctttttatcactgatgggcaaatctcttcatccacttcccctggaaccctctctgatgtcctgggctgaagtaggtgtttctgttctgtgcattcctctttctagcacttattataccatataccatgttctttttttttttttttcctttgagacagggtctcgctttgtcactcaggctggagtgcagtggtatgatcgtggctcactgcagcctcaacttcccgggctcaagtgatcctcccaactcagcttactgagcagctgaaaccacagaagtgcgccaccatgttcagctactttgaaaactaaggtctttctatgttgcccaggttggtctcaaactcctaagctcaagtgatcctcctgccttggcttctcaaagtgctgggattacaggcgtgaaccaccgtgccc

SEQ ID NO: 391006 - DNA, 609 bp, Homo sapiens
catagtaatatatacatgagagtgagagggcaggagataaaggaagaggataaaaggaggaggcattaattctccagttgtcagggacyagaagctcatcagtaagggcagacatctcacacagctagttaaattgtagaggtgaaaatgtatcttaggtctagttccaaagcccatgctcttaagccactatgcagcctgcctcccttgagcgtgaggaacacaacttatcttcagttgctccctactttataaaaggtatatataagcatggaggaaatattagattaatttttaatgttagattgagaatctactttaaaattatgttttttgatcaaaacatgagagtctttcactcttccttggactactttatcacctttcagttagtttggatttaaggctgttactggacttcacatgtcaagtttgaaaagtctcaatcatactgtgcatgatggtatcccatatatggtgcctgcttttgactcatcaaattcatatttcaagagcaacaaactcttcctgccaaccctcagatggctgacttcaaccaagtaatttatgagaataaatgatgacgttttgctccttcgatgagttatg

SEQ ID NO: 391007 - DNA, 609 bp, Homo sapiens
catagtaatatatacatgagagtgagagggcaggagataaaggaagaggataaaaggaggaggcattaattctccagttgtcagggactagaagctcatcagtaagggcagacatctcacacagctagttaaattgtagaggtgaaaatgtatcttaggtctagttccaaagcccatgctcttaagccactatgcagcctgcctcccttgagcgtgaggaacacaacttatcttcagttgctccctactttataaaaggtatatataagcatggaggaaatattagattaatttttaatgttagattgagaatctactttaaaattatgttttttgatcaaaacatgagagtctttcactcttccttggactactttatcacctttcagttagtttggatttaaggctgttactggacttcacatgtcaagtttgaaaagtctcaatcatactgtgcatgatggtatcccatatatggtgccygcttttgactcatcaaattcatatttcaagagcaacaaactcttcctgccaaccctcagatggctgacttcaaccaagtaatttatgagaataaatgatgacgttttgctccttcgatgagttatg

SEQ ID NO: 391008 - DNA, 538 bp, Homo sapiens
gggtgcatctcccgtcctcaggaagccaccacaagcacctgtagaatagaaagcaacatctttgacacagccctaatggaaaagacgctagctagcactttttcacttgaaagtgacagccctctactgaaaagaagcaaccaattgaaacaatttctcagagaaatcaatgaatatcgtatgtaacccactgattcggaaagctgcaatttccgcarttgatctttgatgtaaaaaaaatgcattgtgttctccattttcaccataattttgctatataacccatttaatatcaagtgctgactatttaggcatcaataaagacacgtagaggatcccctgtattactgaggtagaactgtattcattcctgtgtttctcatgtttctttatcatttttgcgtagttacttttgtaatttatatctaggcaattttgagttgacagattaggtccttctcggggtctatttttgggcatgtgcacagctgggctatgtgtgtggccttctagatttccagaaacatgtcggagcttt

SEQ ID NO: 391009 - DNA, 607 bp, Homo sapiens
atgtaatagtcattcccatacatattgggcacccatcaggcactgggatctattcatgaccaagaatccaagatgaataaggtggggtcatagcctgtaagcatccgattgtgtttctggaaytgatatggtagccaatgtctggatagcaatgatcaccatgatttttatatttatatttatttttatatgatcattaaaatttttaatactctaacataaaaacaaagaggatagtaggaaataagacagaataaatacttatttaggacatacatgcatgcttagacaaagctcaacaggaaaattataataatcctaaaaaaccccttagatatgaaatggaaaataataaatacaatactgaaattgcctttgtccatgtaatctagaggcagtctgctctaaacatgatttagagcagactatcccacatgatttgcaaatgcttgaatagacgttaccttggatttatttttaccaatagcaattcaccaatatttatgaacattgattgcatgtggaaactcacccttaatttgtcataatagcagttttgtatttcttctatgtccatctccaagattctaccatggacaacgtgaga

SEQ ID NO: 391010 - DNA, 601 bp, Homo sapiens
agttatccacattcaccacccttcaatttgttcgtgtgacctgattcttcctggacactggacaagaacttgggtacccaagaggtcagggtgtaaaaggctgtcaccctgaccctccactgagctggttaacacttagctgtccatggacggcaaatgctaaaagagcactgattgcaacacatgccctttggggctcttggggtcgcagacaccctctccgagatggcagagctaaaagagcattgtaasaagcttggacgctgccgtgggccgtgcacagagcctgcttccaccagagaggagggaccagccagttctagggttcgttcaccccggttcctgcattcgtctattcgtgtgctccctcctgaattcagctaggcagccaagcaaataagccacccccttcgcaagtcctgtaaaggagtccaggaaactttcccatctcagtagcagaaactctttttgtcatctgaccaattcatagccatattccttctcctccactcccatctcccaacctgttctatcagaacatggatttgttcaagtagcaaatcaagatatccttgtctcaagagaagcagaatcctgtgaa

SEQ ID NO: 391011 - DNA, 419 bp, Homo sapiens
gatggcagagctaaaagagcattgtaagaagcttggacgctgccgtgggccgtgcacagagcctgcttccaccagagakgagggaccagccagttctagggttcgttcaccccggttcctgcattcgtctattcgtgtgctccctcctgaattcagctaggcagccaagcaaataagccacccccttcgcaagtcctgtaaaggagtccaggaaactttcccatctcagtagcagaaactctttttgtcatctgaccaattcatagccatattccttctcctccactcccatctcccaacctgttctatcagaacatggatttgttcaagtagcaaatcaagatatccttgtctcaagagaagcagaatcctgtgaaaatcccagatgcttaataataataattgatctaaaacattta

SEQ ID NO: 391012 - DNA, 419 bp, Homo sapiens
gatggcagagctaaaagagcattgtaagaagcttggacgctgccgtgggccgtgcacagagcctgcttccaccagagaggagggaccagccagttctagggttcgttcaccccggttcctgcattcgtctattcgtgtgctccctcctgaattcagctaggcagccaagcaaataagccacccccttcgcaagtcctgtaaaggagtcmaggaaactttcccatctcagtagcagaaactctttttgtcatctgaccaattcatagccatattccttctcctccactcccatctcccaacctgttctatcagaacatggatttgttcaagtagcaaatcaagatatccttgtctcaagagaagcagaatcctgtgaaaatcccagatgcttaataataataattgatctaaaacattta

SEQ ID NO: 391013 - DNA, 419 bp, Homo sapiens
gatggcagagctaaaagagcattgtaagaagcttggacgctgccgtgggccgtgcacagagcctgcttccaccagagaggagggaccagccagttctagggttcgttcaccccggttcctgcattcgtctattcgtgtgctccctcctgaattcagctaggcagccaagcaaataagccacccccttcgcaagtcctgtaaaggagtccaggaaacyttcccatctcagtagcagaaactctttttgtcatctgaccaattcatagccatattccttctcctccactcccatctcccaacctgttctatcagaacatggatttgttcaagtagcaaatcaagatatccttgtctcaagagaagcagaatcctgtgaaaatcccagatgcttaataataataattgatctaaaacattta

SEQ ID NO: 391014 - DNA, 419 bp, Homo sapiens
gatggcagagctaaaagagcattgtaagaagcttggacgctgccgtgggccgtgcacagagcctgcttccaccagagaggagggaccagccagttctagggttcgttcaccccggttcctgcattcgtctattcgtgtgctccctcctgaattcagctaggcagccaagcaaataagccacccccttcgcaagtcctgtaaaggagtccaggaaactytcccatctcagtagcagaaactctttttgtcatctgaccaattcatagccatattccttctcctccactcccatctcccaacctgttctatcagaacatggatttgttcaagtagcaaatcaagatatccttgtctcaagagaagcagaatcctgtgaaaatcccagatgcttaataataataattgatctaaaacattta

SEQ ID NO: 391015 - DNA, 602 bp, Homo sapiens
tgggctcaagattctcaaagactgttttaatgatccaagacacacccttcgcagaagtgctgggaaaattttcatcttcaaatgcctcatgctacctaggtggccatttttttacaaaagcgctctgcggcagatggccctggcggccccttgaagagcagcggcagccctggtaggccrtccctgtgcttgttggcagtgcccagtctctatgctccgccacacgaatgctctttctgggggagctttctcagactgcaagtgtgaggtgttagccatcccaagtgcagtccttaccaatgggaaccagagttggcggaccagtgcctccactgtggtccttcagaaggtcccagcggatggagcccaagttgcccccaggggctccctctgctggttccccctcctcctttccttcactcactcgtcctgggctccggcttcctggcattacctcctaactcagctgctgcaaggccctcaggcattgcttcaggaaaacccaaaccacacattaatcccatgtctaccaaatgatcaccgaagggctgatgctcattaaaatgtctaagaatagaacactgctgactactggaaagaat

SEQ ID NO: 391016 - DNA, 569 bp, Homo sapiens
gcttgtaaattatgggtcttgaagtgtagagaaaattacagcttctcaggccagcccaagaggaagggaatgaaaagccagtctccaaccctagatgttacaattttataaaacaaatttggagtgcttaaaagacaccaaatctccaaactgcacccccaccgcaattccaattcaatgatgactattttctgttgttgttgtaactgtccccaggatggaccgtgtgaaagactttttgaacatcagcgtaattaccaccatcagttcctgttcacatgcctacttacttcttcaaaaaaaatctaataaaataattctwtcttaatgaaacccagccatttttcttttaaaaatgttatttcattgtctaaatatatggtggttcctctctctttttaagatcttgatagctggactttatagaagttagacacccacaggtttgtgattcactgggccccctctatagtttcacatatgcctttttcagggaactatttggacttgagaatcttcttcaatattcttctctgtaaagaccaatgcaaatatcatgttatactgaa

SEQ ID NO: 391017 - DNA, 569 bp, Homo sapiens
gcttgtaaattatgggtcttgaagtgtagagaaaattacagcttctcaggccagcccaagaggaagggaatgaaaagccagtctccaaccctagatgttacaattttataaaacaaatttggagtgcttaaaagacaccaaatctccaaactgcacccccaccgcaattccaattcaatgatgactattttctgttgttgttgtaactgtccccaggatggaccgtgtgaaagactttttgaacatcagcgtaattaccaccatcagttcctgttcacatgcctacttacttcttcaaaaaaaatctaataaaataattctttcttaatgaaacccagccatttttcttttaaaaatrttatttcattgtctaaatatatggtggttcctctctctttttaagatcttgatagctggactttatagaagttagacacccacaggtttgtgattcactgggccccctctatagtttcacatatgcctttttcagggaactatttggacttgagaatcttcttcaatattcttctctgtaaagaccaatgcaaatatcatgttatactgaa

SEQ ID NO: 391018 - DNA, 464 bp, Homo sapiens
aattttagatagacattaagatcccccaygttgcccgggtaaagtagataattggtgattctactgttagctctattgccttttaattgtgccagggaattcagaaagcagtacctactccaaagcccagatcacctcttgctcacctgtagatccagggacctcttgtttgtgaccatggaagagtgtaagactgattgtctcctgtaagcttcttttccttctgggcctaaagcagaggctggaagcaagaataccaaaagcacaaatcattgcaaatcagtgctgatggctgaaataaatacttatgctgttcttttacttttgctaccatgtattgaacaaacactatgtgtcaggccctttatatacagtctcatttattcctcaccacaaccgatgtagacatcattgttcacccccattttacaaagaaaaaacagactcaagttaggcaacacccc

SEQ ID NO: 391019 - DNA, 464 bp, Homo sapiens
aattttagatagacattaagatcccccatgttgcccgggtaaagtagataattggtgattctactgttagctctattgccttttaattgtgccagggaattcagaawgcagtacctactccaaagcccagatcacctcttgctcacctgtagatccagggacctcttgtttgtgaccatggaagagtgtaagactgattgtctcctgtaagcttcttttccttctgggcctaaagcagaggctggaagcaagaataccaaaagcacaaatcattgcaaatcagtgctgatggctgaaataaatacttatgctgttcttttacttttgctaccatgtattgaacaaacactatgtgtcaggccctttatatacagtctcatttattcctcaccacaaccgatgtagacatcattgttcacccccattttacaaagaaaaaacagactcaagttaggcaacacccc

SEQ ID NO: 391020 - DNA, 561 bp, Homo sapiens
gacaggacctgcaaagaatgcacaggaaaagaagagactgttggaaaagaaggaaggaagcactgggcattacccaccacaatgtggaaccaactttcacaaaggaaatgtttgataattattagaattctctcagatttcactttgtggagcctttgtttacttttcagtaaaatgggaataatatctggtctcacagacactgtttaaaggattaaatgagggaaaatggtgaaagttcctaggagagtgccagccacrtggtcagcacttaactaagcaatgcagactgagctacacccacgaacctgaggctgcacatagactaactacatagcaatagtcaagatttgtgttaggctgtaagacaaatcttgattgtgaattgtgttacaatcctgctaaattccagaaaggaggagctaaatagttttgtcaggtatgactgatcttttaattaacttattgattgaatgactggttttactttgggttcaggactcaatcaacaaattcaattgtacaagaagtgaaactttatttttctgtaaccacttaact

SEQ ID NO: 391021 - DNA, 634 bp, Homo sapiens
tgcatccatcaacctatcacctaggcattaaacccagcatgcagtagctatttttcctgatgttctccctcctgctgccatacacaataggccctggtgtgtgttgttcccctccctgtctccatgtgttctcatcattcagctctcacttataagtaagaaaatgtggtatttggttttctgttcctgagttagtttgctgaggatgatggttcccagctccatccatgtccctgcaaaggacatgatctcattcctttttatggctgcatagtattccatggtgcatatgtaccatgttttctttatccagtctatcattgatgggcatttgggttggttaatgggatctaattaaatgggatcattgatgggcaattgggttgattccatgtctttgctactgtsaatagtgctgcagtgaacatagtgtgcatgtatcttcataacagaatgatttatgttcctttgcgcatatacccagtaatgggattgctgggtcaatgatatttctggttctagatctttgaggaattgccacactgtcttctaaatttacattcccatcaatagtgtaaaagcaatcctatttccctgcaacctcgccagcatctgttgtttcttgacttaataa

SEQ ID NO: 391022 - DNA, 589 bp, Homo sapiens
gttagggtttaaaactactattttagggacacctcatccattcaacaggcctttatggactgacctagaagtactactaacactaattatattttatttactgataaccttaaacccttatttgttaaaggaattttagcattattaataggactgttgatgacaagcctagcacctaagaaaaactatgagttagaaccaactgaattatacacctaatctctgataaagagtatataagttgaaggctcctccttgtgtgtttgcttgcttttcacattttttacctttctgcatatttatttattcaacaaatatttgataatcccctgctacacattctattaggtgctatgactaaaacaataggctaaagcagagagctcctgcccttgtggagcttacagtctagtagaatagacagacaaccaaatactgcgggagkggggagaaaagctgctacaaaaacaaatgattaaaaggatgggtacacagtgctatactaagaataatcagtctagtcagagaggccaaggaaagctgagtaaaggtggcagaaaagaatgttccaggaggaataacatgcgca

SEQ ID NO: 391023 - DNA, 589 bp, Homo sapiens
gttagggtttaaaactactattttagggacacctcatccattcaacaggcctttatggactgacctagaagtactactaacactaattatattttatttactgataaccttaaacccttatttgttaaaggaattttagcattattaataggactgttgatgacaagcctagcacctaagaaaaactatgagttagaaccaactgaattatacacctaatctctgataaagagtatataagttgaaggctcctccttgtgtgtttgcttgcttttcacattttttacctttctgcatatttatttattcaacaaatatttgataatcccctgctacacattctattaggtgctatgactaaaacaataggctaaagcagagagctcctgcccttgtggagcttacagtctagtagaatagacagacaaccaaatactgcgggagtggggagaaaagctgctrcaaaaacaaatgattaaaaggatgggtacacagtgctatactaagaataatcagtctagtcagagaggccaaggaaagctgagtaaaggtggcagaaaagaatgttccaggaggaataacatgcgca

SEQ ID NO: 391024 - DNA, 589 bp, Homo sapiens
gttagggtttaaaactactattttagggacacctcatccattcaacaggcctttatggactgacctagaagtactactaacactaattatattttatttactgataaccttaaacccttatttgttaaaggaattttagcattattaataggactgttgatgacaagcctagcacctaagaaaaactatgagttagaaccaactgaattatacacctaatctctgataaagagtatataagttgaaggctcctccttgtgtgtttgcttgcttttcacattttttacctttctgcatatttatttattcaacaaatatttgataatcccctgctacacattctattaggtgctatgactaaaacaataggctaaagcagagagctcctgcccttgtggagcttacagtctagtagaatagacagacaaccaaatactgcgggagtggggagaaaagctgctacaawaacaaatgattaaaaggatgggtacacagtgctatactaagaataatcagtctagtcagagaggccaaggaaagctgagtaaaggtggcagaaaagaatgttccaggaggaataacatgcgca

SEQ ID NO: 391025 - DNA, 589 bp, Homo sapiens
gttagggtttaaaactactattttagggacacctcatccattcaacaggcctttatggactgacctagaagtactactaacactaattatattttatttactgataaccttaaacccttatttgttaaaggaattttagcattattaataggactgttgatgacaagcctagcacctaagaaaaactatgagttagaaccaactgaattatacacctaatctctgataaagagtatataagttgaaggctcctccttgtgtgtttgcttgcttttcacattttttacctttctgcatatttatttattcaacaaatatttgataatcccctgctacacattctattaggtgctatgactaaaacaataggctaaagcagagagctcctgcccttgtggagcttacagtctagtagaatagacagacaaccaaatactgcgggagtggggagaaaagctgctacaaaaacaaatgattaaaaggatgggkacacagtgctatactaagaataatcagtctagtcagagaggccaaggaaagctgagtaaaggtggcagaaaagaatgttccaggaggaataacatgcgca

SEQ ID NO: 391026 - DNA, 616 bp, Homo sapiens
tacccatattttcaacctttgctacaatgaataaactttcaaaattataaaagcaataatttttaaaaagatttgatgagttaggtgaataaggatagagtttcggggggtagagaaaaaaaatattttgttagataagttccctaaatttgcattgcttacacactaacaggagtaccatgtycacagatgactagaaactagaccagtggttctttgttctctaattttctactgagactaaataatacccttttccaaattttcaagaagaattaaatttagggacaacatttaaagttttgtccctgtatattttctttaaatcttagatatttgcctctacttgtttccagaaagactacaaaaaggcaaaataaataactgaattagaagcaaataagtatttgggaaaaacttggacatctaagtagattacttaatttgtaggattggtagtcatacaataatattattttctttttggatgattgaattaaaaacaagtacttcaggacttccaaatacagtgacagctaaacaaggttgaactagattgagttcaagggcaggccctgcacctgatttttctttataactcccatcaattggcatg

SEQ ID NO: 391027 - DNA, 509 bp, Homo sapiens
agctgaaatcaaacaaggtgatactctgcctttgtttcagctctcatcctgtaaacaagtgccctttttgcagtctatcgagtgccatatttttcatatttttgtgcgttttgttggtcattttgctgtttaaaatgccctcaagcataatgctgatgtgctgactcgtattcctaagtgcaagaaggctatgacaggcctgccaaggaaaataacatccattagagaagcttcattcaggcatgggttatggcgctgttggtggtgagttcaatgttaacgaatcaacaaaaaatattaaataaggtgtttttaaacagaaacacacatgaagcaagattatctattgattagttgacaatagctcacagaaatctaaacctatgtttcccttaagagcaatgggtcagtgttcgctaattcagtgttcatagtgactttataaaacacarttaccatgaataatgagaagtgactatatctattcaaccaattatttatttgtgtcc

SEQ ID NO: 391028 - DNA, 564 bp, Homo sapiens
agaaaggctattacaaggaagaaaagatagtctttcaataagttgtgctataacaactggacatccacatgcaaaacaaaacaatacaaaacaaaactagaaacagaccttactcccatcagaaaaattaacgtgaataggttataaacttaaatgtaaaactataaaatctttagaagataacataggagaaaatctagacaacattggttttggagatgagtttttagatacaacaccaaaggcgtgaactgtgaaggaaataattaataagctagacttcattaaaactataamttgctgctctatgaaggacattgtcaagaaaatgaaatggcaagacacagactgggagaaaatatttgaaaagacaaatgtgataaagaactattatctgaaatatacaaaaaactcttaaaactcaaccataagaaaataaacaacctaactaaaaaattgtctagagaggtagagcaagatctacaaatagaaggctccaccaattgacctctaaaggaacacaaaatttaacaacaatctccacaaaaaaagcaccttcataag

SEQ ID NO: 391029 - DNA, 595 bp, Homo sapiens
  misc_feature (1)...(595): n = A,T,C or G
nnnnnnncttaaagccttcttttttattattgaccttctcttttttattttattttttatctttttctaagtggctacatactggatatcaacactggatttgtagtagttcagttaggctcctaggaagtcattcagagaacgtgttgcagtgaatcagactgtgttaactctgacctagagtgttatcgtctgtctggctcaattccagaagagagaacctcctcctgtgacctcttcccctgtatctcaggccataaataggtgctggggccctgccaagttgggtcactgtggttcatgagggactgtcagtttcttacaaacattacgcagctgcaaaattgctatgccacccaaggtgactcataaaatctgyccctcttaaaaagggaatatgagaaatgtcacctcctggctaccacaataatgcaactaggagttctggttctccgctgactacccacaggagtccttagaggaaccacacaggaaacctgggaaacctaacactctgattccaaggcaagtattaggaagcagggtagaacttctgggtattttagtccaggattgtgataaaatataaacgatg

SEQ ID NO: 391030 - DNA, 604 bp, Homo sapiens
aattcaccaaggatgtaccagtaaatagcccctagctattcccaaaaatagaactcagtggaattaaattatatttttagttctgttcatagcctaccagtttatattttgaaactgtctaagcctaactcttttctgactggatgatgagcagccatctggtacatggattcaatgaaaccattcatggattcaatccctatgttatctgcttgattctctcttacagtcactggctgtacctttcgccatacgtggctgtggcaaatttgcccccgaagaagattaaatagtattactagtagttaggtaagcgtcaatattttagccccactggmaaatatctttcagtgatgaatggttcatcagtagcatcatggtttgttaagggaagttcataatccaagggagaaggcctgcagagattactccccagtctaccaatgggttatgtaaggtcattggcagttctttacataaggggttagttttgcaattgtatatgtaacactggaaatagcagtcttaaaaaaaatagatgcttaattaggagtaggaagtgtgaatagaaagtttcttgtctaaggccaggtgtggaggctca

SEQ ID NO: 391031 - DNA, 604 bp, Homo sapiens
aattcaccaaggatgtaccagtaaatagcccctagctattcccaaaaatagaactcagtggaattaaattatatttttagttctgttcatagcctaccagtttatattttgaaactgtctaagcctaactcttttctgactggatgatgagcagccatctggtacatggattcaatgaaaccattcatggattcaatccctatgttatctgcttgattctctcttacagtcactggctgtacctttcgccatacgtggctgtggcaaatttgcccccgaagaagattaaatagtattactagtagttaggtaagcgtcaatattttagccccactggaaaatatctttcagtgatgaatggttcatcagtagcatcatggtttgttaagggaagttcataatccaagggagaaggcctgcagagattactccccagtctaccaatgggttatgtaaggtcattggcagttctttacataaggggttagttttgcaattgtatatgtaacactggaaatagcagtcttaaaaaaartagatgcttaattaggagtaggaagtgtgaatagaaagtttcttgtctaaggccaggtgtggaggctca

SEQ ID NO: 391032 - DNA, 546 bp, Homo sapiens
ttttcagacattcaatagatttttaacagacttcttttgagaagttttatgttcacagcaaaattgattagatggtacagagatttctgatatgcccctattcccacacatgaatagcctcacccattatcaacatccctcatcagagtagcacatttgttacagtggatgaacctacatcattatcacccagagtccatagtttacctttgggttgactcttggtgttgtacattctatggttttggacaaatgtataacatgtattcatcatcagaatatcatatagggcagtttccctgccctaaaaatcttctgtgctcgacctatttatctccyctagctttttgaaacaactgatctttttactgtctatagtttcactttttccagaatataatatagttgaaatcatacagtatatagtctgttcagattggcttctttcacttattaatattcatttaagtttctttcatgtcatttcatagtttgataactcatttatttttagtgctgaataatattccattgtctgatttagga

SEQ ID NO: 391033 - DNA, 597 bp, Homo sapiens
ctaaaattaataaatggctgcaggatataagatcgatgtaaaaaatcaattatatttgtayatactaaaaataaataatttctggaaattaaaattaaaactaaaacagtaccattataataagaccaaaataaatctgaaatcaatataatgcccccaaagatgaataagatttgcgtgctaaaaactctaaaacattgatgagagaatcaaataaacagagggcaatacaatgtttatgaattggaagactcaatattgttaagctgtcaatgctctctcaactggtctatagattcaacacaatttcaatcaaaaatatcagcttggggcttgttttaaataaaaattgtaagacctattctaattttatggaggaaaaaaacaaacaaaaaactagaatagccaaaaggtttatttgaaaaaatgtgaacaaagttggagggtttacattcctttatttgccgactaactataagtttcaggaatcaagaagtgcagtattggaaaaggagcagacttgcagatcagcggaacacatgacagactccagaaataaattcatatatatgtgaccaaacaattttcaacaaagat

SEQ ID NO: 391034 - DNA, 619 bp, Homo sapiens
gggactcataatataaggccaaggggctgaaaactgctaatattatataaataaactattgaagtaataaataattttaggaaaaaaattatttagaggtagcttataaatataggaatacatgagaataacaccccatttgagaataaatttttttaaactaaaaatttggagccagaagataaaatatgacaagttcattgatatttattccttgacaatcttctttaggcttggcctttttggtaaattaaaaaaaaaagaaacaagaaacaagaaacagaaagaccaaggaaatgctttccaaactttatctgtggtatggcaaaaaaaataaaataataataataataacaataaataaataaaggcctggaatatgcagtctgtggaccaaagtctcaaaaatatttttttaaacttattactcaaatagtaatgtaagtctttcttgtcttgattgtcatgaattttaaggccagagcctcttactctttatctgaaaaaaaaaatcttttttcactacaatctggatggttccatttttatggcataaacctygtaaggtgccaaattccaaagcatccattactgtcaaataactacattatttgtagac

SEQ ID NO: 391035 - DNA, 544 bp, Homo sapiens
ttgttagtacactggctacacagacaaacttaatgaataattcatttgaagttttaaactttcagcataaagtaaagaaggttaatttatttatactaacacagataaagaaacttttgtgtagttgagaacaagttaaagtgaatttgtctaagtatgattctaacaaggaaagacattaaacactaaacgtcggagtaaaatttctaatgtgaattgaaacaattgcttcattctcaacaaaatataggatacatagtaaaaagagttcttagtaaagagttagaagtctagaatttcactctactacttattaatcatctttaagaaggttattttaaatacttccagcctcagtttattcaaccagagaatgggttaatcatatgtaatctgtttaatttacagttatgtgatgtagctaaatgagayaatgactgagaacatactttggaaattatttatacacattactattaaaaagcttgttaaatgagctcctagaatcaatatagttactaatgtactgcaagcaaaagtggtc

SEQ ID NO: 391036 - DNA, 536 bp, Homo sapiens
gatgcccctcattgaagtgtttttgttttaagtttttgtgaaagtgagattttgttctacctaaaggatgataaatataaagaagatgggatctctgtgagagagggtggcaggccattaacagcggaatcatgatggtattacagttctcttcatctatcaatggctcctattcattgcattgactttgcatcattttcttcatatacacaactccttatactagctgtcataattctcaatttacacatgcataaacagagacttgggagtttaaccaactcactcaaggctatagttaataagtagcaaaaccaggcattcaattcatatgyatttcaatacaaattctaattcatctcattattccatttcatgttggcctatagaatgaaacaagtagaaaggaaattctatttcatagatagtaaactaccactttccccaaaaagtcactttttttcattaaagtaaggtcttctataatgttttctgcaataaaaagtcatatcatagtatttttatattggttagtt

SEQ ID NO: 391037 - DNA, 570 bp, Homo sapiens
gtgatgctgtctagtcacataaaccagtttgatgctttgactgactcaatcagtcaagtcagaaggaaaaaagaagggctcaccctgtgattgacttgactggcatagacaaaacaatcacacttgtttgtgtgtgtaaagaaccagtgtgcctgtgtgtacccttcrcacaagagaagagaggacacagtgacaaacattaagtgacagaagtaactgtgttaacacactttatgatcagactgttctctttaccctgcaataactctgaaaaagaggagaggaaggcaaagggagaaataggataatgagttttaatggaattattagtgttaagtaaatacagaaggaatgatgacaagtcagtggcagaaaaagccaaagtctaaaagaaaggcaagatttgataaaatggaggaaaggaagagagagagggggtggagaaagggagggaggaaggaagaatgtgagtatgggtccctggaggaaaataggagctactgaggaaagaggaaggtgagacttctgtaagtcctgtttgtggcaagggagaaagaacaagcaaactta

SEQ ID NO: 391038 - DNA, 533 bp, Homo sapiens
ctcttcctcttccagtctttgaacaaggccatgtgaaaacataatgtaatatatcagagcaaagataaaagaataaagatagtgaataataaaacatgtatctctaaaaactaagaatttaaaccccagctttctgatttaggcctttcatttcaatataatacaggaattgcctgtctgaaacaatgcaaaggttatagggacagttgtgaaagaagcatagacagtgaacaaaattgcatcagtacaaaaatttacctgaaaaaaaacataaatgatgtcatgaaaatgacaactgattctcatggtaaacacaagatggcctcttctgtgattgcttatacttccaggaaacggctattcttttgtatatcctctgattattgctgccakcccaatatcatgtaactaatatactaaaaatacattttgaataatgaaagaaactcttgcaagtaacctattgtatgacacttttttatatcaaaatatcaaaataaaagctaatgctaaaaatcaaaagctccttcttt

SEQ ID NO: 391039 - DNA, 589 bp, Homo sapiens
ttattctcagagatgttgagttaaatttgcgtgtaaaatatcaaaagggagaaggcacttgagtgaatttttctgacagtggtcagaagagaagtctggatagaaggtatggacctgtatgactcaagacagagatgggagttcagtccctgagagtgaattcacctttccaaaaagcaaatattgttttgtgcagaaaacatatagccttccttcagtagaaagcaactcattagatcatttgggaaagatcccaaatccccaattcctgggcctatatttaatcaaaaattacacacttatttttaagtaccgttttttcctttatcctaaagatttttgtcaaattcaaaatattatcagtatagaatatttcttgatacttcgagtttaaaatagcgcatgcttacgtgggtagaatagagataaattataagtcacaaatatttgaaagaaggtatagtttgaatagtctattcrcattactactaataaaataatattaatttctaacacttattcaccacttactttgtgccaagcactgttgtaagggcattatttgaaatgcctcacttgaaattcgcaa

SEQ ID NO: 391040 - DNA, 402 bp, Homo sapiens
cttccacatggaatgacttcgcaaactaattctgttattattgctttatacacatttcaagacttagttcatatggcgccttcattaagagtaccattacctctcaggttacatatgacttatttctgcagtaagtaccaagagtgctttttatatttctttgcaacacatcagagtttttkgtatactttttaggtattgcctgtgactgcctttgcactgcagtggcagaatagagtagttttggcagagatagttgaaaaaaaagttccttcttgattaaaacttccttgagagcacatgttttatctcttcaatttttcactctttatggaatctagttgtgtctactcatagcgtttaatgcactttattgaattgaactgaataataaaattgctg

SEQ ID NO: 391041 - DNA, 547 bp, Homo sapiens
ttttaagctgcattttttttttaaccagcattatgagaatgtttattttgacaaataaaatgcagtacaatgaatttcaccagaaaagttttaaaaagtaggtacaaataaatatgtttacaaattattatagaaacaatacaaaagaagactaaaattctcagtaaggaaaaaccaaaatgtgcccaatcatataaaggctcttcctttgcaagaaatggggataaagctgaagacccagtttggttttgctgctgaaaaatgtacagaatacttagaaaaaccagttgcggtcaaacgttgtaagcccactacccgtacctgcctatttttgatctgagaaaagttgatgaccacagtgcaagatagagctgaagacaggacagccaggcattctccatccaaagtccatcaccctacattaatctttaagtaaaatcagaagaaaagcaagtccttagtgaggtctgaactctgcagccgrgtgactggatctcctccattgtagtgctcaaaatcgtttattttttggccagcagaacaactt

SEQ ID NO: 391042 - DNA, 618 bp, Homo sapiens
ctatagttatatctcatatgcaactatatttatcaatgaagcaaatgattaacaactgatgaatctaaattaaagccatgtaggagttctttcaaatttcttataggtctgataattttcaaacaaaagaaattagggtaaaaatggtctcatttactacataacrtatttttttcttaattttccccatatttttgacatataacaagctatagaaaatatgctgataattaagaccaacattcaaaatactacttacccaaactcacaaagttaaaatctgatagggctgagatacacatccaggctggattggaagttcttgtccttgtcacattgttacctattgctttcacggtacacctaattacaatcttcagactggttcgtgattactaactcaatttttttaatctcccaatcacaactttcttctgactttatgttctgactttaactgatttttgaatttgactaccaattcttagaacacttttcgtctataaaataaaaggtttagactagatggaagttcaggctcccactaattctaagattttaggcttttgtgtatttcacatgtttttcatctcaagtaaatatgatctgatgttatgt

SEQ ID NO: 391043 - DNA, 618 bp, Homo sapiens
ctatagttatatctcatatgcaactatatttatcaatgaagcaaatgattaacaactgatgaatctaaattaaagccatgtaggagttctttcaaatttcttataggtctgataattttcaaacaaaagaaattagggtaaaaatggtctcatttactacataacatatttttttcttaattttccccatatttttgacatataacaagctatagaaaatatgctgataattaagaccaacattcaaaatactacttacccaaactcacaaagttaaaatctgatagggctgagatacacatccaggctggattggaagttcttgtccttgtcacattgttacctattgctttcacggtacacctaattacaatcttcagactggttcgtgattactaactcaatttttttaatctcccaatcacaactttcttctgactttatgttctgactttaactgatttttgaatttgactaccaattcttagaacacttttcgtctataaaataaaaggtttagactagatggaagttcaggctcccactaattctaagattttaggcttttgtgtatttcacatrtttttcatctcaagtaaatatgatctgatgttatgt

SEQ ID NO: 391044 - DNA, 563 bp, Homo sapiens
tagaagcagaagaagacactgacagacaccagcagacagtggcaggccagagatggtggagtgacgtggatgccaaggaaactttggccaggggcagttggaggggagtctggctgctgggcagcccaactccagggaagaccaccttccctttccatcccctttctggctccccatccatcttgctaagagctacctccaccattccataaaactttgcgctcatcctccaaacccacgtctgatcygatgcttctggtacactagggcaagaacccaggatacagaaagccctctgtccttgtgataaggcagagggtctatctgagctgattaacacaagccacctgcagatggcaaaactgaaagagcacactgtaacacacacccactagggcttcaggagctataaacactcaaccctagatgctgccatggggtgggagtccagaaatgctccccaggacctgcccgtctgcatgcttcctttatgggtttgagcagtggggcactgaagaagcaaaccacacccatgttgcatgccctgagaaggggataatggg

SEQ ID NO: 391045 - DNA, 540 bp, Homo sapiens
catgagttgatctcactttctttaggcatcttctcaaaggccagtttgaaaggctttccttgacctctctgcctaaatagcaatcctacctatgatatgctctatcctgttacctgtttgattttatttcgtgtcattttgtggcacttttcactacctaacacattccctatttatttctttgttccttgtttttcaccaacagaatataacttatttaaaattggaactctattttgttcatagttttatctccatgccaagaacaatgcttgcctgaaggaaataaatcaataagtgttttgrcatgaacccaagaattaaactagctttattgcattaaatatgtttctcccgccttttaataaaaattttaaattgtgggccacatgtgcaggatgcacaggtttgttacacaggtaaacgtgtgccacggtggtttgctgcacctgttaacccatcacctgggtattatgtccagaatgcattagctgtttttcctgatgctctcccccacccctcctcccctgccaacaggcc

SEQ ID NO: 391046 - DNA, 548 bp, Homo sapiens
tagaactaattggtgactgcaaacagagatcaaattcaccagaaagctgcatgactttttctttagttcataggcactgtttaagatcagaggtttaaaaaaaaaggttgcatgttgtgttaattgattcaggaatatgttttctgctcacttttgatgctataaaatgaaatggaacagtctggaatgcawactgaaacaaggggttacatgggtgtggcagcttcacagcctacactcgtttgttgtttgccggtaagcattcatttgttcaacttctgatatttgggccttgttccaagagtatttttgagaaaacgtaaaagttctgtgtgaagtggatgaagtactcttttaacttttgagtattcattgtctcaaatatttatatattccattaattctatttcacccatttttttccaagttactctttaatgtctccacttcaatttgaatgtatctagttctaaatattctgcagcttacaggggacacttatgtctatattctgcaatgtcttgttactttttaaagtctattatata

SEQ ID NO: 391047 - DNA, 595 bp, Homo sapiens
agatctgtggttactaccaactcctttttacacagggagtgcagatcatacaaaagaaaaacatagccttgatcagacagctgagttttttttaatcttaaaaaaaatctattttatccaaatgaattgagtactcagaactggaacttttcagaccacaaggaagactgacatgcttttttatcatggtaacaggtactgactgcatggggagaggccataccacagaaacctcaatctgcctgagccgtgactctgagagctggagtaccactggacaaggtgaggggagcttttgcttgtttactcagaaatattttctaaattacctgtttgtgttatttaggagggcaggattggggaatgccactttgacctgatttttacagaataaactccttgcgtagcrttataataatcagaataactagataggctcttttaggcaaggttgggcaaactttctatattctgactcctcttgttgttttcttcccaaacatttgaaagaaaacacattacagtttacaaaaaaatccctcattctgccttgtgttggttccacctcccctaaaaatagaattttatgatgctc

SEQ ID NO: 391048 - DNA, 597 bp, Homo sapiens
ttagctcttgtctaacttaccttttccataaggtgtaaaaagcaccctatacagagggagtatatgaaacccatagctagtctgattgcttgcatgctattcatatacacgcccgttgtaagctggcactgggtgaacccgctgattctaaccatatggctgcctgcagaagtgcactgaggagtttcctccagggtgcccgaacggtgtcctactggcttcctaggctgcaggaaaaaatgaaaaaaaaatgtaattttcccattatgagatttcatccagatgctmatgaggtcatacattaaataatgagactttaaagaacattactattttgaagaattgcaaactgtatgcatttctccactgggtggcggtcgaagtccataatcatgaagacaactaaaagacccggaaactgaaaatctaatttaaaaaatatcacttaagggttaattaattcagaactactattcttctaatcagattaccagtttatagtgctgtgtgtcagtcagactgtgctggttctgcctgttggtagacaattttgcattacagagagctgtagaaacttttgagctattgaaagatttt

SEQ ID NO: 391049 - DNA, 597 bp, Homo sapiens
ttagctcttgtctaacttaccttttccataaggtgtaaaaagcaccctatacagagggagtatatgaaacccatagctagtctgattgcttgcatgctattcatatacacgcccgttgtaagctggcactgggtgaacccgctgattctaaccatatggctgcctgcagaagtgcactgaggagtttcctccagggtgcccgaacggtgtcctactggcttcctaggctgcaggaaaaaatgaaaaaaaaatgtaattttcccattatgagatttcatccagatgctcatgaggtcatacattaaataatgagactttaaagaacattactattttgaagaattgcaaactgtatgyatttctccactgggtggcggtcgaagtccataatcatgaagacaactaaaagacccggaaactgaaaatctaatttaaaaaatatcacttaagggttaattaattcagaactactattcttctaatcagattaccagtttatagtgctgtgtgtcagtcagactgtgctggttctgcctgttggtagacaattttgcattacagagagctgtagaaacttttgagctattgaaagatttt

SEQ ID NO: 391050 - DNA, 583 bp, Homo sapiens
ccttaggcagtacctaaaaaatactcagattaatcttttcattgcttaattaattcaagttgggatctttttttttcaggtagacaaagtctcartgtgtgttagttactggtggtaaattcaatatttaaagattcatttatactctttctccctgccagcaacttactgatgtagtaaatagaaaagttaatgggatcctaaagttagtcaatagctaaaaatatctgcatgttgctaagcatatgattcttattaatattttgtcatgtaaatgttacaggaatatactagtgaatttcataaaagtctcttaaaaaatttagctgttttcccagaaatcagtgttttcatttttaagagaacatgtacaaatctagtaaattcaattacatagtgatactgtcttaatacatttatatagtattaaatgatatacagaaaattaataaatgtaaacattatgccaaagaggaaaaccaaatcagtttttagattttcatgtaaagaggtattgctataacatcatcacaagtaactctataaatctctgatctctgtcttttaaagtatcctttaattc

SEQ ID NO: 391051 - DNA, 420 bp, Homo sapiens
caacactaatgtacaaaagtcagtagcatttctacacaccagtaaagtccaacatgagtgccaaatcaagaaaaacccccacaatakctacagaaaagataaaatacctaggaatacagctaaccagggagatgaaagttttctacaatgagaattagaaagcactgctcaaataaatcagagatgacacaaacaaatggaaaaatattccatgctcatggataggaagaatcaactttgttaaaatgacatactacccaaagcaatttcaagactaaatgctactcctattaaactatcaatcacattcttcacagaattgggaaaaaaaactaactattctaaaattcacatggaacacaaaaaaagagcccaaatagcaaaagccatcctaagcaaaaagaacaaagtcaggggcat

SEQ ID NO: 391052 - DNA, 594 bp, Homo sapiens
gtctatatcatgtttcttttacatgctagtaactttagataaatttgtacttgttaatattgcattgaattgtttcctgtggagatttaataatacgaagtgtgaatatctcgggtgtgaatgataaagcagtttctactctataggagtactatataacacaagagtaactgcattatactcatctgatgtttttgctaaatagttgcacatctttctcagctatgattccattatttggtaaaggcccatgttttaaaattctaactttgttttacatgtcacatgtctgtttcaaattcattatatcatacataaatcacagaataaatttttaaaatatgtatatttacatattttgtaatttcccagattctcagagctgtttcttcaagactataggatacgaaaaagcaataggagggcaaacatgttccagaataagtttgatcaaaaatatctttgcagaacagtctattgtcagcaatggtttccaacgaaaactgccacaccaggagtcccagttagaattttttttaaaaatgcatttgtgtcattttgtttagaaagamaaaaactatctttaaacttaaa

SEQ ID NO: 391053 - DNA, 563 bp, Homo sapiens
tgcttgttgtgattgccatggtataattcacatatcacctctatctgtgtgtgtgtgtgtgtgtgtgtgcgcgcgtgtgtgtgtgtgtgtgtgtgtttttcggagtttcgctcttrttgcccaggctggagtgcaatggtgtgatctcggctcactgcaacctctgcctcccaggttcaagcgattctcctgtctcagcctcccaagtagctgggattacaggcgcctgccaccatgccaggctaattttttgtatttttagtagagacggggtttcgctatattggccaggctggtctcgaacttctgacctcagcctcacaaagtgctgggattataagcgtgggcaaccacgcccagcctccatctgttttatgtaatgctgttctatatataatgctatagttttagttaaccagcaactaaaaaaatgccttggatgaaataagaagtgaaaagatcaattacagtgtttatataagctttgaaaattttaatttcctaaatttatcagtggctcttatttctgtctttcaacatttaattcagataatattctatac

SEQ ID NO: 391054 - DNA, 538 bp, Homo sapiens
ttaatggaggaataggtatctcttatctaaactcctctattcccagctgtgatattgattgatgtttttaaagtcctgaggagctacccttgtggatatgttttctagtccaaagaaaaacaagtcaggaaaaagggaatcataggaacaccttagaaatatgtttaatgacctaggaagagaactaaacgttaagaaaagaaactctaaaaatagtcaatgtattcagagtgaaaataatggcaaaagagaatttgctaggctcatgtagttacatgattcagattagcatttgtagctgtgtgaagatttcatagatttaaagttcttcacgtgacgtttccattggctttggctgaagtcactatttggcagaacagaatcaagattctgatgccagatatgtcaccgatgatcagttccatctcacctcgcagtyctcagagttcaaatcaattcagcaaatatttattgagtgcttatggctgctgacttttctaagtcagagaaaagtaatgagatgttagtaaaatgtgac

SEQ ID NO: 391055 - DNA, 414 bp, Homo sapiens
gtaacaccaaaaagaatttcccagcactaaaacaaaccacattgcaaactcttcctaagtgcttagcaacgttctgaaatggctccatttatgtgaggcttgagaaaggaaagaggcctcttgtgaacttttyaaccacagagaggagtgttctctaaaaagatatattcagagtgctataacaagtgctacatataagttggtgaatcgccttatttaaaaacaagtgccaataaaagatattcttcctgttgacaataaaaataattcaattttcagaaattaagtttctgcaagtcataataactgttttgtgtttaatgttctttatgttctgtagctatttttgatttcttatatctgtttttaattactatctcattgaatatctcatgattgtttttgcaacatctt

SEQ ID NO: 391056 - DNA, 594 bp, Homo sapiens
aagatggccaaatagaaacagctcccatttgcagctcccagtaagacaaaatgcagatgggtgatttctgcatttccaactgaagtactcagttcatctccttgggactggttaggcattgggtgcaacccacggagactgaacraagcagggtggggcttcgcttcacctgggaagtacacggagccaggggacctccctcccccagccaagggaagtggtgagggactgtgctacccaccacgggtactatgcttttcccatggatttttgcaatccatggatcaggagattgcctcatgagcctacaccatcagggccctgggtttcaagcacaaaactgggtggctgtttgggcaggcactgagctgcaggagttttttcatactccagctgcacctggaagtccagagagacaggagaactgtccagtcccctggaaagtggctgaagccaaggagccaagcggtctcgctcagcatgtcccactcccctggaacccagcaagctaagaaccactcacttgaaattctcactgacagcacagcagtctggagttgacctgggactattggcttggtcgggggagggatg

SEQ ID NO: 391057 - DNA, 484 bp, Homo sapiens
acgatttttactaaatgtatatggctctatttctgctatgcatgtatagttctcattccattagcctttcttcattagtccattttatgtctttttaaaaatttttrtgggtatagagtaagtgtatatatttatgggatatatgggatattttgatacaggcatacaatgtgtaataatgaggattaatttgaaagttaataaatcccaggctgggtgtggtggcttacactgtaatcccagcattttgggaggcagaggtgggtggatcacttaacgtcagaagttcaagactatcctggccaacctggcaaaaccccgtctctactaaaaacacaaaaattagttgggcaggatggcatgcatctatagtcccagctaatcaggaggttgaggcatgagaatcatttgaacctgggaggcagagattgcagtgagttgagatcatgccactacacaccagcctgagcagcagagtgagact

SEQ ID NO: 391058 - DNA, 406 bp, Homo sapiens
cctgtatagggcacttaccatgaatggagcttgcaggaatagaagttgcactgagtgagtcagtgagtgagtggtgagtgaatgtgaaggtctaggacattatatacactactgtagactttataaacactgtacacttaggctacaccaaatttataaaaaataaagtaactatgctacaaggttatgaccgctgaaatgtcactaggtgacagaaatttttcagctccattgtartcttatgggaccaccttcacttatgtggtttgtctttgaccaaaatactgttatgtgacatgttatgtgacatgtgacaccaatctacaagaatccagaaaggaaaaaggcagaagctatgagatcctttttggctgaaagaagacagacttttagtggtggagggtgc

SEQ ID NO: 391059 - DNA, 590 bp, Homo sapiens
aagcaagagtttgcaccgaggcctaatttcagcacccatgattttatctagtatacagtactgtctctcttgaaaacaatcaatccaaataagttaaatccattggaacatcttagtgtatgatggtaaaaacaatctagataatgatacaaagtgatatcttcagtaaattattaattactctaaaatgtctttgttttactagtagttttgctaataaatattaatctctaatagacagttcacacttagccaatccatttgataatcagtttatttattatagagccttaacacagttattatgtagttctttaaggatctgaaccaggaggatagcatttacaaagctggggtttataaccagagaagatcatagaatttatgacagttgatctctacacataagggaataatgagtcttttttaatctaagagaactggaaagtctggtttttgaaagggttccttggcaatttagatattacctcagttttacagaggaggagaaggttcrgtgatccttttcaaaagcacatagaataagtgttataagtgttataagtattggaaccgagatttaaatttgg

SEQ ID NO: 391060 - DNA, 529 bp, Homo sapiens
agacctcataatcatggcagaaggcaaggagaagcaagtcaaatcttacgtggatggcagcaggcagagagggagcttatgcagagaaactcctgtttcaaaaccatcagatctcatgagacccactcaccatcaggagaacgatgggggaaagaccctccgctatgattcagtcatctcccacttggtccctaccacaacatatgagagccacaagatgagatttggttggggacacagagccaaaccatcakatgctttggatatacagccagtagtagaatttctggatccagtggtagttctatttttagttttttgaggaacctatatacagttttccataagggctgtatttatttatattcccactaacagtgtgcaaagattcctttttctccatatactctccaacatctatgttttatctttttgataatagccattttgagaggtgtgaggcagtatctcatttaatttgcatttctctaatgattcgtgatgttgaacattttgtcgtatatctttt

SEQ ID NO: 391061 - DNA, 611 bp, Homo sapiens
gaaatctactaaagatatatttattcaacagatatttgttgtattaaagtatcagaggaacagactctgatttatcagagggacagaggtcatagctattgaatatataccaggtatcaaaaataatgttgtaaatttagatatagtattaaaaaatataccatgttctcaaatatctcgtggtatgtaggaaacaaagataaatgaacaattataaatcagtgtgagaagtgagaagtcctctgctacagaaaattactaaaataccttttttttttttacattatcttaggtattatagtaaagtttctcttttaacccatttaatttttctcaaaactttattgggtaggtactattgtttcccctagtttaagataagaaattcaaacagagaagggaatcagattttgtataagcaacaagatatcagaggtgaagtttgagcctggcttcaaagtctgtacttttaaattctatatataccatacccttaagatgcttttrgaaatagcgttgcaagagaaaatacagtatatcaaactaaattaaatgcagataaacagcgaataaattttagcttatgtatgttccgtgcaataggtggttta

SEQ ID NO: 391062 - DNA, 568 bp, Homo sapiens
ttgtattgattctttgcagtttaaaaaatatttgacagagggaactgtaaaaatctttcctcttgtcagttrtaagaactggaattttaacattctcttctcacagaatcaatgtgaaaaacatgaaaatttaataccagttggcagtaaaatctcactttatttaactgagaattttacattgagtatgatgagatcatgtacctcaaaataatgttagtatatgacagaaattaaaaatgatggtaaaaaaggaataaatcaagatatgaaattactgaatgatcccagctaagtttaaaatatttacacaggaaaaagcttagaaggaaatgtagtaagatataaactaagagtagatatatatgtatatgtatatatataaaattgtttaaattggcacataatcgtacatatttatgggatacaatatgacatttcaatacatgtatacaatgtataatgatcaaattagggtaattagcgtatctatcacctcaaacagttatcatttctttgtgttgaggacattcaaaatctgctaacagtagttgtattttgatggaag

SEQ ID NO: 391063 - DNA, 587 bp, Homo sapiens
ggaccatctcctcaggtctcacaaattactgcttccaccagcataattgcctctaggaggcactgcttccccctttaaggctgtggaccagttgctgtgaattattatctagtctacagctgagctgggttctagctgctaggagaaataaattctatgagtgagagtgacgtcaatcaagatcatgtggcttatagaatttgtttaccctctgcagctcacggggatccctgtcttcctaggtcttgggctattcatgcatactgggccctctttactcccagcatccaaggaatcattagccaggcttgatggtaggggctagagtagaacaaaacatgtttgccaagttctttgtaagagccaagtctagtggggragaagggtattcacctagattcctcaagactaggccaagagacagggcaaggaaaaggtcctgacagccttcttaacaccttccctgacagttcctagttttctggtttgaaattgaaaagggtacttccctaaggcaatacctatccctctagcagagggcaaccatttcagcacacagcacagtaagtaacactttgtcgatgcac

SEQ ID NO: 391064 - DNA, 433 bp, Homo sapiens
accgctgtaatctttcagtttcctcttctgcaaaatgaagatagtaataacatttgagaactaaatgatataataaatgaaaaatttaagttgtgcctggaaaatggcaagagctccactgcttttaaatagtattatcctacggtgcttgtgaagattttttaaaaggattttattttctcatattcagttgacagaattggaattaaaattactgtaattcttaatcatagatcascagaccatgcagtttagtcaaggctgtgctgttttttctcccagaaatctggaaaatactatcagttcactatttttatcagtataccattctgcaaagatgaaatgtgattgcaaaagtgctgccaaagtaattgaatgaagaaaattacatatttgaatcttctacttcaaaaatgaaaaactgaagtttccc

SEQ ID NO: 391065 - DNA, 593 bp, Homo sapiens
tgcagcctgggcaacaacagagtgaggctccatctcaataaataaataaagtcctgcttaaacttcaggttgagctgggaggatcatttgagatcaggagttcgagaccagcctgaccaagatggtgaaaccccatctctactaaaaatacaaataattagcagagctgatggcacacacctgtaatctcagctactcaggagactgaggcacaaaaaatcactttaacctgggggacaaaggttgcagtgagccgcgatcacaccactgcactccagcctgggcaacygagtaagactctgtctcaaaacaaacagacaaaaaaacactgcaggctggcacagtggatcatgcctgtaatcccagcactttgggaggtggaggtggcaggaaagcttgaggccaggagttcaagaccagcctggccaacagagagaccccatctctatacaaaaaattaaaaataaaaagtcaatttccatgtgtgtttactttaaataactaaaacaatttcagagacagccctgcataggtcattaaaattgtgatgctgtttttaataaaaatcaaataccaactatagtagagcttac

SEQ ID NO: 391066 - DNA, 593 bp, Homo sapiens
tgcagcctgggcaacaacagagtgaggctccatctcaataaataaataaagtcctgcttaaacttcaggttgagctgggaggatcatttgagatcaggagttcgagaccagcctgaccaagatggtgaaaccccatctctactaaaaatacaaataattagcagagctgatggcacacacctgtaatctcagctactcaggagactgaggcacaaaaaatcactttaacctgggggacaaaggttgcagtgagccgcgatcacaccactgcactccagcctgggcaactgagtaagactctgtctcaaaacaaacagacaaaaaaacactgcaggctggcacagtggatcatgcctgtaatcccagmactttgggaggtggaggtggcaggaaagcttgaggccaggagttcaagaccagcctggccaacagagagaccccatctctatacaaaaaattaaaaataaaaagtcaatttccatgtgtgtttactttaaataactaaaacaatttcagagacagccctgcataggtcattaaaattgtgatgctgtttttaataaaaatcaaataccaactatagtagagcttac

SEQ ID NO: 391067 - DNA, 593 bp, Homo sapiens
agaccacttgaagtcaggagttcgtgaccagcctggacaatatggagaaaccccgtctctacaaaaaatataaaaattagccaggtatggtggygtgcacctgtaatcccagctactcaggaggctgaggcatgagaatctatatatatagatatatatagattaattcagcaattaaaaggttagtttgttcattttattactgtaatgcacagaattcccttttaaaaatatatattcccatagaaagacaaggggcttgatttttttttttttacaatgaagcaaaagccagagtaatctttaaaaaatataacaatctaaattttatttctggtaataatcttttgactactcatctcaatttgttgctattaaggaagtcattttaaccttttgactatatatttaataggtgaatgcctaattatagaattataatattatacttagctttcatgacattcgctaagaattcaacttaccctcaaagttgaattcttacttttgttgttaaccttctcttttgtctgcagtctttgcctgggttaccatagctgcttcttgagcttcctgtctaccttacacaagtg

SEQ ID NO: 391068 - DNA, 531 bp, Homo sapiens
ctttaaacatttttttgctctggttgtccatactattgagagtattttgaatctccartcagttctctcttgtatctatatatgctaaacatacctttaatgatttcctatacatctctaaatagtaattttgtgggaacgttaagtgcagtagttctattactttgcatccttttaatttcatatagttctgttttcttccccgtgtctgcctgggtgacatgagagattaaagactgtggttgttctgtgtatgggctcaagctggatggaggagttgatattagagaaaagagaagctttccatttgattaagctacaaatagagggacttttttttttttttcgagtggctggggaggtgacagaatgggaagcatcaaagggaactttggcagaacttggtaattgaagagaaaaccactgaagagaagcatgatgatgccaggagtttgatttcaaatgatttgtaagaaacagtgaaccaggacacattaagtttgaggtagatggttgtaagatatcaagaag

SEQ ID NO: 391069 - DNA, 531 bp, Homo sapiens
ctttaaacatttttttgctctggttgtccatactattgagagtattttgaatctccaatcagttctctcttgtatctatatatgctaaacatacctttaatgatttcctatacatctctaaatagtaattttgtgggaacgttaagtgcagtagttctattactttgcatccttttaatttcatatagttctgttttcttccccgtgtctgcctgggtgacatgagagattaaagactgtggttgttctgtgtatgggctcaagctggatggaggagttgatattagagaaaagagaagctttccatttgattaagctacaaatagagggmcttttttttttttttcgagtggctggggaggtgacagaatgggaagcatcaaagggaactttggcagaacttggtaattgaagagaaaaccactgaagagaagcatgatgatgccaggagtttgatttcaaatgatttgtaagaaacagtgaaccaggacacattaagtttgaggtagatggttgtaagatatcaagaag

SEQ ID NO: 391070 - DNA, 531 bp, Homo sapiens
ctttaaacatttttttgctctggttgtccatactattgagagtattttgaatctccaatcagttctctcttgtatctatatatgctaaacatacctttaatgatttcctatacatctctaaatagtaattttgtgggaacgttaagtgcagtagttctattactttgcatccttttaatttcatatagttctgttttcttccccgtgtctgcctgggtgacatgagagattaaagactgtggttgttctgtgtatgggctcaagctggatggaggagttgatattagagaaaagagaagctttccatttgattaagctacaaatagagggacttttttttttttttcgagtggctggggakgtgacagaatgggaagcatcaaagggaactttggcagaacttggtaattgaagagaaaaccactgaagagaagcatgatgatgccaggagtttgatttcaaatgatttgtaagaaacagtgaaccaggacacattaagtttgaggtagatggttgtaagatatcaagaag

SEQ ID NO: 391071 - DNA, 567 bp, Homo sapiens
ctctagttctgtatttttcaccatgaaattacgttactgtactatctaaatataataattctcaagagcctatcttcatgtcaacctgctatgctttttaaagcatcaggaaatgacctggaaaactaaaccacagcacaaatgctaagatattttcttaaacagatgacagaaaataccctaatgtgaaatgtgggaatatatatagatatatatacacacacacacatagagagagagagtacaagcatgtgcctgactttgactaattttagaatcatgaataagacatcttcaaatgaaagagtaaaactaattgtcatatgagtttagctgaagcttttttagtatacttctcagatattggccaagtaaagaactctaatgactggtaaaactcacaagttacaggatgtccaatggtttgcttttcataagattaaaggaggacctaattaagttgctaactcataaatcattgtaaagtaattttaaataacttatcatgtgatttttggtatgttacttggaaaacatttaaakaaatagctgtcattgctataataa

SEQ ID NO: 391072 - DNA, 674 bp, Homo sapiens
catagtggaaggtgaaggaggagcagacatgtcacatggccagagcaggagtgggagagagaggaggtgccacacacttttaaacagatstcacaagatctcattcactatcgcaaggacagtaccaagaggatggtgctaaagcattcatgagaaatctgcccccatgatccaatcacctcccaacaggccccacctcaaatataggggattacattcagcatgagatttgggtgagtacatacatccaaattatatcactctgtttagttccaatggtcctagtgaaaactagatactttttctgcatcagtttcaagtttttatattaactacaaactcttacccatttttccaggatagcccaaagaagtctttacaggtaatttaataaaccattgtatgtaagttaatgtagcagaaattgcagattacaaggaggttggttacgaaaagttgatatagtaatctgggactaagtttataaagagttttgtgaaccttactaaaagaaggggtttgaattttatttatataaggaactactgaggatttatatatgtatgtatgtatgcatgtatttgtttcaactggcaagttagatagtatatatttatagtgtacatcatgacgtttaaaatacatattgtggaatgacaaaataaagttattta

SEQ ID NO: 391073 - DNA, 674 bp, Homo sapiens
catagtggaaggtgaaggaggagcagacatgtcacatggccagagcaggagtgggagagagaggaggtgccacacacttttaaacagatctcacaagatctcattcactatcgcaaggacagtaccaagaggatggtgctaaagcattcatgagaaatctgcccccatgatccaatcacctcccaacaggccccacctcaaatataggggattacattcagcatgagatttgggtgagtacatacatccaaattatatcactctgtttagttccaatggtcctagtgaaaactagatactttttctgcatcagtttcaagtttttatattaactacaaactcttacccatttttccaggatagcccaaagaagtctttacaggtaatttaataaaccattgtatgtaagttaatgtagcagaaattgcagattacaaggaggttggttacgaaaagttgatatagtaatctgggactaagtttataaagagttttgtgaaccttrctaaaagaaggggtttgaattttatttatataaggaactactgaggatttatatatgtatgtatgtatgcatgtatttgtttcaactggcaagttagatagtatatatttatagtgtacatcatgacgtttaaaatacatattgtggaatgacaaaataaagttattta

SEQ ID NO: 391074 - DNA, 538 bp, Homo sapiens
tttgtctcctgtaactgttccagtgtaatagtccagcacttgtttggtggcctcagggaccaggctcctttcattttgtcctcatcgacatagtccaggatggctcactcatctggctggtgggaaggggaaaatgagaaagaagacagttataggccgggcgcggtggctcatgcctgtaatcccagcactttgggaggccgaggcaggcagatcacttgaggtcaggagttcgagaccagcctggccaacatggcgaaaccccatctctactaaaaatacaaaaattatctgggcgtggtagcatgcacctgtaatcccagctactcaggaggttgaggcaggagaattgcttcaaccccagaggcagtgagccaagatggtgccactgcactgcagcctgggcgacagaacaagactccatctcaaaaaaaaaaaaaaaaaaaaaaaagacaattgtctgctcttcaggaagttgtaggcayctgtattaagctgttcttgccttactataaggaaatacctgagaccgggtaac

SEQ ID NO: 391075 - DNA, 517 bp, Homo sapiens
ctactggctctctagtttaattgatacccaactttgtattgattgaggtccacataatttatgttggaatctttctctggtgcaaagtgctctactttgtaattgcagagttagactcctactgttttggtaagagggagcaaatttttttttcctattattgaaaatgttaactttgacttgtgtaaatagtaaatatgtttattgtatgtgcagatatttacatgttttaaataagcacatttctatactaaatttgaaaattcacatggttattggtatactttaaaaagatttgtgtgttttaatatatgctcttttattcccttcgaargatgctataaactttactccttttaatatatattggtttttatttttaccgttatattgagcttttctatttttttcctgatgattttggaaaaacctccattattaatggtcagaatctttagtttttatcattgatttatagtaattttatttttaaagttcagtttttatgtgttatttt

SEQ ID NO: 391076 - DNA, 612 bp, Homo sapiens
gataataggataatatagtcctctgcattgcaccccaagttgattgggatttgtactttccttactttaaaagttttttttttaacttagtaacaagatatttgactttactgctgctttactgggtggcactccctctaaaatgataacaaaacaaactagcaatttataagttaacttgaatatgtgaatcaaatttgttaagaaaggtattagatttttttttttttttttttgagacagagtttccctcttatcacccaggctggagtgcaatggtgtgatctcagctcactgcaaactccgcctcccaggttcaagtgattctcctgcctcagcctcccgagtatctgggattacaggcgccaaccaccatgcccagctaatttttgtatttttaatagatgcgggatttcmccatgttagccaggctgatcttgaactcctgacctcaggtgatccacccgcctcagcctcccaaagtgctgggattacagacataagccaccacttccggcctggtattagatttttagtgtttttaaagatctgtagctgcaaatgtaattatggccctgctatattgcagccgtcattagatgcaggaaaaaa

SEQ ID NO: 391077 - DNA, 576 bp, Homo sapiens
actctccaccaacttttgtgcctgtatcccagttgaacatcaaatgtacacaatcttacagtttctaccttaggcagatgtgatcaggaacaaaaggcagttaatgtaataatatcagcgtagagatagataagtagggcatttgaaaacaattcccaagaaaaaatatatatttttttataatttgaaaatctgaaaaaagatcctcatctttgtagactgtaattgtgtctttccattttttctttcatctgtcaaatgcctggatagagtgaacgtgaaataaattcccatttatttyttcatctacattgtaatcccgagtctgtctggtaaaagctgttagtaaatcacttggtcagttctcccaacaaaatagtctttaagtaatacagtatatcaacctatcttttgacattttcatttttcgttcttgacattttctcttaaaaaataatacagtgttggccctattatctttcctttggagtctgtgaaccaaaatatcagctatcacctctcttgtagaaaagctctcaaggttcagaaaccaaagatgtagatgtaaggccctac

SEQ ID NO: 391078 - DNA, 558 bp, Homo sapiens
taatcatgttccccagttggttattaagaaagcaggaattatatgttcatattgatactagtttgccatttgtacccaaaagaagtacaggatgtgagatgagaaaatgaacaacacaaaaattctaggtaaattgctcaaagtcaggcagggagggatagagacatcacaatttcaaggaaagcgtttgttgaaaggcataatataatcactttatctttgctgcagattaaaactgattattatccatgagagaaagacccctaaaacataaaatacaggagagatacacttttatagaagaaaagacaggcctgggtaacactgggrattctaggaagtcatatagtgacacacagatacatacttctaaagaaggatagaaatataaaaaagaaaattttaaggacagagataaaaagtatttcatacctttggaaagctgtccaaaggatcctttgaatcagctaatgtgatcaccaaataagccatgaactttcaagtcttggctcatacttcacagtcagaattcccttctaccattccacaactgcaatt

SEQ ID NO: 391079 - DNA, 578 bp, Homo sapiens
atacttatactaaagattattcattgtttatctaaaattcaaatttaaatggtcattctataattttatgtgttaaatctggcaatcctatctgtgtgggtgaytgtcaggaagtatcatctcaaaaatcactttctactttctaaccagccacatcctacccactcccacccctgtttcatctttacctgaaaagccctgctatgcaagcttccattcagagatgcaacaagaaagtgcttagctctccaagttcaagctcagcctcctcattttctattgagagaacaaggttcagagttcagtggcctgaacaagaccacatggtgatgggatagtgaaactgagaagggtgccacttttgttattgttgctgctgctgttagctacaagcccagcattctatccactacctgaaggttgtagacagtaaaaaacagtgtaattattttttttcaatatgccattgacaaaatgcagctaagcttggttgggtaggagacggctattgatccttcctcagaaagcctaaaagtcatcttaatatctacttaattgaatgcattcaatataatgtg

SEQ ID NO: 391080 - DNA, 578 bp, Homo sapiens
atacttatactaaagattattcattgtttatctaaaattcaaatttaaatggtcattctataattttatgtgttaaatctggcaatcctatctgtgtgggtgactgtcaggaagtatcatctcaaaaatcactttctactttctaaccagccacatcctacccactcccacccctgtttcatctttacctgaaaagccctgctatgcaagcttccattcagagatgcaacaagaaastgcttagctctccaagttcaagctcagcctcctcattttctattgagagaacaaggttcagagttcagtggcctgaacaagaccacatggtgatgggatagtgaaactgagaagggtgccacttttgttattgttgctgctgctgttagctacaagcccagcattctatccactacctgaaggttgtagacagtaaaaaacagtgtaattattttttttcaatatgccattgacaaaatgcagctaagcttggttgggtaggagacggctattgatccttcctcagaaagcctaaaagtcatcttaatatctacttaattgaatgcattcaatataatgtg

SEQ ID NO: 391081 - DNA, 578 bp, Homo sapiens
atacttatactaaagattattcattgtttatctaaaattcaaatttaaatggtcattctataattttatgtgttaaatctggcaatcctatctgtgtgggtgactgtcaggaagtatcatctcaaaaatcactttctactttctaaccagccacatcctacccactcccacccctgtttcatctttacctgaaaagccctgctatgcaagcttccattcagagatgcaacaagaaagtgcttagctctccaagttcaagctcagcctcctcattttctattgagagaacaaggttcagagttcagtggcctgaacaagaccacatggtgatgggatagtgaaactgrgaagggtgccacttttgttattgttgctgctgctgttagctacaagcccagcattctatccactacctgaaggttgtagacagtaaaaaacagtgtaattattttttttcaatatgccattgacaaaatgcagctaagcttggttgggtaggagacggctattgatccttcctcagaaagcctaaaagtcatcttaatatctacttaattgaatgcattcaatataatgtg

SEQ ID NO: 391082 - DNA, 658 bp, Homo sapiens
gctacagatgaagaaacagctggtttgctcatgaaagagctcaactctaatcttctggctctgaatatagtgttctttctagtactataatacatttcttccctgaaaagaaatggcaacctaaaacctattgactgaggtgtgtaaaacactgactatggagatatttaraaattcaggtgaagtgggagcaaagcaggttaactgaaagccaaacacgatgatacctggataatcctgtctcctattttcagcaacctaagagaacctcagccggtaatctcaattagggtcgtctgcagaaacctctatttcttcccctacattcatgctgagtaactttgactaagtaatcacagctgccaaatacaggacagggcactttctaaaatcccttcttcctataaaatgttcatgtctaaccccatggccactttcccatttatccgtttgagtattttactattcactggctcaccaggtaactctgttacctgtgttaaaaatgctagggagtctgtactgtatttgcccggcatttgcaataaaatgtcttactcttttttggtgcatgagaggtctttatacacaccaacatagagtgttgtacctgtatttttataggtacaatcttgctttaaatttcttgtccttaata

SEQ ID NO: 391083 - DNA, 658 bp, Homo sapiens
gctacagatgaagaaacagctggtttgctcatgaaagagctcaactctaatcttctggctctgaatatagtgttctttctagtactataatacatttcttccctgaaaagaaatggcaacctaaaacctattgactgaggtgtgtaaaacactgactatggagatatttagaaattcaggtgaagtgggagcaaagcaggttaactgaaagccaaacacgatgatacctggataatcctgtctcctattttcagcaacctaagagaacctcagccggtaatctcaattagggtcgtctgcagaaacctctatttcttcccctacattcatgcygagtaactttgactaagtaatcacagctgccaaatacaggacagggcactttctaaaatcccttcttcctataaaatgttcatgtctaaccccatggccactttcccatttatccgtttgagtattttactattcactggctcaccaggtaactctgttacctgtgttaaaaatgctagggagtctgtactgtatttgcccggcatttgcaataaaatgtcttactcttttttggtgcatgagaggtctttatacacaccaacatagagtgttgtacctgtatttttataggtacaatcttgctttaaatttcttgtccttaata

SEQ ID NO: 391084 - DNA, 577 bp, Homo sapiens
agaaggctagacacaatttcagaactagatttcagctagtaaaagaatgctagtggtgtgcttatacagactctaaagatcaaattgttaaatattcaggaattcggagcgagctagttgctaaactgtaggagaaawtagcaatgctgggagaagctacactgttgaaattgcaaatgttacaaatccaggcttttttttacttttaggagagccaggttaccagcataccattggctataacataattgtatcaagcctgttgaagccaaagtaatgacataaatttttcgtgggtcccaaaacaaacaacaagaacttaaaaatttggaatttgtcaatatttgccctgtgaaattggcacagactattccactgcccttgtcatgtatactgaattaggtatatctgcagtgaaataggcatatctgcttaatatcatttgatgactgacctgataatgcttcttgagaaaattcctggtaattcttggttatgctggtgtgcagtttctatagagatgcaatacaattactgtcaggtacaagtatttttcatcttggtttctttagcaatt

SEQ ID NO: 391085 - DNA, 577 bp, Homo sapiens
agaaggctagacacaatttcagaactagatttcagctagtaaaagaatgctagtggtgtgcttatacagactctaaagatcaaattgttaaatattcaggaattcggagcgagctagttgctaaactgtaggagaaaatagcaatgctgggagaagctacactgttgaaattgcaaatgttacaaatccaggcttttttttacttttaggagagccaggttaccagcataccattggctataacataattgtatcaagcctgttgragccaaagtaatgacataaatttttcgtgggtcccaaaacaaacaacaagaacttaaaaatttggaatttgtcaatatttgccctgtgaaattggcacagactattccactgcccttgtcatgtatactgaattaggtatatctgcagtgaaataggcatatctgcttaatatcatttgatgactgacctgataatgcttcttgagaaaattcctggtaattcttggttatgctggtgtgcagtttctatagagatgcaatacaattactgtcaggtacaagtatttttcatcttggtttctttagcaatt

SEQ ID NO: 391086 - DNA, 495 bp, Homo sapiens
ggggtctaggcagcctttaccaatgyggtggtggcccgcacagtcagtgcaggtattcttttgccaaatttcttcatcaccacagccatgttgttctcctggttctgagataagtgaaccctatcttagtgacttcccccggccacactctctcctcagagatctgaatcttagccttgtgggacctcctctgagcttccaagttacttacttgttcgtgtcccctcatccctaaggatgctatagggaactaaggagaagacagcacaatttaaatctgtcttcagtgaataacaaggcttttacgtacataaaatataaaaaaattgatgaatacaaggagaaattgacaaatctccaattatagtgggaaattgtaacacaactctgtcaaaggctgatggaatttcagacaaaaaaagaaagaaaggaaaaaggaaagaaaaaactttcaagaacataggagctctgtgtaacataagccacaaacttggc

SEQ ID NO: 391087 - DNA, 495 bp, Homo sapiens
ggggtctaggcagcctttaccaatgtggtggtggcccgcacagtcagtgcaggtattcttttgccaaatttcttcatcaccacagccatgttgttctcctggttctgagataagtgaaccctatcttagtgacttcccccggccacactctctcctcagagatctgaatcttagccttgtgggacctcctctgagcttccaagttacttacttgttcgtgtcccctcatccctaaggatgctatagggaactaaggagaagacagcacaatttaaatctgtcttcagtgaataacaaggcttttacgtacataaaatataaaaaaattgatgaatacaaggagaaattgacaaatctccaattatagtgggaaaytgtaacacaactctgtcaaaggctgatggaatttcagacaaaaaaagaaagaaaggaaaaaggaaagaaaaaactttcaagaacataggagctctgtgtaacataagccacaaacttggc

SEQ ID NO: 391088 - DNA, 625 bp, Homo sapiens
ttttccagtctgtgcttgtctctttattctctaagccacatctttcaaggagtagaaggtcctaactttgatacatttcatttaccttttttatggcttgtgtctttgattttatgtctaagaaatctttttctaaccccaagtcacaaagatttttctcctaagttttcatttgagagcttcctagtttttaggttttacatttacgatatgatcatttatgacttaatttttgtgtggggtgcaagttatgagttgaggttaatttctttttgcaaatagaggtccagttgttcctgcaccatttgttgaaaagaccatcctttttccattgaatggcctttgtacctttgttgaaaaatcaatgcacaagtctatttctgtactctctagtctgttctattgatctatatgtttgctttttcttcaatatcacactgtcctggttactatagctttataaagttctaatttcagatagtgyatatccttcaactttgttcttcttttccaaaagtattttgtatattctaatttctttgcttttccatgtaaattctagaatcaccttgttgatttttatcgaaaatatcttgttacaattttgattggaattgttgaaatc

SEQ ID NO: 391089 - DNA, 638 bp, Homo sapiens
aaatcagaaatgaaaaaggacacattacaacagatactgcagaaattccaaggattattagtggctactatgagcaactatatgtcaataaattgaaaaattagaagaaatagacaaattcctagatacatacaattaccaagactgaatcaggaagaaatccaaacctgaacagaccaacagaccgataacaacaagattgaaaggtgtaataaaaagtatctcagtaaagaaaagcccagaacacaatggcttcactgctgaattcaaccaaacatttaaagaagaactaataccaaatcctactcaaactattctgaaaaatagaggaggaactactttcaaactcattctatgaaaccagtattaccctgataccaaaagcagrcaaagacacaacaacaacaacaaaaaactacagaccaatatctctgaggaatattgaggcaaaaatcctcaacaaaatactagcaagccaaattcaacaatactttagaaagatcattcattatgaccaagtgggatttatccctgggattcaaggatgattcaacatacacaaatcaatcaaggtgatacatcatatcaacagaatgaaggataaaaactatatgatcatttcaattgatgctgaaaac

SEQ ID NO: 391090 - DNA, 531 bp, Homo sapiens
atgatcatttcaattgatgctgaaaacmcatttgataaaattcaacatcccttcattatttccttaaaaaaactggggatagaaagaacatacctcgacataataaaagccatatacaacagccccagagccagtatcatactgaaagcctttcttctaagatctggaacatgacagggatgtccattgtcaccactgttattcaacatagtgaatagaagtcctagctagagcaatcagacaagagaaagatataaagggcatccaaattggatgtggaagaagtcaaattatccttgtttgaaggtgatataatcttacatttagaaaaacctaaagactgcataagaaaactattagaactgatcaacaaattcagtaaagttgcagaatacaaaatcaacatacaatcagtagcatttaaatatgccaacagtgagcaatgtgaaaaagaaatttaaaaagtcattccatttaacaatagccatacataaaattaaatacctaggaattaaccaaagaagtgaaaga

SEQ ID NO: 391091 - DNA, 531 bp, Homo sapiens
atgatcatttcaattgatgctgaaaacacatttgataaaattcaacatcccttcattatttccttaaaaaaactggggatagaaagaacatacctcgacataataaaagccatatacaacagccccagagccagtatcatactgaaagcctttcttctaagatctggaacatgacagggatgtccattgtcaccactgttattcaacatagtgaatagaagtcctagctagagcaatcagacaagagaaagatataaagggcatccaaattggatgtggaagaagtcaaattatccttgtttgaaggtgatataatcttacatttagaaaaacytaaagactgcataagaaaactattagaactgatcaacaaattcagtaaagttgcagaatacaaaatcaacatacaatcagtagcatttaaatatgccaacagtgagcaatgtgaaaaagaaatttaaaaagtcattccatttaacaatagccatacataaaattaaatacctaggaattaaccaaagaagtgaaaga

SEQ ID NO: 391092 - DNA, 543 bp, Homo sapiens
tcatcacaacttctacagctcctcaggcttaggaaagaaagacttacgaggatattaacaagctgtaggatctatttttgcgtttttttctcttccttctgcttcatagtagatgcagcataaaggcagacagccatgcccttccaaacagaaggtgaaagcccaggacaggagccagaattctgagttttattgttagttctggccattccttaatttttttttwaaaaaaagaaactgctgcaagaagaccagcataatttctatatttatttaaatgttgtctctgcatgacactaagcaaaataaaaataatcacccagcagttattaaatgtctactgaatgtaagaaattctgctgagttctatgaccctaaggccaaaagggacttaagggttttttattccccttttaaggaagggccattatctgaggttattctgttttttttgccgtgaggctaagtcttttcagcccctctgcaaaatttaagtcaaagatgatctaaaataaacattctaaatcttttattcaaataaaa

SEQ ID NO: 391093 - DNA, 621 bp, Homo sapiens
taggagaccagggtcaaaggactgcaactttatttttatattttctggattaagtcttcttaataaagtttgcagattatttgcctgccctcccacagtcatgagaaaactcacagtgattgtaggaacactcagtatcgcaaagctcattatgtatgtcaacacacttccacatctgttacctcctgtgagccttgcagagtccctaccatacgagagagtaggacagggactgttgttcttacgraagtacaaaaatggaaatgcagagaaggcgagtgatctgcctaaagtaatagatcactagtgacaaagacaatgctggaatttcagtttctaggcgtcaaacatttttggtgttttgttttccatcccacgtgtaataaaagaatgatctttggagtcaggcacactgggattcaatattagctttgctgggtgccttgaactagttatggcacttttcatttccccatttgtagaaatcgggataacaactgtatcatagtctcatgaggcactagggagaccctctagcacagtgccatccacattatagatattcagtaattttctttttatttccctgatacaaattatttatgtatctgtgattcatat

SEQ ID NO: 391094 - DNA, 325 bp, Homo sapiens
aggccatttaaatccagggaattgcaaaagggaaggctttgttgtcataagaatgtcttttgccagtgaaaattctattytctacttttctaaacttcttggcactggaaaatcctagcctagagggtaccaagtaaggaaaattaagatgatcttgatgcagtacttcctagggaattttactttaggactgttgacttgaaagtatgaagaaaagcagagactgttgcagtttgatgtgaaaggcatttgtcagactaaaaaatactccacacatccaattgcataaggcatctactagtgtttaccatgtgtcaggaaaaca

SEQ ID NO: 391095 - DNA, 325 bp, Homo sapiens
aggccatttaaatccagggaattgcaaaagggaaggctttgttgtcataagaatgtcttttgccagtgaaaattctattctctacttttctaaactycttggcactggaaaatcctagcctagagggtaccaagtaaggaaaattaagatgatcttgatgcagtacttcctagggaattttactttaggactgttgacttgaaagtatgaagaaaagcagagactgttgcagtttgatgtgaaaggcatttgtcagactaaaaaatactccacacatccaattgcataaggcatctactagtgtttaccatgtgtcaggaaaaca

SEQ ID NO: 391096 - DNA, 325 bp, Homo sapiens
aggccatttaaatccagggaattgcaaaagggaaggctttgttgtcataagaatgtcttttgccagtgaaaattctattctctacttttctaaacttcttggcactggaaaatcctagcctagagggtaccaagtaaggaaaattaagatgatcttgatgcagtacttcctagggaattttactttaggactgttgacttgaaagtatgaagaaaagcagagacygttgcagtttgatgtgaaaggcatttgtcagactaaaaaatactccacacatccaattgcataaggcatctactagtgtttaccatgtgtcaggaaaaca

SEQ ID NO: 391097 - DNA, 325 bp, Homo sapiens
aggccatttaaatccagggaattgcaaaagggaaggctttgttgtcataagaatgtcttttgccagtgaaaattctattctctacttttctaaacttcttggcactggaaaatcctagcctagagggtaccaagtaaggaaaattaagatgatcttgatgcagtacttcctagggaattttactttaggactgttgacttgaaagtatgaagaaaagcagagactgttgcagtttgatgtgaaaggcatttgtcagactaaaaaatactccacacayccaattgcataaggcatctactagtgtttaccatgtgtcaggaaaaca

SEQ ID NO: 391098 - DNA, 620 bp, Homo sapiens
gggctggggagcatgaaaggatgatatcttctctttgtgactcatctgcgtataacgattttgatggattttctgggaattaatagtctttggttagtagccatttgccttgtgggcagagctccaagatagtttgccgttaaaaaaaaaaatcctcataaaggcttaaacagggttcaaacagatctaatcgtcatatcatttggcacattgtggtacctgattccatctaaattgttttcccctaacaatccttagtccacatttctgctttctctccttgttaagaatagatggcaggtcaacattcttgcctactcctgcaagagcatcttgaaggaatgaaaggcaattatacttctgctgcaaaggagcattttccacatgttatgctaacagttatgaaaakagctagttattggattagttagtgaggtgtgattgtcagttttcatcaggttctcattactggtaatgttgcccagacctacattttttctctgaatatgcttctgccttttctgtgtctagcttacttgtttacaaaatgttttcagagagaaagtctaattcagggttaacaaagttctgctaagtcaccccaagattatctgggctaa

SEQ ID NO: 391099 - DNA, 594 bp, Homo sapiens
cactgcaaatgccattatttcattcctttttatggctgagtagtattccatgttgtgtgtatatatataccacaatttctttatccactcattgattgatgggcatttgggctggttccaaatttttgcaattgcagattgtgctgctgtaaacatgcatgtgcaagtatttttttcgtataatgacttcttaggaatccaattttatttttttattttttggacagagtctcactctgtcacccaggttggagtgcggtgacgcgatcttggctcactgcaacctctgcctcctgggttcaaagtgattctcctgcctcagcctcccgaatagctgggattacaggtgtccgccaccacacccggctaatttttgtatttttagtrgagtcggggtttcactgtgttagccaggctggtctagaactcctgacctcaagtgatcttcccaccttggcttcccaaagtgctgggattacaggtgtgagccaccacacgtggccagaatccagttttagatatgttggtttgagatacctgttagatttccaactggaaattttggcagtttggttatacagatctgccaaaatg

SEQ ID NO: 391100 - DNA, 566 bp, Homo sapiens
aacagtgtcttttgaagagcagaagttcttattttgaattgagtataatttttcagtcactttcatagatcatatttttagtgcatatctagaaatttttttcataaccaaggttagcaaaygtttttgttatattttttctagacattttatatttttcattttcatttagagctatgagtcattttaagtgacttatatgatgcaaattatggatcaaatatcttataatttttgcatatggatattcaatcattaaaacgtatgttgaaaagactatcatttttttctacttaattgttttgcacttttgtaaaaaatcagttaccatatgtatatgggtctatttctgaatattctgttatgttctatatttctgttttgaaactatcacttgtttaatataaatttacattatatctttcaattttgttttagttactttaggtctgctgagtaatcatataacttttagaaccagatttcaaatttttattttaaaaatcctgctatggtttttattggaagtgtagtgaatctatagtttggtttggaaagaattatca

SEQ ID NO: 391101 - DNA, 566 bp, Homo sapiens
aacagtgtcttttgaagagcagaagttcttattttgaattgagtataatttttcagtcactttcatagatcatatttttagtgcatatctagaaatttttttcataaccaaggttagcaaacgtttttgttatattttttctagacattttatayttttcattttcatttagagctatgagtcattttaagtgacttatatgatgcaaattatggatcaaatatcttataatttttgcatatggatattcaatcattaaaacgtatgttgaaaagactatcatttttttctacttaattgttttgcacttttgtaaaaaatcagttaccatatgtatatgggtctatttctgaatattctgttatgttctatatttctgttttgaaactatcacttgtttaatataaatttacattatatctttcaattttgttttagttactttaggtctgctgagtaatcatataacttttagaaccagatttcaaatttttattttaaaaatcctgctatggtttttattggaagtgtagtgaatctatagtttggtttggaaagaattatca

SEQ ID NO: 391102 - DNA, 603 bp, Homo sapiens
gactcaaacttttgtaactatattgcaaacatgtgcccacwtcaccaacaggtcaaattctgttggggaggagtgctgagtatatgagtgaatgaagatgtggaagaatgtcactcttggcaggtaaaaggacagaaaggaagagcctctgactctgagaggcccccaccaaccatacaaccccagatgcccgcagtgcttggggaataaaataaagaacaaaatacagaaaaaaagctcatcatcttcctcccacatgcccaccctgtagccttaccactctgagtctgtttttgcctcaaagccccagatgagagagaacattgggatttcatggcagttgtaattatagcccttgaaatgccaaattcagctactagggcttgagcaaaacttgcagtgaatgaaaacaaaatggttaaagttattttatgatcagagtcctttaggctgatttatggaattgagtccttatttgcttctacatttaaatctatgatagaaacagatgataagttatattaattcctcttctcatacgtttctcagggaattatcccagtgaaaaaacagctacaggtagagaactctgttcctgggaca

SEQ ID NO: 391103 - DNA, 534 bp, Homo sapiens
taagttgtttactgaataatgatcaggatcataaaagtccaatttataatgacctatgtgaaaattcagaatttggtcctaacmattcccaagcatcatttgccattctgtatcttagaagcaaatataaacccagctaattggtagcctgactaaaaagggcttaggggatttaaacttagttccagttaaatcgtctaaaaatatttttgatcctcttttattcagccactccagacgaaaggtctgggtaaaagttagggatgattttaagaggggcaggtatagttactaaaatgataaccaacagaatttgtgcagatggaaggacagaaaaatcctctgcatcttgggaaagattatcatagatttttggagtatagggaaggggaaaattaatttttaaaaatcttttaaaaccccctccggtgctttcttctcaaaggaaaacagtgtggtgctactcttgcaaaccgttgtggaaacctgtggattaaactctccactgagtttctcagccataaccagatgcca

SEQ ID NO: 391104 - DNA, 534 bp, Homo sapiens
taagttgtttactgaataatgatcaggatcataaaagtccaatttataatgacctatgtgaaaattcagaatttggtcctaacaattcccaagcatcatttgccattctgtatcttagaagcaaatataaacccagctaattggtagcctgactaaaaagggcttaggggatttaaacttagttccagttaaatcgtctaaaaatatttttgatcctcttttattcagccactccagaygaaaggtctgggtaaaagttagggatgattttaagaggggcaggtatagttactaaaatgataaccaacagaatttgtgcagatggaaggacagaaaaatcctctgcatcttgggaaagattatcatagatttttggagtatagggaaggggaaaattaatttttaaaaatcttttaaaaccccctccggtgctttcttctcaaaggaaaacagtgtggtgctactcttgcaaaccgttgtggaaacctgtggattaaactctccactgagtttctcagccataaccagatgcca

SEQ ID NO: 391105 - DNA, 592 bp, Homo sapiens
gtgtacctttagctttggattccttgaaattatattttcaaaccaactataacataaaacatagagtatcttctcagctaggtattattttattatatttattgcagctatctttaaactttttacaagatacattatcatataatttgaccattatttatttgtaggcacacatttaaattcaaataatatagctacattgattatctattgtagattggaaaaacatacagtaaacattggaaacacaattaaataattcacaaagaaaatcaaattggtaattattccagattgagtctgatttcttgattacattttatttactaagaataatgcttctatacttaaatttgtatttttaaaaattctacttgatatgcctttacctgtacagaacakgtaagctttttgaaagaattaagtgcgtcattatttatttttataatcaactctaattataattaaggccttaatatgtaatttgttatatgattaccttttgtatctttctaaataatatgacccctatttactgttcaagttcaacctaattattacaggaattactttttggtttctaagacatttt

SEQ ID NO: 391106 - DNA, 592 bp, Homo sapiens
gtgtacctttagctttggattccttgaaattatattttcaaaccaactataacataaaacatagagtatcttctcagctaggtattattttattatatttattgcagctatctttaaactttttacaagatacattatcatataatttgaccattatttatttgtaggcacacatttaaattcaaataatatagctacattgattatctattgtagattggaaaaacatacagtaaacattggaaacacaattaaataattcacaaagaaaatcaaattggtaattattccagattgagtctgatttcttgattacattttatttactaagaataatgcttctatacttaaatttgtatttttaaaaattctacttgatatgcctttacctgtacagaacaggtaagctttttgaaagaattaagtgcgtcattatttatttttataatcaactctaattataattaaggccttaatatgtaatttgttataygattaccttttgtatctttctaaataatatgacccctatttactgttcaagttcaacctaattattacaggaattactttttggtttctaagacatttt

SEQ ID NO: 391107 - DNA, 644 bp, Homo sapiens
atcatactccagtcagaatggctattattaacaagtcaaaaaataacagacattgctgaggatgtggacaaaagagacatttctcaaaagaagacatggaaattgccaacaggctaagaaaaaaatgttaaacatcacttatgatcagggaaacgcaaattaaaatcacaatgagatatcacttcactccagttagaatggctatttatcaaaagacaaaagaaagaaagtattggtgaggatatggagaaacaataacacatwctgttggtgggattgttaattagcacggcactatggaaaacagtatacagattcttaaaaaattacagatagaactactatatgatccagcaatcccactactggatatataaccaaaaagaaaaagaaaatcagcatgtcaaagagaccaactagtgtccaacaattataaaagtataaagaaaatgcaatacagttaacacaacggaatactattccgtcatgaaaaataaaaaatctgcaatttgcaacaacacagttggacctgtaggacatcatgttaagtgaaataagccagacacagaaagacaaataccatatgattttactcatgtggaattataaaaaaaaaaaacggttgatatcatagaagcagatat

SEQ ID NO: 391108 - DNA, 549 bp, Homo sapiens
aacccacctttaaagctaagaaaagcataaaagacatggataggccacaagaaaaacaacaaagatctctgatcaacagccccagctcaattccaagcctagggttagcatcagctgacagtgatatgcaaagttatcttgaacattccagtacagttgagcctccagatgaytgcagcctcattaaataacacttggagcagaagaattgctcatctgggctatattaaccatagattcatccataatagttcttgtcttagcctacataattttagggtaaactgttatacagcagtagataactacaactggataaattgattttctgaatttcaacaactccttttatattactggacacacttgggcaacttggataatagagtgtcataataagcaaaaggtagaaaaaatacgagaatatgaaataaacagtgtaccctctcataagaagccaacatatcagtccttctgatgagaagatgagtgcaaaggaaaaacggtaagaatcacatggaggaggctaggtaaagggcactttttgaa

SEQ ID NO: 391109 - DNA, 549 bp, Homo sapiens
aacccacctttaaagctaagaaaagcataaaagacatggataggccacaagaaaaacaacaaagatctctgatcaacagccccagctcaattccaagcctagggttagcatcagctgacagtgatatgcaaagttatcttgaacattccagtacagttgagcctccagatgactgcrgcctcattaaataacacttggagcagaagaattgctcatctgggctatattaaccatagattcatccataatagttcttgtcttagcctacataattttagggtaaactgttatacagcagtagataactacaactggataaattgattttctgaatttcaacaactccttttatattactggacacacttgggcaacttggataatagagtgtcataataagcaaaaggtagaaaaaatacgagaatatgaaataaacagtgtaccctctcataagaagccaacatatcagtccttctgatgagaagatgagtgcaaaggaaaaacggtaagaatcacatggaggaggctaggtaaagggcactttttgaa

SEQ ID NO: 391110 - DNA, 549 bp, Homo sapiens
aacccacctttaaagctaagaaaagcataaaagacatggataggccacaagaaaaacaacaaagatctctgatcaacagccccagctcaattccaagcctagggttagcatcagctgacagtgatatgcaaagttatcttgaacattccagtacagttgagcctccagatgactgcagcctcattaaataacacttggagcagaagaattgctcatctgggctatattaaccatagawtcatccataatagttcttgtcttagcctacataattttagggtaaactgttatacagcagtagataactacaactggataaattgattttctgaatttcaacaactccttttatattactggacacacttgggcaacttggataatagagtgtcataataagcaaaaggtagaaaaaatacgagaatatgaaataaacagtgtaccctctcataagaagccaacatatcagtccttctgatgagaagatgagtgcaaaggaaaaacggtaagaatcacatggaggaggctaggtaaagggcactttttgaa

SEQ ID NO: 391111 - DNA, 554 bp, Homo sapiens
tatgagtgatatgcgatatttgtctttctgtgtctggtttattgcaatttacatattgtctcctaggttcatctatgctgttgcaaatgtcaggatttaattatttctgaaagctaaagagtatttcaatgtgtatatggaccacattttctttatccattcattcaatgaatggattgaatgtgaggaactgtgaatgtgaggaactgtgaggaatatgagagtgcaaatatctcttcaagcattgattacatttcctytggatatacacccagtagtgggattatgggatcataggctagttctatttttaattttttgaggaaacttcgtacattttttcataatggctatactaatttacatttctaccaacagtctgcaaggattcccttttctgtacatctctgccaatacttattcacctatttgattatagccattctaacctgtgtgtgatgttatatcatggtggctttaatttacatttccttgattattagggatgttgattagtgcatttttaatgtaccttctgatcattagtgtgcctt

SEQ ID NO: 391112 - DNA, 555 bp, Homo sapiens
cccaacctctcactttgggttactgccattttgttctttgtttctayaggtttaattttaagattccactcctaagtcaaattttatgatatttacctttctgaacctggcttattttacttaatgtcctccaggttcatctatattgtcaataaaatgacaggaattccttctctatatggctgaatagtattcccttgtgtatatgtatatatcatgttttctttatttctttatccacttatggacatctaggttgattcatatcttggctattgttaacaatgctgtagggaacatagaagttcagatatctctttgacatacgtgtttcatttctttagggtatatatatactcagtagtggatggtggatcacatgataattcaataaagatttttgatttaaatttttcttactgaaatttacatgtttttcaaagtaaatgtataacaaatagcaagactgttagagaaataagtatcattatttaaatagttggtttacattacaattccttatcttattttttgacattttccaggagtctcagt

SEQ ID NO: 391113 - DNA, 555 bp, Homo sapiens
cccaacctctcactttgggttactgccattttgttctttgtttctacaggtttaattttaagattccactcctaagtcaaattttatgatatttacctttctgaacctggcttattttacttaatgtcctccaggttcatctatattgtcaataaaatgacaggaattccttctctatatggctgaatagtattcccttgtgtatatgtatatatcatgttttctttatttctttatccacttatggacatctaggttgattcatatcttggctattgttaacaatgctgtagggaacatagaagttcagatatctcttygacatacgtgtttcatttctttagggtatatatatactcagtagtggatggtggatcacatgataattcaataaagatttttgatttaaatttttcttactgaaatttacatgtttttcaaagtaaatgtataacaaatagcaagactgttagagaaataagtatcattatttaaatagttggtttacattacaattccttatcttattttttgacattttccaggagtctcagt

SEQ ID NO: 391114 - DNA, 503 bp, Homo sapiens
ctaaaagggcccaaggtgcagctaatgccattacttcagagggtgcaggacccaagctttggcagcttccatgaggtgctgggtttgcatgygcacggaagacaagaattgaggtttgggaacctctgcctagatgaaagaatttatggtaacacctgattgtccaggcagaaatttggtccaagggtggggcccttggcgaacctctgctaaggcagtgtgcaagggaaatgtggggttgcagtccccacacagagaccccactggggtactgcctagtggagctgtgagtagaaggccactatcctccagaccccagaatggtatatccatcaaaagcttgcaccatgcgcatggaaaagctgcagttactcaacaccagctgtgaaaccagccgggagtggtctgtaccctccaaaaccacaagggcagaactgcccaacactgtgggagcccaccacttgcatcagcatgacctggatatgaggcatggagtcaaagga

SEQ ID NO: 391115 - DNA, 617 bp, Homo sapiens
tgaaacagttttttcctggcttctcctcactaaccaccatgatcatccctggaaatggtacaagagataatcaaaagaggactctgaaatgtggtaagaaaaaggcaagctgatttgggatctcaggactggacaaaaagcacagagacagggcatcttgggtcttacttctcaaagaaggcaatttcgatcctacattgcaacaaaatttgtttagaaacacatgtatttagtctctactcccagtacctgacacagagcttctaaatcccttggaattcaaggtgataggagtgtcttgtttaatggggtttctcttggtgagcttmtggacagtttttcaatggaggctggtcagtagaatgaccaagccatgattagaagcttggcactttcagttacccccagtccctatccagtgaggctgaagattgaactgattatcaatagtgcatatatgatgaagcctgcatgaagagcctaaactctggtgttcagacaccttccagattggtgaacacattcatgtgaagggagggtggtgaaacccaacaccaagagacagaatctcctgcacttgggatccttctggaccttgccctacgtacctcctcatc

SEQ ID NO: 391116 - DNA, 617 bp, Homo sapiens
tgaaacagttttttcctggcttctcctcactaaccaccatgatcatccctggaaatggtacaagagataatcaaaagaggactctgaaatgtggtaagaaaaaggcaagctgatttgggatctcaggactggacaaaaagcacagagacagggcatcttgggtcttacttctcaaagaaggcaatttcgatcctacattgcaacaaaatttgtttagaaacacatgtatttagtctctactcccagtacctgacacagagcttctaaatcccttggaattcaaggtgataggagtgtcttgtttaatggggtttctcttggtgagcttatggacagtttttcaatggaggctggtcagtagaatgaccaagccatgattagaagcttggcactttcagttacccccagtccctatccagtgaggctgaagattgaaytgattatcaatagtgcatatatgatgaagcctgcatgaagagcctaaactctggtgttcagacaccttccagattggtgaacacattcatgtgaagggagggtggtgaaacccaacaccaagagacagaatctcctgcacttgggatccttctggaccttgccctacgtacctcctcatc

SEQ ID NO: 391117 - DNA, 617 bp, Homo sapiens
tgaaacagttttttcctggcttctcctcactaaccaccatgatcatccctggaaatggtacaagagataatcaaaagaggactctgaaatgtggtaagaaaaaggcaagctgatttgggatctcaggactggacaaaaagcacagagacagggcatcttgggtcttacttctcaaagaaggcaatttcgatcctacattgcaacaaaatttgtttagaaacacatgtatttagtctctactcccagtacctgacacagagcttctaaatcccttggaattcaaggtgataggagtgtcttgtttaatggggtttctcttggtgagcttatggacagtttttcaatggaggctggtcagtagaatgaccaagccatgattagaagcttggcactttcagttacccccagtccctatccagtgaggctgaagattgaactgattatcaatagtgcatatatgatgaagcctgcatgaagagcctaaactctggtgttcwgacaccttccagattggtgaacacattcatgtgaagggagggtggtgaaacccaacaccaagagacagaatctcctgcacttgggatccttctggaccttgccctacgtacctcctcatc

SEQ ID NO: 391118 - DNA, 460 bp, Homo sapiens
gcctcaaaccacttatccaaaaatgaatggtatctagaatatatgaggaattcttaaatctcaaaacarctacaatacattgaaaatatattaacagacatttcagtgaataggacatacaggtaaaaaaataagcaatgagaaagtaattaacatcagcattaggtaaaataaaggaaaagcaaagcgaaattcactacctacctattaagatgagaaaataaaatatgatgcatatcatatttaagtttttatttctcaattaaattaatacattttaaaaattagtgacagcagcaaattcaaggcaagaagggagaagctggatctctaatactttactggtggaaatgtaaaatggtacagacactctgagaaacaatttggcaatttcttatcagaataaacatgcaattaccatatgacccagaaattgcacccttaggcatctatcccagag

SEQ ID NO: 391119 - DNA, 602 bp, Homo sapiens
actgccatactgttccctagagtggctatgccattttacattctcactaacaagggttccaatttctctacttccttatcactatctgttaatttctgattttttctatagtaaccatcctactggatgtaaaatagtacatcattgtagttttaatttgcattgcattttccctaatgattagtgaagtcaaacatcattttgtgtgcttattggacattttatatctcctttggggaaygtctatatctgataaagggttgttatctagactatatagagaactcctatatataaaattcaacaataacaacaacaacaacaaaacaaataacctagtgccaacagaaattttaaatgctgtatcaacaatttggttacattcaaatatttgtgaaatttttctagagagagaaggttgagtctgcttattcacatacagtgtaaaaggaggaatgaggactagcagtagagataaaaggaaaaccatttgccttgcgagtgatgaaggatctccaataactagaattaggcagggaccttacacccattattgatgagagtataattatctctgtcttctgtcagagtttctaccaaag

SEQ ID NO: 391120 - DNA, 602 bp, Homo sapiens
actgccatactgttccctagagtggctatgccattttacattctcactaacaagggttccaatttctctacttccttatcactatctgttaatttctgattttttctatagtaaccatcctactggatgtaaaatagtacatcattgtagttttaatttgcattgcattttccctaatgattagtgaagtcaaacatcattttgtgtgcttattggacattttatatctcctttggggaacgtctatatctgataaagggttgttatctagactatatagagaactcctatatataaaattcaacaataacaacaacaacaacaaaacaaataacctagtgccaacagaaattttaaatgctgtatcaacaatttggttacattcaaatatttgtgaaatttttctagagagagaaggttgaktctgcttattcacatacagtgtaaaaggaggaatgaggactagcagtagagataaaaggaaaaccatttgccttgcgagtgatgaaggatctccaataactagaattaggcagggaccttacacccattattgatgagagtataattatctctgtcttctgtcagagtttctaccaaag

SEQ ID NO: 391121 - DNA, 416 bp, Homo sapiens
atataatagctttctgagatattcatttgtctgttaaatttgacaactaagacttctyggtgatagttatggttgactatttaatttttttccttgtgtatggtttatacatttcaggacttttctttttgtatttgttataaatttgtgttgacaattggccctttaaatactgctttgtagtaactctatacattgaccctcccttctccaagacatattatttttggtgactgtttatactttcagtttcttggagggactatatcagtgacttctccaggctatgcagcctctgatgttcttcctcagaaggcacagccttgagcatgcacacatttccttgggatgacagtggttttagcagaactcttttgggttgtttgtctgatttatttgtagcggtgtctctcttg

SEQ ID NO: 391122 - DNA, 558 bp, Homo sapiens
tgcacaagtttcagcggcacagttgcaaactaatgtaataaatcaattttgacagagtaattgataaagttgacaggacaatgtgccatgtgtaatgtaaccaggttaaagtcaaactaaagatgttgttctgttactggcttcttttaacaaacaatgcatcccgagtatcactcaaaatggtgtactatgaatgaaattatatgaaaattaccctaattattagaaatatattctttcaatcatgtttgcttgaattgcttcattgtttggatatttctaattatattttccttaattacttttctggaagccttatctatgtgtgtcaaaataaccttcctaaaattttcttttaccatatgatataatagcaaaagccacaattacttttgcactaaacgaatataattttataaaacacagttattgaacatctcattaactcattaaagagcaaatagttctgtatatttttttctttttattcmtataaagggtctcaatcagaccttctgctacccagtatatagttttgattaattgaaaagacgagta

SEQ ID NO: 391123 - DNA, 534 bp, Homo sapiens
catcctgtctgtatacttttttcccaaaggataagaagattcctttttaagggaataaatctatatgatctcaatttttctaaagtctaatgagagcacatggacacaggaaggggaacgtcacactctggggactgttgtggggtggggggaggggggagggatagcattgggagatatacctaatgctagatgacgagttagtgggtgcagcgcagccatggcacatgtatacatatgtaactaacctgcacattgcgacatgtaccctaaaactcaaagtataataataataaaataaaaagawaagaaaaaaagaaagacttggcaaacagcctgagaactgccataaaacaaaacattccagggactaacttactagtctatagatcaccttaaactgctctggaactttcaagattaaagcaggtccttagaatggcacctataaaagtttgtaaccttcaggctgagcctggaagagacctactactagtaaaagtctaggcataaaggcagggttacattcggtgc

SEQ ID NO: 391124 - DNA, 556 bp, Homo sapiens
aaggtcacaaggtacatggtgaatataaataagccaactacatttctacatgcaattaacaatctgaaaacaaattaagaaaacaatttcatttataatagcaggacaaagaataaagtaactatggatacatttaaccaaagaagtgcaaagcatatactccggaaartacaaaactttgtggaaagaaatgcaaaagatattagccatcaaggaaatgaaaatcaaagccagagtgagataccacctcacactcactaagatggctattatcaaaagaaaagataactgttactgaggaagtggataagtggaaacactatgcactgttggtggtaataccaaataatacagtcactttggaaaaataagtctggcaacaactcgaaaggctaaacttaagttaatataccatccagcaattccactcctaggtatatacccaagactattggaagaagttacccatgacatttgtacatgaatgatcatgggaacagcattcctaacagctaagtgaataaatacataaaatgtggtgtatccatacaattaa

SEQ ID NO: 391125 - DNA, 556 bp, Homo sapiens
aaggtcacaaggtacatggtgaatataaataagccaactacatttctacatgcaattaacaatctgaaaacaaattaagaaaacaatttcatttataatagcaggacaaagaataaagtaactatggatacatttaaccaaagaagtgcaaagcatatactccggaaagtacaaaactttgtggaaagaaatgcaaaagatattagccatcaaggaaatgaaaatcaaagccagagtgagataccacctcacactcactaagatggctattatcaaaagaaaagataactgttactgaggaagtggataagtggaaacactatgcactgttggtggtaataccaaataatacagtcactttggaaaaataagtctggcaacaactcgaaaggctaaacttaagttartataccatccagcaattccactcctaggtatatacccaagactattggaagaagttacccatgacatttgtacatgaatgatcatgggaacagcattcctaacagctaagtgaataaatacataaaatgtggtgtatccatacaattaa

SEQ ID NO: 391126 - DNA, 556 bp, Homo sapiens
aaggtcacaaggtacatggtgaatataaataagccaactacatttctacatgcaattaacaatctgaaaacaaattaagaaaacaatttcatttataatagcaggacaaagaataaagtaactatggatacatttaaccaaagaagtgcaaagcatatactccggaaagtacaaaactttgtggaaagaaatgcaaaagatattagccatcaaggaaatgaaaatcaaagccagagtgagataccacctcacactcactaagatggctattatcaaaagaaaagataactgttactgaggaagtggataagtggaaacactatgcactgttggtggtaataccaaataatacagtcactttggaaaaataagtctggcaacaactcgaaaggctaaacttaagttaatataccatccagcaattccactcctaggtatatacccaagactattggaagaagttacccatgacatttgtacatgaatgatcatggsaacagcattcctaacagctaagtgaataaatacataaaatgtggtgtatccatacaattaa

SEQ ID NO: 391127 - DNA, 556 bp, Homo sapiens
aaggtcacaaggtacatggtgaatataaataagccaactacatttctacatgcaattaacaatctgaaaacaaattaagaaaacaatttcatttataatagcaggacaaagaataaagtaactatggatacatttaaccaaagaagtgcaaagcatatactccggaaagtacaaaactttgtggaaagaaatgcaaaagatattagccatcaaggaaatgaaaatcaaagccagagtgagataccacctcacactcactaagatggctattatcaaaagaaaagataactgttactgaggaagtggataagtggaaacactatgcactgttggtggtaataccaaataatacagtcactttggaaaaataagtctggcaacaactcgaaaggctaaacttaagttaatataccatccagcaattccactcctaggtatatacccaagactattggaagaagttacccatgacatttgtacatgaatgatcatgggaacascattcctaacagctaagtgaataaatacataaaatgtggtgtatccatacaattaa

SEQ ID NO: 391128 - DNA, 544 bp, Homo sapiens
tggttaacaaaaatatccggtcacaaaaaaatcaaatattgtatgatttcatttacatgaaatgtccagaataggcaaatttatagagaaagatagaaatttactgcttattactgaaattagaaaagggagtaagggacagttaggggttatgaaaagtgtggagttattgctagttaatgtgggatgataaaatgatttataattaattttgatggtatatgtacaagtctatgaagatttggaaaaccattggattgtacttgtagttgtgtcagttctatggtatggaaatatacctcaataaagttgttaaaaaggagccttctaattcatcaaaattgcatatgtcttcatttataatcttcctcagtttctttcagcagtgtcctgtagttttcaatgtacaggacttgcacacattttgttwtttgtgtgtgtgtgtgtttccattgtcaatattatttcaacagcagattttgtttcaatttccaattattaattgccagcatatggaaatgcaattgacgttttagtactcacc

SEQ ID NO: 391129 - DNA, 570 bp, Homo sapiens
atatattcacggattttatattggcctacgtttctgtttctatgccagtaccatgatgctttggttgtgatagctttgtagtatgttttaaagtcaggtagtgtgatggcaccaattttgttattattgctgaaaatggctttggctatttggggtcttttgtggttccatatgtttttagttttcattttctatttctgtgaagactatcactggtactttgatagggataggattaaaactacagatcattttgttgactattttatataaatggaaccattcacatatgtgtgaataaatcacccatttattcttctgtggttggcttgtttcactgagcatactgtcctcacatttcatccatgttgtagcatatggcacaattytttcattttaaggcttaataatatttcattgtacatatatgtatacatatactacgtttctttatccagtcacccagcaatggacattcagattgtttctatatctttgttgttggcaataatcctgcaataaacataggagtacagataactctttgagatcctgattttaattactttg

SEQ ID NO: 391130 - DNA, 642 bp, Homo sapiens
ctaagaaaacaaatattatctgggcgtggtggcatgggcctgtaatccacctactatatcggctgaggcaccaaaattgcttgaacctgggatgggaaggttacagtgaacagagcttttgccactgcgctccagcctgggttacagagcaagaccttgtctcaaaaaaaaaaaaaagcttttttttttttcttttctttctttctttttttttttttaaagaggtgtataaaaaaagaagataaatatttttaaagactatattataagctttcctcaaacactcctactaatgatttggtaccaatcctgtattaataaatcctcaaacaatcaattattttttctatacataattttagttaataatttgtttaattgttacattcacacactaataattaacawatacacttcaccttttagaataacaaaacattacagttaagaataaaatctgcttttaactaccaacctttatcttttttaatgtataagcttcaaggatgtgtgtgtgtgtgtgttcatgcacttctataaacacacacatacagtatatgtaatatgacatatttaatgttatacatactcataaatatttatgtatggatttgcatatgtctatatatgtgtgcatatttt

SEQ ID NO: 391131 - DNA, 564 bp, Homo sapiens
ctgtaatataagctatgagtatgaaagtggatatcactaagacatttccctcctcttcaaccttctcctcaccttaactccaaagtttcagagtccaaatccttcaggaattcatttttccatccacycattaaatctggattaataaagtaattcctcagagtaaaagacatattatacaaattccagcagcaactgattttggtattcgcctatttggaatttgaccttaaataactggtcaaatggaagtagttatgatggattcagtgaactccattgttgtaattgatttgttaatgcaataactgttcctctgtaattgctgtaaatagcattcattactattaattggaagttattattagggtcatataaatcattgaaaagagatatttgtggtatagagtggagaactcatggaggactgtaaacagatcttattgctaatgtaatgcatgaaaagtaactatgaacttactgcatgatgtagaaactcaaataataagtaatctaaaggtaatttaaaataccccagcagacatttttttattaaaaataagg

SEQ ID NO: 391132 - DNA, 604 bp, Homo sapiens
gatatcactaagacatttccctcctcttcaaccttctcctcaccttaactccaaagtttcagagtccaaatccttcaggaattcatttttccatccactcattaaatctggattaataaagtaattcctcagagtaaaagacatattatacaaattccagcagcaactgattttggtattcgcctatttggaatttgaccttaaataactggtcaaatggaagtagttatgatggattcagtgaactccattgttgtaattgatttgttaatgcaataactgttcctctgtaattgctgtaaatagcattcattactattaattggaagttattattagggtcatataaatcattgaaaagagatatttgtggtatagagtggagaactcatggaggactgtaaacagatcttattgctaatgtaatgcatgaaaagtaactrtgaacttactgcatgatgtagaaactcaaataataagtaatctaaaggtaatttaaaataccccagcagacatttttttattaaaaataaggtgtttggattatcaaattgatatggacaggagacaggaacacttgatagaagagggcagttccctggga

SEQ ID NO: 391133 - DNA, 589 bp, Homo sapiens
tactattaattggaagttattattagggtcatataaatcattgaaaagagatatttgtggtatagagtggagaactcatggaggactgtaaacagatcttattgctaatgtaatgcatgaaaagtaactatgaacttactgcatgatgtagaaactcaaataataagtaatctaaaggtaatttaaaataccccagcagacatttttttattaaaaataaggtgtttggattatcaaattgatatggacaggagacaggaacacttgatagaagagggcagttccctgggaaaggccccaccctcaagcctggacagctgcggctctaaaagagaacaagcattcctttttcaggcccaaaaagtttcctttgggcccacacgccccctatgctttacccacataaacctctaactccagtctccagagcagaccagcagacaaggagatgagacaagcagatgaatggcagaatgacatggtagagaaagagaaaagaggaggaatgtctgaacaatgagaagagtttggctggggatagtctgagaggagttcggcagstagacagcccaactccagggtaagatca

SEQ ID NO: 391134 - DNA, 525 bp, Homo sapiens
atcattaaacatgaattatgaaagcatccttttaaagataacacaggactgctatcaattgaatatatgtaaaaagaagaactaacaactatcttgtggcttaatatgatttaatcatactatgcaacatttagggacaattaattggttcaagacagtcaagccatctcatgtctagataatttgctgaatgcccttargctgattccaagtcctagtacagcttagggacttagatagtttatcaaaacatgtattcatagtcatagattccccctcatttgtatttgtgtcataacccacaggactctagagatgaaagaacaattatcatgattctttcaaaccatgctttttggccaatagcaataaagatgctttgataaaaaataaaataacattcaatttagctcagtgaacactgagcacttaccaagaataaggcacattaggctctaaggaaaaactgagaatatcacaaagcaaacatttcacagtggaatgcaaacctttaaattagttgat

SEQ ID NO: 391135 - DNA, 525 bp, Homo sapiens
atcattaaacatgaattatgaaagcatccttttaaagataacacaggactgctatcaattgaatatatgtaaaaagaagaactaacaactatcttgtggcttaatatgatttaatcatactatgcaacatttagggacaattaattggttcaagacagtcaagccatctcatgtctagataatttgctgaatgcccttaggctgattccaagtcctagtacagcttagggacttagatagtttatcaaaacatgtattcatagtcatagattccccctcatttgtatttgtgtcataacccacaggactctagagatgaaagaacaattatcatgattctttcaaaccatgctttttggccaatagcaataaagatgctttgataaaaaataaaataayattcaatttagctcagtgaacactgagcacttaccaagaataaggcacattaggctctaaggaaaaactgagaatatcacaaagcaaacatttcacagtggaatgcaaacctttaaattagttgat

SEQ ID NO: 391136 - DNA, 488 bp, Homo sapiens
ataaaggatgattaatctatttctaagaattctacagagaaaaaaagaatagggaagtaacaagtagccaaagagatgatgggtgtaaattttcaatactagtgaaaatcatctgtctacagatcctacacacctgtgccttagtaaagataaatataaagagaataactcctagacatatgacagaaaatggttaattttttatatttacaatgaaaaaaatctcataaggagtcagaaaaaaatatttaaaggaatatatagtaggaagatgaacttttaaaaaatatatattagttttttccttraaatattggtatgtaaccatttcataatctcagtggtttattgcaaacatgctttatttttttcatttcatgggtcttgtagatcaactggagttcacctaatctcagcagggcttacctgctggaccagtgtggattgaagacttgcagtcaggtaagatctattccatgcgttctttc

SEQ ID NO: 391137 - DNA, 557 bp, Homo sapiens
aagtagccaaagagatgatgggtgtaaattttcaatactagtgaaaatcatctgtctacagatcctacacacctgtgccttagtaaagataaatataaagagaataactcctagacatatgacagaaaatggttaattttttatatttacaatgaaaaaaatctcataaggagtcagaaaaaaatatttaaaggaatatatagtaggaagatgaacttttaaaaaatatatattagttttttccttaaaatattggtatgtaaccatttcataatctcagtggtttattgcaaacatgctttatttttttcatttcatgggtcttgtagatcaactggagttcacytaatctcagcagggcttacctgctggaccagtgtggattgaagacttgcagtcaggtaagatctattccatgcgttctttctagagccctgtaagaagcaacagcagctacagggagcagactcttcttgtgatggaccatagaggcaagccaaaccacacaagtatatttaaagctaagcttttagtcttattggctaacattcgattgg

SEQ ID NO: 391138 - DNA, 557 bp, Homo sapiens
cttctttatacttgttttggctatttccctaactttcatttccatataaatcacaagatccatcttgtgaactttcataatcatatacacaatatgtactttatacatgacacatttacagttatttccaatatgttatgcatccatagatgggcaatgcatgttcgcttttgataacacatagcagtttgctcttagtagtagacacaaagttagtcattgtcctaaccaaaagttttttgataaaacaaaaacctcaaacaacaataacaacaacaaaacacatccatagcaatgggcaacrcatgttcacttttgataacacacaacagtttgctcttagtcatagacacagagttagtcattgtcctaaccaaaggttttctgataaaacagaaacctcaaacaacaataacaaccacaaaacacaaaaaatagatggaaagaataaatcgtgtagaataagaaataataaaatttatatatcgtattttgtcctataagcagagaaaaaaaagtagaaaatagcttcaaaatgactaactgacacaactgaa

SEQ ID NO: 391139 - DNA, 535 bp, Homo sapiens
acattatctttgggagaatacagtaggttaatttcaacaaattcccatattttctatagtaaaactctttagaaacaaatttttttatcatcaaaaaacaatttactacttgaatgggggaaaattataaggtcagctattacttagttacattgtcctttaattttgagaataataacaggtattattagaaaccactttctttatccttgttgagaagagaacacacattttctttgacatctctgtcttcagtgatgatttytctctgtctggctctgaaagagtgatacctaaattcttccatttttctcaaacatggctttctagcaacttcatactgctgaaatacttttattcttctatgattttatttacactaaaggtcacatatttccatgtcttttcattggatgtcacatctcaacactagattcaatgaatacagatatttccattaatgctgtagggtaacccttgcccttaatccatgttatgtgtctagtgaactaatgttaatctgtccacaatttgt

SEQ ID NO: 391140 - DNA, 565 bp, Homo sapiens
ttaagtagaaagcaaaaagctagtcatcacacaactctacttcaaactataatgcaaagctataataaccaaaacagcatggtactggtacaaaaacatacatgtagaccaatgaaactggttagacaatccagaaataaagtcacacctacaaccatctgataatttacaaagttgacagtacaaagcaatgggtaacaggctctctattcaataaatggtgctgggataatgrgttagacgtatacagaagggtgaacctggacttcttctttttacaatatacaaaaatcaacttacaatgcattaaaaacttaactgtgaaacctaaaggtataaaaaccatgtaagaaaacctaggaaatgccattttggacgtaggccctagcaaagattttatgatgtattaagactccaaagcaattctaaaaccaacaaacaaaacttgacaagtgtggtctcagagtttctgtacagcaaaagcaactttcagcataataaatagataacttacagaatgggagaaaatatttgcaaactatgctttaacaaaggtctaatattc

SEQ ID NO: 391141 - DNA, 422 bp, Homo sapiens
atgccattttggacgtaggccctagcaaagattttatgatgtattaagactccaaagcaattctaaaaccaacaaacaaaacttgacaagtgtggtctcagagtttctgtacagcaaaagcaactwtcagcataataaatagataacttacagaatgggagaaaatatttgcaaactatgctttaacaaaggtctaatattcaaaatctattagaaacctaaacaattaacaagcaacaccaaacaactctattaaatggacaaagaacatgagaaacatatctcaataaaagacatttttgtggccaagaaacacatgaaaaaatactcaatgtcattaatcattagagaaatgcaaatcgaaaaccacaataaaataccacctcacactagacttctcaaagaactgaaaatagagacaa

SEQ ID NO: 391142 - DNA, 595 bp, Homo sapiens
atactgtaatcaaggaactgacagcatatgtctggattttaggattgtcatggccaagtcactgactatagtgttcctgctatatttctcctttatgctgggaagtatctatggcagatatcctatacctagtccaacagcatatgttgggatgcatgtggaaaaatacatgtcttgttatactgcttgttttctgaatgagaaggttgataactgaaagagttacactgagatatgatactagactgaaaagaatcatctacacctggacctgatttagataccaaaatcttcaagcctctaggctaatccaatgttgtcacaggataagactttgatgggtttgggaacaatggtgagggtattttgcaaataagagaaatttttttgtttgtttgtttgttttttgttttkttttttttttttttttggtgaggccagaagacaatgtgactgatatggtgtgaatgtgttctccaaagtttgtgcattgggaacttaatctccaatgcaacagtggtggaaggtgggcctaataaaaggtaattaagtaatgagggacctgctctcattagtgggttaatgtcattattgc

SEQ ID NO: 391143 - DNA, 371 bp, Homo sapiens
tttgcaaataagagaaatttttttgtttgtttgtttgttttttgtttttttttttttttttttttggtgaggccagaagacaatgtgactgatatggtgtgaatgtgttctccaaagtttgtgcattgggaacttaatctccaatgcaacagtggtggaaggtgggcctaataaaaggtaattaagtwatgagggacctgctctcattagtgggttaatgtcattattgcagaagttggtttgttatcatgagagtgggtttgttaaaaaagtgagtttggctgcctctcgcttgcttgtgttctcttgcccttccttctgttttccaccattggatgttgtagcaagatggtcctcaccagacggacctt

SEQ ID NO: 391144 - DNA, 607 bp, Homo sapiens
agtgggttaatgtcattattgcagaagttggtttgttatcatgagagtgggtttgttaaaaaagtgagtttggctgcctctcgcttgcttgtgttctcttgcccttccttctgttttccaccattggatgttgtagcaagatggtcctcaccagacggaccttggacttccagccctccagaagtataagaaataaacttttttttttttttatgaattacctagtctcaggtattctggtatagcagcacaaaattgaccaagacattggcaaatttaattttcaaaaatattttcaattgcacatgcttttccagcccctgccacagtttactgagaaaatggaatccatgtcctctatttttgaatatggatgggcctttgtagctacttctataaacagaatattttggaaataacactgtgtttttctatgctagatcataaaagrtgatacaggccttcaccacttgccctgactccagacttgaagagccctcacaatagcttacactattttcatggatgtaaagcactagttgtcaccagcacctctcccactgactgaagagagactactttgctcatactctcaccagaccgaaca

SEQ ID NO: 391145 - DNA, 581 bp, Homo sapiens
tgtttccctttgtttgtgttatctattacttctttcagcagtgttttgtcgtttgccttgtagaggcctttcatatccttggttaggtatattcctaagtattttatgttttttgcagctattgtgaaagaagttgagttcttgatttggttctcagcttagttgctgtttgtggatagcagagctactgatttgtgtacattaattttgtatcctaagtttgctgaatttatctatcagttctaggagctttttgaatgagtctcagggttttctaggtatacaatcatatcatcagtgaatgtgacagtctgacttcctctttatctattaggatgccctttatttctttctcttgtttgattgctctgtctgggacttccagtacaatgttgaatagaagtggtaaaagtggacatccttgtcttgttctagttctcagtgggaatgcttccaacttttccccttttattagaatgttggctgtgmgtttgtaatggatggcttttactaccttaaagtatgtcccttccatgccaaatttgctgaaggttttagccataaagagatgttgcattttg

SEQ ID NO: 391146 - DNA, 536 bp, Homo sapiens
gtggggtgggagggaatgaggatggttaattggtacaaaatattatatagttagatagaataaatgagatatagtagttgatagtrcaacagagttactacagtcaacaataatttattgtacattaaaaataacaaaaagagtataattgcattatttgtaacacaaagaaaagataagttcttgaggtgattgacaccccatttaccctgatatgattattacacattatatgactatgaaaatatctcatgtactccataaacatatacacatactatatacctacaaaaataaaaattaaaaactgggaaaaacaagtgtgaaataaacacctctgaataatttaccccaatagaccttcactaaaggaacttctaaagaatatagtccagtatatcctttagaatgaaagtaatcccagaaggaaagtcagtgatgcaagaaggaatgacgatcaagaaatttggtaaataattagataagtataaataagcagtttgcaaaattaaaaataatgtctaatttgtggcatt

SEQ ID NO: 391147 - DNA, 594 bp, Homo sapiens
tcttcagcaaagaaagtttgattcatctcattaggaaggttgaccagctgagataccaaatgagggagaagaaaatgtagaatggagaatgaatatgaaagtgacaaataaaaactatagccttgagaccagttacagaaacaaggactgtagaagctgtggaacttttttactttgtgcattatgtacatttttaatatattaagcattttattattttccttttccttattaacttaaattgcaaaagctgtccatggttagctttatgattttgtctttatgctgtagactatttagatgtcttgtgactatgttagtggggcaattaacatttctagaaatgaattcatggactcggtgcagttttgggagagtgcatctttgtatgaagtctagtggctttatgttattgaaaaataagatatggttttattgttattatatagaagattacacaytggtaggcagatctataaggatactatgtgttcaagagtttggactgtgctggaaagcattaggtgcctctcatttccacacttgctctcagtaccttgctctgtcttgccatgtcagaggtctgtaaactac

SEQ ID NO: 391148 - DNA, 619 bp, Homo sapiens
gcatgtttaaaatctggacttccttaggaacagtttcaatttttttttttctgtgcatggatgtttttagtttctgtgtttgtcttttaacttcttattgaaaactggacatttaaaatgtatatattggtaatagtattgttcttcttaaagtttgcagttgttgatgttgtttcgctgggtttttttagggacttttaaagatcaattttgtaaagttgttggtttttttgtttgtttgtttgtttgtttgtcttttgcaattactgaagtctcattggttagcttaatggtcagctaagggttggacagagattttcttttataacttgaacctcaagatttctttcgtgaggcgtgtgtgtgtgtgtgtgtctgtgtgkgtgtgccgggactttcattcaactgtatggcagtttacaactctgccttaagcttcacttagtgcttttgcagagcctcaatattagccagagatgaaagcttagggccttctcaggattctcctgtgtatgtacacaactctgctcctatatagaacctcatatagtctcaggaaaatgttggagcttttcaagactcctaaagtattcttactcctcatatttattttcaagtt

SEQ ID NO: 391149 - DNA, 605 bp, Homo sapiens
gtaactatgtggtaatgacaaatatacatgaataggattagagactttttaaaagaggccaaagagagactcttcacctcttctgtcacgtgaggttatagtgaaaatatggccatgtatgaactaggaagtatgtcctcaccagacactaaatttgtcagtccctaaattgtggacttcccagtcttcataactgtaagaaatacgtttctattgtttaaagttacccagtttattgtatcttgttataatgtcctcagtggactaagacatttggtttacraatatagttttcccattccataagttgccttttcattgtgttgattgtttcctttgctgtgcataagcattctagttgatgttgtcccaattgtctacttttgcttttgttgcctgtgcttttggtatcatttccaaaaaattattgccaaggccaatgtcaagtatctttttgtctgttttcttctaggtgttttgtgtttctggttttaaattaagtcttgaatccattttgagttgatttttgtttatggtgtaagacgggcctatttcattttttatgtagatatccagttttctcaacactatttattaaagagaaa

SEQ ID NO: 391150 - DNA, 550 bp, Homo sapiens
actcaattgctgaggcacagcatgaaatagggatatgctgtttcctttctaatatatatttcctaatatcctttctaacccttaaagcagagtggctgcctttaataaataagaacattctgaagtaccacaagaaagaaagaaccatctctggtatgtcctaaaaaggtaraataaatatatgataaagttgtggggagactgacaatttggtatcagtctttcatcagagatattttataaaatcacatgtgcataagcaataattggtatacctactgctaatggcatgacatccaaaggtcctgttttcacagcccctgctgaagaaaggcccatccagattatcctttggtatgagtaactgaaacctgagtttttcaccactaaaaccagaagacaaagaaagcatttgacaaatttcaacacctgtgcctgataaaaattctcaacaaatgaggaatagaagggaatgcccttaacccagtaatgagcatttatgagaaacctatagctagcatcatagttaattttattcataagatttgaa

SEQ ID NO: 391151 - DNA, 573 bp, Homo sapiens
aggtgttctttcaaattactcatgatgaaacttaaaagttaacaaaaataattattatggtaattgtgtctattttgattgctgccataagaaactaccacaaatttagtgttttaaaatacacaaatgtgtcatcttattgttctgtatgtaggagtctgacacagatctaattgggttaaaatcaagatgctgtcaaagctgcattccattctggaggttttaaaggatgatttttttccttgatcatttggattattggtataatcattaaagctgtagtagtgagatccctgttttgttgctggctgtcagctcagcaccagttccagcttccagaggtcacctgcatttttttttttttttgcctgagtccccctrcttttcaaagtaaatgactgtgggtcaatttctctgatgcttcaaatctctccttctgtctcacctctttgatgcgttcctctgcctctctcttggcttttaagagtttatgtgattagattggatgcaccaggagattccagtgtaatacccccatctcaaggtttgtaaccttaatcatatcacaaagtc

SEQ ID NO: 391152 - DNA, 511 bp, Homo sapiens
ttggtggtaaataagtaagtaaattttgattgctataatcaacgtctttcccttcgctgatatgttttctcctatttgtaakaacagatatatttacaaaagccacctcaaatattccttgaccagtcactgtttaaaagggcttctggtagtgattgggtaataaagaacttagaatctctatgaaaatccaagcacacataaaaatataaatggcaataagtacttaagagtgataggaataatggcttagtcagattaacaacaacgttagacaactttgttgaggccataacaatctcttgctatgatatgtatagactttattacacaaattaaataataaaaataatattgtacaccattatttagtaccatgacactgtatagtactatgctaaacactactccatgaggtggctcctattattttaattttactactatgaaaatcaagtaacttgtatatgagatacatggctgataagttttagagttgaatttgaaatta

SEQ ID NO: 391153 - DNA, 658 bp, Homo sapiens
acaagggacaatagattactgttaaaaagagttgcaagagaaaaacaaaaacacgtctatactctctttgaggcataacacaaatggaagctctaaatctcagaatcaaacagatgttgctctggcaaaccatcctccaccctaccgactagatattgctacagaaatttgaaatctaatgtgcagtgagtgtaaccatagcaacaacaaatatcaaacctagtccaactgttaaatatattaaataaatctccactgtaaaagtctcggtggaagaaaaagaatacacatacccagacasgaaaactttctacattttacttgtcccacatacaatggctgcctaaaaaaaaattataaggcataaaaaggcaagaagaaacagaatctgaagagacaacatgatcctaagaattagtctcagatataacacagctctgacaggaaatttcaaataattgattagtaagtttatagctcttatagaaaaaaaaggacaaaaagcaatactatttagtatacaaagcatcataaaaatcaatggtatttctagacattagcaaggaaaatttaaatttattattaaaccatttacaatagtatttgtaagaggagggaggcaggaatgaagaaaggaagaaaggaaagtgttgtagtt

SEQ ID NO: 391154 - DNA, 572 bp, Homo sapiens
catgaaatggtttagataagataaccttttacactgttgttctttagtgcaaagggagaagcaattttgcaagcagcagctggccttatcaacattggtgacattttgcagcaaactgaaagctaagaggtagaaagattttaaaatatattcttgctmtaaagaccaaagaaatgtaatacagaatgtgctgttctttataattttggctgtgcttcatagatactaggttttaaagcaattttattttagtagatgagtgagaatattttagaggtagagtagtgaagccctcaacttgctcttacagaattgaacatcaagggagaaatgaagaggtacatgtttgggtttagcacccattttgtagtgccctaactattaaatgaaattgcatggagatttcataatcaacactatcatctctgtgaagcacaaatacaaaggttctgctttctatactttcctatactgaaaaaaaatctccatggcaaataacattattgaaataattgtgctaattatggactcagaataatagatgttccagctacagattaattaaaagtaga

SEQ ID NO: 391155 - DNA, 572 bp, Homo sapiens
catgaaatggtttagataagataaccttttacactgttgttctttagtgcaaagggagaagcaattttgcaagcagcagctggccttatcaacattggtgacattttgcagcaaactgaaagctaagaggtagaaagattttaaaatatattcttgctctaaagaccaaagaaatgtaatacagaatgtgctgttctttataattttggctgtgcttcatagatactaggttttaaagcaattttattttagtagatgagtgagaatattttagaggtagagtagtgaagcyctcaacttgctcttacagaattgaacatcaagggagaaatgaagaggtacatgtttgggtttagcacccattttgtagtgccctaactattaaatgaaattgcatggagatttcataatcaacactatcatctctgtgaagcacaaatacaaaggttctgctttctatactttcctatactgaaaaaaaatctccatggcaaataacattattgaaataattgtgctaattatggactcagaataatagatgttccagctacagattaattaaaagtaga

SEQ ID NO: 391156 - DNA, 643 bp, Homo sapiens
ttcctcatagatttcacttgttggagtcagttatgcaaacctatgtctttcagtcagtaaaatccttttttggctgcttcgtgctacatttctctcattcttaccttttcctgtcctaaaatttayaaggcaagtcatatttgtaaagaaaaatggactgtttctacttattttatacattttatttaacatgatggaccattctcatgcatagaccagcgtttctctatctcagtggtattgactgattgtgctggataattctctgcctgaggagggctcttctttatattttgtgtatttcagaatgttcagcagtgtggctattctcttagatgctagtagcacctccatagtgtgataaccaaaaatgtgtccaataatttcctaattctcctgagatgaaccatcctaggttgcaaacctttgacaggtagaaggctgacattgtacagatctgtttgctaaggtggcattccctttcccttatttagaatactctaaaagcgtttttaaatacatagtcaaaatacacaactttcttagggtattttgaagaggtaataaaagtgaggaaagtaagggaaacatgattgtggagtaattactctgtgcaagatacgttatttttacttacataaat

SEQ ID NO: 391157 - DNA, 557 bp, Homo sapiens
aagtggtggttatgaaaaaaatactagctaaaaacatattccctctatctgagtaggagtgactgtaaacccaaaacaagcatgtttaaaggagattaataactttcaaattgaactccagctcctatttaaagaggcaacgtcactgacaaattcaaataagaaagaaaaggactggcttagaagcgaattcaataacgcagtagtatgcaatatagagagaggccacatcctgaagaaactctccaagaggtgaaaagtcctagatcatcattcaactccagacaaagattggaggaaagacactgccgtgtggctgrgttcatggctgttcaatcactgttgtatacacagaaacatggcctgatggcagattccctaccacttcattaaagcaaatggttaccttgaggtggcaatccaagtctcaagacttttattgttttgcaaacttacattttagtgtattttttgttttccagttctttaaactaaaatgtgaagttcattttaaatcacacttgctctggaaggtctacatcatcataacaggcagt

SEQ ID NO: 391158 - DNA, 587 bp, Homo sapiens
cttactctgacccccagaggctgactactgtgaagttaaccagtgggctacaagtcttctggcttcatattgtgttccgtctatgggaggttctggctagagattggagggcaggcggagggtgctgcagcatatttattccaccactccaccaccactagttccctccctgtcaaagtcttggttttcagtagtcatgtggctacgtttcacaagatcttataaccactcctttctcaatgtgaggcctacagtgagtgcatcccttattgctatctctgggtgcttcaccacatcttgttggtttctcttaatccttcacagacctcaagakgccagtatgctcatgtgcttcttgttaccttctcttccctcttcttcaatgtctactttgatctgctgcacaatcttccttcaattcttcctttaatctttcccaagttggcataaactaagccaaatggtttattccctctagttatactttttacatcatctcacaagagtttttcatattataaatacattctcagtaggtgaatgtcctcttaccaaggtaactggagagtggcacacaagcagtttac

SEQ ID NO: 391159 - DNA, 608 bp, Homo sapiens
tactcctgttcaacctgcttaaaagctccatggctccctgttggtgataggacaagctcagactccttagctgagtatatcctttatgatctgctgctgaggctgatgaccatggggtagggggcagagaaaaggatgaagagtaagaccagagggttgggcaggaaagttttagggaygtaaaggagtttagtcattatgctatgagcaatggaaagtcacaaatgctcagggttttttcctgttgtctttttttttgaaacggagtttttgctcttgtcatccaggctggagtgcaatggcatgtgatctcagctcactgcaacctctgcctcctgggttcaagtgattcttctgccccagcctcctgagtaactgggattacaggtgtgtgccaccacgcccagctaatttttgtatttttagtagagacatgatttcaccatgttggccagactggtctcgaactcctgacctctggtgatccacccacctcggcctcccaaagtgctgggattacaggcgtgagccaccacgcctggccacaaatggtcagttttaagcaggggcatggcatgaacagatttgcatagcggttaaaagcaagg

SEQ ID NO: 391160 - DNA, 631 bp, Homo sapiens
gcatgaatttttaattatatgcctacttacattcacarctcctttggggtcataggggatgttatggagaaggctggaaacctgagaatccaagataggcccagtctctttacagctggaaaagcaactacctgtcttgattcaggctgctataacaaagtgccattgtgttagtccattttgcattcctatagaggaatacctgagactgggtaatttataaaggaaagaggcttatttggctcacgattctgcaggctatacaagcatggcacccacatctgcttggctcctggtaaggcctcagaaagcttacaatcatgatgaaaggcaaagggggagcaggcgtatcacatggcgagagagagagaggaggtccccatctctctcttgttttttttttttttttaaacaaccagaaagatcgcatgtgaacttattattgtggggagggcatcaagatattcatgagggatccacgcccatgactcaaatacctcccactggacccaccttccacattggaggtcacatttcagcatgagatttggaagggacaaacatgcaaactatatcagctgtaaactgggtggtttataaacaacaaaaatttatttcttgtggttccaga

SEQ ID NO: 391161 - DNA, 631 bp, Homo sapiens
gcatgaatttttaattatatgcctacttacattcacaactcctttggggtcataggggatgttatggagaaggctggaarcctgagaatccaagataggcccagtctctttacagctggaaaagcaactacctgtcttgattcaggctgctataacaaagtgccattgtgttagtccattttgcattcctatagaggaatacctgagactgggtaatttataaaggaaagaggcttatttggctcacgattctgcaggctatacaagcatggcacccacatctgcttggctcctggtaaggcctcagaaagcttacaatcatgatgaaaggcaaagggggagcaggcgtatcacatggcgagagagagagaggaggtccccatctctctcttgttttttttttttttttaaacaaccagaaagatcgcatgtgaacttattattgtggggagggcatcaagatattcatgagggatccacgcccatgactcaaatacctcccactggacccaccttccacattggaggtcacatttcagcatgagatttggaagggacaaacatgcaaactatatcagctgtaaactgggtggtttataaacaacaaaaatttatttcttgtggttccaga

SEQ ID NO: 391162 - DNA, 571 bp, Homo sapiens
ttttaattatatgcctacttacattcacaactcctttggggtcataggggatgttatggagaaggctggaaacctgagaatccaagataggcccagtctctttacagctggaaaagcaactacctgtcttgattcaggctgctataacaaagtgccattgtgttagtccattttgcattcctatagaggaatacctgagactgggtaatttataaaggaaagaggcttatttggctcacgattctgcaggctatacaagcatggcacccacatctgcttggctcctggtaaggcctcagaaagcttacaatcatgatgaaaggcaaagggggagcaggcgtatcacatggcgagagagagagaggaggtccccatctctctcttgttttktttttttttttaaacaaccagaaagatcgcatgtgaacttattattgtggggagggcatcaagatattcatgagggatccacgcccatgactcaaatacctcccactggacccaccttccacattggaggtcacatttcagcatgagatttggaagggacaaacatgcaaactatatcagc

SEQ ID NO: 391163 - DNA, 589 bp, Homo sapiens
tgtttagcttgcagggtgattggagtcgggagacaggcagtagataaggataaagtgtgaaaaattcaaacaatctccaaagcaagcttgaaataatccttcctttggagacctggtcttcccagtcaagatgcaaacaaaagaaaatggcctgtctttatttggttcactggtccagaaaatgtgccctgggaagataaggccgagctgggtgtttgaggtgaatacaaggagccaagaggccttgttggggatttctttcacccaagaacttcctaaacctggagcgttctccttgaagaggacactggagctggctgctgctgctttctttaaacagactcagaagttcttttcttggtaacacgagaaactatatgcagggcttcaaggacacattctgaatgatgatttatgctaagttgtttagcctcycctccccgccaataattcttccagagagcatttagctgatttggaaaaagtatatcaaatcccccagagaacagggtgtatcttaacagtggatgaatgtaattctggtcattatctaaatgctcaaagctttacaaactgagtaacccaaatg

SEQ ID NO: 391164 - DNA, 644 bp, Homo sapiens
cccttggaatttcctgagtgataggagcatctcttgttctaacgaggtgactcttggtggggctcctggatagcttcagaatgaggactggtcaccagaaacacaccaagccatgataagaggcttggaactttcaggtccatcccccgtcctccttggatggtagggaggataaaattgagttaataattggtcatgcctacatgaagcctctataaaaaaccctaaaagatggagtacaaaatctccaggttggtaaacatatccacgtgccaggagggtggcacacctctgctttatggggacaaaagctcctattctcaggccccttctggacccagttctacgcatctcttcatctggctgttcattcattccagatatcctttatccggatatcctttataataagccaataaatgtaaataagcatttccctgagttctgtgagtcctaaaaaaattttgagtcggaatctgaggaggagattgggttgtgtgaacctctcctttgtacagcaagttgatcagaagtacaggtgacaacctgagacttrcaattggcaactgaagtggaggcagtcttgttggactgagcccttaatctgtggagcatgatgccagccctaaatagataatgccaca

SEQ ID NO: 391165 - DNA, 495 bp, Homo sapiens
gtctaataggtgcattgtgatcctatttgctgtctagttagtggcttagacataagcatgtgatacaattctagccactaaaactcgatagacagtctgctgataggccttttgcaaagatttttttattctcagtgatgaaaagaaactcataggaacactccttcttcttttagatacttttagatctggctgtgatgcgygggactgtggcagccaccttaggcccatgaggggacttagcatgagaatggaagaactgaaagatagaaagaacttgggtccttgatgacatcatttgagtcactgggttaacccaccttggactactttacttctgggattcttgttatttgataaaagaagtgttcttattgtttaagccagttgaattcatttttaatttttagttacttgaatccccaaacatcctaaatgacatacctccaaattaatacaaatcacaagccacaaatgagacatactttaatgaga

SEQ ID NO: 391166 - DNA, 495 bp, Homo sapiens
gtctaataggtgcattgtgatcctatttgctgtctagttagtggcttagacataagcatgtgatacaattctagccactaaaactcgatagacagtctgctgataggccttttgcaaagatttttttattctcagtgatgaaaagaaactcataggaacactccttcttcttttagatacttttagatctggctgtgatgcgcgggactgtggcagccaccttaggcccatgaggggacttagcatgagaatggaagaactgaaagatagaaagaacttgggtccttgatgacatcatttgagtcactgggttaacccaycttggactactttacttctgggattcttgttatttgataaaagaagtgttcttattgtttaagccagttgaattcatttttaatttttagttacttgaatccccaaacatcctaaatgacatacctccaaattaatacaaatcacaagccacaaatgagacatactttaatgaga

SEQ ID NO: 391167 - DNA, 609 bp, Homo sapiens
ctatttctctccctattctttgccttccaaaggattttaaaaattaaacctttttgtaagtatcacatatgcagatgtgtgtatagttcaatgcattttcacaaagtgagcacagctgtgtaacaattgtcccctcatgtcccctcactgtcgctgcctgcctgttcccaaaggtaaccactattctgacttctatcatcaagctaaatttttcctcttttgctcgacattacagttgtatgattcaatcgtgttgtgatggataatggtagtttcatttttactactgcataycattccattggatgactacactacaatttatgttgatggccatttgatttgcaaatttggggctattacaagtagtactgctatcacatttttgtatgtgtcttttggtgaatatatgtccacatttttcttagttatatgtacctagaggcagaattaatggggaagagggtatgtatatattcactgtttgtaggttgtcccaatttatatttctgccaagaaggtatgaaagtcctgtatcagttcaaatacttgccagcacttggtattattggtcttttaatgatagcaattctgttaagtgggtggcag

SEQ ID NO: 391168 - DNA, 520 bp, Homo sapiens
aaattctaatgcaatagtatatgtttccatgctttatataaatagaataatgtattgtatgttttggtgtgtgtatctgccttctttcgatcaatattatgtttgtkacattcatgttattacatgtaattatagtttattgtcattgctgtttagtagtccattgcatcaatacacaaaaatttacttatcatttcaacattgatgagaatttgagtggcttccagtatgaacatgtaagctagtatgacactatattcttaaacatgtcttttggggaatgtatgtatgtatttttggggggtatcctgggaataaaattgtctgcattatagggtatgcatatgttcaactttcatagaccgttcaaatagtttgcagtgctataagcaacatacaggagttccaggttgtcccacatctcagccgacacttagtattgtctaccttttaaattttacccatttttgtagatgtgacatcatattgtagttagcatttctctgatgtctaattaagc

SEQ ID NO: 391169 - DNA, 575 bp, Homo sapiens
aagataaactagtagtctgctagctgagaagacattgtaggtacttaaaacagcaagtctgtgtgtaatgatctcctttgccctctccaacacattctctcctgtttctgtgaggctgaccacttggataactgcatcaccaaggtggctttgtcctctccctttctgttttgtagctagcgggagggactggcaagagactgcaagattagagcagttggaatacttattctctccttcccatcatccctgccagcctgccatggttctgactgcagctgcatcctcctacagctccaacctcacacaacccctttcccaagatctgactcctgcaagagtctggtctggaagaagctgcaataatattccacatccactagctgtccagtacacatataataaaacccacatcctcattgtgatctacaagacgttagttgatttggcctctgtctgctaatcggacctcggctgtactttctcactcatttactgcttctttgtcaaatagtccttttttaccctgttcagaaaacatrtcaagttccctccagtctctgggcttttgcaat

SEQ ID NO: 391170 - DNA, 640 bp, Homo sapiens
attaagtggaaattatcaaaagagaatcttgaaggagtaatagctaaaaactttctgaagagtattgaaaatayttatttaaaactcaagaaattcaaaataatctaaccaacaaatatacacaaaaattattccgagttgtatcaaattcacacacaaaatctccaaagcattcagagaaaaatcaagtgttgtgtacaaggaaacagtggtaagcatggtggttgagatttcaccagaagttagaaagtcaatgacacattaaagtgctgatatgaaaagacaaaaacacctctcagaaagtttctacccagtgaaattatatctctaattgaatccctttttatatggaggaaaactcatacatttttttcttaagcccatctgcaatatagtaaggactagagaaaaatttctaagctgaagagagatgctttccgaaggaaatacaaagaacattggaaatgttaaaaaattactcattagataactctctctttcttctctttctttgtatatgtatatacatttatgtagaatcacacataaatatgctacatattatatagtatatataatatatatacttacagtaaatatatacacacaggtacccgtgtatatatcccatatatgtata

SEQ ID NO: 391171 - DNA, 640 bp, Homo sapiens
attaagtggaaattatcaaaagagaatcttgaaggagtaatagctaaaaactttctgaagagtattgaaaatacttatttaaaactcaagaaattcaaaataatctaaccaacaaatatacacaaaaattattccgagttgtatcaaattcacacacaaaatctccaaagcattcagagaaaaatcaagtgttgtgtacaaggaaacagtggtaagcatggtggttgagatttcaccagaagttagaaagtcaatgacacattaaagtgctgatatgaaaagacaaaaacacctctcagaaagtttctacccagtgaaattatatctctaattgaatccctttttatatggaggaaaactcatacatttttttcttaagcccatctgcaatatagtaaggactagagaaaaatttctaagctgaagagagatgctttccgaaggaaatasaaagaacattggaaatgttaaaaaattactcattagataactctctctttcttctctttctttgtatatgtatatacatttatgtagaatcacacataaatatgctacatattatatagtatatataatatatatacttacagtaaatatatacacacaggtacccgtgtatatatcccatatatgtata

SEQ ID NO: 391172 - DNA, 603 bp, Homo sapiens
tatgtattctttgaattttacactttaaggaattatacagtatgcaattatacctcaaaagtatagttaattaaatgagtgtttttatttatgccaggggataatatggtttcaaatgaatatttttcttgccgttaatttccaatacttgcatgcaaaggtaactattatagaataaaagaattagtactggagttgaatctctttttctttctttctcatttkgttttgctactaaaatcaataccaatgattacaagttcaaatcatttttatctttcgtcatagtagtttaatttcagaaatgtgtccagcaacaattgctggcatatatacctgaaggagcttcctactgagtattcggaagcctgaaaataggattttattttttgagcttcggaagttacatactacgtggggatctgaaatttggcctgttgtttgtcaggttatatattttaagcagaatctaaaaatgtgccttgttcatgtgggcttttttctttttctttatgtacctttttcttttgttctttttctcctcttacacaaaggaaaggtatacgattttctcttcctttgttatctatctgttccaagtct

SEQ ID NO: 391173 - DNA, 603 bp, Homo sapiens
tatgtattctttgaattttacactttaaggaattatacagtatgcaattatacctcaaaagtatagttaattaaatgagtgtttttatttatgccaggggataatatggtttcaaatgaatatttttcttgccgttaatttccaatacttgcatgcaaaggtaactattatagaataaaagaattagtactggagttgaatctctttttctttctttctcatttggttttgctactaaaatcaataccaatgattacaagttcaaatcatttttatctttcgtcatagtagtttaatttcagaaatgtgtccagcaacaattgctggcatatatacctgaaggagcttcctactgagtattcggaagcctgaaaataggattttattttttgagcttcggaagttacatactacrtggggatctgaaatttggcctgttgtttgtcaggttatatattttaagcagaatctaaaaatgtgccttgttcatgtgggcttttttctttttctttatgtacctttttcttttgttctttttctcctcttacacaaaggaaaggtatacgattttctcttcctttgttatctatctgttccaagtct

SEQ ID NO: 391174 - DNA, 603 bp, Homo sapiens
tatgtattctttgaattttacactttaaggaattatacagtatgcaattatacctcaaaagtatagttaattaaatgagtgtttttatttatgccaggggataatatggtttcaaatgaatatttttcttgccgttaatttccaatacttgcatgcaaaggtaactattatagaataaaagaattagtactggagttgaatctctttttctttctttctcatttggttttgctactaaaatcaataccaatgattacaagttcaaatcatttttatctttcgtcatagtagtttaatttcagaaatgtgtccagcaacaattgctggcatatatacctgaaggagcttcctactgagtattcggaagcctgaaaataggattttattttttgagcttcggaagttacatactacgtggggatctgaaatttggcctgttgtttgtcaggttatatattttaagcagaatctaaaaatgtgccttgttcatgtgggcttttttctttttctttatgtacctttttcttttgttctttttctcytcttacacaaaggaaaggtatacgattttctcttcctttgttatctatctgttccaagtct

SEQ ID NO: 391175 - DNA, 586 bp, Homo sapiens
ctttatatgcataaaaataagtagataaaatacgaagactatttcagaaataggtaggattgatgtctctgagataaattcgctgaatcttgctctttaaaatgagctttaggtcatcccaaaaacatctctattttctctgctcctttctgtcatcccctcacttcctcccctgccaccctatactgttcttggtgatgatttttcagcaaatttcctaatatgtctaaattcatacattgccctgttctttcatcatcgcctctgttstctcacaaatacagttttctagtgtttttttgggagaaaaggagaaattgcccatctactcacagatttggcataaactatatagagatgtagggattccattttagaaagtctaccagcatacagtacagttcttgaggaaggtgaaggtgaattaataaggtaatggaatataccttgtatgtgtttgtccagctaagcgattcttgtcccatttgcaaaactgagtcaggctacatagtcttatttttctatgagacctaactgggaggtacatcaagtaggggaaataaatcagcaattaagattcttcata

SEQ ID NO: 391176 - DNA, 586 bp, Homo sapiens
ctttatatgcataaaaataagtagataaaatacgaagactatttcagaaataggtaggattgatgtctctgagataaattcgctgaatcttgctctttaaaatgagctttaggtcatcccaaaaacatctctattttctctgctcctttctgtcatcccctcacttcctcccctgccaccctatactgttcttggtgatgatttttcagcaaatttcctaatatgtctaaattcatacattgccctgttctttcatcatcgcctctgttgtctcacaaatacagttttctagtgtttttttgggagaaaaggagaaattgcccatctactcacagatttggcataaactatatagagatgtagggattccattttagaaagtctaccagsatacagtacagttcttgaggaaggtgaaggtgaattaataaggtaatggaatataccttgtatgtgtttgtccagctaagcgattcttgtcccatttgcaaaactgagtcaggctacatagtcttatttttctatgagacctaactgggaggtacatcaagtaggggaaataaatcagcaattaagattcttcata

SEQ ID NO: 391177 - DNA, 562 bp, Homo sapiens
aacaatggtattctacctcctgctaagtagtagtataagattaataatacaaggccaggcgtggtggctttctctggtaatcccagcactttgggaggctgaggcaggaggctcacttgagcctaggagtaygagagcagcctgagcaacatagtgagaccccatatgtacaaaaaaaaaaaaaaaaaaagcctgatgtgctggcatgtgcctatagtcccagctatttgggaggctgaggcaagaggattggttgagcccaggaggtcaaggctgcagtgggctataccaaaaagaaaaaataaagattaataatatggcagtgatacacttagttacacagacagagtcccacaggaaattagagtcctgattcaaccacagattcaaaccagacattccctctacctgaatatttctagttctggaaacctcattggtcattgtagctaatcactttttaaagcaaacttttaatttataataatttgagaattatgtttaactttttttttgtcctttctggaaccacaaaatgtcccaggcttatcttgtatatgtt

SEQ ID NO: 391178 - DNA, 562 bp, Homo sapiens
aacaatggtattctacctcctgctaagtagtagtataagattaataatacaaggccaggcgtggtggctttctctggtaatcccagcactttgggaggctgaggcaggaggctcacttgagcctaggagtacgagascagcctgagcaacatagtgagaccccatatgtacaaaaaaaaaaaaaaaaaaagcctgatgtgctggcatgtgcctatagtcccagctatttgggaggctgaggcaagaggattggttgagcccaggaggtcaaggctgcagtgggctataccaaaaagaaaaaataaagattaataatatggcagtgatacacttagttacacagacagagtcccacaggaaattagagtcctgattcaaccacagattcaaaccagacattccctctacctgaatatttctagttctggaaacctcattggtcattgtagctaatcactttttaaagcaaacttttaatttataataatttgagaattatgtttaactttttttttgtcctttctggaaccacaaaatgtcccaggcttatcttgtatatgtt

SEQ ID NO: 391179 - DNA, 562 bp, Homo sapiens
aacaatggtattctacctcctgctaagtagtagtataagattaataatacaaggccaggcgtggtggctttctctggtaatcccagcactttgggaggctgaggcaggaggctcacttgagcctaggagtacgagagcagcctsagcaacatagtgagaccccatatgtacaaaaaaaaaaaaaaaaaaagcctgatgtgctggcatgtgcctatagtcccagctatttgggaggctgaggcaagaggattggttgagcccaggaggtcaaggctgcagtgggctataccaaaaagaaaaaataaagattaataatatggcagtgatacacttagttacacagacagagtcccacaggaaattagagtcctgattcaaccacagattcaaaccagacattccctctacctgaatatttctagttctggaaacctcattggtcattgtagctaatcactttttaaagcaaacttttaatttataataatttgagaattatgtttaactttttttttgtcctttctggaaccacaaaatgtcccaggcttatcttgtatatgtt

SEQ ID NO: 391180 - DNA, 481 bp, Homo sapiens
aaatatatatattctctatatagagaattctatatttaatatatarttgtataaattatatacatatactggagaattttataattttctctatgattttatgtatttataaatatacataaaattctatatataaaatatatataatttgtatatttatattgataattttatatctataaaaattatagaaaaatttttgagtttttttctttttaaaattttacatgaaaataatttttaaatgcttatttggttaagggtattgagctctctggcctttcttttaatgtgcacgcatttcttttgaaaaaaaagtgtgtgtgtgtgtatataattctacatatataatttagtgagagtggtctctctttcaggaaagtcaagaaagatcaaggactcagaaaaatccgttctattgattctaggacattttattttagtttctaatagttgaggtgaaatatttccatgatttaag

SEQ ID NO: 391181 - DNA, 473 bp, Homo sapiens
  misc_feature (1)...(473): n = A,T,C or G
nnnnnnnnnnnnnnnnnnnnnnnnnnnnnnttctctattcaacayagtaacagttctaatctttatttggattccttttctctgtaacatgttactgaacttgcctatttgcagagagcttagaggagggccacattcacctctttctttcctttctctcggggatcacaggcatgttaggttatatatctgaaaataattcagagattattcccaggcatagcaagcctgtgaggttccctccattttgtgctgtgttttacttatttgtggtgagggattaattctaggtctcatttctcccatgtgcacaaagcataggctttgtgatctagttttaaatctaaataaaaattcttctgagcaccactttttaaattaaatttgatggtctacattaccatagtataccaacagaaattcttagatcctaataccaaatggtgagttgaattattgcattcaaaagttat

SEQ ID NO: 391182 - DNA, 320 bp, Homo sapiens
tacattaagaaatccttaatattaagtatggacaattgctaggatgggacagatgcattttccagcataactgtctttaaagcacactttacatgtcaattttatatttgcttatatgttatttaggcaacactactcaatatacaatattagcaaattgcttattttgttttccatatggaacacacagtwgttctttgaatatatattttccactctttagaagaacttcatcttcttcctatgtttgttaaatattaaaaggaaataaaaaatacttgcacgttaaattccgttttaaaggtatttgtacctgaatt

SEQ ID NO: 391183 - DNA, 608 bp, Homo sapiens
caccagaccaaaaatagatgggatgtctaaaaataattccaaatcataatagtattggtagtgatcttccttggtgaatagctggggcaacattctacatatagaaaagacaacggctttagtgatgagtgttgaaggatggtgtgaggcaagatrcataacaacatatttgttattatttacccaggtagccctacaatttcaaccacatccttgccaaagctttggtgactagagtgctctgggatcctgagaagaagaaaagaaaatgagaccaatattgagacaggacaaattaaattattgaagatcttcgtgtctgattaatttgtttcatgattagttttcagaatacagagttttatgaggaatagacataagataggtacattctgaggaagaaaaagagaagtagaccctaaaaatgtgggtatatgatcttgctgaggcagtcaggctagatacagagaagctccaagaaggcctagggcagggggagaagattgagagagggctgcatgggtgggaaggaaagagccctcaaagaatgaagagataatgtgtgtggtttcacaaaaggtcaatctaagagaaaggaacaatcatag

SEQ ID NO: 391184 - DNA, 320 bp, Homo sapiens
tacattaagaaatccttaatattaagtatggacaattgctaggatgggacagatgcattttccagcataactgtctttaaagcacactttacatgtcaattttatatttgcttatatgttatttaggcaacactactcaatatacaatattagcaaattgcttattttgttttccatatggaacacacagtagttctttgaatatatattttccactctttasaagaacttcatcttcttcctatgtttgttaaatattaaaaggaaataaaaaatacttgcacgttaaattccgttttaaaggtatttgtacctgaatt

SEQ ID NO: 391185 - DNA, 571 bp, Homo sapiens
acgtaaccgcttggctaggagggattgacctacccgccatgggtttccttagtaatggcacagattggactgaggagccaagcaacactacatatcactccttgactggaaaagaatgttacgaattatactcatgtttgtctcattatttackaattctaggatgcaaagccagaatacaagcagcaaccactacaccagacaaaccttttgctgcacacatctgtattcttcaatcaacaaaacctgacacaaacaaaaagaaaatggggagatgtcagagatcagtcagcatggtgggaaaaattatagggaaagacccaaaccttcttggaaggctgggatgtttagcacagcttcaggacagaataaaagctgaaggcagctaattcccttaccctgaagcagaaggcaaatggtaaataacatgggaatataaagatccttatctagataaattggttcacttatgtctccagaaaccaacctctgatcatttgcacagaggactgctctctattcggggggtcagcagtgttaatcacccacaaactgtgcttgctccaggcct

SEQ ID NO: 391186 - DNA, 571 bp, Homo sapiens
acgtaaccgcttggctaggagggattgacctacccgccatgggtttccttagtaatggcacagattggactgaggagccaagcaacactacatatcactccttgactggaaaagaatgttacgaattatactcatgtttgtctcattatttactaattctaggatgcaaagccagaatacaagcagcaaccactacaccagacaaaccttttgctgcacacatctgtattcttcaatcaacaaaacctgacacaaacaaaaagaaaatggggagatgtcagagatcagtcagcatggtgggaaaaattayagggaaagacccaaaccttcttggaaggctgggatgtttagcacagcttcaggacagaataaaagctgaaggcagctaattcccttaccctgaagcagaaggcaaatggtaaataacatgggaatataaagatccttatctagataaattggttcacttatgtctccagaaaccaacctctgatcatttgcacagaggactgctctctattcggggggtcagcagtgttaatcacccacaaactgtgcttgctccaggcct

SEQ ID NO: 391187 - DNA, 559 bp, Homo sapiens
cttggttgccaagcactggtggtgaactttgtcttcagctcttcatgatttggatgccagactttcatgataatcctttcaatgttaacggcatagacagtatgtgtaggtatgacttccctgtgtacccgcagagcttcaaaaagttcatacatgttcgctgcagataaagatgcagatagagtgtctccagagcatgccagmaggaatgcagcctgctgctcggcttcatcaggaggtgggtgagaagccggattctgaccagcacagggagcagtaaaagcttgagggctttatattaagttgttctaagctactacattattcttcaggtatggctgtggggtcaaattactgccaaaggcatatttaaaatggtcatctcgtaaccgataagctttccttcttgacacaactgatgtcagtatatctttaggatgattctccacagcatagacaagagctgaaatagcctcctcggtgacattgtccagcccatgctcataagcagtcactgtcattctcccttcaagccagccttgaatgagaagcatcatgg

SEQ ID NO: 391188 - DNA, 575 bp, Homo sapiens
aagccacatacactcaatgtcagcttgtacaagtagctgagagtggggctgtaccatgcaaagccataggggccgagctgcccaccaccatgtgagcctacgttttgcatcaacataacctggatgtgagacatgaagtcaaagatcatttttgagctttcagatttaatgactgccctattaggttttggacttgcaataggtccagcagcccctytgtcctagacaatctctcttacttggaatgggtatttttatccaatgcctgtaccccattgtatctaggaagcaaccaacttgcttttgattttgcaggcttataagtggaaggaactttccttgtccccctgagatgagactttggacttggattttgagttaatgctggaatgagttaagattttggggaactgttggcaggacataattgtgttttaaagtgtaaggacctgagatttggaagcagtcagggtagaacgatatggtttgaccgtgtccctgcccaaatctcatattgcattgtagttcctataatcccatgttgtgggagggatgaggtggacataaatgaatca

SEQ ID NO: 391189 - DNA, 575 bp, Homo sapiens
aagccacatacactcaatgtcagcttgtacaagtagctgagagtggggctgtaccatgcaaagccataggggccgagctgcccaccaccatgtgagcctacgttttgcatcaacataacctggatgtgagacatgaagtcaaagatcatttttgagctttcagatttaatgactgccctattaggttttggacttgcaataggtccagcagcccctctgtcctagacaatctctcttacttggaatgggtatttttatccaatgcctgtaccccattgtatctaggaagcaaccaacttgcttttgattttgcaggcttataagtggaaggaactttccttgtcccccygagatgagactttggacttggattttgagttaatgctggaatgagttaagattttggggaactgttggcaggacataattgtgttttaaagtgtaaggacctgagatttggaagcagtcagggtagaacgatatggtttgaccgtgtccctgcccaaatctcatattgcattgtagttcctataatcccatgttgtgggagggatgaggtggacataaatgaatca

SEQ ID NO: 391190 - DNA, 575 bp, Homo sapiens
aagccacatacactcaatgtcagcttgtacaagtagctgagagtggggctgtaccatgcaaagccataggggccgagctgcccaccaccatgtgagcctacgttttgcatcaacataacctggatgtgagacatgaagtcaaagatcatttttgagctttcagatttaatgactgccctattaggttttggacttgcaataggtccagcagcccctctgtcctagacaatctctcttacttggaatgggtatttttatccaatgcctgtaccccattgtatctaggaagcaaccaacttgcttttgattttgcaggcttataagtggaaggaactttccttgtccccctgagatgagactttggacttggattttgagttaatgctggaatgagttaagattttggggaactgttggcaggacataattgtgttttaaastgtaaggacctgagatttggaagcagtcagggtagaacgatatggtttgaccgtgtccctgcccaaatctcatattgcattgtagttcctataatcccatgttgtgggagggatgaggtggacataaatgaatca

SEQ ID NO: 391191 - DNA, 575 bp, Homo sapiens
aagccacatacactcaatgtcagcttgtacaagtagctgagagtggggctgtaccatgcaaagccataggggccgagctgcccaccaccatgtgagcctacgttttgcatcaacataacctggatgtgagacatgaagtcaaagatcatttttgagctttcagatttaatgactgccctattaggttttggacttgcaataggtccagcagcccctctgtcctagacaatctctcttacttggaatgggtatttttatccaatgcctgtaccccattgtatctaggaagcaaccaacttgcttttgattttgcaggcttataagtggaaggaactttccttgtccccctgagatgagactttggacttggattttgagttaatgctggaatgagttaagattttggggaactgttggcaggacataattgtgttttaaagtgtaaggacctgagatttggaagsagtcagggtagaacgatatggtttgaccgtgtccctgcccaaatctcatattgcattgtagttcctataatcccatgttgtgggagggatgaggtggacataaatgaatca

SEQ ID NO: 391192 - DNA, 412 bp, Homo sapiens
tgcaattgcttttcacattttcatcatgaaatatttctatgtccagaatggtattacctggattgcctcccagggtttgtatggtggggttttacatttaagtctttaaatccatcttgcattgattttcgtatgcgrtgaaaggaaggggtccagtttcaatcttctgcacatggctagcgcgtttatcccagcaccatttattgaatagagagttctttccccatgaatgtttttgtcagcgttgtcaaagatcagatagttgtaggtatttggcctcatttatgagctctctatttggttccattgatctatgtgtttgtttttgtcctagtagccctgtagtatagtttggagtctggtcaggtgatgcctccagctttgttctttttggttaggattgctttgactc

SEQ ID NO: 391193 - DNA, 412 bp, Homo sapiens
tgcaattgcttttcacattttcatcatgaaatatttctatgtccagaatggtattacctggattgcctcccagggtttgtatggtggggttttacatttaagtctttaaatccatcttgcattgattttcgtatgcgatgaaaggaaggggtccagtttcaatcttctgcacatggctagcgcrtttatcccagcaccatttattgaatagagagttctttccccatgaatgtttttgtcagcgttgtcaaagatcagatagttgtaggtatttggcctcatttatgagctctctatttggttccattgatctatgtgtttgtttttgtcctagtagccctgtagtatagtttggagtctggtcaggtgatgcctccagctttgttctttttggttaggattgctttgactc

SEQ ID NO: 391194 - DNA, 581 bp, Homo sapiens
aaaattaaaatctacatccaatggcacagatgcaagttgatgagtttacaaacattatctctgctctccccctctctgcagtgccctagttgtagcctggaccttggcttcttggttcttgtcattatgaaaagtttccagcctcattagcattggtgtgctgggaggtgctcacctctgcgagggtgagttgacaccacacttttgccttctgtaggggtccttatcaaacaaataaagcttcctctgttggatgcattttcatagccggttggataattttaatgtgttttttgatgcatggcacatttatgttgtcagaacaacagttttacgtgatttgtacaagagctttttatggcttttaaaaatgattctaaaattcagaggaggtttagcatgagtgatgggtaaatgggcccagtagcagaaattgaatatcaggcaaaagtctttccacttgtgaatgtaattactgtaactttggtaaggtctaatctgctagtttttaagctaagaaggagaactggacataagrttatagcttataaataaattatgtattttgaacacaaaagcca

SEQ ID NO: 391195 - DNA, 621 bp, Homo sapiens
acatgtaaatcatttaaaagagagggtggcagtattaagtagttaacaaatttcagtattaatatttattatttggaacacatattgaataacaatacaaaggaatattttgctaatcctctttgatattatctttcattatcatrtattatcaagtattttgtgagtaatattttcttccatattttaatattattcttgtgtggttatatattaatttttgtgtatgtttgttaaattatataaaagtagcattatataaaatacacatatttcataaatgtataattatgcaagagcctttacattagtttgttttgaacataattttatattttagatacctatccatattgacgcaggtagacagtactgattttacctgttgcataatattttgccatgagactatttcataatttgtatatttgtttccttgatggagttttagattatatcaacaatttcctttacaagcaaagctaaaattagatccttatacatgatttctattcacatgtggatatattatgaagcactgtaatgtcacaaaatagaaacatctttttaaaataggtatttccatatctttttaggagggttttaacctatcagctttat

SEQ ID NO: 391196 - DNA, 621 bp, Homo sapiens
acatgtaaatcatttaaaagagagggtggcagtattaagtagttaacaaatttcagtattaatatttattatttggaacacatattgaataacaatacaaaggaatattttgctaatcctctttgatattatctttcattatcatatattatcaagtattttgtgagtaatattttcttccatattttaatattattcttgtgtggttatatattaatttttgtgtatgtttgttaaattatataaaagtagcattatataaaatacacatatttcataaatgtataattatgcaagagcctttacattagtttgttttgaacataattttatattttagatacctatccrtattgacgcaggtagacagtactgattttacctgttgcataatattttgccatgagactatttcataatttgtatatttgtttccttgatggagttttagattatatcaacaatttcctttacaagcaaagctaaaattagatccttatacatgatttctattcacatgtggatatattatgaagcactgtaatgtcacaaaatagaaacatctttttaaaataggtatttccatatctttttaggagggttttaacctatcagctttat

SEQ ID NO: 391197 - DNA, 566 bp, Homo sapiens
atcctgcaatgctcagattgccagctcacaggcacatcccctccttcaacaggtgttaaccctagaggactagatcctcatcagttatggcaaacaaawgttacacatgcccctgattttggaaaactaagatatttacatgtatccgttgatacaaattcctacttaattagcactcatgcttttcctgcagagtctgctccatatgtcatcaaacatcttaacttttgtgtttatggggtggcccacaaaaattaaaagtgataatgttctggcttatgccagctcacaatttcaacaattttgtcacacatggaatgtgcaacattccaagagtatcctgtacaacccccagggacaggccatagtagaacatgaccactccacccttaaaaatatgctcagaaaacaaaaaagggggaatgtgtgtaaggactctgcaacactactggcacaagccttatgtacccttaattttttaaatttagatggtaaatttcaatcagatatagaaaagcactttgcaaatattgctcaagatataaaaccttcagttttatggaaag

SEQ ID NO: 391198 - DNA, 574 bp, Homo sapiens
cttaacttttgtgtttatggggtggcccacaaaaattaaaagtgataatgttctggcttatgccagctcacaatttcaacaattttgtcacacatggaatgtgcaacattccaagagtatcctgtacaacccccagggacaggccatagtagaacatgaccactccacccttaaaaatatgctcagaaaacaaaaaagggggaatgtgtgtaaggactctgcaacactactggcacaagccttatgtacccttaattttttaaatttagatggtaaatttcartcagatatagaaaagcactttgcaaatattgctcaagatataaaaccttcagttttatggaaagatgtaaatagtaatatattgtgtagtccaaatgatttgctaacatggggaagacgttatgcttgttttcacatcccctcacgtcctctttggattccagcagggggcaacaaaccttaccatggtgtagctaggacccaactcagtaccaggaatgaagaaaatgaccctgtaggtcctgcaaccctggacaatgtggcttcctgagatgacacaggctccagacat

SEQ ID NO: 391199 - DNA, 599 bp, Homo sapiens
atgaactgaatctagttaaagtacacaaggcaatgagttttgacaaacgtacataaccatgaaaccaccacaatgaaaaatcagaacctttctaaatcaccgaaagattgttccttccatgtagaagttgatcgtatgctctgaatccttgacaaatgatttacttgtcaccatagatgagatctcrtttgctagggtttcatattaatggaaccacatagtgtgtactcttttttacttattcttcataatgattctgacattcattcatgtttttgcatgtatccatagttcctttgtattttgcggtggtactctattttgctaatgaattcacctgctgctggatgtttaggcagttaccaagttgaggctattgtaaataaggtattgctgaaacaggataatctcccttattcccctcacagggtgtgtgacagggatgtgcttcacttcttcggtgccctgatgctcaaaccactatggggagcatgcagatgggcaggatgtgggagcgttttggtggctcccaccccatggcagtgtctagggttcggtgtttacagctcccgaagccctagtcagcgtgtgttacagtg

SEQ ID NO: 391200 - DNA, 588 bp, Homo sapiens
tggtgttcacccattttcaattcctgtaaatggcatgataatatagttgtcaggctagtcccttttcttccatgatgcttcatgrttttagcatctagttatatttcactatgtacacataaaatgtttattgtaactattgcctagacgttcatacttttcatctctcactttcaatttctagtcgcccactgatagaaaaagtaattaactgtccattagcatgaatgacgtgtggataaacatccctttaaaccttgacatctgaacccatttgaaatgatcttctgagctctgcagtcacgagtgagtgaggttaagttgctgtgtcatagaatgcgtacatacttaatttgactaaattaggccagattgtcctctacaatatgtgtggcatattgtttccaatcatcccatgatcttgatgtattgttctattagtactcagcaatattcttcttaatcgatataaatggttttcactttaaattcccctttggttgatactaatatttgctttaatttgcatttccctgaatagaattttctttccactctatgttattataaacagttgtgccatttcta

SEQ ID NO: 391201 - DNA, 588 bp, Homo sapiens
tggtgttcacccattttcaattcctgtaaatggcatgataatatagttgtcaggctagtcccttttcttccatgatgcttcatggttttagcatctagttatatttcactatgtacacataaaatgtttattgtaactattgcctagacgttcatacttttcatctctcactttcaatttctagtcgcccactgatagaaaaagtaattaactgtccattagcatgaatgacgtgtggataaacatccctttaaaccttgacatctgaacccatttgaaatgatcttctgagctctgcagtcacgagtgagtgaggwtaagttgctgtgtcatagaatgcgtacatacttaatttgactaaattaggccagattgtcctctacaatatgtgtggcatattgtttccaatcatcccatgatcttgatgtattgttctattagtactcagcaatattcttcttaatcgatataaatggttttcactttaaattcccctttggttgatactaatatttgctttaatttgcatttccctgaatagaattttctttccactctatgttattataaacagttgtgccatttcta

SEQ ID NO: 391202 - DNA, 568 bp, Homo sapiens
gttttcactttaaattcccctttggttgatactaatatttgctttaatttgcatttccctgaatagaattttctttccactctatgttattataaacagttgtgccatttctaaatagtatatagcgatattttaaatttaaactgtaaatttgttattaggcaaatttaattcatttatagtcactgttacaaatgtcccatttgtagaatttaaacgttagagttatcaaataatctttatttgtgtgatatttcctcttcattcacagtccactttttgggttaactgcctatttttgtaaatctatttatcaaaattattttgtattcttgaacccacctcccgggttcaagcaattctctgcctcagcctccygagtagctgggattacaggcacctgccaccgcacctggctaatttttgtatttttagtaggaatggggttttaccatcttggccaggctggtcttgaactcctgacctagtgatccacccaccttggcctcccaaagtgctgggattataggcgtgagccaccatgcccggtctattttgtgttctttag

SEQ ID NO: 391203 - DNA, 553 bp, Homo sapiens
agcaacgtgccttatcaaagccatcaagggatagtcctctagcaagatggaacttaaagtctcaagcaatgcaattatggaagtaacaacccatcacctttgacgtattctctttgttctraagaagcacagctctaacccatcatctacgagaggggattatcaggagcataaatacaagtaaggacagtggggatcattgtgcagcctgttttccacaaaaagaaaagatgagtaatgtaaaaatgacctccaagaaccaagaatcaagatgatatactaggatacagtgagtttcagattaaatgtaaagtttagctaataaaagagtggtaataaaaacaattccacattaaaaaaatcattgtaaaatatacatttaagttgtacactgaataatcgtatagttttacatttctatcaatggtattcacttaaaactgtaacaggtatgtattataaagataagaaatgattatatttttcatttagtattaggtatatctcccagtgctatccctcccccctcccccaaccccacaacatgtataca

SEQ ID NO: 391204 - DNA, 553 bp, Homo sapiens
agcaacgtgccttatcaaagccatcaagggatagtcctctagcaagatggaacttaaagtctcaagcaatgcaattatggaagtaacaacccatcacctttgacgtattctctttgttctaaagaagcacagctctaacccatcatctacgagaggggattatcaggagcataaayacaagtaaggacagtggggatcattgtgcagcctgttttccacaaaaagaaaagatgagtaatgtaaaaatgacctccaagaaccaagaatcaagatgatatactaggatacagtgagtttcagattaaatgtaaagtttagctaataaaagagtggtaataaaaacaattccacattaaaaaaatcattgtaaaatatacatttaagttgtacactgaataatcgtatagttttacatttctatcaatggtattcacttaaaactgtaacaggtatgtattataaagataagaaatgattatatttttcatttagtattaggtatatctcccagtgctatccctcccccctcccccaaccccacaacatgtataca

SEQ ID NO: 391205 - DNA, 553 bp, Homo sapiens
agcaacgtgccttatcaaagccatcaagggatagtcctctagcaagatggaacttaaagtctcaagcaatgcaattatggaagtaacaacccatcacctttgacgtattctctttgttctaaagaagcacagctctaacccatcatctacgagaggggattatcaggagcataaatacaagtaaggacagtggggatcattgtgcagcctgttttccacaaaaagaaaagatgagtaatgtaaaaatgacctccaagaaccaagaatcaagatgatatactaggatacagtgagtttcagattaaatgtaaagyttagctaataaaagagtggtaataaaaacaattccacattaaaaaaatcattgtaaaatatacatttaagttgtacactgaataatcgtatagttttacatttctatcaatggtattcacttaaaactgtaacaggtatgtattataaagataagaaatgattatatttttcatttagtattaggtatatctcccagtgctatccctcccccctcccccaaccccacaacatgtataca

SEQ ID NO: 391206 - DNA, 553 bp, Homo sapiens
agcaacgtgccttatcaaagccatcaagggatagtcctctagcaagatggaacttaaagtctcaagcaatgcaattatggaagtaacaacccatcacctttgacgtattctctttgttctaaagaagcacagctctaacccatcatctacgagaggggattatcaggagcataaatacaagtaaggacagtggggatcattgtgcagcctgttttccacaaaaagaaaagatgagtaatgtaaaaatgacctccaagaaccaagaatcaagatgatatactaggatacagtgagtttcagattaaatgtaaagtttagctaataaaagagtggtaataaaaacaattccacattaaaaaaatcattgtaaaatatacatttaagttgtacactgaataatcgtatagttttacatttctatcaatggtattcacttaaaactgtaacaggtatgtattataaagataagaaatgattatatttttcatttagtattaggtatatctcccartgctatccctcccccctcccccaaccccacaacatgtataca

SEQ ID NO: 391207 - DNA, 457 bp, Homo sapiens
accctaaaacttataataataaaaaaagattatatttttatcccttcaattccaaagtgcttattgaataattacagaaacaattgctactaatagttttagctttgactttttattatcaaacaattatttgacmgttgttcatctatgcgtatataatacgcaaccatatatacacaatactcatcacacatatacaaactccaccatgcaagaaagagctaaatggttaaacgcacaatgggctttttcagtgcaagtctagcaatttaaagtagaagaaggaaaaatgtcacagaaatgcgctgagaaaaatgggagagagtggtgctgtttttctcacatatacatatatcatttatataaatgtatcatctgagagcattttggaaactctttttcattacctttccactttgctcacctgaataatctttgtattctcaatatttatgca

SEQ ID NO: 391208 - DNA, 457 bp, Homo sapiens
accctaaaacttataataataaaaaaagattatatttttatcccttcaattccaaagtgcttattgaataattacagaaacaattgctactaatagttttagctttgactttttattatcaaacaattatttgaccgttgttcatctatgcgtatataatacgcaaccatatatacacaatactcatcacacatatacaaactccaccatgcaagaaagagctaaatggttaaacgcacaatgggctttttcagtgcaagtctagcaatttaaagtagaagaaggaaaaatgtcacagaaatgcgctgagaaaaatgggagagagtggtgctgtttttctcacatatacatatatcatttatataaatgtatcatctgagagcattttgkaaactctttttcattacctttccactttgctcacctgaataatctttgtattctcaatatttatgca

SEQ ID NO: 391209 - DNA, 545 bp, Homo sapiens
tgtccactaacctgtggaaatgtgttatggatttagattcagtgttgagtctatatagcatctcacagttcagatcctttagggcagcactatttactgaagcagcatgggacattgtcacctttcaatgaaaatgcctcggatgycatgttaccacattgcctgtaggacttgcttcactgctttctggtagggttattttcaataaggtataaataatttattaaaaaagcacaaaaagagtatttatggtgtgtatttatgtatatatttctatatattagcacaaagtatctctgcatgtgtgcattttcatatattagcacaaaatgcctctctcatgagtgtgtgtgtacatacacatagagtattcattggtagaaatttaggtgacaaaatgtggaaaaattgaacatacttttagcaatgttgggtggtgccattggagtggtctcaaggtctttctgcagttttgtattacatagatttgtggttgccttattaagcgaagtttctgattgcatgtactgctgaaatatctgcct

SEQ ID NO: 391210 - DNA, 545 bp, Homo sapiens
tgtccactaacctgtggaaatgtgttatggatttagattcagtgttgagtctatatagcatctcacagttcagatcctttagggcagcactatttactgaagcagcatgggacattgtcacctttcaatgaaaatgcctcggatgtcatgttaccacattgcctgtaggacttgcttcactgctttctggtagggttattttcaataaggtataaataatttattaaaaaagcacaaaaagagtatttatggtgtgtatttatgtatrtatttctatatattagcacaaagtatctctgcatgtgtgcattttcatatattagcacaaaatgcctctctcatgagtgtgtgtgtacatacacatagagtattcattggtagaaatttaggtgacaaaatgtggaaaaattgaacatacttttagcaatgttgggtggtgccattggagtggtctcaaggtctttctgcagttttgtattacatagatttgtggttgccttattaagcgaagtttctgattgcatgtactgctgaaatatctgcct

SEQ ID NO: 391211 - DNA, 545 bp, Homo sapiens
tgtccactaacctgtggaaatgtgttatggatttagattcagtgttgagtctatatagcatctcacagttcagatcctttagggcagcactatttactgaagcagcatgggacattgtcacctttcaatgaaaatgcctcggatgtcatgttaccacattgcctgtaggacttgcttcactgctttctggtagggttattttcaataaggtataaataatttattaaaaaagcacaaaaagagtatttatggtgtgtatttatgtatatatttctatatattagcacaaagtatctctgcrtgtgtgcattttcatatattagcacaaaatgcctctctcatgagtgtgtgtgtacatacacatagagtattcattggtagaaatttaggtgacaaaatgtggaaaaattgaacatacttttagcaatgttgggtggtgccattggagtggtctcaaggtctttctgcagttttgtattacatagatttgtggttgccttattaagcgaagtttctgattgcatgtactgctgaaatatctgcct

SEQ ID NO: 391212 - DNA, 659 bp, Homo sapiens
tgagtgtgtgtgtacatacacatagagtattcattggtagaaatttaggtgacaaaatgtggaaaaattgaacatacttttagcaatgttgggtggtgccattggagtggtctcaaggtctttctgcagttttgtattacatagatttgtggttgccttattaagcgaagtttctgattgcatgtactgctgaaatatctgcctctgtcatcagctctcctacttcattgttattctcttattagcacttaactcacgcaaaagaagagaaaaagaaatatctatgttaaaaattgttttgatttcaagagagagattttacaattctgaaacattttctgttttaaaccctggtttcttgaatgcttatattttcttcttcagccattcttytacacaaatctcagataaaagtaatactcaagttcttcagatagataatttatctagtattgctaaagcagtcatggtaggtacattgcatagcaatgtgcattaaaaatataatttattttaggaatctagttagggaaatgttgctctcctcagaaatattttgcctagatacatagaaatggagtggtactaattgattatactgaagaagctgtgatccacaaccatcttaagctgatatattaaattatagaactattaca

SEQ ID NO: 391213 - DNA, 617 bp, Homo sapiens
ctacctgcatcaggaataagaactccttcccctcccgtgcccgggtgtgctctcgccattcctccattcatcattcacacccttctatagaagtaaaaattgccttgctgagaaaattaatgttcaagttctatttctttgtggcactgaggaacaagaatttctaaaaatgggcagtcagagggtaaaaacagctctatagacaggcacatcatagaaagactacagtaaactgttacyggtagagtctaggtcaagggtgaattctcccatgcacataagaaagaaataacacaaagtttatgatcttccttccaaatatcataaaagaggacttactatcgaggacggcataacctaggtatcagaaattcgtaaggatgaaaaaaaaaatgaagtccaatctgtcctagaacataggtgcaaaatcttcatataaaatattaacaaatcaaaatcattaatatagagtagaatattgtatcacaagtacaaatatcccaatccaaaaaaaacaagagttaattaaacaggtaataaaatatataaataaaataatgatatgtttttaaaaattaatatatagctttggtgaaattttagaaaaagagaactca

SEQ ID NO: 391214 - DNA, 298 bp, Homo sapiens
gaattgttgaaattgtgagctggcataagctggaccattaccagttttaacttttgcatttatgggatggcccacaaaaattagaagatgtttaatgacatatcgagtggactctccaggaagggcgtgtgcactaattagatgaatgttggtatcaattgatacatatacatatcttagttttctaaattcasggatgtgtgtaacatctgtttgccataattgtttaggttcacctgttgaaggaagggatgtgcctgtgagctggcaatctgggcattgcaggataatttgttta

SEQ ID NO: 391215 - DNA, 449 bp, Homo sapiens
tctacagattcaatataatttatatgaaaattacaatgtyctgtttcacagaaatagaaaaatcctaaaattcatctagaaccagaaaagaccccaaatcatcaaagcaaccttgagctaaaataacaaagctgaagacatcacactccctaatctcaaaatattttctaaagctactgtaaagaaaacagcatgatactgtcataaacacataaaagaaaattggcacaatatagcacaaaaataaaataaattgaagaaattgaatgaattataaaaaacttacccataaagaaattgtcaatccctggtggttccactggtgaattctattacacattcaaggaagaagtaactttttcatatacactctttcacaaaatgttctattttgttggaatatgccccaacttgttttatgcggctaccagtaccctgatatcaaaaaa

SEQ ID NO: 391216 - DNA, 586 bp, Homo sapiens
aatctaaagatatatattttactcctatttatctttggtttttcaaattatttttcttatagttttgcgtaaggtgaggggttttayctgggttagtaaaaaatgatttccagcaaacattgaatgtggtaaaattcaactgggtcaagaagacttagccataacttcccttcaagctaaatacataataaaatatgtgtaaatatgtgtaaaatcacctgattcataaattctgattgctgacaatactgaaatacatttattaaatccttctagactttatttttttaaagcgagatcattatataatttaaatggcttatttgtgatatctaacaaaatagaaacttaaatggtttgtgtgttgcctgtagtatatttctattatatagaggcccattaaatatatttcaaagactacttaatgttatttataaatgttaatcttttttccatccttcatgatgctaaataaggaagtttataaaaatattttaaaactttgtcattccccacttatagcgcagttgacttctttaactactattattctacatagtttgatcctatgttatcttctgtactt

SEQ ID NO: 391217 - DNA, 626 bp, Homo sapiens
ataaaaatgagcaaaaggtctaaatagacatttctcaaaaaaggcattcaaatggcaaacaggtatatgaaaatgtggycaacatcactgatcaccagagaaatgcaaatcaaaactataataatatatcatctcctcccagtaaaaattgcttttatccaaaagaaaggcaatattgaatgctggtgaggatgtggacaaatggggaacccttgtacactgctgctggggatgcaaaatggtgcagctgttattaagattccttaaaaactatagattgaaccaccacaagatccaacaattctactactgggtatttatccaaaggaaatgaaatcagtatgttgaagagttatctgcattcccaagttcattgcagcactattcacaatagccatgatttggatgaaacctaagtatccatcaacagattaatggataaagaaaatatggtacctatagacaatggggtacctattcagctacttaaaaaatgagctccagttatttgtgataatacagatgaaactggaggaaattatgttaagtaaaacatgccaggcatagtaagacaaactttgcatgttctcactcacttgtgggttctaaaacttaatacaattgaa

SEQ ID NO: 391218 - DNA, 626 bp, Homo sapiens
ataaaaatgagcaaaaggtctaaatagacatttctcaaaaaaggcattcaaatggcaaacaggtatatgaaaatgtggtcaacatcactgatcaccagagaaatgcaaatcaaaactataataatatatcatctcctcccagtaaaaattgcttttatccaaaagaaaggcaatattgaatgctggtgaggatgtggacaaatggggaacccttgtacactgctgctggggatgcaaaatggtgcagctgttattaagattccttaaaaactatagattgaaccaccacaagatccaacaattctactactgggtatttatccaaaggaaatgaaatcagtatgttgaagagttatctgcattcccaagttcattgcagcactattcacaatagccatgatttggatgaaacctaagtatccatcaacagattaatggataaagaaaatatggtacctatagacaatggggtacctattcagctayttaaaaaatgagctccagttatttgtgataatacagatgaaactggaggaaattatgttaagtaaaacatgccaggcatagtaagacaaactttgcatgttctcactcacttgtgggttctaaaacttaatacaattgaa

SEQ ID NO: 391219 - DNA, 626 bp, Homo sapiens
ataaaaatgagcaaaaggtctaaatagacatttctcaaaaaaggcattcaaatggcaaacaggtatatgaaaatgtggtcaacatcactgatcaccagagaaatgcaaatcaaaactataataatatatcatctcctcccagtaaaaattgcttttatccaaaagaaaggcaatattgaatgctggtgaggatgtggacaaatggggaacccttgtacactgctgctggggatgcaaaatggtgcagctgttattaagattccttaaaaactatagattgaaccaccacaagatccaacaattctactactgggtatttatccaaaggaaatgaaatcagtatgttgaagagttatctgcattcccaagttcattgcagcactattcacaatagccatgatttggatgaaacctaagtatccatcaacagattaatggataaagaaaatatggtacctatagacaatggggtacctattcagctacttaaaaaatgagctccagttatttgtgataatacagatgamactggaggaaattatgttaagtaaaacatgccaggcatagtaagacaaactttgcatgttctcactcacttgtgggttctaaaacttaatacaattgaa

SEQ ID NO: 391220 - DNA, 560 bp, Homo sapiens
taagtattcattagcactatttgcttatatgaatatgcatttgtagagtgactgtctacacaaactagaataattgagaaatcctaacgaaacattaaatagctctctgtatacccagaatacatttaaaggtgctattctatgctctaattaaatattttatatttttatattaatgtgtgatatttacccttgtaatagggtataatttctattctgaattgaagagccagaattcatgatcattgatgaaaaatgtgtttattataccgaacttttcaactatttttcacatggtgctttttccaccagggtcttctgcacacttttgttcatgaattgtctaatttaaatggctatttagaaaagcaaaggttgcgaaaacaagtaaagaattagtctcctcaatctaagacacctcctaagacaaaatggctaaatgkaacatggtctgctggattaggtactgaagctcaaaaaggtacactgtagaaatgttggtgaaacccagataaaacctatagagttagtcatgagtattttagtatatgctaatttct

SEQ ID NO: 391221 - DNA, 397 bp, Homo sapiens
cacagtttcaatacaattacatgtttgctatttttctactgtattatcagatatttgmcaggtactggggttaagaggaggaataaaaatgacctgacccacagagatattatatcctatgataaagatataccaactgaaaaacaacatggtccctaaagtgtaattttaatgactttttttcttagctaaactgaaaatacaaacctctatttgtgttcttttaagactacttaaatgcattgtaatataacttaaaagctaattctgcaactcttcactaagtgtatggcttcatttcacaatgagatgcttgagtagatttgattcttgtgagtattctttgaattaagatggattgcagtatctgttctcatcctagtcatttatttgtctt

SEQ ID NO: 391222 - DNA, 553 bp, Homo sapiens
ataatcacctgctttcaagcaccaccatggctgtaaatactgtgatggatagggtggcayattttgagaaaagtcaaaaccatagcatttgattgatcaacatctggattctatcattgctgacctatactttgatgtcacaaattaaaggtaagatgtcatttaaaccaagaagcagagaccagttatatctgtcttcaaatatttgaaaatttgtcaggttgaagatgagttaatttcaatccaaggttgtagtgagccacacttggactagaagaaggatcaggaaggtagatttcagctcaaattcaggaaaggcttgaattagaaccaactggaaatggaatagctcaccttatggggtaggcattgctggtctactgatgtgtgtaaccatttattaagacgttataaaagaatcagagcacaaattttagataaaagttatccaagtaccactttccgcatctcagggccccttgcacttcatgagactctagtctatgaacagtgctattcaccactaacctaacttatattttatatttgttca

SEQ ID NO: 391223 - DNA, 553 bp, Homo sapiens
ataatcacctgctttcaagcaccaccatggctgtaaatactgtgatggatagggtggcatattttgagaaaagtcaaaaccatagcatttgattgatcaacatctggattctatcattgctgacctatactttgatgtcacaaattaaaggtaagatgtcatttaaaccaagaagcagagaccagttatatctgtcttcaaatatttgaaaatttgtcaggttgaagatgagttaatttcaatccaaggttgtagtgagccacacttggactagaagaaggatcaggaaggtagatttcagctcaaattcaggaaaggcttgaattagaaccaactggaaatggaatagctcaccttatggggtaggcattgctggtctactgatgtgtgtaaccatttattaagacgttataaaagaatcagagcacaaattttagataaaagttatccaagtaccactttccgcatctyagggccccttgcacttcatgagactctagtctatgaacagtgctattcaccactaacctaacttatattttatatttgttca

SEQ ID NO: 391224 - DNA, 563 bp, Homo sapiens
ccagtaaaatgtggatttttggctacaggtgttctagccttgttatctagataatttttaatctcacttttgatttattctttgacacaaggcattatatgggtttgtgcttcttgatctccaaatattgaatattactttactctctgcttcatgatttattttcagtattattgggtcatggtcagagcaagtggcttatatatgctctactttaaaacatttgttaaaaaatattttcttaaaagtttttaaaatcaagtatggagtcagattttatgaatgaaaatattcattcaacaaatgttcattgaactcaattccatgacaggctcttttctttttcttttwttttttttgagatggaatcttgctctgtcccccaggctggagtgcagtggcttgatcttggctcactgcaagctccgcctcccaggttcatgccattctcctgcctcagcctcccgagtagctgggactacaggtgcccaccaccatgcctggctaattatttttgtatgtttagtagagacgcagtttcactgtgttagccaggatggtct

SEQ ID NO: 391225 - DNA, 626 bp, Homo sapiens
tcaattacctcccaccaggtccctcccacaacaaatggggtttatgggagctacaatttcagatgagatttggatggagacacagccaaaccatattattccaccccagcccctcccaaatctcatgccctcacatttcaaaaccaatcttgccttcccaacagtccctcagtctgaattagtctaagtcgaatttcagaattaactcaaaattccaggtccaaagtctcatctgagacaaggcaagacccttccgtctatgtgcatataaaataaaaaaagcaagttagttacttcctagatacaatgggggtacaggaattgggcaaacacagccattttgaatgagagaaattggccaaaatgaagacactacaaaccccatggaagtccaaaatccagcagagccctcaaatcttaaagctccaaaatgatctcctttgactccatgtctcacatccacataacaatgatgcaagaagtgggctcccatggccttggsgagctctgcctctgtggctctgagggtacagccaccctcctggctgctttcacaggctggcattcagtacctggggcttttccaggtgcccagtgcaagctgtcagtggatctaccattctgga

SEQ ID NO: 391226 - DNA, 280 bp, Homo sapiens
ctacaaaccccatggaagtccaaaatccagcagagccctcaaatcttaaagctccaaaatgatctcctttgactccatgtctcacatccacataacaatgatgcaagaagtgggctcccatggccttggcsagctctgcctctgtggctctgagggtacagccaccctcctggctgctttcacaggctggcattcagtacctggggcttttccaggtgcccagtgcaagctgtcagtggatctaccattctggagtctgaaggatggtagccctcttaga

SEQ ID NO: 391227 - DNA, 569 bp, Homo sapiens
atgttttaactaggttagtgcttttcctggatttccaattatagtacgtcttcattttatggtatgaacagcttacatttttgttccctgaattatgagttaaaaaaataagcacagttgtsgaattcagtcagattctcaaatctttttaaagaaacaatgcctccgacacagcacagaaagcagaagggctttgggtctgcatggacgttgtcattagtagaccttgtaacatgtcaaattttgaacataaagaacttattacaagtagtaattatttctatagattccttgataggagggaaagttttcacatcaaaactgaatacaaactgaaagcaatttcacctatattccttcctctacctacataggagaaattaattatctgtgaaaaaaattaatagctctcctattgtaatgcatcaaagcattattaactcattttcttgtctgaatttttgaattctcaacattagaatttctcatcaaggtagttgaataattggcattagtagaaattgaaattaatgttagatgctacatttcaaagattgttttggttgaag

SEQ ID NO: 391228 - DNA, 569 bp, Homo sapiens
atgttttaactaggttagtgcttttcctggatttccaattatagtacgtcttcattttatggtatgaacagcttacatttttgttccctgaattatgagttaaaaaaataagcacagttgtcsaattcagtcagattctcaaatctttttaaagaaacaatgcctccgacacagcacagaaagcagaagggctttgggtctgcatggacgttgtcattagtagaccttgtaacatgtcaaattttgaacataaagaacttattacaagtagtaattatttctatagattccttgataggagggaaagttttcacatcaaaactgaatacaaactgaaagcaatttcacctatattccttcctctacctacataggagaaattaattatctgtgaaaaaaattaatagctctcctattgtaatgcatcaaagcattattaactcattttcttgtctgaatttttgaattctcaacattagaatttctcatcaaggtagttgaataattggcattagtagaaattgaaattaatgttagatgctacatttcaaagattgttttggttgaag

SEQ ID NO: 391229 - DNA, 579 bp, Homo sapiens
gctaatttactgggtttgatctggtttaaggtcaattcagctcattgctatgttgagtcaactgactttgcagaaacttgccattaagtagacccaacaatcagatcaactctaccacatttaatttggatgaatcacccagatacaacctttggcaagaagatctcacttactcagcttctccagtcttgctttcttagattttcctttstttattcctagttggtaagcttgctgccacaaaggacaaaaaaataaaattggaaggaaggaattacatattttttcatttccattacaaaatcttgacaacacaaggagagatcaaacaggggcctttaacatagcaattgtcttttctctctctatggggaatggctatctttggtgaattattagaatggacagattctactctatttagtttctgtcagaagtcatgttaacagaaagaccatgtagtttttaccaaaatgtcaacaatgtggcatttccctgggatgtataaccaatggattttgtgctgggggaaatgtctgggtgaaggcctgagaaccattttgagttactcaaagcaca

SEQ ID NO: 391230 - DNA, 579 bp, Homo sapiens
gctaatttactgggtttgatctggtttaaggtcaattcagctcattgctatgttgagtcaactgactttgcagaaacttgccattaagtagacccaacaatcagatcaactctaccacatttaatttggatgaatcacccagatacaacctttggcaagaagatctcacttactcagcttctccagtcttgctttcttagattttcctttctttattcctasttggtaagcttgctgccacaaaggacaaaaaaataaaattggaaggaaggaattacatattttttcatttccattacaaaatcttgacaacacaaggagagatcaaacaggggcctttaacatagcaattgtcttttctctctctatggggaatggctatctttggtgaattattagaatggacagattctactctatttagtttctgtcagaagtcatgttaacagaaagaccatgtagtttttaccaaaatgtcaacaatgtggcatttccctgggatgtataaccaatggattttgtgctgggggaaatgtctgggtgaaggcctgagaaccattttgagttactcaaagcaca

SEQ ID NO: 391231 - DNA, 579 bp, Homo sapiens
gctaatttactgggtttgatctggtttaaggtcaattcagctcattgctatgttgagtcaactgactttgcagaaacttgccattaagtagacccaacaatcagatcaactctaccacatttaatttggatgaatcacccagatacaacctttggcaagaagatctcacttactcagcttctccagtcttgctttcttagattttcctttctttattcctagttggtaagcttgctgccacaaaggacaaaaaaataaaattggaaggaaggaattacatattttttcatttccattacaaaatcttgacaacacaaggagagatcaaacaggggcctttaacatagcaattgtcttttctctctctatggggaatggctatckttggtgaattattagaatggacagattctactctatttagtttctgtcagaagtcatgttaacagaaagaccatgtagtttttaccaaaatgtcaacaatgtggcatttccctgggatgtataaccaatggattttgtgctgggggaaatgtctgggtgaaggcctgagaaccattttgagttactcaaagcaca

SEQ ID NO: 391232 - DNA, 411 bp, Homo sapiens
acttgcaacatcaacaatgcatttggcccaggaactgctaatgaacatacagtgcagtgcttgttcaagaagttttgcaaaggagaagaggaagatgaggagtgtagtgaccagccattagaagttgacaacaaccaagtgggagcaatcatcaaagctcatccttttacaactacacgagaaggtgccgaagagctcaccattgaccattctatggtcatttggcatttgaagcaaactggaaaggtgaaaaagctcgataagtggatgcctcatgagctgaaccaaaaaaaacaaaaaacaaamaaaaaaaaaccatcgttttgaagtgtcatcttctcttactctatgcaacaaggaaacatttctcaattggattgtgatgtgccacaaaaagtggattttatatga

SEQ ID NO: 391233 - DNA, 569 bp, Homo sapiens
acaaccagctcaggggtaggaccaagaagcagctccaaagcgcttcccaaagccaaacttgcaaccaaaaaaggtcatggtcactgtttggtggtctgctgccagtctgatccactacagctttctgaatcctggcgaaaccattacatctcagaagtatagttggcaaatcgatgagataaaccgaaaactgcaaggcctgcagctggcattggtcaacagaaagggcccaattcttctccatgacaatgcatgtcacacaaccaatgcttcaaaagttgaacaaattgggctacaaagtgctgcctcatccaccrtatgcacccaacccctggtcaactgactaccacttcaagcatctcaacaactttttgcagggaaaatgcttccacaaccagcaggatgcagaaaatgctttccaagagttcgttgaatcttgaagcacagacatttatgctacaggaataaagaaacttattattaactggcaaaaatgtgttgattgtaacggttcctattctgattaataaagatgtgttttcattgttcagctcccatggacacaggta

SEQ ID NO: 391234 - DNA, 549 bp, Homo sapiens
gtaacctcttacgtgggccacacctaaaatctgaagtgagtctaaggaagtgagcttggatctgaggacacagcagaaggaaataaaatgtcctggtctatcttgcttagtaacaagtgttgagcttactaatgttgcttttctctctgggtttgcctgctgccttctgggctcccattaaaaacgtcttgtatgacaattactattttttgctttttcaaaatgtcacagaaactatttagccaatagatcacctcatgcaaggctacaacttctcttttaaatatcgcattaatcgtttatatgttggatgatgtgagttattagcttggcaacaaaatgggttttcctcttggctctttttatttcttctctcattattacaggaaagccaaaccaatacttcatggtggacacttatgtcatgcctctggggtctaaataatggtccyttttttctacctgtcattcagtgtgtgaagcatgctgcagaggtatcaactcacccctcccctgtcatgccatcaaggacatggccgccacattgtg

SEQ ID NO: 391235 - DNA, 415 bp, Homo sapiens
cattactacagaaaaaaatcacatccagaatctttgtcatttaacacagaactcccatcagctgagccaagtcagctatagtcagttccattctacattctaacaatcatttctgaaacacataagagggttattaaattaatgaaataaacacttttcattaatgaycttaaagaaaactacctttaacattttttatcccagttttgtgcatttgtttgctactctcttttagaataatgaataaattcatgtctcttactactcagcaaaggatgtcttttatttatttaattattttttgtaagaaacagggtcttgctctgtcacccaggctactggagtgcagcggtgtgatcatggctcactgcaacctacaactcctggggctcaagggatcctcctgcctcagtct

SEQ ID NO: 391236 - DNA, 498 bp, Homo sapiens
tgagatcttagaaaacaagtcaggcagatacaaagtacagattatactaattttctcagagcaycaggatctaggaaattattggaaagcaccctcctaaaactcagatagagatttcatattaaaaatccctcaaattttgggacagctatatctggtgattaacaaaaatatgaacagagatgagagtaagatcagtatgattatagagtactcagattattataatgcattgttaaaatgatggcccccaatgaatcatggctcctttgggccattccgatttgctatgtcaggttgttattgcctcccatccaaagatgaagcccctttccccatcccctgaagctggggtggtctcatgacttgtttggctaatagaatgcagcagaagtgacatggtacaactttcagggcttgtattttatgctttcatcctcttaacatcaccctaaggccactatgctgtgaagaaacctaagcatgtgggaagagagg

SEQ ID NO: 391237 - DNA, 498 bp, Homo sapiens
tgagatcttagaaaacaagtcaggcagatacaaagtacagattatactaattttctcagagcaccaggatctaggaaattattggaaagcaccctcctaaaactcagatagagatttcatattaaaaatccctcaaattttgggacagctatatctggtgattaacaaaaatatgaacagagatgagagtaagatcagtatgattatagagtactcagattattataatgcattgttaaaatgatggcccccaatgaatcatggctcctttgggccattccsatttgctatgtcaggttgttattgcctcccatccaaagatgaagcccctttccccatcccctgaagctggggtggtctcatgacttgtttggctaatagaatgcagcagaagtgacatggtacaactttcagggcttgtattttatgctttcatcctcttaacatcaccctaaggccactatgctgtgaagaaacctaagcatgtgggaagagagg

SEQ ID NO: 391238 - DNA, 580 bp, Homo sapiens
ttatctacgttctaaattttatccactatatttcattcattcaaaattgattcagtggtagaaagcaacagatcccctgaatccctgggcacactttgccctctaccttcagggttcctctgactattgggaactccctccctctctgcacttaccctgcagtgttgccatgacgtatttacatggtgacttcttctcaaatgataaggagttctttcaggtcagggacagtatctaactcattatgaagtaataggacaaaaaatattatttaaggacaaagctgattgtaccatcttcttacccattaggaaaaatgccattattctattaggcaaaaatgacatttgatgtgctcttttaccctcccagagactttaataagagagagataaaaaaagactgaaattgyaagacctcttccaattcttttgttctgcaacatggtgggaactagagttcccacacgccattgtttagcagaatgccttaagtgtgtatttccacatattgagaggtgtactcagagaagaggagtagaaaatcttagttgctttgcatagtacagtgaagaagattg

SEQ ID NO: 391239 - DNA, 662 bp, Homo sapiens
taactgcaggaagttaaaatcagtgaaaaaaatcactggagatgaatttgaattctctcagataaaggtgcattttatcacackcacctttttcttactttatggtggtcatcaaatttaaatacatttcaaactgtagaaaaaagaattctagagcagcaaactgtgacaagagactggccagtctcataacacccgcttttgtttgttccagtgacacagtgaaattacatatcccagccacctttgcaatgagacatagcctccttgttctggaatatgcaaatcaccactttcattacaggtccacaaaatcctcccacatgtaatattttcctttctttttgtatcctctggctaaatgtggagaactctcagatcctagatgaaaatgagaccagaagatggaagaatctggatctcaaaaggtaacctgccaacaaagaacacccatattgaactgtcacataaataagaaatcaatttctattgtgtgaagccactgatatctggagacttgtttgttatggcagctaacattagccttactgacttactctactgacttgtaagttagtggctagcctttaaaaatgagaattggtcactatgacaaagaaattttaaataatcttaatgaccacggacgttagaatagagct

SEQ ID NO: 391240 - DNA, 662 bp, Homo sapiens
taactgcaggaagttaaaatcagtgaaaaaaatcactggagatgaatttgaattctctcagataaaggtgcattttatcacactcacctttttcttactttatggtggtcatcaaatttaaatacatttcaaactgtagaaaaaagaattctagagcagcaaactgtgacaagagactggccagtctcawaacacccgcttttgtttgttccagtgacacagtgaaattacatatcccagccacctttgcaatgagacatagcctccttgttctggaatatgcaaatcaccactttcattacaggtccacaaaatcctcccacatgtaatattttcctttctttttgtatcctctggctaaatgtggagaactctcagatcctagatgaaaatgagaccagaagatggaagaatctggatctcaaaaggtaacctgccaacaaagaacacccatattgaactgtcacataaataagaaatcaatttctattgtgtgaagccactgatatctggagacttgtttgttatggcagctaacattagccttactgacttactctactgacttgtaagttagtggctagcctttaaaaatgagaattggtcactatgacaaagaaattttaaataatcttaatgaccacggacgttagaatagagct

SEQ ID NO: 391241 - DNA, 629 bp, Homo sapiens
ttgtactcaagacttgagataataagcaattaagtagatttcagctcttctaacttgagattgtttagtggactttgcagcctatattaataaatttgcattttcacctcaggcctctagttaccagcatttcagtggtgtcatcaaatcgacttttcctaaaggcctcttttgggaccacatgtcaatattgaaagctcagtattcaggaaggtgtgatgctgactcacagaaaatgcccttcccaygactgatggtcttactgcctcaagttggcagaatgacacattgacccagagcctccaaggatttggctgatccttgggagtaatatgagagagctttgcgacgttcatgaatacctgtaatgggggaagggggcatttgatagatacactttcgccttagtgtactcgctggtacccaagagacctacttactctggagagaagacagactctcaaactctcaaatttaactcaaaatatttcaatgtcagatctgaattcagtttacagtgggaccctcattcatttaaattgcttaaattgctatcgtttcaattgtccaggtctgtgtttaagtccaagagaaagagaatacagtgtatacgaaacagcaaaagttca

SEQ ID NO: 391242 - DNA, 629 bp, Homo sapiens
ttgtactcaagacttgagataataagcaattaagtagatttcagctcttctaacttgagattgtttagtggactttgcagcctatattaataaatttgcattttcacctcaggcctctagttaccagcatttcagtggtgtcatcaaatcgacttttcctaaaggcctcttttgggaccacatgtcaatattgaaagctcagtattcaggaaggtgtgatgctgactcacagaaaatgcccttcccacgactgatggtcttactgcctcaagttggcagaatgacacattgacccagagcctccaaggatttggctgatccttgggagtaatatgagagagctttgcgacgttcatgaatacctgtaatgggggaagggggcatttgatagatacactttcgcsttagtgtactcgctggtacccaagagacctacttactctggagagaagacagactctcaaactctcaaatttaactcaaaatatttcaatgtcagatctgaattcagtttacagtgggaccctcattcatttaaattgcttaaattgctatcgtttcaattgtccaggtctgtgtttaagtccaagagaaagagaatacagtgtatacgaaacagcaaaagttca

SEQ ID NO: 391243 - DNA, 592 bp, Homo sapiens
gcgttgtttgtagaatgcagaattccataatagatctaaaattaggcttctggagcatgagatgttttcaaattcattactgctttcaaaataacataattttctatatgaaaacagcttggaattcttaggaatagaaattgaaggtggttttatttacctattttttttgttttgtttctggtggctgatgattttcctttttatgcttggaaggtttcatgaccttgtggaatatgatctatagaatataatagtttggtgtatttggtttccaattttgaaaaagagtaaattaagaaatatcattttaattctgagaactttcatcagtagttaatcaagaggtagaatttttcaataatatttttcatcctgcttgtaccaggcgtatactatggcagagtaattgattgctagatttatcacgctggggaagctggaaatattttgttgtattgattaaggacttagmatttctgtgaaacatatctgcatacattccaggcacctggagggaataaaggtatgataatctcaagataacaaggaaacttaatattgtaattaagctatatattgattctaattt

SEQ ID NO: 391244 - DNA, 493 bp, Homo sapiens
gtccaccacatattttcagaatggatttgtgggctgtggtcatagcagccactggctgtcacagtctatgaaatgtgaccaggtggaaaataaattcactgagtcttcctctgacagagggcctagagaaaagggagaagagatamatcctaagtgctagcaagaatgaaaagctcctgggtggacaagttagaagaatctgagacactgaaggatggacgtccactagtcatgtactcatctaacgtcactggtttttagagccaggggactgcctgtcctagaagtctataatctttgactgttagctctaaatgagtgccttggtctattccttctgctatatcaaaatttcttggaccaggtaatttataaacaacagacgtttacttctcagagttctggaatctgggaagtccaaggtcaaggcaacagtggattcagtgtctagtgagggctggctgctctgcttcaaagatcataccttgttgct

SEQ ID NO: 391245 - DNA, 408 bp, Homo sapiens
tggtggttcaattttctgactacatgcaaggggatgaaaaaaggtgttaacttgtcctcatgaaagagaaatcctgagtagcagacatccaaattctgyactagatatatgatttaaatcttatatttcatttttagtttatcatttacctaccctgtaacttgtatttccaaataaaatataagctctttgaaggtagaaaacatgtcataattttaagaattctatcaaatttaaagcatctagaacaactttttcctactaggaacttagcaaatatctattaattagaggacaagaactctgctttaaataagctattatgaagtgaggacttccttcatggctggtttatttttatttttattttgagatggagtttcactcttgttgcccaggctggagtgc

SEQ ID NO: 391246 - DNA, 621 bp, Homo sapiens
tgatgatgtgtcgctgtctcccatcaccctcagatggggctgtctagttgtaggaaaacaagcccggggytcccattcattctacattatgatgagttgtagaattatttcattatatattataaggtaataataatacaaatgaagtgcataataaatgtaatgcacctgaatcatcccaaaaccatccaccatgtcccactatccatggaaaaattgtcttccacaaaaccaatccctggtgccaaaaagttttggactactggtttaggctatggatattaaagtataaagatcttaattaggagttgtgttcactctaaataaaaatagtgtatctggatctttaagttctcagtactgaacagcagcatttcttaaggaagaaaagaggcatcattctttactttggacggatgccaccatgttatagtagagagatttctgattggctaccaaagttcttgatgcctgatgtacacacacttccttccatttattccatcaaacattaatctaaagactaatatgaagggattttgcaaatgtaatgaaggtcctacagcaattgatcctaaaatagaaagataatctgggtggggatgacttaatcacacgatc

SEQ ID NO: 391247 - DNA, 621 bp, Homo sapiens
tgatgatgtgtcgctgtctcccatcaccctcagatggggctgtctagttgtaggaaaacaagcccggggctcccattcattctacattatgatgagttgtagaattatttcattatatattataaggyaataataatacaaatgaagtgcataataaatgtaatgcacctgaatcatcccaaaaccatccaccatgtcccactatccatggaaaaattgtcttccacaaaaccaatccctggtgccaaaaagttttggactactggtttaggctatggatattaaagtataaagatcttaattaggagttgtgttcactctaaataaaaatagtgtatctggatctttaagttctcagtactgaacagcagcatttcttaaggaagaaaagaggcatcattctttactttggacggatgccaccatgttatagtagagagatttctgattggctaccaaagttcttgatgcctgatgtacacacacttccttccatttattccatcaaacattaatctaaagactaatatgaagggattttgcaaatgtaatgaaggtcctacagcaattgatcctaaaatagaaagataatctgggtggggatgacttaatcacacgatc

SEQ ID NO: 391248 - DNA, 507 bp, Homo sapiens
aaagggataggctgaaaaaggagagggagaagtagggaactcatgatttcaactcttctagggtccgctgaatccatgacagttacccaggatccactgcctgcaaacttagaaattaaaacttattttggataagcttccaatgaagaggttccttgtacactaagcttcttatattyccaaagggaaaacaagccttgaagagccccatgttgctagggagtccagtgcagtgaaggccaggtctggctgagcagtcaggtccctgggcttctccccttattatattatttttcagagaaggagaaaagaaaacaaaaaataaaactaagtgtggtgggatttattaataatgaaatgtgttaataaaagatatttgtcagaggaagaaaatagtaaaatctttccttccttaaaagtttgcatttaaagttgaaatggtttccatgcttaatgaaaactgtcttatctttcttagctatgttttttttttttttgcgacagagt

SEQ ID NO: 391249 - DNA, 592 bp, Homo sapiens
cacaggtccttcaaagtctgctgggtccccagcacttgggtttgttgtgcttgtcagacccatgtctgcctaagcaaactgtgctgtgggtccctgaaacaaaaaaacaaaagggatggggtwcccctctcacctcgttttatgtcctgagagcttggctgtgtgaccaaggaggatgcctctctggtctctgccatcggaggggcacagagtgtggctctgtgccaggcagcagtctgaccagactggggactcaagacacatgagacccaggtggcactctctctgtctgtatgtgtcaagcgctcacggagttttgttgtaagatgccaattcataagggctttcttcatcttatccttgttgccctgattagtgctgggagactcctattccagcatcacctgcccagtgtcacagtgagtggacctgaggctgaaggtgtctcagcttccatgggagactggaggcgtggtctgcacaaacactctccctacctgcacatggcaatgtaagtctttgctttcttcatccatctctgagagtgaatttttggatcacgggctgcctcttctgcacctactgcaggaac

SEQ ID NO: 391250 - DNA, 555 bp, Homo sapiens
gaggctgaggcagggagaattacttgaacccaggaggcagaggttgcagtgagccgagattgtgcygctgcactctaaactgggctacagaatgagactccatctcaaaaacaaacaaacaaacaaacaaacaaaaaagaatatagtagatttgaacaacactatcagctaacttgacttgattgatatttgcagaacacttcgctctacaatagcagaatacagatttttcccaagtgcacatggaacatttatgaatctagaccacattgtggctgatttttaaaagtctcaataaattcaaaagcattcatcatacacagtgtgttctctgtggaacatactgcatatgacgaattagaattaaattagaaatcagtgacagaaagatccttgaaaatccccaaatatctgacatctaatacacttctaaataacccataggtcaaaggagaaatctaaagggaaattagaaagcaattcaaagtgaatgaaaatagaaaacaacatagaatatatgggctgtcactaaaacagtacctagaggaaaattta

SEQ ID NO: 391251 - DNA, 543 bp, Homo sapiens
  misc_feature (1)...(543): n = A,T,C or G
cacatgtttacctatgtaacaaacctgcatgtcctgcacatgtatcctggaacttacaactaaattaaataaaattaaattttaaaaagaaagaaaaacaatagacaagaaataggaactaaggtgctaatttttattttattacttcaatcaataaaaactgtgagttaaaataaaaaagaagtctcttgctatctgagcctgtttccaggagtgaattttactggaggaatctttggaactgcctattctatgccctcttcaggaaacaagtctttcttaaatggtaataacctactctaagcctagaaaaccacatccggggctttccatgaagaggctgtgggatggaattgatgttagaataagaacattattggaaattctagtcattagcggccaaaagatggattctttaagttgraaagacctctaaattacaaaaaatagtttaaagatttcttattctaaacaactgccttatttatattcattggaagattaaattaaaagannnnnnnnnnnnnnnnnnnnnnnnnnnnn

SEQ ID NO: 391252 - DNA, 598 bp, Homo sapiens
gcctttttccaaaaatgatgctgaggcttcaatacttaaaggggaagagtttgctggaggggaaagaggaagggtatggtcacattactgaatccacacattgcaaaagaaaaggataaggcaggggaatagtcaatttggtattcatcttatgctcagtaaatcagcacttcacataaggtaagatgaggacagagcacctacctgtgggaatattttaccttctatctggagctgtgtgcttaagagcaaaaggaaagtcagcttctcacatgactcagctttcagcttaactttctccttttggcagagtgaattggggtccaagtttctattttcctttcacacatttgaaactagacttgattttgcttagaaatgtgacatttatttatacttctaaacaaaatcacggctagttatcaattgyccattttcagagaatgagaaagcccaagagctcatgactccttcccatttccttgggttatggataccaggaccctgggttctgcagagcctggggacagtggatgagagaatgctgtttctgagcatgatatggttgctgtcagatccctgctcctaaacttactag

SEQ ID NO: 391253 - DNA, 562 bp, Homo sapiens
tgttatcatttcaaggtctttgttgccattcaaagtgacaaaacacaagtatatgagaggtgggtctggaatagaatggaataaagagcttatttgccttatttgggcacttttcctttctatttaagatattcagttaattttatgtgtttataattgcactgcaaatcttctaaatgtatttcatcttatcaaatgtattactatcatccttaaaaatgattttcatgcatacatgtaatccaaattattcaccatcatctggtcttcctaccactccaaccttatattttattgttctccttccattcactgctcctcatcattctctttgctcttgtaaaatgccaagatcattttcaccttagtgtctttgcatttgctatttcctctgcctgcaatgcctctgtgatctttacatagctggtttcttcttgtcacttaggtctctgttcaaatatcattccttggagaagccttctctgaccactttcactgaaatatcccrtctccataagtcactctctaacatatcatttcattttgttatctttatagcatt

SEQ ID NO: 391254 - DNA, 569 bp, Homo sapiens
ttgaagaataaaaacaaatacacacccacctagtcccttctacagaggccagttgagataaatacactgagatgcctaagaagactatattgtttctgctcctagatattaggcattttcctatatctgctccctgattttatagactaaaactcccaagtgaacatgaacttgtctatttctagacagagagcttccagaagctagtttccaagccagagtggatggaaatgtcacagtgtggatgtytcaaaactcatgagcctgactgacccctctggtggagtggtcatgattttccagagagcagctgttagcccatccatttcatggttattacagactccggtggatgacaggatcctgtgccattcctctgtgaatatctcatactgattacacagtttctgagccctcaggacttttctgcaaatttgcacttattagtaaatttttaatcagggaagatgtgcaaaatactgcattaaactcaaggataatcattctggagtatcatagtgggaaggaattcccattggtcctctaaattgccatgtgcacctacagtc

SEQ ID NO: 391255 - DNA, 594 bp, Homo sapiens
tagtgtgatcatgacacagaagtctatttccacctccagctcagagaaatagtgtgggagcaacagagaaggagcagaaaataaactttttcttcaggctttaaggaggggtagctccctccacaggtcagcgaatgcctttcaagatcacttttgtaacctcctttgcccttaggcccctacagccaggcaatttcactgcccacagaaggcagtcctcatgcttgcgctgtcttcaagtctgtccccaggctgaaggttgccttctcttactcattctgactccttcaagccaaccttcaaattcagcttagggatggatacctcgccttttattccagcccctcattattccagttaagaacctgtcagtatgaggcaggagaatagggtttggagacagagaacataaggacttcctagaactaaatcaaatggaaacacttcagctatgccaggaaatatcctctccatttacatagggcgcaggcggagtaagtaactttgtaactttacttcatcctcttcatttacatagggtgtacaccaagtaaccartagaaacctctagagggtatttaaaccccccaaaat

SEQ ID NO: 391256 - DNA, 547 bp, Homo sapiens
ttgactcatagattacaaatgtccttaaggtcttcctccatttaaaaaaaaaactggaaatcataagtgatacattatgggtatggtttatgcatgaaaaactgatgtagagtgtcaactgatagagtcacacacaaagaaaaggcgttggccctagatcagagtttctcaatcccagtactgttgacattttggatgggagaattatctgttgggagsgggagatattggcctgtaaactgaaggatgtttggcagcatccctggctttgctattacccactacatggcaatagcactcccattgcagtagtggcaatcaaaaatgtctccaaatgttgcaaaatgtccctggagggtaaaatcaccagttgaaaaccactgccctgtaaccaaataactaacaaatgcatgtatgtctatatattttgattaaagtaaaatgtttaagtcatcaatttttaatgctttttactataaccaagtttttaaaatcaattgatcaactcctagttcaagttaagtcatttaagatgtcttttgcatac

SEQ ID NO: 391257 - DNA, 583 bp, Homo sapiens
gtacttacacaagcctaggtggtatagcctattgctcctaggctacaaacctgtacagcatgttactgtattaaacattgtargcaactgtaacgcactggaaagtatctgtgtttctaaaccttggaaaaagtacagttaaaatatgatataatcttatgggaccactgtcatatattcagtccgtttttgactgaaacatcattatgtactacatgactgtattacataaggcaaagagtgaaattactgatccaataattggttatctttctccttagctatattgacaaaacaacagaacttatgaagaggaggagaatcattcaatctttgcagtaagagttctgtaccttgattttggtggtgattatgcaatctacacacctgtgataaaatggcatagaactatacacacacattgtactgatgtcaatttcctggttttaatattgtattaaagttatgtaggatgtaaccaataggggaaactggggaaaagttacagtgccctctctatttttgcagcttcctgtaaactataatatgccaaaagcatcctaaggacttgccagcacttcaa

SEQ ID NO: 391258 - DNA, 570 bp, Homo sapiens
actaatggacattgccgggttgagaagtggggaaatgggatggtgaaggcgaggtgggagggtgaattcacctacttagagagaacagcatgtggggtaacaggcaggaaaaagcttgcccaactgagaaacttaaagaagattagctggaacatcaaatgcaaaaagaaaagtagtaataatgttagagataagtgagtgcaaatatgttggagagtcttacaaagcatattaaatagtttggactttaccctaagggcaagggtttaaaaagacttaaggataacattatccatcttgctatcccgtggggaaagagggcaagaccagcactagggagtgtcattaggagattttacagtaaccattctaggccatcactgacaatgacttggatcagggtgactataggaggaaaagggagaaatggtgaaatggtgatatttggaaacagaatatagaagagttaacatgaaggaagtaagaatcagagataatcctcaggtttttagcttgaataggtgtttgatmgttggtgtcatttcctacaataagcaatactagaagtgg

SEQ ID NO: 391259 - DNA, 577 bp, Homo sapiens
gctgaactgaaattgaaaaccatgtctaactatctgtgcttattataaaagccattctgtttctcaggtggaaacatatacattttttattcattatctccataaacatttactgagtactggaacttctatatgagcaaatccatctttattaaaaatgttcttccttgaaatgaatatatattactgtttaaattgaatacatactatgattttttttctaagtatatattgtccaggatagcaagctatactgattatgtaaattaaccataatgaatccattttaaagaccaggaattctcttttttgtcctcttttatcattttaagattgttctgagatcaaagcaaaacgactcctaaattacctagacttgctttttgtccctatgtatttcagattataagaaaatacctgattccacraaactggcatactgtgtaaaaacacaggttttaatttttaatatgtatatataattaaatgtaattatatgtgtacaatttctaaaggaataaacaaaaaagcaaagaaagtcataaaaaattggaatatttcattctactgtaaaagt

SEQ ID NO: 391260 - DNA, 498 bp, Homo sapiens
tcctgggtatgtctttattagcagcatgagaatagactaatacagtgtgtgtgtgtgtgtgtgtgtgtgtgtgtgtgtgtgtgtgtgcatgcgtgtatttatcttataaagcatctaccagttttagagtaacttctgctattccaacaaagaaacatagaaaacattctttgaactaatgaggtctctattgcattcttttatttcaaactagtgtagtagataattgtgaaataatgtagtagataactgctagaaaatcacgttgaataatattgaataataatgtctaataagaacttctatttattaagaatatcttgcatacagatacccatagaagcattttatatcctttgactcaacaatactttgaatgatttaagcattacatcaaattgatttaatgcatgaattttctaatttatgaatacctggccacaaggatagggaggatacgttttraagtcagaccaacataagtttgtatgccagttc

SEQ ID NO: 391261 - DNA, 469 bp, Homo sapiens
ctacatgatttagtctaagcccaaagttttttcttacccaagtgtcatggagacaaccatgcagtctttcaaatttgaaactgagaaaaagaatcatagctgaaaactcatagcttcattgaaactctctcaggttgcaggactcctataaatagcatgttaattcttgatcctrtcatttatatcttactatgtgctggccactgttcttatactttatatatattattagtttatttaatttttgcagtaaatctatctttttgataggattatttttatcctcatttcaaagatgaagaaactgaggaacaaataaaataaatatcttgggttatccatcagagctgggatttgaatccatccagattgactgttaaactcacctaacaccaaagattgccatagtttttctgtaagagaccatatcataaatatttttggttttatgttcaatacaatctctgct

SEQ ID NO: 391262 - DNA, 570 bp, Homo sapiens
tcatgagatttgatggtcttatcgaggacttttctccctttggcacttctccttcctgccacattgtaaagatgtctttcttctcctttgccttctgccatgattgtaagtttcctgaggccttttccagccatgcagaactgtgagtcaattaaacctctttcctttataagttattcagtcttgagtattccttcatagcagcatgagaatgcactaatacacaccacaatcatattgttataatattctgtgattttctgtgacttactattaccagtgacttttctataatcagatgatttcttgctgctcattaatgtctttttctttctgatggaagaactcccttyaggatttttttatagaatgggtctagtgttggtgaactcgctcagattttgcttctctgagaaagtttttattttctttttatgcttgaaggatatttttgctgaacagactattctagaatataaggtttttgtctctttttttttccttcagcactttaagtatgtcatgttactctcccctggcctgtaaggtttccagtgaaatgtctgcccc

SEQ ID NO: 391263 - DNA, 576 bp, Homo sapiens
aagttctgaccactgggataggtgatccccctttggatagggctggtttaaaagatccctccatgggcgggtgtcagctgagtattgtccagttttcgtttctgctgtaatagtatggcactgatctccctcccccagagtccagaaatgcattccacaccagatctcaattccagggcatggtggaagtgggggctttggtgattcagaactgtttctatctcttcactgcctctttcagcaatatgaaattaaaacctggtattatgagtgctcatcttatttttagttcttatgaaggtgtttttttctctgtgtagatagttgttaatttggtggccttgagtggggtggcgatcagtaaagctttctatttggccatcatgcttcaccttctcctcccatagataatttatctacctatttgtaacatagcttcacattggctacagacacctaatggctatctataaatctatgcttgcatgtttgtgtagatccyatgctatgtttaatttttatatgcatggcattgtcttaatcgcaagccatttaggtcacgaaatgttttttgtt

SEQ ID NO: 391264 - DNA, 575 bp, Homo sapiens
tttatcttttggggaaacacagagagagagagaacattcaagaacgtgcataagaaggcattaagatactactttttctcccactttgtggcctgtcttttaaggtttattataggagacatctctttttcatgaggaaaagtataaatcacttagaaaagcatgggctgcctttggattgcaatgcaaaggcaatccctaatcattttctttagggaaaaatttaagtttttccatggagacagacaaaactgaaggaacccctttggcaatgatgtttgcagtcaatctggagaggcaaatgcatcagcaaaagtgaatttckaagcatctctctagtgttacaaacagattagctctcacagttacctagacagatgtgaatctgtcccacttgcggtcttaatgcttccctgttgctaatgatgttccaagggtatcaggaaatggaaataaatggctggtgtggtagctgcctggagctgccttaagtgccagccctgctgggtgtcaattgtttgtttggtggctttcaaagtaaagtggaacattgatttgtttaaacactgcaatgt

SEQ ID NO: 391265 - DNA, 496 bp, Homo sapiens
tgccagaggaatcctggcagaaaaataaaataaaataaaactccttctagtaagttcttctttgccccttgtttaatcttagacttgagttcaaaaaaattcccgaaagttttatcatattcttgaaattattatattgagttttgaaattcaaaatatcatgaattttcgcttctctttgcttctccattaaaatcattttactcttccatgaagtatgattggttgaggagagttcccaaagtgaagggagaagcatacctaattctcataatttcatcataaaactccccatccccaacaccaacccctgatacaggttaatatcacagcaagtctttccctgaaggggtatcggggtagaacatttctgtgtctaccayagaaaattgatgagaaatgcagtgtagtacataaaatattttaaactgcaatccaaatccccactgttaagaaggaaagcactaaagatagctaaggaataaggtgattctaa

SEQ ID NO: 391266 - DNA, 631 bp, Homo sapiens
atagctggatttcttatatgtagtctcagggcttccaaggcccgtatctcaagagagaaagaaccaggaagaaagcagaaagtattgctctttattgtctgacttcaaaaatcactcattggcacttctgtctcattctctttatttaaaaaaagtctctgaagcttcccatattcaacagaaataaaaaattaaactttaccttttgatgagaggtgttcaaagtattttagacatacttaagaccacacagatatctgaatattttatcattgatatgaatataactgaagcatatatagcaaggtatgttattcaagtatttctggaccctctacagaaatatttytcaatgctaaaacaccatttacaatattcataatggttttctgaaggtctaactacttgcattcttactacttaatgttttatagtcaaaagatttatttttacatgaatacaattattttaacagggatttgtgttagcttatttcctttgaaaagtggacaccaaaacagaattagctgtttaagagacgtgtggaaactttttcaaggttaaaatggagggaaacagagaaagccaagggagccttcagaccatgatgcaagtctgtcacctgtgaaag

SEQ ID NO: 391267 - DNA, 542 bp, Homo sapiens
tcttgcatcagcatgctctggctgtgagagttagagtcaaaggagatcattttgtaactttaaggtttgatgactgccctattggatttcagtcttgcatggggcctgtagccctttgttttggccaatgtcccmcatttggaacaggtgtatttactcaatgcctgtacccccattgtacctaggaagtaactaacttgctttcgattttatgggctcataggcaaagggacttgccttgtctcagatgagattttagacgtggacttttgagttaatttggaatgttgagttaacttggaattttgagttaatgctgaaatcagttaagactttgggggattgttgggggactgctggaagagcattactgtgttttgaaatgtgaggacatgagatttgggaggagctggggtgaagtgatatggtttgactctgtgtccccacctaaaaatgaattcatatatgaattgtatgtgtcatataatctccatgtgttgtggagggacctggtgggaggtaatttaatcatggggtcaatt

SEQ ID NO: 391268 - DNA, 552 bp, Homo sapiens
gggctggtcttttcaaccttatttcactcttactagatgtcaaaaacatgaaaaagaaayaaacaaaaaaaactttcagctgaatttaataacaatggattaattccagacaaaacaaagaaacacatacttttgtaatatgtttaaaagtagttaaaaggataaaacaactgtaagcattcagtgaagaaataatactactgtctattgttggtaattcgtttttgttggggtaaggcattggttccatgcggtggtccccaaatttgctcatgtgttagagtcacctgagacaatttaaaaaatttgctgaccaacctacaccctgggccaataaaatcagaatctctggggggagggggttataatttataaatcatttttttcctaaatgattccaaggatgaactaaatttgagatccactggtccaattgcagtctattcttaaacctataatgactgccagcaatatttttatatcttatcaacgaccacattatgtgagtcactcttaactctccttttatgttatggaagcctgcctgataaa

SEQ ID NO: 391269 - DNA, 552 bp, Homo sapiens
gggctggtcttttcaaccttatttcactcttactagatgtcaaaaacatgaaaaagaaacaaacaaaaaaaactttcagctgaatttaataayaatggattaattccagacaaaacaaagaaacacatacttttgtaatatgtttaaaagtagttaaaaggataaaacaactgtaagcattcagtgaagaaataatactactgtctattgttggtaattcgtttttgttggggtaaggcattggttccatgcggtggtccccaaatttgctcatgtgttagagtcacctgagacaatttaaaaaatttgctgaccaacctacaccctgggccaataaaatcagaatctctggggggagggggttataatttataaatcatttttttcctaaatgattccaaggatgaactaaatttgagatccactggtccaattgcagtctattcttaaacctataatgactgccagcaatatttttatatcttatcaacgaccacattatgtgagtcactcttaactctccttttatgttatggaagcctgcctgataaa

SEQ ID NO: 391270 - DNA, 599 bp, Homo sapiens
atattaagagataagagtggcacatttatattgttcttatagaaacattatacaactatagtaaaataaaactacactgcatattaatacagaccttgaccataaaaacaaacataatgaaataaaaygatggacgattttaaaagtacaatttaataaaattaggattttacttcctgtaagattaaataaatgtattactctgtttcctctgccagctggtaatgagacctcccctaactcatgagacccatgagtagtgtcagtgaagaccacatgagaagtcaagatttccacctttgcctgaaaataacaaggactccttcctctctttcctcactggggtagtatcagagtagttaggagttttctgagagccagcagtaacaaggctatctcaccatgttgtcagtggagaccacatgagaagctaaaactcccaccccctcctagcagtagtgatgagcccaaatctcttgggtatcaatagtggcaccatggggaacacagactcctacttttccttctcctacctggcataataagacagtgccctccttctcctatgatagtagtgtcagagaaagcagctaaaacag

SEQ ID NO: 391271 - DNA, 664 bp, Homo sapiens
ggccaaactggactacttgaatgcagaataaaccctagatattgttttttctgtcagtctaagcatgagtagcttttcttttccaatagctagcaggcagagagaaaatagyaaaatcagttatggaattggtatttccattaacatactgtcttttcaaacaagcaccagttgatcttattgtgtcaaatttacaaagaaactgatatatgagaaaagcaatgcattattgtagtttattatttgtgaatataattccaagtactttgttatgctgtgtaccaggaccatttttgccggtggggggtgtggaaggggagtggcatgagaggcagcacaaatgcacactgcaaaggtgtaggaacagggctcttagatggaggacttaccttatggctgtaaaagatgtgaacttctccagaataaggaccagttcttgtttatctttggtttctttccagaatctggtaaagcaactacaatactaaatggtaaagtgtgtctatcagtcttgaaagcaagtcagagttagataatatttataatattaaatgtgaatgtgctagcattatcacataaaataatactggtctaagattgaggttattcctaaatctaagctaacagtgacttagtatgtttcatttattaaccccaaatctct

SEQ ID NO: 391272 - DNA, 599 bp, Homo sapiens
atattaagagataagagtggcacatttatattgttcttatagaaacattatacaactatagtaaaataaaactacactgcatattaatacagaccttgaccataaaaacaaacataatgaaataaaatgatggacgattttaaaagtacaatttaataaaattaggattttacttcctgtaagattaaataaatgtattactctgtttcctctgccagctggtaatgagacctcccctaactcatgagacccatgagtagtgtcagtgaagaccacatgagaagtcaagatttccacctttgcctgaaaataacaaggactccttcctctctttcctcactggggtagtatcagagtagttaggagttttctgagagccagcagtaacaaggctatctcaccatgttgtcagtggagaccacatgagaagctaaaactcccaccccctcctagcagtagtgatgagcccaaatctcttgggtatcaatagtggcaccatggggaacacagactcctacttttccttctcctacctggcataataagacaktgccctccttctcctatgatagtagtgtcagagaaagcagctaaaacag

SEQ ID NO: 391273 - DNA, 552 bp, Homo sapiens
gtttctttggcttttcttatttttaaaatattaattttctttgatggcttaaggccaattagtcttttcttcttgctatctttttgcatttgataaattcatttttattttttaatttttgtgatatataagggtatgattcccagtaaatttcctccattatcttcaaggttttttcttatttaatttaataacctgctctagtacccagtggttcccttcctgacccttactattaattcatcttagaaaaagtcactgatacctactgattgctgagacttgagcccagagtggttctgactgtaacatgaagaggatattcagtctyagttcccacattcatgggtgtctcaaaatagtcttggagtcatttggcctggtaatctgcgtgtctgaaatgagcctttgtagacttataattttcagatcactttcatgtattatatttccaccatataacttcactctgcacagtattttttttattttctatttggccttacctgagggtcagaaagataaagtgacttattttttcaaatagcacag

SEQ ID NO: 391274 - DNA, 587 bp, Homo sapiens
atagaggtccatatatcacagtaaccagaagcattttcattaaaaaattctccatagacataaaacagctaaatataattacagttgtagaataatgccatctcaatcatttccccatttatttgaaatttgatttaacagcaaaactcaaagggggcgtgagggtgaatagctagcaaaagaaatttctctgcgggaggcaatcatcaaaaaaacttgtagttaccagttgttccgccctacttctcatattctcatttggctttttgcccagatttgcataaatcactagtaatggccaaaacaattcatgaatatagaaaaaaataacaaataaaaaaatggaggaaggaaaaaataaactcatgaaaaaaaaaaacatcrgttcttaattattggaacactaatgaaaacagtgaatcaaataaatagtttgttctcaaagtgttgtcatgcaaaacacaataaacatgaaagttcctgaaataacacttcatagcaagaggaaaaaaatgccctgtaacagtccttgaaagaaaaaattcattagtatttcactttatcattcctggtttcaggttccagtc

SEQ ID NO: 391275 - DNA, 587 bp, Homo sapiens
atagaggtccatatatcacagtaaccagaagcattttcattaaaaaattctccatagacataaaacagctaaatataattacagttgtagaataatgccatctcaatcatttccccatttatttgaaatttgatttaacagcaaaactcaaagggggcgtgagggtgaatagctagcaaaagaaatttctctgcgggaggcaatcatcaaaaaaacttgtagttaccagttgttccgccctacttctcatattctcatttggctttttgcccagatttgcataaatcactagtaatggccaaaacaattcatgaatatagaaaaaaataacaaataaaaaaatggaggaaggaaaaaataaactcatgaaaaaaaaaaacatcagttyttaattattggaacactaatgaaaacagtgaatcaaataaatagtttgttctcaaagtgttgtcatgcaaaacacaataaacatgaaagttcctgaaataacacttcatagcaagaggaaaaaaatgccctgtaacagtccttgaaagaaaaaattcattagtatttcactttatcattcctggtttcaggttccagtc

SEQ ID NO: 391276 - DNA, 599 bp, Homo sapiens
aattcattagtatttcactttatcattcctggtttcaggttccagtctaatctccatagaaatggaattccgattggacctcagagatatcttacaagtacactgtaatcccaacttgagggagaagttcgagttaactgaaattcagtttaccctcatgggagcagttgggctgaactactaagaggaaccaaatttaagttcttaaaaatggccaggatgaattctaaaataaaacaacagagctaatattaaaatataaagaaaaatccttctttctttctttctttctttctttctttctttctttctttctttttcttttctttcttctctttctctttctttcttcttcctttcttctctctctcctctttctctttctttccttactattttttttttgtttttaccctgagcagcctatctctctytttttttttttcacaaatgtgaagtgattatgagaatgcagaggaaaaaaaatgccggtaaacaacaacgagtaaatcatctttataatcagtaaaacacatatttaataacaattctaacacaaggacttatgtgcctaagatagccacagatacccagtttat

SEQ ID NO: 391277 - DNA, 599 bp, Homo sapiens
aattcattagtatttcactttatcattcctggtttcaggttccagtctaatctccatagaaatggaattccgattggacctcagagatatcttacaagtacactgtaatcccaacttgagggagaagttcgagttaactgaaattcagtttaccctcatgggagcagttgggctgaactactaagaggaaccaaatttaagttcttaaaaatggccaggatgaattctaaaataaaacaacagagctaatattaaaatataaagaaaaatccttctttctttctttctttctttctttctttctttctttctttctttttcttttctttcttctctttctctttctttcttcttcctttcttctctctctcctctttctctttctttccttactattttttttttgtttttaccctgagcagcctatctctctttttttttttttcacaaatgtgaagtgattatgagaaygcagaggaaaaaaaatgccggtaaacaacaacgagtaaatcatctttataatcagtaaaacacatatttaataacaattctaacacaaggacttatgtgcctaagatagccacagatacccagtttat

SEQ ID NO: 391278 - DNA, 591 bp, Homo sapiens
aaaaaaccattctttatatacatttaatttagaatgccatcttagccttgtggacctcattctgagcatcaaggaaatctgcttttttggctattttatttagtattaaatatattaaatatatattttgggtcattttaccatataaaaagaaattgctttgtctaagaaatgtaatactttttcatctatgcttgtatcttaagtacatatgtcaaaatccaaagcatattttttctgtagctaaaatgttttaaatattgcaacaaaacaaattaaaccattctattttcaacttttatttttatttctatttttaatttttaaaatttttattttttttcattattatttcaacaggttttggggaacaggtggtgtttggttacatgaagaagttccttagtggtgatttctgagattttggtgcacccatcacctgagcagtgtacactgtacccaatgtgtagtctcttttccctcactattccccaccctttcccttgagtccccaaagttcagtggattactgttatgcctttkcatcctcataggtcagctcccacgtgtgagtgagaacatgtgatgttt

SEQ ID NO: 391279 - DNA, 572 bp, Homo sapiens
agggcaaacctgcctcccattctattcaaagtcatccctctgaggctcacctgagacaaatgcatatctgattgtytcctctctcctactgtttacgtaaaaatgcagattcactgagccagactatattgtgtattcagaaggaaggctgatcatggactcaaaagaatgcaaccttttgtctcttatctacttctaacctggaagccccttcttcagttgtcccaccttaccagactgaaccaacatacattttatgcatatagattgacgtatcatgtctccctaaaatgtataaaagcaaactgtaccctcgaccctcttgggcacatgtctcaggacttcctgaggctgcatcatgggtgtgtccttaaccttgtcaaaataaactttctaagttaactgagaactgtcgcagatatttggggatcacaaaaatatgacatatccaatgagaaagggcaaaaatgcaagaaaataagagagcagagaacatttgactaataactggcttatacttacacaaagataaacattaggtagccaagctgaaagagaaaatcaaggtgaag

SEQ ID NO: 391280 - DNA, 577 bp, Homo sapiens
ctaatatacttcttttcatattgagatgagaggttttcctgactacccctcttgcagaacatgtgacagggatatggttcacctgttcagcctccgtgtgcactcaaaccctttacaagaaggggagcacagacatgggtaaggtgcaggagctggggaaagtgccccagtgctcctgggttccagccctgtggcagcatccaggagtgggagcccatgacccccaaagcccacgtgggcatgtgttacagggtgtttttttagccttactttctgtggacagcttaagtgttaaacagctcagtgccttcttggtacccaggtccttgtccagcatccaagaagaattgggttacaaatggacttaaaggatgaatgtggtggttttactcagtgctggaggtgactctcagcaggatggatggggagatggaagggggttggagtggaaagatgatcttcacctggagtttggccatggagccrccaatctcctctctgatcatccccagcgaaactcctcttggtattcagccactccttctcttctttccttctctgccatgctgttctgcaa

SEQ ID NO: 391281 - DNA, 552 bp, Homo sapiens
atgaatacagcaaatatgcagagagaagcaaaaatatgtgacaactgagagggaataaaacaaagggtcagagcgggcagaaggcagggacagaagagagaaaagtgamtaatgactgactaacatgagacgttgtatttcttgtaaagtatcttacgacatttctcatattctgaagacccttctttttaactttagcttatatattttttgtcctttgaaaccaaattaacattaattataacagatgttgacttgtgtggtctagaacagatcatacgatctcttgagttataacttggttaacttttaggatagtgacatattgtttcttaatcccagagtcaatgatgatacctgagacaatgctgtgatgattggcatttatctgctcagtacatggtctctgaatggtaatctccagccaaggcattagtgatggagagtatggagggatctaatcatgaagacagtgaaggctccgggaactctgggaaagataaaatggcagtggctatggtggagaagcacggtagggaagaagcttggtgt

SEQ ID NO: 391282 - DNA, 552 bp, Homo sapiens
atgaatacagcaaatatgcagagagaagcaaaaatatgtgacaactgagagggaataaaacaaagggtcagagcgggcagaaggcagggacagaagagagaaaagtgactaatgactgactaacatgagacgttgtatttcttgtaaagtatcttacgacatttctcatattctgaagacccttctttttaactttagcttatatattttttgtcctttgaaaccaaattaacattaattataacagatgttgacttgtgtggtctagaacagatcatacgatctcttgagttataacttggttaacttttaggatagtgacatattgtttcttaatcccagagtcaatgatgatacctgagacaatgctgtgatgattggcatttatctgctcagtacrtggtctctgaatggtaatctccagccaaggcattagtgatggagagtatggagggatctaatcatgaagacagtgaaggctccgggaactctgggaaagataaaatggcagtggctatggtggagaagcacggtagggaagaagcttggtgt

SEQ ID NO: 391283 - DNA, 575 bp, Homo sapiens
agaattaggtactctgacattatatagtaggtaaaaaatagagtaagaaagtcaccaggcaaaaacctggatttgaaggtgatagaatattttgtaaaataatcagcactagtctatggacttgcttacaattttagagctgcatacatttaaggaattaatatacacttcargacagttgttattcttccaaatcctttttaacttagaatagttagatcatcttcccttgctcagcaaaaataaaataagtcttttattttctccagtttaatgctgttgtaaaaatttaaaggggaaaaatgccattaggaataaccaattctagtttctttctgttggaacttataatcaaagactgaacaaaaatgtttatttttgccctataataataactttcattttttagcactttatagcttacaaagaaattttatgtggattatcttctttatttcttaaacagctttagaaagttggtggtcattgatacaattttacaaaatgaaaaataaagcaccacatgacaagatagagctagagtgtttggcatggtatctagacaatttaaataa

SEQ ID NO: 391284 - DNA, 609 bp, Homo sapiens
taattttcatgtgaaaacagatgctgctgacttcaggtgttggccaaaacagagtaattgatactgaacttggtttcctactaaaagcagctataaaattgaacaaaatatataaagcaacagtatgcggataccttgagaaagtaacacaggtctgtgacccttgaaggaagaaagaaaagtaaggtgagcctatcaatcatattaaaattgccttggctttttctttgaaccctttgtctaaagtcaagcaggaaagtggactaaaagtggagaagtttttgtgagctaaggtggctgaagcaagagttccaggctgctgaggcaaagcagctagaatttgtracacagtatccgaaaagttggaatctgtgtaagaaggcaactccacaaatatgtatgagcatacacatagtgagattataaaagacctagcatataacacctgccaaagaactgacagctgaatagtagtatcattgacttaatcttttcatctcagtcaaggtgtggagacctcattgaagacaccacaaactcagttaagtcagcagaaagttcacaactgaggaataaaaacaatgcagtggaggaagagcatgtcttaga

SEQ ID NO: 391285 - DNA, 578 bp, Homo sapiens
ttggttttaattctgtttatgtgatgtatcaattaattgacttacatatatgttaaaccatctctgcatccctagtatgaaacccacttggtcatggtggattatctgttggatatgttgttggatttggtttgctagtattttcttgaggatttttgtatctacattcatcagggatattggtctgtagttttctttttttgttatgaccttccctcattttgctattagggtgacacgggctttatggaattatttagggagaattcccaaggcagaagtttartgaagcttgagctgcaacatctcactctgctggggcttttttcaaggatgccaggaggaagcagcagccatagccttgagcttgtgcatgaagccctgccctggtttaggggccaccttctgagacctggggaccaggggcttcttgtggtgcaagtggaataccaacgcaaaccccacttactccaccctgtgcccatgatgaagaccatcagctctcttggttctcaagactttgaatcagcctgaagtacatcactggcttttatggttcatagaaaacatattatagg

SEQ ID NO: 391286 - DNA, 608 bp, Homo sapiens
aaatggaaaaatactccaggttcatggaaagacaatcctgatactgtcaagatgtcagttcttcctcattttatctatagattcaatgcaatctcaattaaaattccagcaagttattttgtggttatttgtgaactgaatccaaagtttatgtggagaaataaaagactcagaatagccatcacaatattgaaagacaagaacaaaatggaggaataacactactggactacaagrcttactataaagctacagtaaacaagacaatgtcgtattggtgaaagattagacaaacagaccaaaagaacagaacagagagttcagaaatagactcacatgaatataatcaactaacctgtgataaaggtgcaaagaaagtattgtcaatgaataatgccagaacaactgggcatctacatgcaaaaagaatgaatgaagacatagatattacatctcttagaaaaattagctcaaaatgaaccagagatctaaatgtaaaatgtaaaactataaaaccactggaagataacatagaagaaaacttagataaccttaaatatggtgatgatttttaggtacatctcaaaggtataacccatgaaaaaatt

SEQ ID NO: 391287 - DNA, 534 bp, Homo sapiens
ttacaagtcccccgtgaccaaatgaaagaaagaggtggtttcaaacaggcacaattttccctagctcagtgcagagtaagcaggtcaaaatgcccactttccagtatctcccaaggattgtgactgcatatgtgatggttaatattaagtgtcaactagatttggttgaaggatggaaagtattgtttctggctgtatctgcatgtttcttgaatgttgccagaagagattaacatttgagtcagtgaaattggagaagaagacccacmctcaggaagacccacccacaatgtgggtgggcaccatcgaattggctgccagcgtggctagaaaaagcaggcagagtaaggtagaagaagctgacttgctgcattttccagccttcatctttatcccatgctggatgcttcctgcctttgaacatcagactccaagttcttcagcttttggactcttggacacaatcaaactctttttatttgagacaacatggatgaacctggagggaattatgttaagtaaaataagccatgc

SEQ ID NO: 391288 - DNA, 584 bp, Homo sapiens
tgactgcatatgtgatggttaatattaagtgtcaactagatttggttgaaggatggaaagtattgtttctggctgtatctgcatgtttcttgaatgttgccagaagagattaacatttgagtcagtgaaattggagaagaagacccacactcaggaagacccacccacaatgtgggtgggcaccatcsaattggctgccagcgtggctagaaaaagcaggcagagtaaggtagaagaagctgacttgctgcattttccagccttcatctttatcccatgctggatgcttcctgcctttgaacatcagactccaagttcttcagcttttggactcttggacacaatcaaactctttttatttgagacaacatggatgaacctggagggaattatgttaagtaaaataagccatgctcagaaaggcaagtactgcataatctcacttatataggaagagtaaaaaatttgaacttatggaagtacaacggagaacggtggttatcaaagctgggatagggagatagagagtggggagatgttagtaaaaaagagaaaaacttcatttagataagaggagtaaattc

SEQ ID NO: 391289 - DNA, 316 bp, Homo sapiens
gaagctggccaaaacccaccaaaaccaaaatggtgacgagagtgacctctggttgtcctcactgctacactcccaccagcgccatgatagtttacaaatgccatgtcaacaccaggaagttaccctatatgttctaawtatgggaggcatgaataatccacctcttgtttagcatatcatcaagaaatagccataaaaatgggcaacaagcagcactcagggctgctctgtctatggagtagccattcttttattcctttactttcttaatattagcttgctttcagtttacattgcagactcaccctgaattatt

SEQ ID NO: 391290 - DNA, 584 bp, Homo sapiens
acatcaccaagtttttaaataaagaccaaaacacctctgacattaaacattaaaataaattgagttatacaaatgtttaagaaagattaacaaaaacaagtcaaaaaatatttattattcaattgttccaggtcagggccacaggtccctgaagcctatacyagcagctatattgggcataaggtaggaaccaaccctggacaggacactatctggtcacaggatgcacacacacacacacacacacacacacacacacactctctctctctctctctctctctctctctccaactggacaatttagacattgcattttaacgtgcacatctttgaaatgtgagatataaccagaatacccagacttaaggagaacgtacaaactccacgcagacaatagccctggctgagaattgaatttttttctcatcaatattataatgaaacaatgttcaaagacatgttattcaaggaccttctgtataatgttcttaaatttaatgactcaatattctaaagactaatgtaatgatgtaatgtttatcaaaatcaaaacaagatattttgtagatattgataataat

SEQ ID NO: 391291 - DNA, 584 bp, Homo sapiens
acatcaccaagtttttaaataaagaccaaaacacctctgacattaaacattaaaataaattgagttatacaaatgtttaagaaagattaacaaaaacaagtcaaaaaatatttattattcaattgttccaggtcagggccacaggtccctgaagcctatactagcagctatattgggcataaggtaggaaccaaccctggacaggacactatctggtcacagkatgcacacacacacacacacacacacacacacacacactctctctctctctctctctctctctctctccaactggacaatttagacattgcattttaacgtgcacatctttgaaatgtgagatataaccagaatacccagacttaaggagaacgtacaaactccacgcagacaatagccctggctgagaattgaatttttttctcatcaatattataatgaaacaatgttcaaagacatgttattcaaggaccttctgtataatgttcttaaatttaatgactcaatattctaaagactaatgtaatgatgtaatgtttatcaaaatcaaaacaagatattttgtagatattgataataat

SEQ ID NO: 391292 - DNA, 635 bp, Homo sapiens
agctgtgatgtcagagggcagaataagacggttgtctcctttccagaaaagaaagcaaattcaccctcattctgccttttttttttaatttggccatcaatggattggtgagcgtgatctttattcagtctactgattcaaatgctagtgtttttcagaagcacccttacagacctacacagaaataatagattttttttgtttgtttgtttttaccagctatctaaatatgctttaacacagttggcatacatttatatctaaaatattaaccattatacacctataccaaaaaatactactcatcaatatagaggaattaaatattgatacacgcagcaacctggatgaatctccagaggattttgctgattgaaaaaaatgcagtatcaaaatataaaatactgtattatttcatctacataatattcttgtgacaaaattataaaaatggagaacagatcattggttgccaggggttaaagagggagtgagtgagtgggaaatggatgtgattataaaagggccacatgagcratcctgctgttgatggaaatggtctgcattttcattgtatcaaagtcagctacctggttttgctattttactctagttttgcaagattttgaaaaatg

SEQ ID NO: 391293 - DNA, 552 bp, Homo sapiens
aaaataataactaaaacaacttttcaagatatagacagtataagacatcaatagaaacaacaaacagttaaaaagcattgcaattaagtgaaagtgcagaattttgattaattttctctttgtttttgcagtcactgttaagttgttatccgtttaaaataatgagatasaaggttttttttggttgttttgttttgttttgttttgtttgaaacggagtttcactcttgttgcccaggctggagtgtaatggtgcaatcttggctcaccgcaacctctgcctcccaggttcaagcgattcttctgcctcagcctcccaagtagctgggattacaggcatgcaccaccatgcccagctaattttgtatttttagtacagacggggtttctccacattggtcaggctggtctcgaacccctgacgtcaggtgatctgcccacctctgtgtcccaaagtgctggcattgagatataagattttacttgtattataagtctcatggtaacctcagatgaaaaaacctacaagagatacacaaaaagtaaaacaca

SEQ ID NO: 391294 - DNA, 552 bp, Homo sapiens
aaaataataactaaaacaacttttcaagatatagacagtataagacatcaatagaaacaacaaacagttaaaaagcattgcaattaagtgaaagtgcagaattttgattaattttctctttgtttttgcagtcactgttaagttgttatccgtttaaaataatgagatacaaggttttttttggttgttttgttttgttttgttttgtttgaaacggagtttcactcttgttgcccaggctggagtgtaatggtgcaatcttggctcaccgcaacctctgcctcccaggttcaagcgattcttctgcctcagcctcccaagtagctgggattacaggcatgcaccaccatgcccagctaattttgtatttttagtacagacggggtttctccacrttggtcaggctggtctcgaacccctgacgtcaggtgatctgcccacctctgtgtcccaaagtgctggcattgagatataagattttacttgtattataagtctcatggtaacctcagatgaaaaaacctacaagagatacacaaaaagtaaaacaca

SEQ ID NO: 391295 - DNA, 552 bp, Homo sapiens
aaaataataactaaaacaacttttcaagatatagacagtataagacatcaatagaaacaacaaacagttaaaaagcattgcaattaagtgaaagtgcagaattttgattaattttctctttgtttttgcagtcactgttaagttgttatccgtttaaaataatgagatacaaggttttttttggttgttttgttttgttttgttttgtttgaaacggagtttcactcttgttgcccaggctggagtgtaatggtgcaatcttggctcaccgcaacctctgcctcccaggttcaagcgattcttctgcctcagcctcccaagtagctgggattacaggcatgcaccaccatgcccagctaattttgtatttttagtacagacggggtttctccacattggtcaggctggtctcgaacccctgacgtcaggtgatctgcccacctctgtstcccaaagtgctggcattgagatataagattttacttgtattataagtctcatggtaacctcagatgaaaaaacctacaagagatacacaaaaagtaaaacaca

SEQ ID NO: 391296 - DNA, 613 bp, Homo sapiens
acaattgttcatcaaaatttaaaagttgaattaacatatgatccagggatttgatttttccacaaatacccaaataaattgaaagcagggtcttgaagagattttgtagacccatgctcacagaagcatttttcatatagctaaaatgttgaaacaacccaggtatccatggacagatgaataggtaagcaaaacgtggtatatacatacaatagaatatgactcagccttaaaaagaaaagaaatcctgatatatgctacaacatggatggaccttaaggatactatgttaagtgaaataaastaattacaaaataaaatactgtatgatactgtatgaaagtacaatggtggttgcctggtgttggtagcaagggaaaatggagaattttttgtttaatgagtatacagtttcaattttgcaaaatgaaaaacttcctagaaatgaatggtggtgaggtttagcaacaaccatatgaatgtacttaataccactgaaccgtatgcttaaagatggctaagatggtaaattttaggttatattttaccaaaatttttaaaaattgaaggattaaaaagataagtagggaaatttggatataactggctaata

SEQ ID NO: 391297 - DNA, 530 bp, Homo sapiens
gagagtccaggctgcttccactcatagtgaaagcaaagggaagtcagcaggtgatgtgtacagaaatcatatgagagaggaggcaagagagagcaagaatgtaccaagtccttttaaacaatcagcttttatggaaaataatagagggagaattcactcactccagagggagggaattaatgtactcatgttggatttaccaccattactcaaacatctcccatcaggccccacttgtagcattggggttcaaatttcaacatttggtttggggtgacaaatatccaaaccataatatccaataatataaaattcccaaaatataatcacattaagaaccaagtagaaggctaaaatgttgtttaaaacatcataacagaataatagtgaactgagttacatataaatagaaaataytggaccgggcacagtggctcacgcctgtaatttcagcactttgggggaccgaggtgggtggaagttcgagaccagcctggccaatatggtgaaaccccatctatgctaaaaat

SEQ ID NO: 391298 - DNA, 530 bp, Homo sapiens
gagagtccaggctgcttccactcatagtgaaagcaaagggaagtcagcaggtgatgtgtacagaaatcatatgagagaggaggcaagagagagcaagaatgtaccaagtccttttaaacaatcagcttttatggaaaataatagagggagaattcactcactccagagggagggaattaatgtactcatgttggatttaccaccattactcaaacatctcccatcaggccccacttgtagcattggggttcaaatttcaacatttggtttggggtgacaaatatccaaaccataatatccaataatataaaattcccaaaatataatcacattaagaaccaagtagaaggctaaaatgttgtttaaaacatcataacagaataatagtgaactgagttacatataaatagaaaatactggacmgggcacagtggctcacgcctgtaatttcagcactttgggggaccgaggtgggtggaagttcgagaccagcctggccaatatggtgaaaccccatctatgctaaaaat

SEQ ID NO: 391299 - DNA, 530 bp, Homo sapiens
gagagtccaggctgcttccactcatagtgaaagcaaagggaagtcagcaggtgatgtgtacagaaatcatatgagagaggaggcaagagagagcaagaatgtaccaagtccttttaaacaatcagcttttatggaaaataatagagggagaattcactcactccagagggagggaattaatgtactcatgttggatttaccaccattactcaaacatctcccatcaggccccacttgtagcattggggttcaaatttcaacatttggtttggggtgacaaatatccaaaccataatatccaataatataaaattcccaaaatataatcacattaagaaccaagtagaaggctaaaatgttgtttaaaacatcataacagaataatagtgaactgagttacatataaatagaaaatactggaccgggcacrgtggctcacgcctgtaatttcagcactttgggggaccgaggtgggtggaagttcgagaccagcctggccaatatggtgaaaccccatctatgctaaaaat

SEQ ID NO: 391300 - DNA, 580 bp, Homo sapiens
atttctgtaattgcaattaactgggaacttaaaatgtttttagtatacagtatttttacattggagatactttctattagtttggtttaagaatttatacatgaacttttaattctttttttacttaatatttattttttaaaaatatactttctattctacacgtctgttggccttttgaaaaagaatatgcaaattacaaaattagaaacataaattggttcatattgccttacagacattttaacttttcaagtaagtgataaaatttctaatttagtctaagtagtatttagaagtgtttttaaaaaatcttttatatatatatgctataaaataagcaatgtgtgtatggttgaactgtttttcagataattgtcatacatctaaaagatttatttgtattattgatttayattaaattgaacatatattaaactttttaaaactatttttctactgacaggaattcacattgtttccatttttatatttaaattattttgtaattggatactggcaatatggtagagtagaaagaaccagaaatctgactccacatctggaaaataattacaca

SEQ ID NO: 391301 - DNA, 594 bp, Homo sapiens
aactgtaggatgctgattataatccccatggtcaccaaagaaagagtatagaatttaaaaaaaggaaatgagaaataaaatatttcagtacaaaacaagaactatacacaaaagaagacagcaatacagaaaattaggaacaaaaaagctacaagtcatatagaaaacaaatagcaaaatgatagaagtatgtccctttgtcaaaattactttagatataaaaggtttaaactttccaatcaaaatgcagagattggcagaataggtaagaaacaataatccaactacatgctgtctaccagctactcacttcagatcaaaagtcaaaaataagttgaaagcaacacaatggaaaaaggcatttcctacaagtagtaactaaaagagataagattgattgcctataataagataaaatagactttaaacagaaaaaaaattatatgagacaaaaggatattatatgytaataagaggtgaaatacagcaagaagatataataatgataaacatttatgcacctaatattaattagtcaaaatatatgaaacaaaattcacagaaatgaatgcaaaaataggcatttctataaca

SEQ ID NO: 391302 - DNA, 594 bp, Homo sapiens
ttcaaattataaaaccattgtcattgtgcttctacaacaaaatacctgagactgggtaatttataaggagtagaaatttattttctcacagttctgtacattgggaagaccaagatcaaggcaccaggctgttcagtgtctggtaaaagcctgttccttatagacgacaatgtctagatgtcctcacatggtggaaatgataaaagtacaaaaaggagaaagatgttatgtcctctcatggtgaaagagtgagcagaagggacaaagaaagagagagacagctcccaggaatttccattataaatgctaatcccattcatgaagtctctgtactcatgacttaatcaccttctaaaggttcccaccttttcacattgatgattaagtttaaacrtatgagttttggagaacatattcagatcacagaaaccatctttaaacaaagtactcaggaaatattacgtatatatctaatggaagagtctactaaaaatgcagatttgatcaagttggttaatggttaatgccagatttttaagtaagagtaggactgaagaaattctgttaaacctagcagcaaataacgttggtaat

SEQ ID NO: 391303 - DNA, 603 bp, Homo sapiens
taaacatccagcagtaggtgcccatttatttacaaagattgcagttgtacacagtaacccaagtacggaaagggaaagtcacaaaattagaatgatggagctttgggctgaagtgtagttatgtagctggtaagcttaatgtaggatggaaactctgtggtgacaggtataaataagaagtgaaaatagaaggaaaaaacacgtactctctaatttaataatattagcccattttaccctccgaacatttcaaaaattaccttgaacatatatatgatttyaatattttttatataaaaaatgtagatctatccatgtgaacttttgattttgtcttaaagtacccaaataattgaatcaattattgacttacagatttaggtccgcaaaaatttatttaattttgagttaaataaagaaaataaacaaattgaggttcaggacttgtacctatattaaacatattgataaatatagaaaatgtgtctttctttataaaatgttaacatatcaggaaaatatccaaaaaattattgaataactctgtttcaatcagtatttacagtcacatggccacatacagatatgtatcatttttctagg

SEQ ID NO: 391304 - DNA, 590 bp, Homo sapiens
aaagaatggtttagaattcataattcgtaaatattaactccaagtggttaataaacataaaaaagtcttaactcttattgatgatcaagaaattaaaaattaaaactacaatgctacccaaccatgtacttattgtattggctaaaactaaatagakgtagacctcattaaggtctttcatactctgctggttggagagtgtggtacaacctcattagaaaaaaatttaaatatttatctaaatcttaaggtagacatatcctatgacacagcacaactaaatatttatcttagaaaacccattggataaatacacaaaaatattcattacaaatttttgactaattttctcaggtaggaaacaactaaaatttcattgtgtttattaaatgatggacaataaattgccataaattttataatgtaatattacacagcaacaatgataatgaaggagtgacaacagtaagatttgagatgaatacatttttaaagaaaacactaattttgagcaaaatagcaagattaaactcaatttagtttgattcatttatataaattaataaaagagatatattagttttctattg

SEQ ID NO: 391305 - DNA, 590 bp, Homo sapiens
aaagaatggtttagaattcataattcgtaaatattaactccaagtggttaataaacataaaaaagtcttaactcttattgatgatcaagaaattaaaaattaaaactacaatgctacccaaccatgtacttattgtattggctaaaactaaatagatgtagacctcattaaggtctttcatactctgctggttggagagtgtggtacaacctcattagaaaaaaatttaaatatttatctaaatcttaaggtagacatatcctatgacacagcacaactaaatatttatcttagaaaacccattggataaatacacaaaaatattcattacaaatttttgactaattttctcaggtaggaaacaactaaaatttcattgtgtttattaaatgatrgacaataaattgccataaattttataatgtaatattacacagcaacaatgataatgaaggagtgacaacagtaagatttgagatgaatacatttttaaagaaaacactaattttgagcaaaatagcaagattaaactcaatttagtttgattcatttatataaattaataaaagagatatattagttttctattg

SEQ ID NO: 391306 - DNA, 488 bp, Homo sapiens
aaaatggtatcccttaggtcacagagagcaatgcactatttcttgatttaggaggttatttcattgccattttttaagcaaaatattaaatttcacttttatgttttatacactttcatactaaaactaattaatcatagattatatgggatttcaaattgagtgaagaatcacttttttggaatcactgctgctgttttggctatacagtgatgggttgaactgtttttggcagtgtataaagaaggaaagactgaatagattagtgggatttttcagaacagtataaacaaaagattttttaagcttgtaaactttggaattttattatttttctccctttctttttggcagattttacatatctctagtgattcatataatgattgattatataatctttttgagaatcgtgaaatgacatcacttaacccatgtttragaggacaatgttgagagtcattatgtctgaatttgttaattttttt

SEQ ID NO: 391307 - DNA, 542 bp, Homo sapiens
cattatgtctgaatttgttaattttttttcacatacactttctattaggtacaacttctgtttgttatcttaattatgatagatgatgattctcatgatactccctttttataaataacaccttcataaatatttgactatcatagctaaataatgcaaaaatcttgcatgccaaataaaatgtgatgcagtttaaaaatcccaaaacaacacacattattgacagtaaattttaaatattataaagtttaaattttaatacaaaataaattttaaatactttaagctgtttacatattttaaaagttattattttgttctatcaatataatctttctgcattttgtkaatttaattgagttaatcttacctaaccaatttctttctgtagttcaaaactttacaagcccaaagtgttaaaatttctggcatctctttaatatacaccatttggtcatacaaaaaaggagaaatactattttagattaagagacagatgaaaaatagtagataaaataatattgatttcagatggaagataa

SEQ ID NO: 391308 - DNA, 551 bp, Homo sapiens
tggatgccctggattagaatcttcataatatgtgtccatgcatgagtatatatgtgtttttctattraaggggcatgtaatgagatgagaagaaaaatacactagggtcggtggcaacttcctcaccctgtctacaaatggacacaatatagaaatgcacacacagacccattcagtgaaatgtcataccatatattttgcctattctgtatgcatatcatatttttgagaccactttagctcagccaaacagctctttttccttttaagaaagattaaatgaagctgctcaaataaattaatgttcttcattagtgataaggttttggcagtaaatagctgaccattggacttacagtggctcactcgttcaagatattccattatctcacatggcaaaatagctagagaaaggaagtttgtcttacattcaaaacaggtttgtggcagttccaagcatcatatcacacacttctgtcccaaagcacagtgtagaaaaaaaaatgctttttttttattttacataggactagtctccttttttatgtgtt

SEQ ID NO: 391309 - DNA, 634 bp, Homo sapiens
taatctatcactggaaacagtttcaaccgtaattttttcactcttgatcacgactcactcatatgacccagtgaaacaaattacagtgttctctttgcattgatttgacttctgggcctttgtaaatcttacttctctaattaggctgtaaaaagaaactgcaatatatagattcatggaatagaatcaggacaggggaaacatttttaacagttttgaagcccaaggggattttagaactgtcactgtgatgagttgggtttaaaaattctatggtctatattaaaataaatagtcttatgacaacacagttcctgttctaggcatctcagagtcactgtagttttgtatatttggaaatgcttaaatacactggaaataaaaaaaatgctacattttcatattacaatattaaacattctattacttttcattcctacaactactgttccatttcatgtcctaatcattgcttgtctgtagaatttcaataatttctcgaatggtttttattactaggaatctgtcctttgtcagatgactttcctagaaaacaatatccattttatatgactttaawattttggaatcacatggtttcctcatatctattcaattgttttaaaactagtga

SEQ ID NO: 391310 - DNA, 560 bp, Homo sapiens
aacataatttgacaaatataaccatgaaatgattatgaataggtattatagaatggaaacatgaaataattgaaataaaaaccttgctagatgagttcaatagtacaatggagatgatagcagagaacagaattagtgaactggaagactcatcaatagtgtttgctcgatcttaacaacacagagaaatcgactttaaaaatacacagagtctaaatgatatgtaaaaaggtaacaaaagatttagcatccatatcactgcagtcccagaaggagagggaaaaatgaaagggcaggacaaacatttaaagaaataatatctgaaaatacccaaacttgttaagacatgaacccacatacttaagaagctgagcaaaccccaaagatgattaaaaacaaacaaatgaaacctttaacaagacagacaagaattatacttataaaaactatagaaaaaaaaracaccttaagaaccagagagaagcaacacataatctctagaggaatgcaagttcaaatgacagcccacttctcatccaaaaccattgagaccaaaagca

SEQ ID NO: 391311 - DNA, 526 bp, Homo sapiens
tttagccttcaaaagagttgatctaattttctgcttttctatatccatcaaaaaattaatttacctacctgctcaccacctaaatggccatataagtatcttcctgctttaactcatctgcttacattattacatgctctgtatgtatgtgtaacttaaaaattgatataatttatatctatagatagaagatacagatatagattgtagagatggatggatagattctactattctgactattatacatcttatgtgtatgctatttcaattctgactactgtaatgctatgcctctctttagctgaartaaataatttgagtctggaaaaaacttttcctagattctggatgatctgaaaagtctaccatgaatggcacataaaattaacaccaaaagtaaaaaaaaagactagaaggtataacctaggtaattatggcagactcttaattcacatgattttccttttatgaagagcaacataaattgtataaaactagtgtctggatgttaaactctggcgtc

SEQ ID NO: 391312 - DNA, 464 bp, Homo sapiens
ggcttatggttcagcaggctgtaaaggaagcatagtggcttctgcttctgggaggatcaggaagcctcccaatcataccagaaggccaaggggcaaggagatgtttcatatggcaggagtagaagcaagactgagagaggaaagaggtgccacaccctgttatataaccagatctcatgagaacacactatcatgaggacagcrccaagaagatgctgcctaaccattggtgaaggatctgcctcccacccccacctcccaatgtttccaggcagaagcctgctgcagacgcagagttcttggaaaacctctactagggcagtgctttaggaaaatatggacttggagcccccacacaggggactaccaccctccagaccccagactcatagacccaccaacagcttgcactctctgtgtggaaaatctacagtcactcaacactagtccagtccatgagagca

SEQ ID NO: 391313 - DNA, 464 bp, Homo sapiens
ggcttatggttcagcaggctgtaaaggaagcatagtggcttctgcttctgggaggatcaggaagcctcccaatcataccagaaggccaaggggcaaggagatgtttcatatggcaggagtagaagcaagactgagagaggaaagaggtgccacaccctgttatataaccagatctcatgagaacacactatcatgaggacagcgycaagaagatgctgcctaaccattggtgaaggatctgcctcccacccccacctcccaatgtttccaggcagaagcctgctgcagacgcagagttcttggaaaacctctactagggcagtgctttaggaaaatatggacttggagcccccacacaggggactaccaccctccagaccccagactcatagacccaccaacagcttgcactctctgtgtggaaaatctacagtcactcaacactagtccagtccatgagagca

SEQ ID NO: 391314 - DNA, 573 bp, Homo sapiens
tctaatctatcatttcagacaaatcccttgattttttcccacagctctccctctttgtgttagagttccataaatgtaatgcccamtatgtgaagagaaaattaacattcccctttttctacttgcagacttccaaacatttcctgaaaccttaaactcttactgattctttaaactgtccccattccacttttctctgcagcaagtagctctcaatgtgtagtcctcagatgggcagcatccactggaaaactgctagaaatgcacattctcaggcctcacccaagatctgctgaatcagaagctctggggtggaacccaacaacctgcattttaacaagccttccagatgacgctgaagcatgctccatactgacaactaatgcaatgcattatggtaaatttgcccacccaccctctggcaaaaataacatctaattgcatttactttttagtttgatgagaacttatctcggtatcttttaattcacctgatgtttctgttggtaacaaaaccaacaaaaacattgtaaatttggtacactgaaatgcaaaataagagtgaaggagagg

SEQ ID NO: 391315 - DNA, 573 bp, Homo sapiens
tctaatctatcatttcagacaaatcccttgattttttcccacagctctccctctttgtgttagagttccataaatgtaatgcccaatatgtgaagagaaaattaacattcccctttttctacttgcagacttccaaacatttcctgaaaccttaaactcttactgattctttaaactgtccccattccacttttctctgcagcaagtagctctcaatgtgtagtcctcagatgggcagcatccactggaaaactgctagaaatgcacattctcaggcctcacccaagatctgctgaatcagaagctctggggtggaacccaacaacctgcattttaacaagccttccagatgackctgaagcatgctccatactgacaactaatgcaatgcattatggtaaatttgcccacccaccctctggcaaaaataacatctaattgcatttactttttagtttgatgagaacttatctcggtatcttttaattcacctgatgtttctgttggtaacaaaaccaacaaaaacattgtaaatttggtacactgaaatgcaaaataagagtgaaggagagg

SEQ ID NO: 391316 - DNA, 573 bp, Homo sapiens
tctaatctatcatttcagacaaatcccttgattttttcccacagctctccctctttgtgttagagttccataaatgtaatgcccaatatgtgaagagaaaattaacattcccctttttctacttgcagacttccaaacatttcctgaaaccttaaactcttactgattctttaaactgtccccattccacttttctctgcagcaagtagctctcaatgtgtagtcctcagatgggcagcatccactggaaaactgctagaaatgcacattctcaggcctcacccaagatctgctgaatcagaagctctggggtggaacccaacaacctgcattttaacaagccttccagatgacgctgaagcatgctccatactgayaactaatgcaatgcattatggtaaatttgcccacccaccctctggcaaaaataacatctaattgcatttactttttagtttgatgagaacttatctcggtatcttttaattcacctgatgtttctgttggtaacaaaaccaacaaaaacattgtaaatttggtacactgaaatgcaaaataagagtgaaggagagg

SEQ ID NO: 391317 - DNA, 573 bp, Homo sapiens
tctaatctatcatttcagacaaatcccttgattttttcccacagctctccctctttgtgttagagttccataaatgtaatgcccaatatgtgaagagaaaattaacattcccctttttctacttgcagacttccaaacatttcctgaaaccttaaactcttactgattctttaaactgtccccattccacttttctctgcagcaagtagctctcaatgtgtagtcctcagatgggcagcatccactggaaaactgctagaaatgcacattctcaggcctcacccaagatctgctgaatcagaagctctggggtggaacccaacaacctgcattttaacaagccttccagatgacgctgaagcatgctccatactgacaactaatgcaatgcattatggtaaatttgcccacccaccctctggcaaaaataacatctaattgcatttactttttagtttgatgagwacttatctcggtatcttttaattcacctgatgtttctgttggtaacaaaaccaacaaaaacattgtaaatttggtacactgaaatgcaaaataagagtgaaggagagg

SEQ ID NO: 391318 - DNA, 464 bp, Homo sapiens
ggcttatggttcagcaggctgtaaaggaagcatagtggcttctgcttctgggaggatcaggaagcctcccaatcataccagaaggccaaggggcaaggagatgtttcatatggcaggagtagaagcaagactgagagaggaaagaggtgccacaccctgttatataaccagatctcatgagaacacactatcatgaggacagcgccaagaagatgctgcctaaccattggtgaaggatctgcctcccacccccacctcccaatgtttccaggcagaagcctgctgcagacgcagagttcttggraaacctctactagggcagtgctttaggaaaatatggacttggagcccccacacaggggactaccaccctccagaccccagactcatagacccaccaacagcttgcactctctgtgtggaaaatctacagtcactcaacactagtccagtccatgagagca

SEQ ID NO: 391319 - DNA, 504 bp, Homo sapiens
ctatcatcaagctgtttatgttctttacatttctgttcttgataattatatgctagtctttgaatatgaagataatgcttctgacccaatattcataatgcatgtgcctcgagttgttattttttgcaagagaaataagtttattttgatctgatgcactttctttcccagtcttcatgtgaccagcagcaccaactgcaagactgtctgtcacctgagtgtggcttgcaaccaagcacatgtgggaattcagtgaagcccctgccttgacctcattatcaacaggaaccagccaaagacagtggtcactctttatccatgtaaatagacaccgtaatttattttcaaaaaaatccaaaggaaaaaatttaaggccattrtaataccagaaatctgcactgtgagtacttggaagatgacagttgataaagctgggaggtttacaatgactagattgtcagaaggggttaaatgtatgttctaataataagagaacaagaaaaa

SEQ ID NO: 391320 - DNA, 270 bp, Homo sapiens
taaggccattgtaataccagaaatctgcactgtgagtacttggaagatgacagttgataaagctgggaggtttacaatgactagattgtcagaaggggttaaatgtatgttctaatartaagagaacaagaaaaaagaatgccctggtgatgtgtaaatttaaaatacagtggtacattttaggaaaaccaaaaatcaatccatgaactttgaaatgaagggagatagttctgagagaactaaaggaactggacttgagatccaagatta

SEQ ID NO: 391321 - DNA, 270 bp, Homo sapiens
taaggccattgtaataccagaaatctgcactgtgagtacttggaagatgacagttgataaagctgggaggtttacaatgactagattgtcagaaggggttaaatgtatgttctaataataagagaacaagaaaaaagaatgmcctggtgatgtgtaaatttaaaatacagtggtacattttaggaaaaccaaaaatcaatccatgaactttgaaatgaagggagatagttctgagagaactaaaggaactggacttgagatccaagatta

SEQ ID NO: 391322 - DNA, 537 bp, Homo sapiens
gggattatgacattctgccatgcttggaaaagttggatttatgaaaccagyagctggactgagcctgcctatgcagctcttacacaagtgcttcctattttgtgcacaagcagcctcaagagcccaaagatagtgattgagagagacaggctctgaagcctttttatttcaacttcttggaatcaccaccttgctaataaatatcaaaatctttggtgtcatttatcagattaattactttttccataaaaagagtgagttgagaaaataacaagcaagaaactccctgtcccttcttcatcctgaaaacaggagaatcaatatcttaaccctgtttttgagagatgaatgggtaggtcaatattgcttggctatttgtccttccacttgggagagattactgctgcattttcccctcaatctctagaatcatggcttatagaaaacaattatgtactgaattactaattgcatcaaaactttattagacttcttatcaaagagcatgctcagatttatttattattaatagtaata

SEQ ID NO: 391323 - DNA, 537 bp, Homo sapiens
gggattatgacattctgccatgcttggaaaagttggatttatgaaaccagtagctggactgagcctgcctatgcagctcttacacaagtgcttcctattttgtgcacaagcagcctcaagagcccaaagatagtgattgagagagacaggctctgaagcctttttatttcaacttcttggaatcaccaccttgctaataaatatcaaaatctttggtgtcatttatcagattaattactttttccataaaaagagtgagttgagaaaataacaagcaagaaactccctgtcccttcttcatcctgaaaacaggagaatcaatatcttaaccctgtttytgagagatgaatgggtaggtcaatattgcttggctatttgtccttccacttgggagagattactgctgcattttcccctcaatctctagaatcatggcttatagaaaacaattatgtactgaattactaattgcatcaaaactttattagacttcttatcaaagagcatgctcagatttatttattattaatagtaata

SEQ ID NO: 391324 - DNA, 502 bp, Homo sapiens
aaaattaacatgaatggaagtaaatataaagtatattcacattaatatcagctttgctttatctattaaagtatatgacaagcttgcggttttcaggaccttgtaactcctggttcattgcaaagcacagaaattcttcagagcctcaagagttgtgtttaatgcactatttaaatagtctccaaccactaggttagatagcttagcrgtcaaatagcctttgaaatctctgtagactcacctcaattgagcagtcctgataatttacagaagtgtgtagtgcactaagagatccctgatgtatgatgtctttgcctgtagagtgttttctgtgtttatccactgaagtgtgtgtgggggtgtgtttctgtgtgtaggtgggtgagtatgggggtgtgtgtgtgtctgcgtgtaggtgggtgagtatgggtgtgcacgggtgtgtgtgtgtgtgtttatattgtggtgtgtgtctgttggggtgctgccatcagggatttgg

SEQ ID NO: 391325 - DNA, 383 bp, Homo sapiens
tctttgttgctatctttttcaaaaggaagagattggtagaaaagagaaaaaccttttttttatttctgttgtccttccactagtatttattatgggaaatctgtgtctactgcttcttcagaattcattacacctggtgagtcccagcgccaaggcccccrtataatttctatgcctttgcttaattaagacactgtgatagactgggcagacatttcctggcaatttatgatcagctggaggagcttaagtcttaaagcaaagctgtgaaaatatgcagttatgtttatataaaaagtagtgaaattataacttttcatgtcttagctaaaagttgaaaaggcacattgttgtggttgacaagctgcatttatactttttgt

SEQ ID NO: 391326 - DNA, 556 bp, Homo sapiens
ctgtgatagactgggcagacatttcctggcaatttatgatcagctggaggagcttaagtcttaaagcaaagctgtgaaaatatgcagttatgtttatataaaaagtagtgaaattataacttttcatgtcttagctaaaagttgaaaaggcacattgytgtggttgacaagctgcatttatactttttgttcttttcctattcattaaaagccattcacaaataaacaggaagaaagagacacacactctgagtttgacacttgctcttttttattaggtatttggaatccaggtcaatgtgaagaacttccctaagactcattgctggctaacactgggattagttactcaaagagctttgtagtgtgaccatcattaagacttttacagatgtctttatttaatcacataggtttagcagagttcagccaatagactgtggaatggacagaatgagcccaatgcttgtctgacaaaatatgttgaatttgtcagttctaagtgtaacacttggatcttccacagctatcaccatgtagtacagtgttattcacc

SEQ ID NO: 391327 - DNA, 556 bp, Homo sapiens
ctgtgatagactgggcagacatttcctggcaatttatgatcagctggaggagcttaagtcttaaagcaaagctgtgaaaatatgcagttatgtttatataaaaagtagtgaaattataacttttcatgtcttagctaaaagttgaaaaggcacattgttgtggttgacaagctgcatttatactttttgttcttttcctattcattaaaagccattcacaaataaacaggaagaragagacacacactctgagtttgacacttgctcttttttattaggtatttggaatccaggtcaatgtgaagaacttccctaagactcattgctggctaacactgggattagttactcaaagagctttgtagtgtgaccatcattaagacttttacagatgtctttatttaatcacataggtttagcagagttcagccaatagactgtggaatggacagaatgagcccaatgcttgtctgacaaaatatgttgaatttgtcagttctaagtgtaacacttggatcttccacagctatcaccatgtagtacagtgttattcacc

SEQ ID NO: 391328 - DNA, 556 bp, Homo sapiens
ctgtgatagactgggcagacatttcctggcaatttatgatcagctggaggagcttaagtcttaaagcaaagctgtgaaaatatgcagttatgtttatataaaaagtagtgaaattataacttttcatgtcttagctaaaagttgaaaaggcacattgttgtggttgacaagctgcatttatactttttgttcttttcctattcattaaaagccattcacaaataaacaggaagaaagagacacacactctgagtttgacacttgctcttttttattaggtatttggaatccaggtsaatgtgaagaacttccctaagactcattgctggctaacactgggattagttactcaaagagctttgtagtgtgaccatcattaagacttttacagatgtctttatttaatcacataggtttagcagagttcagccaatagactgtggaatggacagaatgagcccaatgcttgtctgacaaaatatgttgaatttgtcagttctaagtgtaacacttggatcttccacagctatcaccatgtagtacagtgttattcacc

SEQ ID NO: 391329 - DNA, 556 bp, Homo sapiens
ctgtgatagactgggcagacatttcctggcaatttatgatcagctggaggagcttaagtcttaaagcaaagctgtgaaaatatgcagttatgtttatataaaaagtagtgaaattataacttttcatgtcttagctaaaagttgaaaaggcacattgttgtggttgacaagctgcatttatactttttgttcttttcctattcattaaaagccattcacaaataaacaggaagaaagagacacacactctgagtttgacacttgctcttttttattaggtatttggaatccaggtcaatgtgaagaacttccctaagactcattgctggctaacactgggattagttactcaaagagctttgtagtgtgaccatcattargacttttacagatgtctttatttaatcacataggtttagcagagttcagccaatagactgtggaatggacagaatgagcccaatgcttgtctgacaaaatatgttgaatttgtcagttctaagtgtaacacttggatcttccacagctatcaccatgtagtacagtgttattcacc

SEQ ID NO: 391330 - DNA, 507 bp, Homo sapiens
gttgtggttgacaagctgcatttatactttttgttcttttcctattcattaaaagccattcacaaataaacaggaagaaagagacacacactctgagtttgacacttgctcttttttattaggtatttggaatccaggtcaatgtgaagaacttccctaagactcattgctggctaacactgggattagttactcaaagagctttgtagtgtgaccatcattaagacttttacagatgtctttatttaatcacataggtttagcagagttcagccaatagactgtggaatggayagaatgagcccaatgcttgtctgacaaaatatgttgaatttgtcagttctaagtgtaacacttggatcttccacagctatcaccatgtagtacagtgttattcacctatccaagttcatagaagattccattccaggctctgcaccaagtattttccatctataacagggataaagttttagatatattttctaagttttcttacggttgggc

SEQ ID NO: 391331 - DNA, 581 bp, Homo sapiens
atgtaattcctcacagttataagatcacacacaactaacacaacttaaataattatgtctttaaacaataaaaaccaaagaaagaaaaaatttcatatatttggccatcattttcattagaggtcaaaatcctactaataagctccctcctttggcattcttcctaaatacattgtattacctggaaacaggacaaatattcatctctaaatcaatgacaagcaaaggaattacattaacrtttgtattagtttgcttttgctccaataatgcttaagaaacatgacaagaagttactgaccaataacagcaagcatttactccttgctcatgaattttgcgaattggttgcagcagttctaccttagactacagatgagagtcaggtgtgctccaggtgtctctcattcctggacccatgttgaaggacacagactacttagggcatttgatttttataatgctttatatatattgatttttataatgctttataagcaagagttgaagaggagaagcttctttaaagttctgcttagttacttctattactattaacctacccaaattctattgggtag

SEQ ID NO: 391332 - DNA, 579 bp, Homo sapiens
tgtcagtgagaagcatttgttgaatgtctaccatgtgccaagcagtgcacttggtattctcatgtgtcatgtctttgtgtatcaattactaatccataggttgatgcaaaagtcattgcagttttaaccatcattttcaagggcaaaaaatcacaattacttttgcaccaaatgaatatcatttctcagtcccaagccaatgcttctatacctgtttttttgcaatgtttagttggacatctataacggccttccatgaggcagcctactgtctcycagagcatgataaggaagttccttgggttagatatctttctagcctgaaatattacaatttgcatttcagcccattgaattagacatttttgtcttcagataatttctttggaaatgcaaatgttcctcaaagtgtagctacctattgggtcactgaagctttaatattagcaggtttgctggttcgctttcttcaaggatagtggatattttgccaaaaagggagaataggaagccagagtggaaagaggggaacaaaaacagggatggatacaagggaaggagatagatggtattagcatt

SEQ ID NO: 391333 - DNA, 572 bp, Homo sapiens
tttatcaggtgttcacaaggtttaggaaggcccagcacaaagcaaaaccatagagacgttgagtactcttttgcttcagcattcagcatccaattccaactccatgcttttccttacttccaacttccatttttgccccgagcaacctgtgcaggaaaccatcagtttccctgctccactggacatctaaagactatggtggtgatagaaaatgagagtcatcaaaaaggtccaagtttagtgaagatgcgcaaagggaaccagcccttcccaaagaattcagtgaatgagccaagattctccagaaaccgctcagctttgcagtgataattttctgtgaagacatagactgaaatgggaataagagatagaaagttgaaaaagawttttctcagaatccacatgtaaccttacagaaggcaaacagaagggttagtgagataaatggaatcacgtagctgaggtgagacaatgtaggaaaatcaagcatgagataggaaatcaggatattgtgcttctttgtgaagactcggttccctctaattgctcgtaaacctaaaatctctacttca

SEQ ID NO: 391334 - DNA, 572 bp, Homo sapiens
tttatcaggtgttcacaaggtttaggaaggcccagcacaaagcaaaaccatagagacgttgagtactcttttgcttcagcattcagcatccaattccaactccatgcttttccttacttccaacttccatttttgccccgagcaacctgtgcaggaaaccatcagtttccctgctccactggacatctaaagactatggtggtgatagaaaatgagagtcatcaaaaaggtccaagtttagtgaagatgcgcaaagggaaccagcccttcccaaagaattcagtgaatgagccaagattctccagaaaccgctcagctttgcagtgataattttctgtgaagacatagactgaaatgggaataagagatagaaagttgaaaaagaattttctcagaatccacatgtaaccttacagaaggcaaayagaagggttagtgagataaatggaatcacgtagctgaggtgagacaatgtaggaaaatcaagcatgagataggaaatcaggatattgtgcttctttgtgaagactcggttccctctaattgctcgtaaacctaaaatctctacttca

SEQ ID NO: 391335 - DNA, 252 bp, Homo sapiens
atttattaagacactaccaggggtgagaccctgagtaaatgattgtcaaatttgaatatgtggttagaaacacctgaaggactgctgggccccacacccagagtttmtgattcattgagtttgagctgggacttgagaatttacatttctagcaaattcccagatgatactgatattgctgtctggaggccacactttgaagaccactgcctctaggaatgggaaaagaaattagataccagcaatctgtcc

SEQ ID NO: 391336 - DNA, 252 bp, Homo sapiens
atttattaagacactaccaggggtgagaccctgagtaaatgattgtcaaatttgaatatgtggttagaaacacctgaaggactgctgggccccacacccagagtttatgattcattgagtttgagctgggacttgrgaatttacatttctagcaaattcccagatgatactgatattgctgtctggaggccacactttgaagaccactgcctctaggaatgggaaaagaaattagataccagcaatctgtcc

SEQ ID NO: 391337 - DNA, 252 bp, Homo sapiens
atttattaagacactaccaggggtgagaccctgagtaaatgattgtcaaatttgaatatgtggttagaaacacctgaaggactgctgggccccacacccagagtttatgattcattgagtttgagctgggacttgagaatttacatttctagcaaattcccagatgataytgatattgctgtctggaggccacactttgaagaccactgcctctaggaatgggaaaagaaattagataccagcaatctgtcc

SEQ ID NO: 391338 - DNA, 177 bp, Homo sapiens
gggcaaaactgaaggttttaaatgctatgaagygtagggccatgctgctggtgctaattaagcactgagaactacctttcatacaaggctgagatctgtacatgagagctgaaacagcctcttgctacttgatcatgaacatcttcagttagatccagaaagggtctagtgagggta

SEQ ID NO: 391339 - DNA, 541 bp, Homo sapiens
aaaatccctagtgtttaattagttttagttagttgagactgattgtgatgaaacacaacatttaactttgctatctcctaggcaagtgctgccagaaataaaaagtctcctttttacagaaaagagaacatggaaaggcggtccagagttcagtctcaaaggcaatgctgggcagggactgacaaagggttgaggagtgtccattaacctgggtattggtgatggaaagcatatcctgaaattggagatagcaagactcttggtgaactgttgagtagactgggttgaattcagtgaaggatctaaaggaaaaataaaaatattaatgcttctatgtagttttaaaagttgtgaccataagatagcaagtataatcacrcaccaaaaaatgacttttctgtcccaagtgagtggtaggcttcaatgtagtcacccagaaaacattaaatatttgtcatatgttcaagatacattttgaaacatctaaggaaatagaaattatcactttgttacatgtgcatgtaggtgcacacacagagta

SEQ ID NO: 391340 - DNA, 547 bp, Homo sapiens
gcttccttccataagggattcagcatggtaaacaagtaaacaagtcactcatgtcacaagtcccgcaaaggggtcaaggkaacactcttgtttcagaaccactgaagaaattcaaagaatctgtgataagcttcttaacagtgccctgggatcttgtgatttcccaggatagaaatcaagagagatcaccagaggcagcaatgaagagagtttattacctctcagggagccagtcatgagagaacaaaaaggagtgggctgttccccgaagatactgtgtggttcggttaggtatagggtctttccatagggaaggattccctcagggaatgtatagggggagttttgctagcacctgcacaatggctcaacatgtttcttcatacatttcatgtagcattagcattttaaatctccacccctgggcatgaactttagtgttaaaatgaggaaaagataactttaggttggagtttaagtctgactccacatatgggactctgggaaagcctctagccccctgaaatagaaatttgcaattaatagc

SEQ ID NO: 391341 - DNA, 547 bp, Homo sapiens
gcttccttccataagggattcagcatggtaaacaagtaaacaagtcactcatgtcacaagtcccgcaaaggggtcaagggaacactcttgtttcagaaccactgaagaaattcaaagaatctgtgataagcttcttaacagtgccctgggatcttgtgatttcccaggatagaaatcaagagagatcaccagaggcagcaatgaagagagtttattacctctcagggagccagtcatgagagaacaaaaaggagtgggctgttccccgaagatactgtgtggttcggttaggtatagggtctttccatagggaaggattccctcagggaatgtatagggggagttttgctagcacctgcacaatggctcaacatgtttcttcatacatttcatgtagcattagcattttaaatctccacccctgggcatgaactttagtgttaaaatgaggaaaagataactttaggttggagtttaagtctgactccacatatgggactytgggaaagcctctagccccctgaaatagaaatttgcaattaatagc

SEQ ID NO: 391342 - DNA, 399 bp, Homo sapiens
cttccttggtcttttattgctgattggctgagagttagacaagctagagcttgagtagaggggcttttatccttttccttcagacaatcttaagatagggaaccaaccagtcggcctgtctcaggctctaaggaaaattctgagaggtcagcaagaaacctaatattataaacaacagtgccatcarcacttatttaaatatataaatataaattttaaaggccctattaaagtcattctgagcctgtacatttaaaccgttctaaaggtttacgggtatttagatacgagaagaaattagacccaaattatgcatcaatatccaatacgtgtgcactgtgtattcaagatcaatataatctcccacagactgttctgctgagttagctaatatacaaa

SEQ ID NO: 391343 - DNA, 528 bp, Homo sapiens
agaacccctccctgcagcctctccagtctaataaggggatggtagtgtggtcagtgagggcatccagatgcagccaaagggcacagtgagtgatgtctcctctggcctcctctttcagctgcagattctctgagttactgaaacagcttctccatggccccaccagccttggagggtggtgacagctcccagatgacgctaaccccagggccctgcgccatcmcccctggttccccttggccctgcccacacctacgtaaacagctttttcttaatgacccttcagccacttcgaggtccctgccagtacctgactgccacattccccaaagggaacaggctcctcagcacaggagctgaggtttctacaggcacagagaaaacactgtcccaactgttggaatggagtcgggagtggaaaaaagaacgttttttctcaatgcttagactcaccaattgtttcattttatcacatgaaggctgtgtggcattttgaagtagaattaagaatctacataattacaaatt

SEQ ID NO: 391344 - DNA, 528 bp, Homo sapiens
agaacccctccctgcagcctctccagtctaataaggggatggtagtgtggtcagtgagggcatccagatgcagccaaagggcacagtgagtgatgtctcctctggcctcctctttcagctgcagattctctgagttactgaaacagcttctccatggccccaccagccttggagggtggtgacagctcccagatgacgctaaccccagggccctgcgccatcccccctggttccccttggccctgcccacacctaygtaaacagctttttcttaatgacccttcagccacttcgaggtccctgccagtacctgactgccacattccccaaagggaacaggctcctcagcacaggagctgaggtttctacaggcacagagaaaacactgtcccaactgttggaatggagtcgggagtggaaaaaagaacgttttttctcaatgcttagactcaccaattgtttcattttatcacatgaaggctgtgtggcattttgaagtagaattaagaatctacataattacaaatt

SEQ ID NO: 391345 - DNA, 528 bp, Homo sapiens
agaacccctccctgcagcctctccagtctaataaggggatggtagtgtggtcagtgagggcatccagatgcagccaaagggcacagtgagtgatgtctcctctggcctcctctttcagctgcagattctctgagttactgaaacagcttctccatggccccaccagccttggagggtggtgacagctcccagatgacgctaaccccagggccctgcgccatcccccctggttccccttggccctgcccacacctacgtaaacagctttttcttaatgacccttcagccrcttcgaggtccctgccagtacctgactgccacattccccaaagggaacaggctcctcagcacaggagctgaggtttctacaggcacagagaaaacactgtcccaactgttggaatggagtcgggagtggaaaaaagaacgttttttctcaatgcttagactcaccaattgtttcattttatcacatgaaggctgtgtggcattttgaagtagaattaagaatctacataattacaaatt

SEQ ID NO: 391346 - DNA, 528 bp, Homo sapiens
agaacccctccctgcagcctctccagtctaataaggggatggtagtgtggtcagtgagggcatccagatgcagccaaagggcacagtgagtgatgtctcctctggcctcctctttcagctgcagattctctgagttactgaaacagcttctccatggccccaccagccttggagggtggtgacagctcccagatgacgctaaccccagggccctgcgccatcccccctggttccccttggccctgcccacacctacgtaaacagctttttcttaatgacccttcagccacttcgaggtccctgccagtacctgactgccacattccccaaagggaacaggctcctcagcmcaggagctgaggtttctacaggcacagagaaaacactgtcccaactgttggaatggagtcgggagtggaaaaaagaacgttttttctcaatgcttagactcaccaattgtttcattttatcacatgaaggctgtgtggcattttgaagtagaattaagaatctacataattacaaatt

SEQ ID NO: 391347 - DNA, 525 bp, Homo sapiens
gatgggtgcagcaaaccaccaaggcatgtgtatacctatgtaacaaacctgcacattctgcacatgtatcccagaacttaaagtataataaataaataaataaataaccctttgtgaatctgtacttctggagaaaaacccacacaactctgggacattagtatgcatcacaagtaagattttaaaaataatgtaaaaagtgttatttctgtttttgttaccttgtcattaaataaggtttctatcttccttgacctctcaagatcagtgatttagctacatgtaaatgccttcttgcattggattcttcccgataaaccagactcctcatttctctcgtggattgggccttctatgactgcacttatatagctgcttcagaatagaaagctactttctctcttagcaaggtatggcttttccaatgtcccctcttgctttgccaagttgagttccaaagwtgtgttaaatctcagctaaatcagtgtatttgcctttcctgcttatggcattaattgcacttta

SEQ ID NO: 391348 - DNA, 559 bp, Homo sapiens
cttaacactttagattttgtgttttagatattgaaatttctatcatatgctttgataatagattgtgatttctgcaaaggcaaagagtgctttcctcaactttgtatcctttggggtgggtttaaatgatctcttatacctactaggtgtttgataaatgtttgttgtagcagatgaacacctgaaacagtaattcagaaccttaggttctagtattttctatgtcacattagtgtgacttgcagaatggctcagcttagcttttcctatgtataatgatttcagactagatgaattccarggtccctcctggccctttcaattccctaatttcaagtagaatttagaagaaaaaatttgtaagcagcaattttatagttctattatggaatttctacttggggaaagctaacatttcatgatctcattcttgctggattctttctcaagattttccatggagctgaaatttacccatgaccttgagaaagaaatgcacatgcttcatgatcctcactccactttcttgtccttaatgcttttcctctgatgattgctc

SEQ ID NO: 391349 - DNA, 559 bp, Homo sapiens
cttaacactttagattttgtgttttagatattgaaatttctatcatatgctttgataatagattgtgatttctgcaaaggcaaagagtgctttcctcaactttgtatcctttggggtgggtttaaatgatctcttatacctactaggtgtttgataaatgtttgttgtagcagatgaacacctgaaacagtaattcagaaccttaggttctagtattttctatgtcacattagtgtgacttgcagaatggctcagcttagcttttcctatgtataatgatttcagactagatgaattccagggtccctcctggccctytcaattccctaatttcaagtagaatttagaagaaaaaatttgtaagcagcaattttatagttctattatggaatttctacttggggaaagctaacatttcatgatctcattcttgctggattctttctcaagattttccatggagctgaaatttacccatgaccttgagaaagaaatgcacatgcttcatgatcctcactccactttcttgtccttaatgcttttcctctgatgattgctc

SEQ ID NO: 391350 - DNA, 493 bp, Homo sapiens
aagaatcaagctcataattgctggtttgtcaattataatggtaaaatatgtatttatataatacatatgatatgttggatgctattggagtgagtttggcatatttatttatttattttttatggtactcatccatgtttctgttcatatataggataacaaattcagaaacaatgggaaagtaatatatgaaaccttaatagaaaatacaatagagattacaaaacactaccatttgattttttatgcaaatacttcaatattccaatatttttamtcacttgctaaataaagcacatgactcgaaatgctaaataattctgttagtgtaaatcttttagataaaatgttggtgaaaaaccaaaattgtttgtaaggtatgtatgaccttgtttattatctatcacagacatcaagatgatcatagttaataccaatttaagctttatagaatactcttttaggcccaatattgatatattaaatgaaggta

SEQ ID NO: 391351 - DNA, 493 bp, Homo sapiens
aagaatcaagctcataattgctggtttgtcaattataatggtaaaatatgtatttatataatacatatgatatgttggatgctattggagtgagtttggcatatttatttatttattttttatggtactcatccatgtttctgttcatatataggataacaaattcagaaacaatgggaaagtaatatatgaaaccttaatagaaaatacaatagagattacaaaacactaccatttgattttttatgcaaatacttcaatattccaatatttttactcacttgctaaataaagcacatgactcraaatgctaaataattctgttagtgtaaatcttttagataaaatgttggtgaaaaaccaaaattgtttgtaaggtatgtatgaccttgtttattatctatcacagacatcaagatgatcatagttaataccaatttaagctttatagaatactcttttaggcccaatattgatatattaaatgaaggta

SEQ ID NO: 391352 - DNA, 493 bp, Homo sapiens
aagaatcaagctcataattgctggtttgtcaattataatggtaaaatatgtatttatataatacatatgatatgttggatgctattggagtgagtttggcatatttatttatttattttttatggtactcatccatgtttctgttcatatataggataacaaattcagaaacaatgggaaagtaatatatgaaaccttaatagaaaatacaatagagattacaaaacactaccatttgattttttatgcaaatacttcaatattccaatatttttactcacttgctaaataaagcacatgactcgaaatgctaaataattctgttagtstaaatcttttagataaaatgttggtgaaaaaccaaaattgtttgtaaggtatgtatgaccttgtttattatctatcacagacatcaagatgatcatagttaataccaatttaagctttatagaatactcttttaggcccaatattgatatattaaatgaaggta

SEQ ID NO: 391353 - DNA, 628 bp, Homo sapiens
aggggcctcatctgtcctgttcctcctgtggcctgggtcctagcaccatgtctggtacagtgtagatgctcaagggaagtttactttgtagaactgtttatctgggagatattactgttggtctaacctgtaccatattgtaaacctccagccattttgcagactttgatcacagtgaaacgttccatgggaacttgggccatgagaaacatccttcctaaccacgtgactgcagaaacatccttatcacatcctcctgggcaaaggccmaacagcctgactgcagggacatccttgccatatcctgctgggcagcaagctctaccacccagatccctccctcccagtcccatgattaccccagcctgtgagtggcagttggttctggcactaagctggtttcctcctccccagggttttgctggcaataaagatgttgctgttgaagccaccaactgtccctctgtctttctttaaccctcgccttgccttccaaacctaacaataactctacctctccattttaccaatgaggatgtgggactcaaggagagcaagagacttacccagtgagtcacagagcctgaacttgaactcagttcagctgaatccagaacttgtttctccc

SEQ ID NO: 391354 - DNA, 571 bp, Homo sapiens
agatactcagataatatctgtagtctgaacctatttccttatctaaaaagtaaggaataaaarcacccattttacctgcctcactgagctgttttgaagatcagatgaaataatgtgcctgaaagcactttgaaaagtataaaatgttatacaaatgtaaggcattctaatttcagagggaggtttttctcagttataacctccatgtcagcttgaataaaggaacattttttaaaacttaatctgaaaagaaacttgtcccttctgggcacaaattataaaactcccgcaaaaaatgtttgtatatatttttgtttgtttgttcctaaatagtataatgaactatggtctttcagggaaaatgttgctctgatactagtcacaatgtagaaaattgcccttatgtactttcaggaaagaattgcaaacaaatgagctattttctcttctcgagtaaagggacttcccaagcatgggtggcagctgttcaagtccatctggtcaagaattcactaagatcataatgtgaaagttgctcaagtgcagatttgcatgacagcctgcaaatgtt

SEQ ID NO: 391355 - DNA, 571 bp, Homo sapiens
agatactcagataatatctgtagtctgaacctatttccttatctaaaaagtaaggaataaaaacacccaytttacctgcctcactgagctgttttgaagatcagatgaaataatgtgcctgaaagcactttgaaaagtataaaatgttatacaaatgtaaggcattctaatttcagagggaggtttttctcagttataacctccatgtcagcttgaataaaggaacattttttaaaacttaatctgaaaagaaacttgtcccttctgggcacaaattataaaactcccgcaaaaaatgtttgtatatatttttgtttgtttgttcctaaatagtataatgaactatggtctttcagggaaaatgttgctctgatactagtcacaatgtagaaaattgcccttatgtactttcaggaaagaattgcaaacaaatgagctattttctcttctcgagtaaagggacttcccaagcatgggtggcagctgttcaagtccatctggtcaagaattcactaagatcataatgtgaaagttgctcaagtgcagatttgcatgacagcctgcaaatgtt

SEQ ID NO: 391356 - DNA, 571 bp, Homo sapiens
agatactcagataatatctgtagtctgaacctatttccttatctaaaaagtaaggaataaaaacacccattttacctgcctcactgagctgttttgaagatcagatgaaataatgtgcctgaaagcactttgaaaagtataaaatgttatacaaatgtaaggcattctaatttcagagggaggtttttctcagttataacctccatgtcagcttgaataaaggaacattttttaaaacttaatctgaaaagaaacttgtcccttctgggcacaaattataaaactcccgcaaaaaatgtttgtatatatttttgtttgtttgttcctaaatagtataatgaactatggtctttcagggaaaatgttgctctgatactagtcacaatgtagaaaattgcccttatgtactttcaggaaagaattgcaaacaartgagctattttctcttctcgagtaaagggacttcccaagcatgggtggcagctgttcaagtccatctggtcaagaattcactaagatcataatgtgaaagttgctcaagtgcagatttgcatgacagcctgcaaatgtt

SEQ ID NO: 391357 - DNA, 372 bp, Homo sapiens
acttctatttgtcagaaagaaaaagaggagccagcaaggaaccttgaaaaagagcaggcaataagagaaggaacactggcagtgtatattcctggaagacaagacaatgcttcaaggagtagagagtaataagttgtgtttcatgctgctagagttgagttagacaaagcttgaaactagaactttggtgttagtrgcattgaggtcatcgacgatgttgactaaaacagttttggtggagagatgacaacagaagcctaaacagagtgcactgaagagagaagaagagatgagagaaatttgattctgcatatacataaaactctttcaaaggtcttcttttagaaagaggaaggaagatagagagagaca

SEQ ID NO: 391358 - DNA, 372 bp, Homo sapiens
acttctatttgtcagaaagaaaaagaggagccagcaaggaaccttgaaaaagagcaggcaataagagaaggaacactggcagtgtatattcctggaagacaagacaatgcttcaaggagtagagagtaataagttgtgtttcatgctgctagagttgagttagacaaagcttgaaactagaactttggtgttagtggcattgaggtcatcgacgatgttgactaaaacagttttggtggagagatgacaacagaagcctraacagagtgcactgaagagagaagaagagatgagagaaatttgattctgcatatacataaaactctttcaaaggtcttcttttagaaagaggaaggaagatagagagagaca

SEQ ID NO: 391359 - DNA, 372 bp, Homo sapiens
acttctatttgtcagaaagaaaaagaggagccagcaaggaaccttgaaaaagagcaggcaataagagaaggaacactggcagtgtatattcctggaagacaagacaatgcttcaaggagtagagagtaataagttgtgtttcatgctgctagagttgagttagacaaagcttgaaactagaactttggtgttagtggcattgaggtcatcgacgatgttgactaaaacagttttggtggagagatgacaacagaagcctaaacagagtgcactgaagagagaagaagagakgagagaaatttgattctgcatatacataaaactctttcaaaggtcttcttttagaaagaggaaggaagatagagagagaca

SEQ ID NO: 391360 - DNA, 573 bp, Homo sapiens
ttaatactttcccagtttttccaacttgcatcccaaccccttctctctgggttttagcagtggatactttgagattctaatatttatctcctcagaaggtgagatgcagaagaggagataggaaattgagataataactactttcttctgwtgggtgggaaaaattctatatgagagtttttctaccaagacacatgtgaaaggaagtggcaacgtggcaattcatctaagatcagcaactttttttctctgtttgaatttgttgatttggaagttatttgtctggctctgcaacagaatcattatttgctctaccaatttttctaaagtctcacatgctgatgccagttaaaaaagaatacattttagtctgtcaacttttgcttacaaaagaggatctaaaagtgtgttccaaggtaatttgaacagactctttcaagatagtgcatcttttagtagatccacagaacagtaaatataacttgataatcaccccaaacagttcttgcattggaaaattgaattggcaggtttgcataataaagggctaaaattatgaaccacacaagattt

SEQ ID NO: 391361 - DNA, 459 bp, Homo sapiens
ttgagaccagcctggtcaacatgatgaaacctgtctctagtaaaaatacaaaaattagcaaggcatgttggcaggcrtgtgtaatctcagatactcaggaggctgaggcaggagaatcacttgaacccaggagacagaggttgcagtaagccaagatcataccactgcaccacagcctgggtgatggagactccgtctcaaaaaaaaaaaaaaaaaaaaaaaaggcttgtgcttttcttacataagagtacatcttctgactataaaaatcctggaagaaaacctaggaaatactcttctagacatcatatttgtcaatttatggctaagtcctcaaaagcaattgcaagaataacaaaaattgacaagtgtgatctaatttagctaaagagcttctgcacagcacgagaaactatcacgggattaaacagacagcctaaagaatggaagaaaatattc

SEQ ID NO: 391362 - DNA, 459 bp, Homo sapiens
ttgagaccagcctggtcaacatgatgaaacctgtctctagtaaaaatacaaaaattagcaaggcatgttggcaggcatgtgtaatctcagatactcaggaggctgaggcaggagaatcacttgaacccaggagacagaggttgcagtaagccaagatcataccactgcaccacagcctgggtgatggagactccgtctyaaaaaaaaaaaaaaaaaaaaaaaaggcttgtgcttttcttacataagagtacatcttctgactataaaaatcctggaagaaaacctaggaaatactcttctagacatcatatttgtcaatttatggctaagtcctcaaaagcaattgcaagaataacaaaaattgacaagtgtgatctaatttagctaaagagcttctgcacagcacgagaaactatcacgggattaaacagacagcctaaagaatggaagaaaatattc

SEQ ID NO: 391363 - DNA, 459 bp, Homo sapiens
ttgagaccagcctggtcaacatgatgaaacctgtctctagtaaaaatacaaaaattagcaaggcatgttggcaggcatgtgtaatctcagatactcaggaggctgaggcaggagaatcacttgaacccaggagacagaggttgcagtaagccaagatcataccactgcaccacagcctgggtgatggagactccgtctcaaaaaaaaaaaaaaaaaaaaaaaaggcttgtgcttttcttacataagagtacatcttctgactataaaaatcctggaagaaaacctaggaaatactcttctagacatcatatttgtcaatttatggctaagtcctcaaaagcaattgcaagaataacaaaaattgacaagtgtsatctaatttagctaaagagcttctgcacagcacgagaaactatcacgggattaaacagacagcctaaagaatggaagaaaatattc

SEQ ID NO: 391364 - DNA, 459 bp, Homo sapiens
ttgagaccagcctggtcaacatgatgaaacctgtctctagtaaaaatacaaaaattagcaaggcatgttggcaggcatgtgtaatctcagatactcaggaggctgaggcaggagaatcacttgaacccaggagacagaggttgcagtaagccaagatcataccactgcaccacagcctgggtgatggagactccgtctcaaaaaaaaaaaaaaaaaaaaaaaaggcttgtgcttttcttacataagagtacatcttctgactataaaaatcctggaagaaaacctaggaaatactcttctagacatcatatttgtcaatttatggctaagtcctcaaaagcaattgcaagaataacaaaaattgacaagtgtgatctaatttagctaaagagcttctgcacagcacgagaaastatcacgggattaaacagacagcctaaagaatggaagaaaatattc

SEQ ID NO: 391365 - DNA, 588 bp, Homo sapiens
aatgtcactgttgctgagtctccatcgcctctgtgttgtggagcagttagagacacacagcagtgtctgtgagtggctctgttgaaggaccgttttctagatgagaggcacatctcaacacagctcactgatcagactcaggtgagtgggacctgctctcytctcttcctcctggcttggggacagtcactatcaggtgggtggttttggcctctgggcagctactgaggggaatccctgaacactcaccgggtgcctgttctgtgctgacggtcgtctcattcatcctcgcagcaattccattctgcatcttttctcatcacctccgtgaccacccaggacaaccccatgcaggccctgtcaccaggcccagtccagctccatgataaccaagacacaggtccagagacaaccatcctgcatcatgcctgcatctgaacccccttggtgggtagtgaccagcataacatggaagaagccagggcagcatgcggacgcagtctgcagccccagatggctcctgggccttgggaagtcattcttaaaggggaagctggtcactttgaggtcctgaagggaagggtgaat

SEQ ID NO: 391366 - DNA, 588 bp, Homo sapiens
aatgtcactgttgctgagtctccatcgcctctgtgttgtggagcagttagagacacacagcagtgtctgtgagtggctctgttgaaggaccgttttctagatgagaggcacatctcaacacagctcactgatcagactcaggtgagtgggacctgctctcctctcttyctcctggcttggggacagtcactatcaggtgggtggttttggcctctgggcagctactgaggggaatccctgaacactcaccgggtgcctgttctgtgctgacggtcgtctcattcatcctcgcagcaattccattctgcatcttttctcatcacctccgtgaccacccaggacaaccccatgcaggccctgtcaccaggcccagtccagctccatgataaccaagacacaggtccagagacaaccatcctgcatcatgcctgcatctgaacccccttggtgggtagtgaccagcataacatggaagaagccagggcagcatgcggacgcagtctgcagccccagatggctcctgggccttgggaagtcattcttaaaggggaagctggtcactttgaggtcctgaagggaagggtgaat

SEQ ID NO: 391367 - DNA, 588 bp, Homo sapiens
aatgtcactgttgctgagtctccatcgcctctgtgttgtggagcagttagagacacacagcagtgtctgtgagtggctctgttgaaggaccgttttctagatgagaggcacatctcaacacagctcactgatcagactcaggtgagtgggacctgctctcctctcttcctcctggcttggggacagtcactatcaggtgggtggttttggcctctgggcagctactgaggggaatccctgaacactcaccgggtgcctgttctgtgctgacggtcgtctcattcatcctcgcagcaattccattctgcatcttttctcatcacctccgtgaccacccaggacaaccccatgcaggccctgtcaccaggcccagtccagctccatgataaccaagacacaggtccagagacaaccrtcctgcatcatgcctgcatctgaacccccttggtgggtagtgaccagcataacatggaagaagccagggcagcatgcggacgcagtctgcagccccagatggctcctgggccttgggaagtcattcttaaaggggaagctggtcactttgaggtcctgaagggaagggtgaat

SEQ ID NO: 391368 - DNA, 227 bp, Homo sapiens
tcagcaagcagagagagcaaagggaacatgattaagggaaaagaggagcaataactcttccctttccaaacagattttcagaaatccaaaccagtgaattctgcrtttcacattggccaagactataagctctgctcactgcagttatgagaaaaactgggaaactcatttaaagacattaatcagggccaggcatggtggctcatgcctgtaattctggcaatttg

SEQ ID NO: 391369 - DNA, 227 bp, Homo sapiens
tcagcaagcagagagagcaaagggaacatgattaagggaaaagaggagcaataactcttccctttccaaacagattttcagaaatccaaaccagtgaattctgcgtttcacattgrccaagactataagctctgctcactgcagttatgagaaaaactgggaaactcatttaaagacattaatcagggccaggcatggtggctcatgcctgtaattctggcaatttg

SEQ ID NO: 391370 - DNA, 489 bp, Homo sapiens
acggggtttcaccatgttggccaggctggtctcaaactcctgacctcaggtgatccactcacctcggcctcctaaaatgctgggattacaggcgtgcagcagtgcccagccgggactgtctgcattttcaggagatgtcaatcccatccaaacaaagctatgtggcattgctctcttgattacaaaagacagaaaattygctagtcctgtagacctacagttcccaaaactgtgtttacttagggagacataacaccatttgtggagctttaacaacacagcccaaattgggcttctactgttctagccttgttcatttttgcacacttatgtggacatgaggtgaatctcagcttctaacatctttcagctgtcatctgaactgaaaatccaacaatttttgggcagaaacacaaaaaaaacatatacatacatatacacacattacaaggaaaagcagtaattttcagaaagaaactacagtttaac

SEQ ID NO: 391371 - DNA, 372 bp, Homo sapiens
gatgactcactaatacgttgtttgaatgcttttttgacctactctaacttgatacttttttactccacttggacaacgcaaatgactgtattcttatgaacatgatcacatattgaaaagtacataggcttaggatttagaagcacttgcctttagcagggttggccatttacacattagagagttgttataatcagagatatrtgaaaagaattgggccctttgcctaacacttgataagcattcagtaaattatagcctttgttgatactctttttgttatttgtcattactcagaactcagaaattcagatatattgaaattcccttctcaaataatagccttttttttgcctgactgaattcagaaaa

SEQ ID NO: 391372 - DNA, 562 bp, Homo sapiens
gaaacagctcaaaggtcacttcctgagacaggctttccctgactctcctagaacttaccatccgtgtttctcttaagcttgttacattgttttcctcataactgtactatctaacgttaaactttaacatttcttgactttttttaaatctcattctactacaatataaactgcagcacagtaggtggcagagtgtctgtctgcttcattgctgtactctyaacatctgtattagtgcctcgtacataataggtgctcaataagtatttttttaattaatgaagggacaaatgtaaggtaactggaggttaaaaaaattacagaaatccttacctgtgttactgagtagcaatactatttattatgtatgtattttaaaggcattaacattttttatttttcaggattaattggaattcttcaaaatgtcaggtaagtttttgtgaataaatttgaatatgctttattttcaaatgtgaattttgtgattattttccctaaagggggactttatttcgatttttttttgtttaacatttggcaaatataaatacgtgtgtgt

SEQ ID NO: 391373 - DNA, 570 bp, Homo sapiens
tttatctatattatttcattgttctgctaataatatagattacaaaatataattctctcggccacatactatattgggaaccctgctatgtagaaataactggatatgttaaattatttttaacatatcacaatgttatttaatatgttaaattatttttaacatatcaccaaaccacaacactagaaaaggtaggtaaaacagtcatatttcaaaatttttgaacagataactgttgttacatttcaatttaaagctaacttgaatggggccccacggaaaatggggattcttataaatgaaaatttctaatattttttagagaagttttaaggcattttttaaaggagcagctggctataaagatgttaaggattacctaytgattatgactccaaatgacctgctatattttaaactctcagtttctttaagttttagatatgaattagtaaacatctatgatgtgtcaggaacttcatatatgctgacagaggtgaatattatggtttcattatacaggccaggaaacagaagcccacagagtttaagcaatctgttcaaggttat

SEQ ID NO: 391374 - DNA, 441 bp, Homo sapiens
taggctgttctgctgtgttctttttcaaattccactcggtaagggttttgaaatatagttygaagagaaattacccatgaactaaaaaacccaaaaaacataataggtcatatgttccagttatggataacatgcagtaaactgataccaacctgtctctcccactaaatacaattaacctaaacagaatgaatgaacagctatttgaagaccctggaaattaaaaagtagaaagaacatgaaacagaagaccagaaaaagtacaatcaaaccagagtaagcttcacatttttctctggtatccctggcccaatactggttcaaggcatcctgaaacatagtagtagacactagatgcagagacagctccaggagaagccctctacttctggcttgagcaggggaatgagcatccctaaagctcaaaaacagctggaaaat

SEQ ID NO: 391375 - DNA, 602 bp, Homo sapiens
catttgtactgctataataaaatacctgagacaaggtaatttataataatcagaaatttgtttcttccatttctaaaggctgggagaatcaagtcctttcagaatggcattaatccattcataagggtggagccttcattacctaaacacattctatattcttgtgaataattcatttaatattttttactcctgaggaaaatgaataactcttatacaatagagatctcacccgcataccaatactgtttgtaaaatattaatgttttagactccgtttatatgggacataactttaaaacaaaacatgttccatgaatcagacatttgttagacctacttaaattaaagatacttcatcaattcctccaattttttcccaacmtttttctactaaaagcttgaatattcaatgatatagaaatatgccccaggagaggcagaacaacatggcaaaatagaaaactccacagatcatccatggctgcaaggacaccaagttaacaacatcttcataagaaccaaaagtcaggtgagcattcacagtatctggttttaacttcatatagctgaaagaggcactgaagagataggaaaaaagc

SEQ ID NO: 391376 - DNA, 566 bp, Homo sapiens
attcgtatagagattatattttttaaaattaaatttatatttattttaaaattaaatacatatttatgtaattgaacratttttgttataagtatgtattatccagagataaaagaaggaaaacatatgatgaaattatatgtgggaaattggtatattatactttcttctaagctttgaagttttcataagagttctgattgcttctgcaggaaaacaaagcaaaacaaaacaaaatatgtttaactttgtgtaactatagcatctcagacttacgtaaataaagacctctgttacggagcgttgtcctaccaatactggtgtaagacacactgtctgataggatttgagtttttttagttattttgaacatcaggaaatcatgccattttctctttaaatatactaaatataacaaaggtttctttattctcttaaacaagaatagtggataaaattatttttgtgggaacacatatccaacaccataatgcaaattggaattatgtaaagaaattgggataaattcattaacactacataattcaagtacagatttcaagatt

SEQ ID NO: 391377 - DNA, 566 bp, Homo sapiens
attcgtatagagattatattttttaaaattaaatttatatttattttaaaattaaatacatatttatgtaattgaacaatttttgttataagtatgtattatccagagataaaagaaggaaaacatatgatgaaattatatgtgggaaattggtatattatactttcttctaagctttgaagttttcataagagttctgattgcttctgcaggaaaacaaagcaaaacaaaacaaaatatgtttaactttgtgtaactatagcatctcagacttacgtaaataaagacctctgttacggagcgttgtcctaccaatactggtgtaagacacactgtctgataggatttgagttttttwagttattttgaacatcaggaaatcatgccattttctctttaaatatactaaatataacaaaggtttctttattctcttaaacaagaatagtggataaaattatttttgtgggaacacatatccaacaccataatgcaaattggaattatgtaaagaaattgggataaattcattaacactacataattcaagtacagatttcaagatt

SEQ ID NO: 391378 - DNA, 573 bp, Homo sapiens
tgctgtatagaaattttttgacttgatgtwattccatttgtctatttttgcttttgttgtctgtgtttttgaagccttacttacatagtcttttaacagaccactgcctaaaatactttcttaatgttttcttccaggagtttcaagtctttaatccattttgatttgatttgtgtaaatggtgagaaatagggatctagttacatttttctgcatatagatatttagctagtttcccactaccatttattaaagagactatcctttccccaatgtatgttcttgatgcctttgttgaaaatgagttggctgtaaatttgtggatttatttccaggttctctatgtcgctccattagtcaatatgtctgtttctgtaccaataccatgctgttttggttactatagctctgtagtatatttcaagtctggtagtgtgattcctccagatttgttctttttgctaagatttcctctggctattcaggatctttttggttccattaaaattttaggatttgtttcctacatctgtgaaaaataccatttgtattttaatatgaattgcatgaaac

SEQ ID NO: 391379 - DNA, 525 bp, Homo sapiens
cagatgatgttaatgtcactgactcaaagccacatttgagtaacactctgctctggaaagggagataagagataaaggaaaacaaggggataattgagtaggcaatgtcctttgggacggctggaasgaaccagtgcaccagtggtttggttgtctttgtgacaggaagaaaggaagacacttttttctttgtgacaagtaaaaaaagaaagtatgaatgtaaattcaaataagtttattggtggatggattaacaggaagttaaggaaggtctgcacagatgatttcaaacatcttaggctaacactggggatctagaatggtcaagtatatctgatacatacatagtcatgaagtcataatctacaacatttattcatgtggtggcaaaattacattccagaccactctatacattatcacactgataatatatgtaaacaggacctatttgaccaggaagtgtgtgctgttgtaaacacatttattttagcattcttttttttttttttttttgcataaaaa

SEQ ID NO: 391380 - DNA, 525 bp, Homo sapiens
cagatgatgttaatgtcactgactcaaagccacatttgagtaacactctgctctggaaagggagataagagataaaggaaaacaaggggataattgagtaggcaatgtcctttgggacggctggaacsaaccagtgcaccagtggtttggttgtctttgtgacaggaagaaaggaagacacttttttctttgtgacaagtaaaaaaagaaagtatgaatgtaaattcaaataagtttattggtggatggattaacaggaagttaaggaaggtctgcacagatgatttcaaacatcttaggctaacactggggatctagaatggtcaagtatatctgatacatacatagtcatgaagtcataatctacaacatttattcatgtggtggcaaaattacattccagaccactctatacattatcacactgataatatatgtaaacaggacctatttgaccaggaagtgtgtgctgttgtaaacacatttattttagcattcttttttttttttttttttgcataaaaa

SEQ ID NO: 391381 - DNA, 589 bp, Homo sapiens
ggagctgaaatcccatgggatttctcatcattgtaatcattggaatcccttaacttctctccttctattagatcctcattcctgtgattcattccattgttttggtggaacacatcctccagtaactttctgagaaaaagttcctgaaatgtaaatgttttgaaacttttcatgtctaaaaatctactcattccactcttcctcgttaactgctagtttccgcgaatatagaactttagactgtttttcactttccttcagtatttcagattgttttattgttacaatgacttctgatcaagcttgtgtttaccatctgtatctcttctctctcyctctgtctccctccctccctctataatcttttgtattcacagtattctaaaattcacagtgacataatgatgcattttggtggtaaatcttctgtcattcattgttttgtgtattcagtgaaccattttttgaaaaattttccactccattttctctattctctctcctatattgatcctctaatttccttaccttctctgatttttcatttatttgcctttttattctatttagaatattatttaaatgtatc

SEQ ID NO: 391382 - DNA, 609 bp, Homo sapiens
tcacagtattctaaaattcacagtgacataatgatgcattttggtggtaaatcttctgtcattcattgttttgtgtattcagtgaaccattttttgaaaaattttccactccattttctctattctctctcctatattgatcctctaatttccttaccttctctgatttttcatttatttgcctttttattctatttagaatattatttaaatgtatctgcctctttcaaatttttatttcataatttgaattttagaagccgtttcttattttctgaatgttcatctttaaatgtcagtccattgttttatgaatacactgtcttttaattcttcaagtataatagagtggtttttttaatygttttcttcaatttcatgcctgcgctctgttttcttcagttcctttgttttggccactatatttatgtgaaagcttgcctcatatggtccacttatccttgactttctagtcagaaaaggtgtttaaaagatgacagctctatgtgcaaaggtggggtttgtcaactggcgtacattttgtaaggtgatgagagaagagaacatctaaacattttgtttggggaaggctcccaatgtcagtatctt

SEQ ID NO: 391383 - DNA, 609 bp, Homo sapiens
tcacagtattctaaaattcacagtgacataatgatgcattttggtggtaaatcttctgtcattcattgttttgtgtattcagtgaaccattttttgaaaaattttccactccattttctctattctctctcctatattgatcctctaatttccttaccttctctgatttttcatttatttgcctttttattctatttagaatattatttaaatgtatctgcctctttcaaatttttatttcataatttgaattttagaagccgtttcttattttctgaatgttcatctttaaatgtcagtccattgttttatgaatacactgtcttttaattcttcaagtataatagagtggtttttttaatcgttttcttcaatttcatgcctgcgctctgttttcttcagttcctttgttttggccactatatttatgtgaaagcttgcctcatatggtccacttatccttgactttctagtcagaaaaggtgtttaaaagatgacagctctatgtgcaaagstggggtttgtcaactggcgtacattttgtaaggtgatgagagaagagaacatctaaacattttgtttggggaaggctcccaatgtcagtatctt

SEQ ID NO: 391384 - DNA, 550 bp, Homo sapiens
aatcatgtgaattgtattaaaactatgacatatgacaatattatataaagaaaattttaactctaagagacaaatataattttttaaaaaagaaattaaaaatatcacgtcttatgctaaatatatatagatatatttattatgatgcagcaggttttggaatacagggatytaggcaagttaaaaataaaaagtttatatgcttaaactttctgaatattgtttgtctgatttcctatttaaatatcagacatcattataggaaatacatagtctacttacgattgcaatggcactttcaaatataaggcaattaatattttagaaagcagcaacttttactttttttaaaaaaaaaagctagtagcagcatgtaaaaatgagcattacgagaaactcagaaaaacaaatttaccctgaaaagatgaatataattaaaaaacaaagcacctttcatttcaaaaagaactgtaggctaagaccctcatctcagaataaccccatctaagaacactcaggctttctttatttaataagcagcagcagaaga

SEQ ID NO: 391385 - DNA, 478 bp, Homo sapiens
gcaaattaaaaccaaagcaagaaaaaggaaagaaataaagattagagtaggaataaataaaatagagaataaaaaagaaaatcaaaaaagctaaaaattgttgctttgaaaagatcaaaactgacaaacttttggatacaytaataaagaaaaagagaaaagattcaaattaccaaaataatgaatgaaaagagccatattaatactaaccttacattgaaaagaaaaaaggattataggggaatactacaaactaccatatgccaattagatacagtagatgaaatggacaaattcctagaagacagacactaccaaaactgactcaagaagaaacaggaaacctgaatagaactgtaataagaggctaaattagtaaccaaaaaaacttcccacaaaaaaaaaaacccagggtacagactgatttacttgtgcattctaccaaatacttaataaggaatgaatatcaacccttcgc

SEQ ID NO: 391386 - DNA, 498 bp, Homo sapiens
ttatgtagcttgctgaaacacatatgatctgttactgtttatttcatattttacacagacactaaaaatattttcaatgcttatatgaaaaggggatcaatagtaaagtcaggaaccaggacaaaccagcacaggctgaggtaatacattcctgccaattcgcatatgaataaggagagttgccctggagcagaaagcttgagttaggcttatgcttaggcaagccatgctctaagagaaagttgtaagggtgaggtgcctgaatcaagataacattttattcttcataacggaaaataaacagcctttatgtacaagtctgccgaaattaaagcaatgaaaataaatggatsagttacacaaaattaaaagcagacctgataaagtgtggtgtgactgaaacaggaacaaaaatggacagaagtcataactttcatttaccatcttcaattatagtgaaatatttgcttactttactccacattgccatgaacacat

SEQ ID NO: 391387 - DNA, 498 bp, Homo sapiens
ttatgtagcttgctgaaacacatatgatctgttactgtttatttcatattttacacagacactaaaaatattttcaatgcttatatgaaaaggggatcaatagtaaagtcaggaaccaggacaaaccagcacaggctgaggtaatacattcctgccaattcgcatatgaataaggagagttgccctggagcagaaagcttgagttaggcttatgcttaggcaagccatgctctaagagaaagttgtaagggtgaggtgcctgaatcaagataacattttattcttcataacggaaaataaacagcctttatgtacaagtctgccgaaattaaagcaatgaaaataaatggatcagttacacaaaattaaaagcagacctgataaagygtggtgtgactgaaacaggaacaaaaatggacagaagtcataactttcatttaccatcttcaattatagtgaaatatttgcttactttactccacattgccatgaacacat

SEQ ID NO: 391388 - DNA, 660 bp, Homo sapiens
gtttatagtgttttaagcttactttgtatatgtttactgggttaatgagtcacagcttttcaggatgaactcctattctactagagagatactcaattgaaacacacttttagattgtgttcttgcaagcccactctcagctgtcaaagttaacacccaataaaaatactctacaaagcaaagaaatacacttgcaaataactgagtgctgactgtaagcccaatccaacttttccatttttcaaaattaaccatagttgatggcttgctgtgtctctctatcttgaacgttgtggtggagatctttcaaaatacatgaagtcctgaaattggaaaaagaattatatgtagatatatagataattaggtataatgcatgyggtattatcctttgtaatttattaggggattcccccattccagttaaaatacataaatttagggaaatatttatgaagagcacctactgtgaagagcagcagttacaaatttggaactgttagttttccatttgaagtgccaattaactgaatctcatcattaaaaagaggaaaaacttcataatctcaggattggacaaccccaaagagtacagtgacaggcagaaaggaaggaggaatgggacatccactttagagttatttcactaagaaatcatag

SEQ ID NO: 391389 - DNA, 660 bp, Homo sapiens
gtttatagtgttttaagcttactttgtatatgtttactgggttaatgagtcacagcttttcaggatgaactcctattctactagagagatactcaattgaaacacacttttagattgtgttcttgcaagcccactctcagctgtcaaagttaacacccaataaaaatactctacaaagcaaagaaatacacttgcaaataactgagtgctgactgtaagcccaatccaacttttccatttttcaaaattaaccatagttgatggcttgctgtgtctctctatcttgaacgttgtggtggagatctttcaaaatacatgaagtcctgaaattggaaaaagaattatatgtagatatatagataattaggtataatgcatgcggtattatcctttgtaatttattaggggattcccccattccagttaaaatacataaatttagggaaatatttatgaagagcacctactgtgaagagcagcagttacaaatttggaactgttagttttccatttgaagtgccaattaactgaatctcatcattaaaaagaggaaaaacttcataatctcaggattggacaaccccaaagagtacagtgacaggcagaaaggaaggaggaatgggacatcyactttagagttatttcactaagaaatcatag

SEQ ID NO: 391390 - DNA, 543 bp, Homo sapiens
  misc_feature (1)...(543): n = A,T,C or G
acatcacaaaaaaaaaaaaaaaaggaaattttactaaatgctgcatgaaggttttaataccagtcatttacaatgtcttccatagaaatgaaagaagaatgaattcttcctagctaattctagaggccagtattacccaattagcaaaatctgacatagatgttacaagaaaagaaaactaaagatcatatccctaataaatatagaatcrgactttctcaacaaattactagcaaaccagatttaggaacataaaaataggattaaancaccatgaccacagtgggcatttatccacatggataaaagattggtttatcacattaaatatcatattaaaacacatcaatgtatgtactatattaataaaatatagtacaaacaccacatgaccacatcagtaagcacagaaatcacacttgacaaaatacaacatcctccatgataaaaacacttaagaaactagaaataggagaactccctcaatctgataaaagagtacctatgaaaaactcacaccaaacattatgtttaggagtaaag

SEQ ID NO: 391391 - DNA, 613 bp, Homo sapiens
cctcacattcaattagccaccaaatcctggcatttaaataccaaagatgacttccgaagccaaccagttcgttgcatctccatcaccactactctatttcagatcattacctttgcccgaactattgcagcagctagtcttttagccactaggttttcctcattcagtttatcttccacctgccatagcacaactttcatgatatttaattgttcttaatttacccagtaatagtaaatagcaggccgggcatggtggctcatgttggtaatcccaacactttgggaggctgaggcaggaggatcacttgagcccaggagttcacaaccaacctgtgcaacataaagagaccttgtctctactaaaaataaaaaaatttagccaagcatagtggcaaatacctgtagtctcagctacttggaaggctgaggcgggaggatggcttgaccccaggagttagaagctacagtgacctgtgttcacaccattgcactccagcatgggtaacagagtgagrccctggctaaaataaataaataaataaaagagtaatagcaaaggcttatgagcacttggtatgcaccaagtactatacaatgtacttcatatgcat

SEQ ID NO: 391392 - DNA, 560 bp, Homo sapiens
ggattacaggcgtgagccactgcgcccggcctgttctgtatgttgactgcagtggcagatacacaaacctacacatgataaagctgtatagaaatagataacacacacacgtgcacacacagagagaaatgaacataagcaaaactggggaaggaaatctgaacaagatcagtagattatatcaatgtcagttatcctggttgtggcagtgtactacagttttgctagatgttagcattcagggaaactgtgtaaaggaaaatagaatttctctgtatgatttcttacaagtgcaggtggattaagtatctcaataaaattttcagttttaaaaaaaggcattctgtctaccctccatccccctgcagcaacttgtcttgctgtcctcttaagcagttctatatgcagatgcagatggaggagggatctctatcccctcaagcagaaaaatataaacatatagagtagttgttcagatacttctgagcctyctcttcctcatcaactttactctcagtctcataagcctgacactgaatcaccctttagaacataagccc

SEQ ID NO: 391393 - DNA, 447 bp, Homo sapiens
ctgccactgccagctgtgtggtcgtcagcaatgatttattatctctgtgtctcagtttcctcatctataaaaatgaggataataactgtctctagcttattaggttactatgaggtttacatgagataatatgtgtagtaaaakcctagcacagcacctggaacacaatatacactcaacaattgttactgtatttgccattatgattgtaattctaattttttttttttaaatcacctagagccattgtgtggctggctggctacaatgccacgacccaggagatcgtacggccttctgagctgttggcaggagtcaaagcatacattggtttcatacagtcactggcccagtttttgggtgcagatgcttccagagtcatccgcaacgccctcctgcagcagacacaaccactggattcctgtggggaacagacaatcaccacac

SEQ ID NO: 391394 - DNA, 580 bp, Homo sapiens
atttgccactttcccaccctgagtcttcaggaacattctagcacttcttaactctctccttgatcttttcttaacttcctgcagcctgaggccatttgatactgacctgtataaaaatctgctttacaaattcttcccttacaggtggcctctgtcagcctcttgcagctgggccaggagactgacaagcttaaaaccagaaatcgagaatccatttctctgctcatgcgcttggtaagtaccttatttaaattggtgtgagaatagggaatggaagggccagagggagacttctgtttagggtctttgcatccttgccattcttgtcacccaaaagcattaactaaggacttaactctgcataaccctctgaatgtagtcctcacattctgattaacattctaaacttgtcctataatcccagagtagagtcttcaaggacttctgcaagacagggccttcctgcccctaagctggctgggcccatgtcctgcaatgttcccgagtctgatctgatagggcagctgtgcccsttattggtaattacctgtccagtacatgtttggtttcacttgacaat

SEQ ID NO: 391395 - DNA, 561 bp, Homo sapiens
agatatggctgggcgggaaggcaggacaagttattttgtgaggttagaggggaaggggccttgtgaaatcaaggtctggaaagggctgcccaggagaggaggcaactgagagttgaggctgacaccttagaggagaagatgaccatatggttctccaagaaccaggcatgaatctgtatggcacttgccagttgcttggtttaaggctaaagagacagaccccttcccctcttccaggactccctgtgccctcctccccatccccagttcttctctccaccttctcctcccgaaaagatgcatccagccctacccctccccatggcccagcacatcccctcccccatctagtgatccccagtccttagaccgagcacaccagctcctgtgaatatcctgtctccctcactggcycgtattgactggcatcttagtcttccaccaaactagtcagttcttcccatagtctaacctccattccttcagttacagcagctcgttttcagtatcctgccaatagtgaaattagaaaccaaccctatctgtaaacaagccacccca

SEQ ID NO: 391396 - DNA, 599 bp, Homo sapiens
ttaaatttgataattttatgtctgatttttgaaatgtgagaataacagagaactatgttaatgtgtgttttcaattctgagacatttttctttatccctaaccaaagaaaccatgaaaggtgcttcatctacaaagaattatatccaattcgaaggaccaacttcatagttggcaagtatccacttcacaagtattgraagacagaattctgctctttgctttcaagctagccaaaccacagcacggttctgaccaaacagatccaaatccacagggcttttctcagcattattcacaatttgctatgaatggatggctagactgagcttaggtaagccagcctggagaagccagagagtctggtaatgtatcagagctgagatttctatcattaattttactgccattgtacagcccattcctttgtttctagaaggttgggccacattcaactataacttgttattcaaaattttattttaatacttttagagaaagtttgttaagatggttaaaatagaaaattaaattttctgaaagccactgttaacattaattctactgtagccacagaatattcatagcatcatctaatgct

SEQ ID NO: 391397 - DNA, 599 bp, Homo sapiens
ttaaatttgataattttatgtctgatttttgaaatgtgagaataacagagaactatgttaatgtgtgttttcaattctgagacatttttctttatccctaaccaaagaaaccatgaaaggtgcttcatctacaaagaattatatccaattcgaaggaccaacttcatagttggcaagtatccacttcacaagtattgaaagacagaattctgctctttgctttcaagctagccaaaccacagcacggttctgaccaaacagatccaaatccacagggcttttctcagcattattcacaatttgctatgaatggatggctagactgagcttaggtaagccagcctggagaagccagagagtctggtaatgtatcagagctgagatttctatcattaattttactgccattgtacagcccattcctttgtttctagaaggttgggccacattcaactataacttgttattcaaaattttattttaatacttttagagaaagtttgttaagatggttaaaatagaaaatyaaattttctgaaagccactgttaacattaattctactgtagccacagaatattcatagcatcatctaatgct

SEQ ID NO: 391398 - DNA, 514 bp, Homo sapiens
agaaagagatttagtgacttactcaaggtcacagagtgagtaaatgctttaactgaacctgaatccctttctgcattcattcattaattagagagttccagtgatgagtcaaacattatgctgactacaaagggtatataaagaaaaatggcaccaatccagtcatccaagtgatttgagcctggcagggaagaaacygagctatctgtcactcaactcaatatacccttggtattcattgttcttttcttaaataaatctgtcattaaaaatacataacaaacaaaatattaataaccttacatctaacaacttggcttgtggatttaataatttatttcaattataaaagacacccaactgtaaaaaagagttgagtgctcaaaagagagctgcctgctcaatgactttaactgaactttatgtgcctgaaaactcacacagtgacaataaaaacaaattcatcagcagtgctaaagctttgaaaatcagggcctaaaattaactagagatt

SEQ ID NO: 391399 - DNA, 492 bp, Homo sapiens
tatcatttcttttcattgagaattatcaacatgatggtaaaaggacactcacttgaatgccaaaaggacactgatttggtttataatttcaattctctgaccattcttcacataaactttggcaaggtatttagtattcctatgatcccatctgtaaaattctcccatccrtaaaatcaggataatgataatgctaaccaatcagggttgttctgtggcttagatttattacatgtaaagactaagaactgtgcttgacgttcaataaatgctaattattatttttctgttcgtaattgttctgcagcttgaaatgtttttcctgttaaaaccaaaaataggttggaaaattaagtaatccatttgaaaagtgttttggaggacttgccagtagtcaggttctatgaaaagatagaacatgttcctgttttcataaagcttacattccagtggaggcaaaaagatgatataaagtgagtctaaaaaataagg

SEQ ID NO: 391400 - DNA, 580 bp, Homo sapiens
ctttgcttctgctctcatttcactatgtggcaatgcatatgtaaaatgtcatcattggttgggaaatgcatattgagattaaaagagttgtcgcattttagaattggttgtttattcttctgtcagaaaattagccagaagttttctacgaagtaaaaatacgtaattcagtttttcttcccttataatattattagtagtttactccattttgttactttctatgttcaggtgctctatttcccaccatattccctcaccagcccccaccagataaatgtcagaaagaatgaaacattatgtttttcctctgyttcaggaagctacctacttagaattccatgacgtttcagttacacaagggcttgaatcttcaaaaaacctaataccactaatcagtttaaacttttttcactttgctgttgattctaattcatcaacaataaattctttccattacccataatgatagttaaaacttgttcatgccctgttactgcacctaaaagcaaactccttaaacctgcacttccaagagtagttatttgtattgattggatccatgataattattttgcct

SEQ ID NO: 391401 - DNA, 554 bp, Homo sapiens
ccaaatgcatgtcttgtaactacattgatgcattgctcaatgcaactaaaacccaattataccacacgtgactctctgaaaacaatcattccctccagaatagttcactcagcactaatcaatgagaatagaaacatcccttgtcacaamccaagtgctctgatttgtataagctgtataatagacagaggagatgtgacgactgtgccacactttgcctaaccccaaccccatttttttacttcaacctctggaggctttttattgattactattaactctgagatactctctatatatacctgaagcacagatttgtaaacagactgtctatacctactcacttcttgaatcctattgaaaagtccatccaacttccactcaaaatatcagtattttctatgaaatggtattcaaaagttattatgaaatatggcccttactgaataaatctatttttgcaggaaataaatatctgtaattttaatatttatgccattacatcaattctgtagctagctattttgatgtaatattataccgtgttcccatct

SEQ ID NO: 391402 - DNA, 600 bp, Homo sapiens
aatacttattttcttacttttaaattacagaaagacaatcacataagctgataataatgctgtagtgattaaatgaagtattccatgtaaagacttaatagtgctggcacttattgcacacttcataatttttttattttttatattttatgatgatgccgttactttttcctgggttcttttattttagttttataggctatggatgttacatttttctgttgatagtttcattatgctctttctattaaaatttcattcatcttaaaaatttcccrtattctcattcttgcatataattagtcaccaactactggaaatttatataatgtaatgctgctctgtcttttcttttcatctttgttacaatgatttaatccaccttgattaagtataatagttttctttctagtctgtctagtatttgcttccttgtcacttcctcctgattattcttgttcaaagtggcattcaccatcttattacaaatgaatgccaaaaattttaatggtttactattgcctttatataaaaagacaaacttaaagtttctaaaatctgatatttacatatgtcttcaaacatttaatcctttattgt

SEQ ID NO: 391403 - DNA, 567 bp, Homo sapiens
tattaagaccagaaaaatggaattggtacaattcaataaactaagatacagaccttattcaggcgccaagagatttcccatacattgacttttcattgttgtttggtgtaaacttgtttggattttgtggcatgtacaggtttatggagataccacaacactcagggtgcaaaactgttccattgctccccaaaatgtcctccttttgttgtcacatgttcaccccacctctatcaaccacctgtcattggttttartggaattgactttatctttgactgaggtggggatcctttggaagattttgagcaaataagtggcataatctgctatattatatgtaatgtatgtatttcttttgttttcgtacttaattcaaatctatagaatgttaaaagaataaaatgaaccgctgtatttctttatgtctgtattttcaaatactggcactttacttgatttgttttatttttccatatatattatttcaatttcatgttgtttttcctactctatgtggtgagccatttgaaagaaatttgtcatgtacaatggcaattactacta

SEQ ID NO: 391404 - DNA, 415 bp, Homo sapiens
gagtggtgagttaaaaataggtggaaaaagtcagaaagtcaccccaggctaattttactttgcttctgtgtgccatgaaaactcgggatacttatcttttttattttaagttgtatttatctttctctgtcttctttccctggaataaatcttcaagcaaatacatgcattcaagtgagagggctcctcaacacttaaggctgtcatttcactcaagctacgatatgttaagaatcacatggatttgattttgaatcatagttttcctcctagaacttatgggttctgtttttttataccacaaattaggatagcaatatctaaattatgaggtcattgtgaagattaaattacaamatacgtaaacgtttccagacaaaaggaaacaatgcaagagatgccaacaatttttagt

SEQ ID NO: 391405 - DNA, 564 bp, Homo sapiens
actttatggagtaattattactagtaaattccctttgattaagaatacccatcttttcagaggactttccataataattatttcaaaagaaaaaggaaaaaaactttctttaattgcatttaaaaagcagctatttacttttattattgtatacatgttcaagttgttaaaatctaacagctctaaaaacaagaaaaaaatccgaacatgagtatgtaaaagagccactatgtacagtcattttatttaaagcttcmcatcatatacttaaatcatgatttctcaattgcaaagggtaaaataatacatagatacacattttaactttcctctatttgtcaatgacagcagtagtgttgtggaaagaatctgatttgagaaagtgagtttgaaatctgctttgcgacttactgctcaatgatactaggcaatctagttggccaattgcagtctcagttgcagtacagaaacaacttcttttaaaaatatgctacgggaaggaagatatttaaacatgtgtctctggatttcaattgttatgacagaactaacatgtacaaacat

SEQ ID NO: 391406 - DNA, 564 bp, Homo sapiens
actttatggagtaattattactagtaaattccctttgattaagaatacccatcttttcagaggactttccataataattatttcaaaagaaaaaggaaaaaaactttctttaattgcatttaaaaagcagctatttacttttattattgtatacatgttcaagttgttaaaatctaacagctctaaaaacaagaaaaaaatccgaacatgagtatgtaaaagagccactatgtacagtcattttatttaaagcttcccatcatatacttaaatcatgatttctcaattgcaaagggtaaaataatacatagatacacattttaactttcctctatttgtcaatgacagcagtagtgttgtggaaagaatctgatttgagaaagtgagtttgaaatctgctttgcgacttactgctcaatgatactaggcaatctagttggccaattgcagtctcagttgcagtacagaaacaacttcttttaaaaatatsctacgggaaggaagatatttaaacatgtgtctctggatttcaattgttatgacagaactaacatgtacaaacat

SEQ ID NO: 391407 - DNA, 580 bp, Homo sapiens
tttgaaccagaaaggaatgggaatccaaactgaatcactgggtggtccaaacgtcatctaagatattgatatagagatatctgagatggaagggaatttagaggtcatattacagtccttcatcttacagatgaccaaaaaaaggaaaaagagagagagggattgatttgttcacacatatcactactggtagagtgaaaaaaataaaaatccagtttcccattttcctatggtgtcttcatttcatagtaaatcctgccagaatgtttaatggacccttacgtaagcagcttctctcaaaagctgttcttgctgtaagaatgaaaagaatgagagctatagactgcatactgcaaggtatgtgttagttcagactcagattgagttagctaacccaaatattgctactcacatatatctcaagactttactatatatacatatatcaatgccaaacattttagccttattcactgccataatcacaatcacactaaawgatgcaaatattcaataattgattaattcaccaaagaggaatttcctgcccctttcaagttactaagtctgtacagtgaat

SEQ ID NO: 391408 - DNA, 580 bp, Homo sapiens
tattttgtagagagttatcttgaccagtttactgttatactacaatattcaaaccaaaaggatttaatacactgaaatttaaacgcaaagaccatttttaacatgtcaataggatgtatgaacatttaatacatttagtgacattcattaacatactttattttaacagaattatgctatactatgataaaatagtagcaagtatctatagctaaaataaataatttcttaaaattgacaacatcaaattgcatccattaaaaaaattaatgattaattcacgtttttatattggtcttcgggttgaggttcatgtttctaatgcctttgaatcttgatatttacagttttttcagtagcacattaagaaagacttttgcttcttcaaaataaagacttgattcttattttgaattttgaatttatgctttttcttattcataggtatttaataggactgcctgataatattagtgccaaccgccaggattatcatgcaacaatataaaaatatcacattgttttctagtcttgtaaatgtcatatcagcagtyaaagtgtccatatatttcactgaaac

SEQ ID NO: 391409 - DNA, 357 bp, Homo sapiens
gctacaacgtcagcacaccttcagactttgctctgccatttgtgtattgcctgttcttgagccactctgaagttcatctgggaacaatctggttggtagtttacagtacagttcaattctcaaatattttgctctgccttatttgctctgctccatgtgtgctgaccctgagagtgagcctaggttcacgtgtttgtttatacacaggatttgggatctgcttctctagtgctgtctttgtctatattttctccacaatttccagttctgaggtgcctaatttcccagatcctgtaggtggaaaaatagyttctcagaattttagcccctctgctgtcaaacaattccacaatacta

SEQ ID NO: 391410 - DNA, 540 bp, Homo sapiens
tattgtttacttctcagagtccttgtggagttactttttctactctatccagactttttgttgcaatcagtagagggaaatggattatagtgggtttgctgcattttagcctgcaccagaagtcagaaaatgcagacttaactccacactggcaatctcaaatacttttggggactttacgatgcacatattaatgttattaatgattcatatatttaactttatgattcacatattaatattattaatargccatgaatactgctcttataaagctcctactctaatatagaaggtgaatttgcaaatcaatacacaattacaagacagtgtgattagtgctatggcaaagttaagtgtaaatctcagaagcagcacagaatggcaacatttctctctccctgaagagggaaagttagaaaaaattttactaagaccttgcccttaaacaatgagaatgaaaacagatatgaaacaggaagttccagaaggcacaacagcatgaaagagaaaataaaggaccaacattatttctattct

SEQ ID NO: 391411 - DNA, 636 bp, Homo sapiens
aaggggtagccctgctctgcaaggagaagtacctctgttgctgctgtacactggcgttccaataaacattgctgtttaacactatcagcttgcccttgaattctttcctgggcaaagccaagaaccctcccaggctaagccccagcttggggctctcatgccctgcatcagtttgataaaaacctaccttattgttatcactatggatggaggaagacattattttgcttgagtcatttttagtgagacttttatggatgctttagatataaccaytatgtaaggaattgggataacgtgtgatgtggaaggtatacaccaacaaagccttggaatgggtatttggagcacaggaagaggttttcagtgccgacagaaaattatgatttaagaaaacattaaacttgctgtaaaaacagatgataagattaagaaaaaattatgtaaagtcgtaagagtcaggtagcagtttgggtttttctacatcttgcttaaattctattttgtggaagatgaactttctttttgtaaaatgatacattttggcttagaaataaaatgtccaaatgctttgaagtttgaattgatcaaaagaaaagtcaccacagtgacgtgaaagctctaaagattataaag

SEQ ID NO: 391412 - DNA, 590 bp, Homo sapiens
gaacctgaacaggccttgctaagtttctcccaatatgttaccattagatcatacctttttattgcccagtcatacttctgtacaactgtccataaaaatacacaagtttctctgtttctttgggtctttatatctgaatgctcccatgttgtgtaaaacttatattaaataaatgtgaataactgtctcttgttaatctgtcttttgctacagtagtcttagcaataaatctagcaatgggaaaagagatatgattattatgtctatataatagagtacagaaaatacaaagrttatgtacctttgtacttaaatttgaatttaagagactgatattctgtaaattcaaattaaaactaccaaaagcccacagtgacaaactgaaaactacgctgctttttaattaagctatttgctaacatcctgttagaaagcaattcaaccaattgacaatgtgctcagaataatactcacttgaagagcaatacctaaaccttttctagaagtaaaaatttaaagcctaaaaacaagaactgttcatagaaggaattttaccttaagacgtattttaagaacaaaaaaataaagca

SEQ ID NO: 391413 - DNA, 596 bp, Homo sapiens
tatcactgaaatttcgctttgtctccaaacttggctttataaagacatggcaccttattttaaccccataatcccagtgaaattgattctacataagtagcttctcctcgctcttccattttatgtttagacatagagaagatctgagctctctaatgctgatagtctagttttattgattagactgtctcttaatattctgggtttgcagattccaagccctttctatacatattagctgatatagattgtgcccatgttatgtgcttaccttttccccaaaaggccatcttttacagctctcattgtggttatataacccaggtgacagcaagttggatcacgatagtcctaaaatcttagcatgctttgtggcaaaagagtgtacatttaaactagtaatgatgttgctggtctttcagactttctcaagcgatatatgcttattmtttcaaactgatatattatttaaaacaagatatattatttaaaacaagagcaaggagtcatagattctccatctttagtcttttgtcccaagagtaggactattcaatattccccacagcactgtataatgatttaatttatactgg

SEQ ID NO: 391414 - DNA, 453 bp, Homo sapiens
ggcctgaatctctgcccaaaacttgaactaaaatgacaycaaaaaaaaaaaaaaattaaaatagtttcagaaactcattttttcttcaaatttcatatgccctgtttttacaatgaaaatttgaggacatcttgttacttgattaaataggaagtactaaaaaaatcaaatgaaacatataccaaaatttaataatccaaacttaaaaccctaagttggatgagttttactgttttaagtccattcattttggggtctttttctctttttctcaagtaaacattaaaaaaaaaaagaaagaaagaaaaaaacttttacttaaagacaaaaaaaaccttaaacatttaagttttcaacaagatttttggggaagagtattggatattttattgcatgccaatgtacattttgttttatttcccatttcaatgatcattgcagcattgtttagat

SEQ ID NO: 391415 - DNA, 570 bp, Homo sapiens
gctcttgctgtccaacattcaggaggtgtgagccaatgtgctcctgttgaactcaattgcataacgctgtaacatttcacagtatttagggttgtgttaagtatctttaattcaaagtagagaggggctgtccctagaaacagagtggatgctgtgcaaggagccatcagcctgtgacctagatttcagagtcagggggcctcctgccacacgcagtctgttaacagtgcccacagggaaaatacaaacaagaaacacctgaggttcaaacacaagcactaaatggagacacttacatccctgacttcttcattttaaaaagakatttttattgtaagaattacaggtaaatgtactggggcctgaacaagagaggaccaatttaacacttccaaagggacatcagccctgacggaaagaagaaaacacagaatgaagtgttctccacaggatctcttaatgggtcaccagtctgtgaggtcacaaccacgtagggaaaaacttacattttctcactaatgtaagaagcaaagaagaggcaaaaaagggaaaagagttgattaattttct

SEQ ID NO: 391416 - DNA, 628 bp, Homo sapiens
atttattttgtatttactggtgacctccttgttagccactaatgagctacgttatcacagcctgtatccctcattgccttctacttctcatgtactttgtcttctctgcttcccaggaaagatactctgcggcccttgcatttaccagctgctttgttcctttatgtccctttgttcctcgctaaattcatttgacatctttcttttattaaaaatttcaaataaagaaccagttctacatttgaacaatatttgaattgtcaaaagacctaagytgtaaaaagaaaaccgttgtctactgaagagattttgtttgtgtactaatttatctagtaataaatctttataatatcagtattttgttaaaagaaactctgctaaggaggaaaaaatagtctgtgatacctaaatatgtttcttgtcatctaatccattaaacttatgctttgtatctaaatgaaatttttgattgttgttttcacttttctatattatttcaattgaaatattatttcaatattttctaaccagaaataactaatttagcatttaaatgaagacctagtctccaggacgatgaggtaaccaaacaagaattgcactattgcggctctggagggagtaattg

SEQ ID NO: 391417 - DNA, 546 bp, Homo sapiens
tgccaaatccatcatcatgaagattttaccttatatattcttctaatagttttgagttaaacctcttgtttaggtttttgytccattttgagttaattttttatatagtataaggtaagtgttcaacttcattattttccacatggaaatccaggtcccccagaaccattttttgacaacgctatgttttcccctttgaattgtcttgaaagatcatttgaccatatatataagagtttatttcttggctttctattctattctgttggtctatgtttatctttatgcaaatactacattgttttgattttgcagatttaaagtaagttttagaattaaggcatgagagtcttccaaatgttcttttttattcctaagattgtatttgattatttaaatttatatgagattccatatgaattttaggatagcgttttttctatttcagcaaaactaaatttggattttgaaaggggttgcattgatttgtagatcactttgggtagtattggcatcttaacaatattaattttttcagtctatgaa

SEQ ID NO: 391418 - DNA, 603 bp, Homo sapiens
ttttactcaagttacttagattctctaaagttttcatttcccagtctgtaaaattataatatttattttacaaattgttgcaaatattaaatgtgaggaagtatgtgaaatttttaacatacttctcagggtatatgtttggttgtaacgattattaattgatcaatgatatttcattattgtatgaatcagtctaataactgaggataaatgaatatattagaagaacactttgatacagaaataaagagaaagagaaagctatggagtaaagcataggaatcatggaatccatagacttttcttaatattttccacaataatgataatctcytttgaaaatttcatctgcctttcatccacatgttattctgctcaagattcaattttctgagaggaagagtatgattggtctacttgggtcacatgcactctgcaagggaaaagggaaggagcatgcagagtggtagatctctgatgtacagttccataaataacacagggggtatgaaaattactccacaaaggaaaagaagaaaattttttttaaaaaacagggatatgagagactggttggaaccacagatatctattatatccacc

SEQ ID NO: 391419 - DNA, 567 bp, Homo sapiens
gaagtcagtataactaagaaaaaaattaaagtaattggtaaatacaagtattaagaactcaaatactgtataagttgttactaaaaattcattatatgatgaaaaatttagagaaatctttttaatcttgtatcttaagcctaatcaaacctataaaaattatgtacattgtgactaatcacattgttttcaagtataaactgagcaacacattcatggaaaagactaggtgctagtaaaatgtcttgtggcaaggtgataatatattcttagtgggtatagtttagaagatcagaagagagcaatacacaattacaagcaacaaaaaatgtgaaaagcttcatggtggttctgaccaattatttgtgttcttgtaaagttaggtacaatgtaaagagtgatcacaatcataattaatgtgtccartttttgtggttctttgtatttgagatgttttgttgtttcttctgattttctggtttctcctctatattataatatattagtagaaaaaatactgtttttttattatgaaattttgctgctgtatcataccatctttagcta

SEQ ID NO: 391420 - DNA, 674 bp, Homo sapiens
gtgaaactgaaactcactctcctgaatggttggtcatagctcaggtccaatttttctcataggtacaatttaaccagcagttggaaatttcagtgagtatgcatttctttctaagctgttgactttattaagggagatcagatacagttctgtcatagcaaggcttcaaattacaactctggatccctcaagaacaatatcgcaggctctcaggtctgttctggcccctgttcccctgtgagccatacagcttcaactccattttactgccacagctaggaatccctttaagtgcctgaagatttccccttctcctctccttttctctttttttacagttatatcttctctttgatatatattttaatttcaatgctgtatgtttgaacttttaagtatgaaacttggtagggatggrggcatgttctcgattctactcagcatcccatcagaagtctccttcattagaagttaaagagtttgcaaagtgttttctgtgtgctaaatcccaaccttaaaacaattcataagaataacgaagtatatgtaatatatttgaagtactttaaatattcatttcgaccatttaatttatagtgacaaatactaccttactagttggaaagtacctcagtcggtacccaacatgtaagacaacagtcaagtgtgtatta

SEQ ID NO: 391421 - DNA, 674 bp, Homo sapiens
gtgaaactgaaactcactctcctgaatggttggtcatagctcaggtccaatttttctcataggtacaatttaaccagcagttggaaatttcagtgagtatgcatttctttctaagctgttgactttattaagggagatcagatacagttctgtcatagcaaggcttcaaattacaactctggatccctcaagaacaatatcgcaggctctcaggtctgttctggcccctgttcccctgtgagccatacagcttcaactccattttactgccacagctaggaatccctttaagtgcctgaagatttccccttctcctctccttttctctttttttacagttatatcttctctttgatatatattttaatttcaatgctgtatgtttgaacttttaagtatgaaacttggtagggatggaggcatgttctcgattctactcagcatcccatcagaagtctccttcattagaagttaaagagtttgcaaagtgttttctgtgtgctaaatcccaaccttaaaacaattcataagaataacgaagtatatgtaatatatttgawgtactttaaatattcatttcgaccatttaatttatagtgacaaatactaccttactagttggaaagtacctcagtcggtacccaacatgtaagacaacagtcaagtgtgtatta

SEQ ID NO: 391422 - DNA, 555 bp, Homo sapiens
atgaaacttggtagggatggaggcatgttctcgattctactcagcatcccatcagaagtctccttcattagaagttaaagagtttgcaaagtgttttctgtgtgctaaatcccaaccttaaaacaattcataagaataacgaagtatatgtaatatatttgaagtactttaaatattcatttcgaccatttaatttatagtgacaaatactaccttactagttggaaagtacctcagtcggtacccaacatgtaagacaacagtcaagtgtgtattactgctgaaaacgaaaaaaagtaatcttaaggatcaaagtttggacaggccaatattcatatttggcctccctccttccctgctaaatgtaargcttaattggagggatataacatactggcttactatcaaggacatattgggtcattgaaaatacacttcaaaaggccaaacaaaacaaagtcattgtaggactttcagacaaaatctgaaagcccactgtgtaggcttcagacaaagacctcaagagatttaagttatgctgcaagttacacaacc

SEQ ID NO: 391423 - DNA, 594 bp, Homo sapiens
atattcatattccttttaaaagcttatttttaaatcccctctgtattagagattcttaacaatcaaagggataaaatgatctactccataaatgaagaatcagtactcttgccatccagctcagtgcatgttttatgggctcttaaaagtgtccaagatggcagagatgtgggtttttaagggatttctactcactgggactgacctgactactctgatttacagtgtatatttccagcagtgaaaaataagttaaaaaaaaaaacttacagtctcgatatggcaccatgtctttaagagaccattctgaaggcaagctactatcctacgtattaataccttttatattaaaagttgaagttagttttctttcctaaaatagaccttattctggcaatgatgtacttcatctgcctctaaatgcttttgtcggcacctctactaatgaatttactagatacctcatatgctctcctgttctcttatataattttgacttcactcagatagattttccaatggaaaaactgaagcaacacccttatcccctttggattctctagtactgtctrctttatcatctaaataaagtta

SEQ ID NO: 391424 - DNA, 585 bp, Homo sapiens
gaggctctgtgggcgtgagaccctccaagccaggggtgggataatatctcctggtgtgccgtttgctaagacctttggaaaagcgcatgttagggtgggagtgacccgattttccatgtgccatctgtcacagctttacttggctctgaaagggaattccctgaccccttgtacttcctgggtgaggcgcgctgccctgcttcagctcatgctcagtgcgctgcacccactgtcctgcacccactgtccagcacccactgtccaacaagccccaatgagatgaacccggtacttcagttggaaatgcagaaatcacctgtcttctgtgttgctcatgctgggagctgtagactggagctgttcctattcagccatcttggaatgttttccatttcttataaatttggattttgattaaaatcaacaagaaaaaaataagaaattataaaattaaaaatatatactttaatttgctactcttggctcgcatatggataaaaaaagwctgtaaagggtattcttgtcattaaaaatggaaaaatcagaaataaaatcacaagtgataagaatgaatgaacaatgtta

SEQ ID NO: 391425 - DNA, 492 bp, Homo sapiens
cacaagaataccttcctgttcaggtattcttatctgaccagattgtgctccaatacttttctcttcttaataggctcactgttaacctgttttgggatcagagaataggcaatgggaataaatagcaagtcttcagctttgtaatgttgcccaaaagaccttaatcaacaaccattgattttaaatctaggaggaggtcagccacagtcatgtgcattaatatttattaatagttgtaggtaaggtataataaaaattagattttctatttatccacatttagatggcaaggaaattagtatgtaaaagcaccaataattgattgcagctattttcttaactttagcttggcaggcttctggtgctgattgtgagtgcattctgaggtgatgtttacacaaatcagacctgagaacaggagggctccartatttttatcgtaaaatctgagtcaagggacaagcagttgtttacacaacagtaggaaagcaa

SEQ ID NO: 391426 - DNA, 565 bp, Homo sapiens
tttctatagtgaccttggtcttttatgtttctttattctaaattactactttcaataatttctctttattgttactgcctcagaatttaaacagaaaaccaatagaaccttttaacatttagaaatatatttaaaataaattgcatataaatatgtactttaaataattttttaatatatttaaaagcatatgtgatactcatgtgaaagcataccaaatgtaaaatgtattttgttaacatgagctcctaagtgttatgwtttaatatgttttcaattacacttttgaaattgccattggcaagaaaatgccatgaatcggaaatgctcaactaaaacgattatagcaaactggccaaatatgttgtataacactttagcaaaaaattgaacttctgcatgcaaactatgatagtttatacttcaagttattaatgaatgcactgatatgctcacagaaagcattaaataattgatattgaacaaagacattttagcaaaactggaacgcagaaatatctaaattaggccacagtcattaaagctaatacatggcactgtataa

SEQ ID NO: 391427 - DNA, 599 bp, Homo sapiens
cacctctcacatggcggcaagcaagaagagagcttgtgaggtaaattctcctttttaaaaccatcagatcttgtgagacttattcactatcacaaggatagcacaggaaagacctgcccccatgattcaatgacttcccaccgggtccctctcacaacgcatgttaatttaagatgagattttggtgtttgaagatgaattaatattttcataattttcagcaaaagtgggaattacatagtaatagggctaatgcttatcgagtgctgactatgcttatctgttcaaaataacatacatgtactgtctgatttaatttaaatgacacatatacatgttagacaaaaataaggataaagaagctagagaaagtgagggacagagagtttaattaaattgcccatgattgaaggcaagaaaatagaagcgagaagataaatgcaggcagtttgtttcggagctggtagtccattgtaatactgctaccttttttaaaaatattgatacaaagtgaataattctccttataactaggtaatgtcagcattcaaacttgaattctctttatcatttayctacattaactaattattgcaaat

SEQ ID NO: 391428 - DNA, 432 bp, Homo sapiens
tatccatacttttagtaggtaatgtatatatgttgagaactagtaactcatatagatttgagttagaaggcttcaaaatatcaaaaagcattgctttttaaataaataatttcataagtgactttcttttctgagaagatggagaactcactcacatttctaggtaattgatgtatgtagcttaactaaacytatagtttatttttcatttaaaatatgacataatcacattcaagagtgctgactgagaaacaagaataatattttgagtgcattctttctgtgtttttaggaaagcaaacacagagtgttcatgccacaggggcctttagagatcacctattctaatcctcatgttttacagatagggagaataatattcaaaaggcggaagcgtcaatccatgattgtacaaccagtcagtagtgaaac

SEQ ID NO: 391429 - DNA, 570 bp, Homo sapiens
tggatatgcccctaccaaatgcagacttttaacattatgtaaaaaacaaattttaaaataaaatacctacattatttattacataataataaaggagacaattaaaatatagatcattatggttagctgatttattatattttcatgcattcttagcattcattattaggtacctaggctttgtgctagaaattaaaaatatagaaaagtataatatattatttgtacttttctgttgtttgataatcatgaattttaactttgagtttttatatgaattttctctaaaacawttttgaagtcatttaattaacctagaagtttgcacacagctatttaaccatctaaaaacactgtaattgttctgctcgcatatggtatcacatatataataaaacaatttcattaaagaatgtgtaggaccaggtggggtggctcattcctgtaatcccaacactttgggaggctgaggtgggaggatcacttgaggctgggagcttgagacgagcctgggcaatatagtgagaccccatctgtctcaactatttcaagagtagaatgaataatttt

SEQ ID NO: 391430 - DNA, 672 bp, Homo sapiens
aattattccaaagtgagaagaactaggtaggaattatatttcctgtcagcaataaaatatgataaaaagaaagtaagggaatattttcaaaattctgagaaaaaaatgttcagttaaattctatagcaagtcaattcagtaatcaagtggcatggcatttgattgccattgttagaattgactcagaaagcttacttcctatccacctttttgtaaaaggtacttgagaatttactctagccaaacaagaaaatactgcagaaaatgaaaagatacattatgcaaggaaactgaaattaaatgggaagactaaggaaggaaagaccaakatgacaagagacctagagaactatcagtctattctgaagaggaagtgagaggactctgagagagaggactccacgaaaaaaaaaaaaaaaaaggatgctacaaaatatgactgagagcctggaaaaaattaaacatatgacaaaggtaaatgcaaggaaaaaaataaacattaatgtgttagtctgctttcacactactgataaagacatacctgagactggacaatttaagaaagaaagagatttaattggattcacagttccacatggctgggaaggcctcacaatcacgacaaaaggcaaggaggagcaagtcacatcttacgagcatggcggcaggcaa

SEQ ID NO: 391431 - DNA, 672 bp, Homo sapiens
aattattccaaagtgagaagaactaggtaggaattatatttcctgtcagcaataaaatatgataaaaagaaagtaagggaatattttcaaaattctgagaaaaaaatgttcagttaaattctatagcaagtcaattcagtaatcaagtggcatggcatttgattgccattgttagaattgactcagaaagcttacttcctatccacctttttgtaaaaggtacttgagaatttactctagccaaacaagaaaatactgcagaaaatgaaaagatacattatgcaaggaaactgaaattaaatgggaagactaaggaaggaaagaccaatatgacaagagacctagagaactatcagtctattytgaagaggaagtgagaggactctgagagagaggactccacgaaaaaaaaaaaaaaaaaggatgctacaaaatatgactgagagcctggaaaaaattaaacatatgacaaaggtaaatgcaaggaaaaaaataaacattaatgtgttagtctgctttcacactactgataaagacatacctgagactggacaatttaagaaagaaagagatttaattggattcacagttccacatggctgggaaggcctcacaatcacgacaaaaggcaaggaggagcaagtcacatcttacgagcatggcggcaggcaa

SEQ ID NO: 391432 - DNA, 672 bp, Homo sapiens
aattattccaaagtgagaagaactaggtaggaattatatttcctgtcagcaataaaatatgataaaaagaaagtaagggaatattttcaaaattctgagaaaaaaatgttcagttaaattctatagcaagtcaattcagtaatcaagtggcatggcatttgattgccattgttagaattgactcagaaagcttacttcctatccacctttttgtaaaaggtacttgagaatttactctagccaaacaagaaaatactgcagaaaatgaaaagatacattatgcaaggaaactgaaattaaatgggaagactaaggaaggaaagaccaatatgacaagagacctagagaactatcagtctattctgaagaggaagtgagaggactytgagagagaggactccacgaaaaaaaaaaaaaaaaaggatgctacaaaatatgactgagagcctggaaaaaattaaacatatgacaaaggtaaatgcaaggaaaaaaataaacattaatgtgttagtctgctttcacactactgataaagacatacctgagactggacaatttaagaaagaaagagatttaattggattcacagttccacatggctgggaaggcctcacaatcacgacaaaaggcaaggaggagcaagtcacatcttacgagcatggcggcaggcaa

SEQ ID NO: 391433 - DNA, 631 bp, Homo sapiens
aatgaaatataagagcctggtattaaacagaaagggataagccatatttgatcggtgactaagtatacatttcatattttctccctcccaaatataaggtattacattttcatactatttcttacttgatagagttcaatgttttatattacttgcttcaaataactaccattccttgggaaatggctgaaatcaccatggtaggcagtgaagaagtacttataacttttaattaacagagattgaaaagctgagagtgttttttaaggactgagactgctttggtgtgagtacaaatttcataactgcaggttattttggttaattggaggattaatttgttttttctgtgctcattattgtatttgtctttaaaagtgtagaacaagtgattctttttgctgtgatattgatgaattttttaataatcaaaattgacgtaaactcggtagtcatttaaatgagagaagggagcataagaaaggttaatttttactaatttgtagagatagtagagactgtttttaagtgctgttttgtaatttgagaactactttattattctttttactgaayacaagtcttgaaactcttgtagaaaaataatactattatatcgtgtattaagata

SEQ ID NO: 391434 - DNA, 628 bp, Homo sapiens
ctgtcttcaaagaatcatttgctaatggakaaataataattcaatttttgtccgtaattgtttgtctttaagaagcagttttaaatacatctagttgtagaataatacatttttaaaaatctacttggctttgttatttcttagtgttagtcagtttgattaagattagttaatccaaacgttaagactgatgatttcttagtgttgggactagatgcatgtgtttaatgatcttattttttacataaaaatactgagaaagaagatatttcaaaatatccaaagttgtaaatgttatatttctaactttctcttttacagaaggatatgtatatttcatctatatagaacctcaagtaatagttttgaaattgaggtttgtagctaggtttcaaactcatcaattataaagcaggtgaactggcttgggttgggtgttcctgtgagaattattgacttgagtattaatttagggatttggagattttaaaatactaatttttcaagaggaattaaaaaggtgaacctatccctagtctttgaagtatagtcagcttccaattaatctgcatgtgtgggacaccatcccctcctaggtgtgactttctcagacctgctggaaaattgc

SEQ ID NO: 391435 - DNA, 541 bp, Homo sapiens
tatatgacaataaatgaaaagtgtatcaatcaaagtttcatagtcctctctctgcataaagaaatatgagggaggaaaatgaaaactaaatagattggcaggcagaaaatgctgatactgtccttcatccacatttggaatagttctctggtctctctcttcctaaaataacctatgcagtgagtcaaataatttctttcttctttggtaaaactagacctaaatttcagtttacaaagaaagaaaagtgaaaatagggaaggaaggaaagaaagatgcccaactgcctgactttgaattaattgcaatccttttaatagtatatgcataaagaaataatattacagaagctgttccatcttgaccacatcctctgtcagtctgcakaactacccagtgaagtagggttgttcatacagctacggagctgagactctaggcctctacagatccattgactaattgccctaagggctcaggtcagacctaatttcccctaattccagtgctttcctcatttcaaaaaagcaatgttttatct

SEQ ID NO: 391436 - DNA, 505 bp, Homo sapiens
caatttaaataactaacttttaaaatagcttatttttattttatttatttttattttttagagacagggtctcatcatgtaaatttatttttaaagaggcatctgtgatataaaatattgtggtatttaaaatttggaatttataattaaaaaattacgtgaagctggagtttcctaagcaacttaygtgtttaagggaagaaatacattatttttaaactaaccttacttaatggggactgttttaaccttaggcaatggagatcaaagagttcactatcagagctggtttctaccagccgtgggcactactgttccgaaaaaccacctttctgaatacactgtttacttccataggctgaaaatctgtcgtattttttatatcttttagcacaagatgatttactgccatctgccttaaacttgtaacaagtataaatgtacaatgtctgaaaggtgagtggtacattgttgagttgtgcagtacatgacagctctgaagaca

SEQ ID NO: 391437 - DNA, 599 bp, Homo sapiens
aaaaatgcaagataaaataagtaccacaaaagagaatcataagtgctctaggaaccaaaaggaaatgaggtaaaggccagacagtatatagtaagcaaggaaaaatagacattcataaggaatagtaacagtagaaaacttcagttttcaaacgagctaaaagattagagaaggatacaggaaaaagaacttgtttccgggtcaaaagcaacaaaaataatgactgggaaaatggagmagtaaggaaacaaaattctcaaggtaaattctttacccaattgtcttgtcttttaaaaagacaatatttggggaaaaaacaaaaaacatttctaggctgaaaaatgcttcagatgaaattttagtatgccaaagattaaagggtgttcacaataaaatgttatcaacaacagtaaaggccaagttcccatgattctacagatacttactgaggcaaaatcacagtgtggccagaaagaacttgagagtgcatgggaggaacgcttggctaagtaccaaaaactgaatcaaaaccagtgcccagaacatctatcgaaggcatgtcttcatgagaagtgtttaatgttgtcaccacttaaatt

SEQ ID NO: 391438 - DNA, 575 bp, Homo sapiens
ctaaagacatactttaagcaagatgctttgctggatgctgtgtataaattttaaagggagaatttctgcagatttttgactgaataaaatgactaaatattctgaaaaaactaatattcttttagatatataaatattggcataattgatttgaaatcatgtatttggaaactacttacaatttatattttacagtgttactaatcacaaaaatactgttaactagtcacacaaatactgttgtataatcttttatcctttttgcaggttaactagtcacataaatactgttgtataattcttttatcctttttgcaggttaactagtcacataaatactsttgtataattcttttatcctttttgcaggttaactagtcacataaatactgttgtataattcttttatccttattgcaggttaactagtcgcacaaatactgttgtataattctattatcctttttacacaaaattacttttttatgtaatctttcttattttagtttctaaaaaagttgacatacagagggttccaagatggctgaagaggaacagctccagtctacagctcc

SEQ ID NO: 391439 - DNA, 575 bp, Homo sapiens
ctaaagacatactttaagcaagatgctttgctggatgctgtgtataaattttaaagggagaatttctgcagatttttgactgaataaaatgactaaatattctgaaaaaactaatattcttttagatatataaatattggcataattgatttgaaatcatgtatttggaaactacttacaatttatattttacagtgttactaatcacaaaaatactgttaactagtcacacaaatactgttgtataatcttttatcctttttgcaggttaactagtcacataaatactgttgtataattcttttatcctttttgcaggttaactagtcacataaatactcttgtataattcttttatcctttttgcaggttaactagtcacataaatactgttgtataattcttttatccttattgcaggttaactagtcgcacaaatactgttgtataattctattatcctttttacacaaaattacttttttatgtaatctttcttattttagtttctaaaaaagttgacatacagwgggttccaagatggctgaagaggaacagctccagtctacagctcc

SEQ ID NO: 391440 - DNA, 581 bp, Homo sapiens
agtcacataaatactgttgtataattcttttatccttattgcaggttaactagtcgcacaaatactgttgtataattctattatcctttttacacaaaattacttttttatgtaatctttcttattttagtttctaaaaaagttgacatacagagggttccaagatggctgaagaggaacagctccagtctacagctcccagcatgagggactcagaagaygggtgatttctgtatttccaactgaggtactgggttcatctcaaagggtcttgttggacagtgggtgcagcccatgaagtgtgagccgaagcagggcagggcattgcctcacctaggaagctcaagaggtcggagaattagctttcctagccaagggaagccgtgacagatggtacctggaaaatcaggacacttctaccctaatactgtgcttttctaacagtcttagcaaatggcacaccaggatattatatccagcgcctggctcagagggtcccacacccatggagccttgctcattgctagcacagcagtctgagattgaactgcaaggcggcagcgaggctggggggagggggg

SEQ ID NO: 391441 - DNA, 581 bp, Homo sapiens
agtcacataaatactgttgtataattcttttatccttattgcaggttaactagtcgcacaaatactgttgtataattctattatcctttttacacaaaattacttttttatgtaatctttcttattttagtttctaaaaaagttgacatacagagggttccaagatggctgaagaggaacagctccagtctacagctcccagcatgagggactcagaagacgggtgatttctgtatttccaactgaggtactgggttcatctcaaagggtcttgttggacagtgggtgcagcccatgaagtgtgagccgaagcagggcagggcattgcctcacctaggaagctcaagagktcggagaattagctttcctagccaagggaagccgtgacagatggtacctggaaaatcaggacacttctaccctaatactgtgcttttctaacagtcttagcaaatggcacaccaggatattatatccagcgcctggctcagagggtcccacacccatggagccttgctcattgctagcacagcagtctgagattgaactgcaaggcggcagcgaggctggggggagggggg

SEQ ID NO: 391442 - DNA, 581 bp, Homo sapiens
agtcacataaatactgttgtataattcttttatccttattgcaggttaactagtcgcacaaatactgttgtataattctattatcctttttacacaaaattacttttttatgtaatctttcttattttagtttctaaaaaagttgacatacagagggttccaagatggctgaagaggaacagctccagtctacagctcccagcatgagggactcagaagacgggtgatttctgtatttccaactgaggtactgggttcatctcaaagggtcttgttggacagtgggtgcagcccatgaagtgtgagccgaagcagggcagggcattgcctcacctaggaagctcaagaggtcggagaattagctttcctagccaagggaagccrtgacagatggtacctggaaaatcaggacacttctaccctaatactgtgcttttctaacagtcttagcaaatggcacaccaggatattatatccagcgcctggctcagagggtcccacacccatggagccttgctcattgctagcacagcagtctgagattgaactgcaaggcggcagcgaggctggggggagggggg

SEQ ID NO: 391443 - DNA, 527 bp, Homo sapiens
ttgcacaatcatataacgtcctacattgttacaaytttttaggtaggtttttttcctcttcagtgtgattgtaaattccttgagtctaaagctgtgtatcaatcaatcaacagataatcactgcgacctttctgtgactgagacattgtgtaaggtgaaatggtggataaaacaatttgagcagtaaataactgaaagtctcaaaagacagtacgtgtctcagtatactattgccacaataattctaaataacacacagccacaacactcacggcctgtaacagtaagcttttattcttacgttcactagtgtgtcaattaactgtccttcagcttcaagctgtgatttggctcagattgctccagctatggttgggtcaacacttctgccttattttgcacccctgattgaaggaactctatgtaaagacatcttttcctcgggaacctaattgctatgtttgacatcctcaacagattctttattaatgccttttttcccttaaattataaaataatttttaaaa

SEQ ID NO: 391444 - DNA, 439 bp, Homo sapiens
cacgttgttaaccataatcaccctacttttcaataaaacactagaattcattccttctgtctaactgtaactttgtaccccrttgaccaatctctccctttccctccttcctcttgctctcctcaggctctggtattcattattctactttctacttctatgcgatcagcttttttagattagacatatgagtgagatcatgtgttatttgtctttctgtgcctgactcatttcacttgatacaatgtcttcaaggtttatttatgttgcctcaaatgacagaatttcttttctctttgtggctgaatagtattccattgtgtgtgtgagtgtgtgtgtgtgtgtgtgtgtataacaattgtattatccattcatccactgattgacacttagcttgattctatatcttggctattaattgtactgcaataagcatggg

SEQ ID NO: 391445 - DNA, 409 bp, Homo sapiens
tgatgtgttcccattttcctttgtctcaagaaaattttaaacttgtcttttaatgtcttcattggcccattgggtcttaaactgagccatcaaatagctctctcagtgctacccaaaacatgatggctcagttttcactgtcaccctttgcctgcctagatatgagttctgagttggagaaccagaacaagagagtgcagaatacaacgtgtcaatcaatgtaggctttaaatattgctacttttactatwttcatcattgttatttttaaatacataaactactacatttttaggatgaaattaattgtgtatatcacaaaaggcagtttagaaaatctgagtcatttttatttgtataataggggcttcattgtagtgtaacttattagcactacaagttcaaataa

SEQ ID NO: 391446 - DNA, 603 bp, Homo sapiens
aaaaatcagaggaggaataacactttatggtttgaaacttatatgaaattcaaactccagtaatcagagatagttttatttgaacataattatggtcatttgtttaggtattttctagggctgctttcactgctacagtggtaacatcaggtaggtaagataaaaaccatataacacaaagcttgcggtacttactatctgaccctttaaggaagttttttgaccattctctaatgggtgattccttgaaactttgatgtatgacctcagttccatttctaggctgatactcactttaggcataagtgtttcaaatacaataacccaactttgyaactcaatatcaagtcatctttatgtttactctgacttttgaccatgtgcttaatttataagctacagaaagattcttccagttaggtcttcctgctactttttcatgtactccaatcacaatgtatattgtagcttcagattctggtaattttctatctacttcatgatgttccatttatctgagtcatgttttatattgtttcttaatacatgttaggacttttctatgacagcatttcccagagtgtgttccaaaaacattaggtt

SEQ ID NO: 391447 - DNA, 603 bp, Homo sapiens
aaaaatcagaggaggaataacactttatggtttgaaacttatatgaaattcaaactccagtaatcagagatagttttatttgaacataattatggtcatttgtttaggtattttctagggctgctttcactgctacagtggtaacatcaggtaggtaagataaaaaccatataacacaaagcttgcggtacttactatctgaccctttaaggaagttttttgaccattctctaatgggtgattccttgaaactttgatgtatgacctcagttccatttctaggctgatactcactttaggcataagtgtttcaaatacaataacccaactttgtaactcaatatcaagtcatctttatgtttactctgacttttgaccatgtgcttaatttataagctacagaaagattcttccagttaggtcttcctgctactttttcatgtactccaatcacaatgtatattgtagcttcagattctggtaattttctatctacttcatgatgttccatttatctgagtcatgttttatattgtttcttaatacatgttaggacttttctatgacagcatttcccagrgtgtgttccaaaaacattaggtt

SEQ ID NO: 391448 - DNA, 540 bp, Homo sapiens
ggctgaacaaatttggaagagaaacagtttctctcctgaatgacttctttgtcaacagcttttatatgcagaatttctcagatatatttggctgtcaaatacctttttatatagagtacatcatgagacttcactgttctctaaggtgtcgtaaatgtttgagaataaaattgaaaattgagttaattggactctgatatcaaaaaccaagctgcttttgtaccttcagaacagtagtttgcatgtctcatttcctcatacaagccaattatttatttatttttacttagtaactaacagatagcacttattttgtgccaggcattactctacatacttttcaaatattaacacatttaacttgtataaaaaccctgggacttatttgaattctaatccatatgttacagatgagaaaactgatgcaccaggaactaaggtgattttccaaagcaatttagctaaaaggtgctagaactagaattcaaatatagttggactgattgcagtcratgcttttaactaataaactgtgctggc

SEQ ID NO: 391449 - DNA, 551 bp, Homo sapiens
aagaagctgagatgcagaaaaattaatccaatggcccaagatgacaaaattaggaagtaactcacttcccaattaaacccayttttccttttactactttatgcctcaagtattacttaactaaaagaagaaccaaaataaagcaaactttgtgtagcctagcagttgtttatagcttcatttatttttctaactttgaattagttatgtatggatgaaattagaaattaaaatgtaaatccatattctagttcattttgaaaaattaaaaattttgacaacatgacagccactatatgagcctgaaaaaggctatcttctcagaaagggcatgagccgtctagtttacagtccctattaagccattcagtttacactgggctacttcatgcattaccttgcctgcatttgactttatgaaacttacatggttcagtcgttatgttagaagaaactttcagaactagattactcactatttcttttatcagatatatgaatctctgtaattctccatttatccaatatcttactaatctttgaacacaaat

SEQ ID NO: 391450 - DNA, 551 bp, Homo sapiens
aagaagctgagatgcagaaaaattaatccaatggcccaagatgacaaaattaggaagtaactcacttcccaattaaacccatttttccttttactaytttatgcctcaagtattacttaactaaaagaagaaccaaaataaagcaaactttgtgtagcctagcagttgtttatagcttcatttatttttctaactttgaattagttatgtatggatgaaattagaaattaaaatgtaaatccatattctagttcattttgaaaaattaaaaattttgacaacatgacagccactatatgagcctgaaaaaggctatcttctcagaaagggcatgagccgtctagtttacagtccctattaagccattcagtttacactgggctacttcatgcattaccttgcctgcatttgactttatgaaacttacatggttcagtcgttatgttagaagaaactttcagaactagattactcactatttcttttatcagatatatgaatctctgtaattctccatttatccaatatcttactaatctttgaacacaaat

SEQ ID NO: 391451 - DNA, 551 bp, Homo sapiens
aagaagctgagatgcagaaaaattaatccaatggcccaagatgacaaaattaggaagtaactcacttcccaattaaacccatttttccttttactactttatgcctcaagtattacttaactaaaagaagaaccaaaataaagcaaactttgtgtagcctagcagttgtttatagcttcatttatttttctaactttgaattagttatgtatggatgaaattagaaattaaaatgtaaatccatattctagttcattttgaaaaattaaaaattttgacaacatgacagccactatatgagcctgaaaaaggctatcttctcagaaagrgcatgagccgtctagtttacagtccctattaagccattcagtttacactgggctacttcatgcattaccttgcctgcatttgactttatgaaacttacatggttcagtcgttatgttagaagaaactttcagaactagattactcactatttcttttatcagatatatgaatctctgtaattctccatttatccaatatcttactaatctttgaacacaaat

SEQ ID NO: 391452 - DNA, 578 bp, Homo sapiens
tctatttttcttcaatttcccctgtccaactcaccccacaaaggctgtatcagaagagccagctacttgtgtctgggcttttatatcaagttttaggaatgttcagacagyttccaactaattaaaatttacatgttaaattctctgttcatctatggtatttctaaagagaagtgatatttgtttttgttttgcttttttatcttcaggttagcctctacaaatgtctgcagtctttagagaatattggcttctctttcttttgttcattttttgacacttctttgtctctctctctcacttctgctatggttgctgaatatctttccacctatgacgttttagatggggaaagagtttggccatcagtgtctgcaccagttaccacttcagcccactacatcttgagctgcaatttctactacttgcatgaattcggtgagacaagacactcacacacacacaagttaaatgagggggatttatgacttacatacaaacatcaaaggacaacagaagtctaggattcatgatgagctggtccaatgctcaggaaagctgcctggggcggatggggt

SEQ ID NO: 391453 - DNA, 466 bp, Homo sapiens
gccctcattgcacttagcttcattaattttttacattcacaatttctttcacttgatgctttttcaaatattaaaaaaaattctttagaatgacagtaggattttctgagaaaagatatgacttrcattataagatttccatgtaatcctaattatacaaaaataaatagtgtggtgctactaaagtatgtcctttaatattccattataatactgtaaatgtagtagatacttttgcaagtaaagataaattgtatgtgtgcttcacacaatgaccacttcagatgagtgttacatggtcccccacagacccacttctaagttctttgtctctactggaatggtaaaggaaaaaaaaacgaacagtttgttcttcagaatataggccgtaccataggagtgtcctgtgcactctggggcctataattacaatgggaaaaattggattagttagattcattgtaac

SEQ ID NO: 391454 - DNA, 595 bp, Homo sapiens
tctttgggatctccttggcccaagagaggagtccattcagtaagttagggttcttaaaatttcatttttgtttacagaagtttatggagtttaacaagagttttaatctcttgtcctagttaacrtaagttaatgatcagaagagccgggtctaaaaactaattactccaactttggggtccacacatttaacgactatgatatactctgaaaatagatattgcctgctgtgaatggcagtatgaagtgagcaattaagaagatgattttattctggctactgtaataggggagaatattcattaatgaggaaaacctcaaagtaaaggaatatggcctgcagttctacagcaccaggtaaacaagagagtgctaaagaaaacaagtaattttactttaagttctgggatacatgtgcagaatgtgcaggtttgttacatcagtatacatgtgccatggtggtctgttgcacccgtcaacctgtcatctaggttttaagacctgcatgcattagatatttgtcctaatgctctccctccccttggtccccaccccctgacaggccctggtgtatgatgttcccctcccgatgtcc

SEQ ID NO: 391455 - DNA, 595 bp, Homo sapiens
tctttgggatctccttggcccaagagaggagtccattcagtaagttagggttcttaaaatttcatttttgtttacagaagtttatggagtttaacaagagttttaatctcttgtcctagttaacgtaagttaatgatcagaagagccgggtctaaaaactaattactcyaactttggggtccacacatttaacgactatgatatactctgaaaatagatattgcctgctgtgaatggcagtatgaagtgagcaattaagaagatgattttattctggctactgtaataggggagaatattcattaatgaggaaaacctcaaagtaaaggaatatggcctgcagttctacagcaccaggtaaacaagagagtgctaaagaaaacaagtaattttactttaagttctgggatacatgtgcagaatgtgcaggtttgttacatcagtatacatgtgccatggtggtctgttgcacccgtcaacctgtcatctaggttttaagacctgcatgcattagatatttgtcctaatgctctccctccccttggtccccaccccctgacaggccctggtgtatgatgttcccctcccgatgtcc

SEQ ID NO: 391456 - DNA, 595 bp, Homo sapiens
tctttgggatctccttggcccaagagaggagtccattcagtaagttagggttcttaaaatttcatttttgtttacagaagtttatggagtttaacaagagttttaatctcttgtcctagttaacgtaagttaatgatcagaagagccgggtctaaaaactaattactccractttggggtccacacatttaacgactatgatatactctgaaaatagatattgcctgctgtgaatggcagtatgaagtgagcaattaagaagatgattttattctggctactgtaataggggagaatattcattaatgaggaaaacctcaaagtaaaggaatatggcctgcagttctacagcaccaggtaaacaagagagtgctaaagaaaacaagtaattttactttaagttctgggatacatgtgcagaatgtgcaggtttgttacatcagtatacatgtgccatggtggtctgttgcacccgtcaacctgtcatctaggttttaagacctgcatgcattagatatttgtcctaatgctctccctccccttggtccccaccccctgacaggccctggtgtatgatgttcccctcccgatgtcc

SEQ ID NO: 391457 - DNA, 595 bp, Homo sapiens
tctttgggatctccttggcccaagagaggagtccattcagtaagttagggttcttaaaatttcatttttgtttacagaagtttatggagtttaacaagagttttaatctcttgtcctagttaacgtaagttaatgatcagaagagccgggtctaaaaactaattactccaactttggggtccacacatttaaygactatgatatactctgaaaatagatattgcctgctgtgaatggcagtatgaagtgagcaattaagaagatgattttattctggctactgtaataggggagaatattcattaatgaggaaaacctcaaagtaaaggaatatggcctgcagttctacagcaccaggtaaacaagagagtgctaaagaaaacaagtaattttactttaagttctgggatacatgtgcagaatgtgcaggtttgttacatcagtatacatgtgccatggtggtctgttgcacccgtcaacctgtcatctaggttttaagacctgcatgcattagatatttgtcctaatgctctccctccccttggtccccaccccctgacaggccctggtgtatgatgttcccctcccgatgtcc

SEQ ID NO: 391458 - DNA, 602 bp, Homo sapiens
ggctgtaagaacattttttaaagtttgcggaagactaattcttagacatcagttatctctcaaaaatcatgtaattaaagtagtaatcaaaaacatgtttgcccccaaattgcatgtattctaagatacagctgagtaaaatgtattcatacaaacttggccacaatactttgagaattatcaattatcaaaatatgcaatttaaaaaaattattttgaacatactttggacaaaaacagacatgtaatgagtgttgaatttgcagtacacactttacctgcattatctcatataaccaaaacaacatcctccaacatatgtatctggggaaacagaagaccagaaaataactcaattccttaacctcagatggatggttaataatgaaatggattttgaaatattgctactaggtgtcagattttaataattttctacagatggataatctaatataaaaatgttgattacagaaggtaaatratgattaaatttgatgtcaatagaatgtacatgagtttccttttttaactaatgatttaccatgtaccttgtaagtaagagattagtagttatctaaattggtacaacaatagctatt

SEQ ID NO: 391459 - DNA, 655 bp, Homo sapiens
atttcatagcttagcaatttaataaaccaatcagcaatcaatatttcaaaaatatatacaagttttattgtttttggtacctttccagtatctaaagtgttctggattgtacaataatttatgtacttaccctatgattgagggtatgcataaggaagcctaaggagcatctggaaaacatgtttaaattcagatttaaacttagtttgtcatatgaaattataagaaagtaaagataatatgataacctttggcaattaaaattaaatrttttattgagcttaatatgcttttatttgtaagcgttccagcttaccacattaaaacatctgcttcttttttctttctgaatttgcccttgtcaaagggaagtgtaatagtgaatatatatccagatttttataacaaaaatagaatagaacacaaattactatgtttaaaataattaatgcttattttgcaatctgaactgtattctagatgcaaaatattctcattgtgagaataacttgggattcagctatttgaaataactgttgtttataaataaacacagtaattaattagactccaaagttcctttcacctaaaagatttacaactttgcacatttgtcaaaaagcaatattttccacaataagaagattagcatcag

SEQ ID NO: 391460 - DNA, 564 bp, Homo sapiens
attgtttctggctgtgtcagtgagggtgttgcgagaggagaatgacatytgagtcaataaatctaactaaactaatttttcccttccctttagattttatgatattgtcttcatattccattgagcttaatttctaagctggtgggtgctgcttttcaggaaggagatagtattaggttggtgtaaaagttattgtggtttttgccaatactgcaattactttggcaccagcctaaagtagtgctatttccttcttgtaaagactcctaatatctcaactcctgctctttcggatcttttcttgagaaaattggtggaatgctcaccttttgctgaagaagactctgaaatgcagctaaaaaaaaaaaaaaacaaaaaaaaccagtaattaacttcaggaccactattcaccctaggccccaaatttcctttttatgtcaaatataacttaccaaacttttataataggctacacataggattatattaatggaggttaagagtgtccactctcttcaagcttcctgtggtaaggctaagtggaaaaccagaattacagtttca

SEQ ID NO: 391461 - DNA, 581 bp, Homo sapiens
aagacacaaatttaacttgcattagatatatatgtatccagtagtgggattctcagatcatatggtagttctatttttagttcttgaggaatttccaaaatatttttatgtctataccaatttacaaatccacaaacagtgtataaatgagatgttttcattcaaagccccatatttttttcctagtctctatgaattttctggttttcagccaaatccttgagtcttttatagtgcctatcactgtaaatttttgtcctagaaatctcacatctagtagaaggatttattctagccctaattcacctcaggtgaagattcattccttaaagatttctgccctaatctgaggctgctttgagcattgatgcctacacaacctggtgtctaaggcagagcaatacctctgtagtgtggctactcccaactcatacctttacggagatttcaatgtttcagccctgagggatttgtgttacttcaatgayagcaggaattttttttttttttattaaatgtttttcttcagcagggtttttcatttttctatgttgtttcctttcttctttaagattggcttg

SEQ ID NO: 391462 - DNA, 520 bp, Homo sapiens
tttaaaagagcagttgaccaggatatatcttaatttattttttttttacatctatcatcaggcctcaaagttctcagccttgggmaatacttctcattctctagcacctacaacacatagtcatttgttatgttttttttctttccccttcttccttcgcaccataatattatttttatctgtgaactgatctttgattatttacaagaacctaattcctagaatagagtgttataggaataatcctaattaatttttttcttagcctttaggttcacaataattttattgagtatttatccaatctaaactaacacaataaattgtctttcacataataaggtcctaattctctttatcactttatacataaaatccattacccttttgggattaaacctcattttgggccattgaaattgttaacttttattaaaagttattaattcaatatatactgaaatagaaatctacttctttaaattttaggattattaaacacatgatttacttagccaaa

SEQ ID NO: 391463 - DNA, 586 bp, Homo sapiens
ccctatctgatcacatgactctgctctgctaggtaattttggatacactggagaaaataataatggaatcagtgtccwaaagtcaagctcattgaagataaaagcagtacttcattattaattattactctcctttaggaaatttgcctacattttaccttatatctatatctatatctatatcttaaactttcaagaaatggagctatatattacccaccattttgagatccctgaagaactatactcttctttcaggggcacatcatctagaaatctgtttcaacttcaatatgtattaaagtcattacatatatttttaaaattttaaaatttcagcacaccttctttgtgaattcatattctagtattggctattttcatacttaacatttttttctttataccaatacatttcattttattatattctttcatgtaatattgtttgtattctttattataagatgtcttaatttcataaaaaaactaaattaaatatttagactgtatccacccccaatatctttaagcaaaaaattaactttgtttttatatttttacagatagaagaaggatattgtac

SEQ ID NO: 391464 - DNA, 551 bp, Homo sapiens
ttcaattctgcctgtctcaccacaatgacttgaaaaatgtattcaataaattgtattcacagatttatgactaccggagctttccattcttgtccagaactaaaactaggtattttgccagcccagtcttttctgatgctttcagtgctatatctaaagcaatatttgaatgatgcattcatgggaaaaataaataaataataccaagtgagcttaatgtattccttcatttttttttctcttaaaatgtcatgactgcaaactacattatagatggcttcaggaatgtgactaaatgatgaactggataaagaactcagcttaaaagagacaaaaataactcatctcaaaagtcatatttttgatgcttctttattatttttatatttagataattgatagtgtattatttcctgtggtctacagatccagcttttcctatactcactttctctgagaaagaaagaattgtcrtatttttataaccaaggagttttatagcttatatcaatacatttctggttccctcttcccaaagcaaaccatagttg

SEQ ID NO: 391465 - DNA, 511 bp, Homo sapiens
taagttaccactagtccccacttcacaagtggttggaaattgaataagtctcagcttttaataagtggcttctttttaatccacgtctgcagagttcccccaaaagggagggatcagaagtcctccattgcccctgtactcctatgtcaaggtggcaacccagtgttttccaatgcaagacttttcctgcctttatgaaccttgcaattagtcgcctgagtgcctgtcgctctgggttttcaccacactaaagaatcatttcccactmttccaggaaccaacagacatcatcccttaactcagtgctagagaattttcccatgtcaggttttattaagctctctaactctaaagattcagagctccagacctttttcttggacttaaattgttctttttaagaagcacaggtcttccatttcttggtacaataagatccccaagtctcaaggacccaaagctctttctgagaatcccactatcacaggggcaacaggtagaacaatggaat

SEQ ID NO: 391466 - DNA, 511 bp, Homo sapiens
taagttaccactagtccccacttcacaagtggttggaaattgaataagtctcagcttttaataagtggcttctttttaatccacgtctgcagagttcccccaaaagggagggatcagaagtcctccattgcccctgtactcctatgtcaaggtggcaacccagtgttttccaatgcaagacttttcctgcctttatgaaccttgcaattagtcgcctgagtgcctgtcgctctgggttttcaccacactaaagaatcatttcccactattccaggaaccaacagacatcatcccttaactcagtgctagagaawtttcccatgtcaggttttattaagctctctaactctaaagattcagagctccagacctttttcttggacttaaattgttctttttaagaagcacaggtcttccatttcttggtacaataagatccccaagtctcaaggacccaaagctctttctgagaatcccactatcacaggggcaacaggtagaacaatggaat

SEQ ID NO: 391467 - DNA, 504 bp, Homo sapiens
tcatcttccagcagcctttatactttataagtcctcatgtgcatgctgtgtaggaacctgtgagatgtcactggcaatcatttggaccatcattccatagacagcagatgctgtagggaatgatctcagggcattttatttgtctacggttatacattggcaacactttagaaaaagttttgcacattcagccctcacagtaacctgtgagaaagtgcaaaaaaaaaggtacwcatttaaaaatgtttccagacttcagtaatgttaagatgcaagaaaaaatatatttttatatataaatatataatatatatttagcatatatatacactatataaatatataatatatatttagcatatatatatatactatataaatatatagtaataaccatattttacaagaaagatggaaagagatggaatgtcttagccaaagaatcaagatgtgaatgtgtgtttccttggttcagtgcgctttatatgataggtttgctaaagc

SEQ ID NO: 391468 - DNA, 504 bp, Homo sapiens
tcatcttccagcagcctttatactttataagtcctcatgtgcatgctgtgtaggaacctgtgagatgtcactggcaatcatttggaccatcattccatagacagcagatgctgtagggaatgatctcagggcattttatttgtctacggttatacattggcaacactttagaaaaagttttgcacattcagccctcacagtaacctgtgagaaagtgcaaaaaaaaaggtactcatttaaaaatgtttccagacttcagtaatgttaagatgcaagaaaaaatatatttttatatataaatatataatatatatttagcatatatatacactatataaatatataatatatatttagcatatatatatayactatataaatatatagtaataaccatattttacaagaaagatggaaagagatggaatgtcttagccaaagaatcaagatgtgaatgtgtgtttccttggttcagtgcgctttatatgataggtttgctaaagc

SEQ ID NO: 391469 - DNA, 610 bp, Homo sapiens
atttacgaaactgcattcactggtgatctagccttgccatggaagtgaaggaacaagaaagtggacacagtaggcaagctgaatggcaccacatcaccacctcagaaggggctctgccttcagggctcctcaacttcagtaaccccattcttaacccaccttgtccctataggaagctagaagaggttgaatgcatattctgaaacttcttttttccactttatgagaaaaaaattatacaatttggggtaatgctcatatggtggatatgcagttttcacatcataaaaacacaggtgctaactgagcctggtgtgtgcaacactcctacgcagaaaccagcagtgacagagaaccccagagtcagttacaccagcatagtttgcatttttagagggtgggaagggaggacagaaaggatctgagatgcacagagcagtggtttagcccatggattctgctgcacggaggcttcagaacctgaatgttatggaaragataccaccatgttttactgaatttggtatgtcccagattttaacaaacttcccattcccaagacccactgccatccccaattaagaaagatttttaaaaaccaagtaaagtt

SEQ ID NO: 391470 - DNA, 538 bp, Homo sapiens
acccctaaaatacctcattggaaggatgtactatagaagttactagaaataaagaggaaagaagacaacttggcaaatggcttgcccttcgttgctaattccagtctattgttgctcccttcaccttaaaaatacaacacctgcttggagttgcgtrccataagcccaacatgcccagccacgtctccttgtttcagtcttctacactcccccaccatcagagtccttttccctcagtccttaaaattttagctcctaactgtcattcccttcaccgttactcctgacaatccttggtgatttaaatgttcacataatccttctggtattctggcctgtcagtgccttgacttcatccatttcaaagatcatgtctacaccattctctgccacccactttcacagtcatattccaccagatcttgtcattataaattatttaaatccctttataacctcaattccaagcatccaacccgctgaccactacatcttattgttccagcttactctctctagtgccccacctccaaaaatc

SEQ ID NO: 391471 - DNA, 558 bp, Homo sapiens
aaactccaaattagaatagaatgaagcaacattctaggcaagcatgtaaagctggacctgtagggatatccttcctcaacatgcacacaaccaacccacttcagctacttttgtgagaaagtactcrgatttcagtagtgaaggaaagaaataaggaaaaaagaaacaaggaaaaaaagacctgagagttggagtagaccaaacctgaatatagtgggcactggagcactgatcaaaagagaaacatgtgtcaggctgcattgttagaaaagtgacttagaaaagctgaagttttttgtgtatttgcttgttttgcaattaagagagtcataacagatattggctatcacctggggtcattgtagttggtgcagtgagacaggtgtgggcaaatcacatcatttggtgctttcagtttataagcaatctcttgtttcagtgattattaaggataaacttagaaggagacaggaatcttaattagacatgtccattctgaaagtctgtggaacgaggaaaggactcttctactatctttgtctttggtgaggaaggagg

SEQ ID NO: 391472 - DNA, 633 bp, Homo sapiens
gttgtttttaaccactaaagttttggtgttgttggttacgcaactgtagctagctgatacactgtcttcttaggtgcattaggattttctttgcttgagggaatattttttaagaatctctagaggccatttcggggagcatgctgyagtcttagtataaataacaatcatttgtttcaggcaaaactgtctgccactggactttctcctagaaaggcagcaaacatctgcagggtattacagtagtgttaggagaaagaggaagtagccttgtcaaggcttacaaaatgaatgctcttatttactatagacaaatgattggagggtgttgtaattgggtgagtggcaaatgcagacagactgtggggtggtgacatgagtgatgctagaactcttaggtagaagatggggcttggccgcccctggttttctggagatacagaatcacactgactacataataatgatggtgatgatagctaacgattattaagcactcacttccagtcatactacatgctttacatgcattctctcatttctcataataactctatgaactgggtattaggtaatatcattagctccattttacaaataatgaaactgaggctcagacagcttcttcaaggt

SEQ ID NO: 391473 - DNA, 550 bp, Homo sapiens
tgacaattccaactactagtcataattattctatctagtattatatctctatgaaaactaggaccaattgttcagcctatttgacttgattttaatagtttaagccatttccaaaagatttttttccttctagaattaccttaaccaaagtttcctacatactagaatttatttatttatttagatagttagttagttattttcagacaaagtctcactcttgtccaccaggctggagtgcaatggcacgatctcggctcactgcaacctccgcctcccaggttcaagcgattctcctgcctcagcctcccaagtagctgggattacaggtgcctgccaccacggctggctactttttgtatttttagtagagatgggggtttcaccatgttgtccaggctggtctcgaactcctgaccttaggtgatycacccgccttggcctcccaaagtgctgggattacaggcgtgagccatcgcacccagcccatactagatttattttaagttacatttttcctgtgcactaactgaatataggactatattag

SEQ ID NO: 391474 - DNA, 629 bp, Homo sapiens
cacctcccggtttcacgccattctcctcctacctcagcctcctgagtacctgggactacaggtgcccgccaccatgcccggctaattttgtttttgtatttttagtaaagacagggtttcaccatgttagccaggatggtctcgatctyctgaccccgtgatccgcccgccttggcctcccaaagtgtggggattacaggcatgagccaccgcacccggcctatacgtggtgcattttaagaagtagggtcactcttttaagcccacagacttgaaagtattcaaaaacccaattataatttcctagtagtccttggcagctggaatatgttaatatagcttctcaaggtgaggaagtcattaggcagagaatccaactgtgattttggagttaagaactatttcctctcatatggtcacagataacttgtattcttattaacaggagctagatcctagctttctaacaagaaaagagcctacaagaagactagggcaaatcttaaactttgcctcctctcttaaatcatattactatcctgtacatcagcagagtcagtattgaattgaaatagggaggcctcattacttggctggggaattttaacagtcccaagcttttaggagcc

SEQ ID NO: 391475 - DNA, 629 bp, Homo sapiens
cacctcccggtttcacgccattctcctcctacctcagcctcctgagtacctgggactacaggtgcccgccaccatgcccggctaattttgtttttgtatttttagtaaagacagggtttcaccatgttagccaggatggtctcgatctcctgaccccgtgatccgcccgccttggcctcccaaagtgtggggattacaggcatgagccacygcacccggcctatacgtggtgcattttaagaagtagggtcactcttttaagcccacagacttgaaagtattcaaaaacccaattataatttcctagtagtccttggcagctggaatatgttaatatagcttctcaaggtgaggaagtcattaggcagagaatccaactgtgattttggagttaagaactatttcctctcatatggtcacagataacttgtattcttattaacaggagctagatcctagctttctaacaagaaaagagcctacaagaagactagggcaaatcttaaactttgcctcctctcttaaatcatattactatcctgtacatcagcagagtcagtattgaattgaaatagggaggcctcattacttggctggggaattttaacagtcccaagcttttaggagcc

SEQ ID NO: 391476 - DNA, 492 bp, Homo sapiens
ttgggggatgagcatacagagctgataaaaagaatccaaggagatctgggcaggtrgagtgcatttttttcctttaaaaagtttatttttaaaataggagggcttaaggcaaagataaattatattgtcataatagagggagtttcaggaaagttaggatatatttgttcatgtaaaattatgtataattacatatatttattatatatattttatatagattatttctttttttggtcacaatttatctttaagcccatttaacctaaaggagtccagtttacggagatgaatacagttgcagcacgaagagcgagtgctcaagtgagagaatatgacactactgatgtgtaccctacatcctacataccaagaggacctgctacttcctcctgaccaaccaacccctaccccagggcagccatcacttccatgccacaaactgaataaattctcccagatagggatatttatattaatgcaggatttttg

SEQ ID NO: 391477 - DNA, 538 bp, Homo sapiens
tattaaaacatacagaatttggtgtaatatcctatattttttctggtctggaatctactacagaaaatagatcttgctggaaaggatttagagtctagtgggggagacataacaattaaaattcataattacagcacagtgtggtacactctgtgataggtgaatgttcactactatgggtatctaggtgtggtggtggacgcctgtagtcccaggtactcaggaggctaagactggaggattgcttgagcccaggaattcaagttcagcctgggcaacatagcgaaacccatctctaaaagaaatactatgggaaagctctgattctggtaatggtcaagtagtttagaccaactatcccacaaataacaatgataagcctcaaataaaatatgaaaagccactatttataattyacccaccaagaacagtgaaaagtaggcaaaaagtgaagagagtttgattactgaaagaagaaaatcataacgagtgagagctacatttagatgacttttgccttgggggctctctccaatcc

SEQ ID NO: 391478 - DNA, 626 bp, Homo sapiens
attgacatttttgaagagcctaagccagctgttttgcaaaatacttctcaatttgaacgtgcccaattgtttcctcaccattaggttcagattaaacatttttggcaggaatacaatgtaggtgatggtaggcccttctcagtatagcacatgaggaggcacatgattttattacttttccatgcaactttcagccyatcctcctccacacatctcaacttccccctcaagcaggggtggtgtcaaaggcaggccaaagggacctgacctgcactcacattcttttgagtgctgtagacagcagcaaccatgaagaatgaattgcaaacttgaatgtctcttgagacaactttccttgatctatcttcctaactcaaacctcagtgacagaaaacagtaacagccgtgtttgtaaaagtggttcccatgctaaagatgaatcaccagtttgcctcagaaatgaaaggaagactgattcagactagctctgttgccaaaaatacacaatggaggatgttacaccaaaaaacagaaagcaagctgaagccaaaagagaaacaccaagggtattatgataaaactacaaaagtccttttgaagataaatataggtaacagggtttgaac

SEQ ID NO: 391479 - DNA, 513 bp, Homo sapiens
gacaataggtttttattgttttaagccacacagtttatgatactttgctaaggtcaccctaagaaaktaatacattaagtcaagtctatgggggtgtcatagtcagctttggctgctataacaaaatatcatagactaggtgacttaaataacagatatttatttcttacagttctggaggctgagaagtccaacatcaaggagctggtagattttgttgctggtaagggccctctttctggcttgcacatggctaccttctcattgtgtcctcacatggcaaagagggagagagagagaggtgttaggagctctcgggtgtctcttcttctttgtacaaggacactcatcccaccatgggggtcccaccctcatgacctcatctcaacctaattacttcccaaaggttccacctccagaccacatcacactgggagttagggcttcaatatacgaattttggggggacacaaacattcaggggaacagcagacttcttaactttgtggtctt

SEQ ID NO: 391480 - DNA, 513 bp, Homo sapiens
gacaataggtttttattgttttaagccacacagtttatgatactttgctaaggtcaccctaagaaattaatacattaagtcaagtctatgggggtgtcatagtcagctttggctgctataacaaaatatcatagactaggtgacttaaataacagatatttatttcttacagttctggaggctgagaagtccaacatcaaggagctggtagattttgttgctggtaagggccctctttctggcttgcacatggctaccttctcattgtgtcctcacatggcaaagagggagagagagagaggtgttaggagctctcgggtgtctcttcttctttgtacaaggacactcatcccaccatgggggtcccaccctcatgacctcatctcaacctaattacttcccaaaggttccacctccagaccacatcacactgggagttagggcttcaatataygaattttggggggacacaaacattcaggggaacagcagacttcttaactttgtggtctt

SEQ ID NO: 391481 - DNA, 537 bp, Homo sapiens
ttgctctttaattcagattcagtaacctgcccctttaatataaattactggtgcaatatgtaacagagttttttgactgcctactctagtccttgctgacagaactttcatttggataggggtgggaggctgtttccttctccccagcatgacttaagtagacactgattaattaaagcttgtcacagtactttcatttcccttgtcaatgattgttttttgcaaccgagttctggccagttaaacaaaatgggagtctgctggagaaattctggaaaaggttactgttatggtttggctctgtgtccccacccaaatctcatctcgaattgtaatccccacatgttggaggagaggcctggtgggaggtgactgaattatgggcggacttctccyttgcaagtgagttctagtgagttcttgcaagatctgaatgtttgaaaatgtgtggcacttccacctttgctctctttctctccctcttctctctctcctgccatcaagtgagacatgtcttgcttcccctttgacttccac

SEQ ID NO: 391482 - DNA, 599 bp, Homo sapiens
ctagtcatttctgtagaaacagaggctgaaatgactgggtagcattatggaggatttctggtaataataacacctacacagtgtgctgcaggaaatagcgagtccatacccgataattatgacgtgatgaatcatagaagaatttaggagcattgagactgagtgttgaagatttacattccaaatatatttttattgcacctataacataacttacggattcaaggagaaaaatgtcaaaagacctacgttttatacatgcacatgtacacatttatgtctgtctrcatagatctagacatgcacaaatgtggggtaagcaaggagcaggaagtggacatggaggatgaggtggtgagagaagatagtgatttttcattaatagtgatgaatacctctaatgtggaagtcaagtgacagttattcatttattctatcattgaaataaccctgagaagtaggcactagtgacaccactttatagatgaagagaatgagactcaatagtaagtagcagagcccagttttgaaccaagataagcctggttccaaagcagataggacacatcataagacctttcctgttgttcctgaactgc

SEQ ID NO: 391483 - DNA, 554 bp, Homo sapiens
gagagtagaattgttaccagaggctggtaagggtagtagggaggtggcggtggttactgggtacaaaaaaaatagaaagaatgaataagacatactatttggttacacaacagggtgactattcagtaataattgtatatattaaaataactaaaagtgtaattggattgtttgtaacacaaaggataaatgcttgagggaatggataccccattctccatgatgtgattatytcacattacatgcctgtatcaaaacatttcatgtaccccacaaatatatatacctactatgtacccacaaaagttaaaaagaaagaaaaggaaaaaagattaaaacgactatcttggtccttttgtgctgcaataacagaataccacagactgggggattataaagaacagaaatttattgtctcacatttccgtcagctgggaagtccaagatcaaggtgtcagcgtcttgtacagaccttcttactgtatcttcttcacatggtggaagagcaagagatagcaaacccactccagcaaggttgttttatgacagcatta

SEQ ID NO: 391484 - DNA, 554 bp, Homo sapiens
gagagtagaattgttaccagaggctggtaagggtagtagggaggtggcggtggttactgggtacaaaaaaaatagaaagaatgaataagacatactatttggttacacaacagggtgactattcagtaataattgtatatattaaaataactaaaagtgtaattggattgtttgtaacacaaaggataaatgcttgagggaatggataccccattctccatgatgtgattatctcacattacatgcctgtatcaaaacatttcatgtaccccacaaatatatatacctactatrtacccacaaaagttaaaaagaaagaaaaggaaaaaagattaaaacgactatcttggtccttttgtgctgcaataacagaataccacagactgggggattataaagaacagaaatttattgtctcacatttccgtcagctgggaagtccaagatcaaggtgtcagcgtcttgtacagaccttcttactgtatcttcttcacatggtggaagagcaagagatagcaaacccactccagcaaggttgttttatgacagcatta

SEQ ID NO: 391485 - DNA, 610 bp, Homo sapiens
gttgtgatgcaaatacaaacatcgacacaattgtatttttaggtatcaggtacaaataataaagagaccataacattgttaaaaatataaaaattttaggactaaatctaatgaagatacacaggtcttctacattaaaaatctattaagaagtattgagagaaactaaagaagacataaataaatggagagctattatgttcatgggttggaagtctcaatgttataaagacattagttgtctgcttattgatctacagatattgtgcaatcaaaatcctagcttgtgtttttgtgtagaacttgacaagttgattctaaattttacatggaaatccaaggggacaatgcacaaccaaagcacaggtaagaggactagcttgcctgaataacaagactaaatatagatccacagttatcaaaatagtgtggtatggactaggatagactagtggaccggtggaatagaatagaaagtcctgaaacacgcccatacttayatgacttgatttaagacaaaggtggctctccagagaagagggacattttcataataatggttccaagtcaatagtatatccataaggtataaaagaaaatttgaccccca

SEQ ID NO: 391486 - DNA, 401 bp, Homo sapiens
gcataatagacaatctgctcccactaaaccctgcctaaattgtagattcatgaataaaataaatgctgtgattgttttagaccagtaagttttgtggtggctatttaaacaatagaatattacatgcatcttagagttattacggttaacatttaattcctacttgtaacaattccctaaagatggaataattttacaacagattagctctgtttatctccctcatctactgtgctattgtcatgtattttacttctaaatatattcaaatccctacaaggtataattattattttttgtcttttataaactggtgctcttcattcttttatgctggcttgtkgttccatctgggataattttcatcagcctaaataactctttggtattgtggtgaagat

SEQ ID NO: 391487 - DNA, 622 bp, Homo sapiens
ccactgtaacacgatacctctctaacccagcagaactggaaaaatacttaacagctaaaatgcgcaactggatatgaataattccttacatttatggggctctctgagcaatggaccagtaaatactgcccmagttgtgctatgcagattccctgcattatcttgggaaaagaaagtttcctgagtaggagtcaacacgggaagttgaatggctttccagtttctcctgccttagatctttattatttaatttcaaagactgaatttttagagcatttctttcatagtcaaatacaattgtaatatgcattggaaggtcaaataagatttttttggataacctaccatcgcctttggcatgaaaaatcaagaagtcactaaaatgtcccccactctgagggcagagggatgatgtgcctacgccgcagttaggcagtatacataatatccatgaaaagatttaggtttaaggttgttgcagccttcagaggaaaactgataaaaacttgagcacttttatatatcaagctgtttggcttttttcagccacatctcaatttctatttcatagcagctgtgctatgtaaaaaggatctgagagttttgaaaagaatgtattgcc

SEQ ID NO: 391488 - DNA, 640 bp, Homo sapiens
atccatgcctttttctttccactgtaacacgatacctctctaacccagcagaactggaaaaatacttaacagctaaaatgcgcaactggatatgaataattccttacatttatggggctctctgagcaatggaccagtaaatactgccccagttgtgctatgcagattccctgcattatcttgggaaaagaaagtttcctgagtaggagtcaacacgggaagttgaatggctttccagtttctcctgccttagatctttattatttaatttcaaagactgaatttttagagcatttctttcatagtcaaatacaattgtaatatgcattggaaggtcaaataagatttttttggataacctaccatcgcctttggcatgaaaaatcaagaagtcactaaaatgtcccccactctgagggcagagggatgatgtgcctaygccgcagttaggcagtatacataatatccatgaaaagatttaggtttaaggttgttgcagccttcagaggaaaactgataaaaacttgagcacttttatatatcaagctgtttggcttttttcagccacatctcaatttctatttcatagcagctgtgctatgtaaaaaggatctgagagttttgaaaagaatgtattgcc

SEQ ID NO: 391489 - DNA, 566 bp, Homo sapiens
tatttatatgactcacgtgtctgagggctgactgattgaggctgagctatctgggcagcaccctttcaagttatgtatccaggtagtcttggctgctcacaatgatttgggctcaggttggcttccaatgtgctcattcttgtgcttaggctgaggggacagaatgttcgcrgaagttcttcttatggtgagagcagatgtgcaagagggcatgaagcaaattcaaggcatcttaaggcctaagctcatcatggtactttgtcatttccacttccttcagttgcccaaaccaagtcatatggctgaacccaaagttaaggtgtgaagaaatatattctgctttgttagtgggaagaattgcaaggttcactgaaatggctgtggacacaggaaggggctgacttgatgggaaagttcctggctggcttggaattgaagtcaattatgcaatctaccacaatgattatgagcccaatggactcaaattagttctacctggagagtcaggtgtccatgtttggggataagggcaaagaaacagggcaagctctttgtaactgaaccca

SEQ ID NO: 391490 - DNA, 572 bp, Homo sapiens
catcattgactaaaattgccttcctggaaattacattctaagagagagatgtagtctataaaaaataaataagtaaactatatcctattttataagggaataagtgttatgggaaaaagaaagtataacagatggaacaaatccagagtacagagggaaaagaggatttgtggtattctatagagtgctcagggtaggcctcattgaaaagcagaaaatttgagaaaatatttgaaggtgatgcagcaatagatttcttagggaagagcattccagaaagagggaacaactagaacagaaacattaagatagggaacatgcaaagcattacaaaaagaggccagaacaaagtggccaagggataaaatagtaagtgataaagtcagaagggtaaagaaaggactgcaaatagttagggcattgtaaggactttgacttcractccaagtgaaatgggtaggccttgcaagattttgagcctaggagtgaaaggatatgagttcatttttaaaagggactcctgtgtcaaaggcataaagctttattttctgagttagaggtttttaaacagt

SEQ ID NO: 391491 - DNA, 504 bp, Homo sapiens
tcatcttccagcagcctttatactttataagtcctcatgtgcatgctgtgtaggaacctgtgagatgtcactggcaatcatttggaccatcattccatagacagcagatgctgtagggaatgatctcagggcattttatttgtctayggttatacattggcaacactttagaaaaagttttgcacattcagccctcacagtaacctgtgagaaagtgcaaaaaaaaaggtactcatttaaaaatgtttccagacttcagtaatgttaagatgcaagaaaaaatatatttttatatataaatatataatatatatttagcatatatatacactatataaatatataatatatatttagcatatatatatatactatataaatatatagtaataaccatattttacaagaaagatggaaagagatggaatgtcttagccaaagaatcaagatgtgaatgtgtgtttccttggttcagtgcgctttatatgataggtttgctaaagc

SEQ ID NO: 391492 - DNA, 561 bp, Homo sapiens
gtacattcactgcctggttaatctgctgatttccacagctttaaataccacttacttacagattaattcatattttaatcagactctcttctgaactccagatccatattatctgactgcctgtsgttgccacctatatttggatgcctttaacttaacatagtttaaagagaactctaactcatcctcccacagtttgcttctctctcagtagtctccattttaggaaatgacatctctttctacccaactcttgatacaagaaacctgggagtcattctggacacctccctgttttgcatcctcaacatccaattcatttacaagttctgttgatttcacctccagaatatacttaaaatccctctactgctttctacctgttcccttataactctagtccaagccaccatcaactctcatttcaacttctacaacaactaaattaatctcctattactgaccttttcaaagtattctctacctaggagccagagtcatcttttaatccctccaatgacctcccattatacacagtgtaaaatccaaaatacataacaa

SEQ ID NO: 391493 - DNA, 585 bp, Homo sapiens
gaagtatgtgaactaatacaagagtcagcaaggtgggccaggcagaatattagcatacaaaaattaatagctttctattacacaaacaaaaacagattagatatgtattatacttttaaaatatctcattttcaaaaagcagtaaatctttttcaagttataaataagtaacaagttatggcataatctataaagctttttgaaggccttaaaagagaaacaagtggaacataaaatgtatttaatcaataggaatgctcaatgttgtatcttaataactcaaatttcataaaataaatgaaatcccaatcaaggtcccccaaggtatttcatgaaacttgataatttgattttaaagttcatatggaggagcaaatacttaagaataaactgaggcaggagaatggcgtgaacccgggaggcggagcttgccrtgagcccagatcacaccactgcactccagcctgggtgacagagcgagagtctgtctcaaaaaaaacaaaaacaaacaaacataaaaacaaaacaacaacaaaaaagaataaccaggataatcttgaaattgaagaaagcaacaaagtgata

SEQ ID NO: 391494 - DNA, 527 bp, Homo sapiens
ataaaagttgctaaaatgaataatttggatgggtgatgtgagaatttacttgtgccactacctttcccagcctctggtaatcatccttttcctctctatcaccacgagtttaattgttttgatttttagatcccacaaataagtgagaacatgtgatgcttgtctttctgtgcctggtttatttcacttaacataatgacctccagtccatttatgtcgccgcaaatacaaaatttcattattttttatggttaaatagtattttattatgtatatataccacattttctctgtccattcatctattgatggacacttagattgattctatatcttggctattgtgaatattgctgcaataaacacgggaargcagatatctgttagacataccaatttcatttcctttggatatatacccagtaatggaattgatggatcatatggtagttctatttttagttttttgcggaacttctatactgttttccataatgagtatactaacttacattcccaccaacagt

SEQ ID NO: 391495 - DNA, 597 bp, Homo sapiens
actgtatattgctttgaatagtatggtcattttcacaatattatcacggaattcataatcataaatttctttcaattcatgaacatgggaygtctttctgtgtctttgtttctttggtttctttcatcagtgtgttttatagttttattgtagagttttttttttaacttctttgattaattttattactaggtatatttttgtagctattgtaaatgctttcttgacttcttttttgctagttccttattggtgtgttggaatgctactgatctctgtgtgctgattttgtatgttgaaactttattgaattaatttatcagctctaagagtttttggagcagcttttagggatttctatataagggttttcttacatgtaaggttatgttatattatctgcaaataggaataatttgatttcctcctttcctgtggatgttctttattttcttctcatgcctaattgctccagctaagactcccagtactatgttgaataaaggtgatgaaagtgggcatccttgtcttgttctagatcttagagaaaaagtttacaacttttcccaatctgtatgatgttagttgtgggtttgc

SEQ ID NO: 391496 - DNA, 581 bp, Homo sapiens
tgcaccagaatatggtgagtgcaggaatacccacctagcactggctcctggcccatgtctattctcacccaaatatagctccatgytgcactgcaagggacctcatggcatgtatatccatcccagctcacagatctgtttcctatgaacagttgccacttagcgaccccttgccttgagcctaagggagtacagaccagtaacacagatcatgctggggtagaggtatgcttgggccctggaagcagactcaggtccacttaaactgggtatgctgaattgtgagtacctagcacttggtctagactgtggtggggagccaaacaggttccacataggcgtacatccttggttttgaagatttcttgctctgtggaaaatgcacacatctggagaagggacaaggcgaaaccctcaaagacagggctaaggggaggggccgttctagctctagtctaaggatgtcactggaagcaagataaagagattcatatctctgacactggggagccatcatgtctgccctagaatacttactcttaaatattttcataagaaataaacatattttatattgttta

SEQ ID NO: 391497 - DNA, 581 bp, Homo sapiens
tgcaccagaatatggtgagtgcaggaatacccacctagcactggctcctggcccatgtctattctcacccaaatatagctccatgctgcactgcaagggacctcatggcatgtatatccatcccagctcacagatctgtttcctatgaacagttgccacttagcgaccccttgccttgagcctaagggagtacagaccagtaacacagatcatgctggggtagaggtatgcttgggccctggaagcagactcaggtccacttaaactgggtatrctgaattgtgagtacctagcacttggtctagactgtggtggggagccaaacaggttccacataggcgtacatccttggttttgaagatttcttgctctgtggaaaatgcacacatctggagaagggacaaggcgaaaccctcaaagacagggctaaggggaggggccgttctagctctagtctaaggatgtcactggaagcaagataaagagattcatatctctgacactggggagccatcatgtctgccctagaatacttactcttaaatattttcataagaaataaacatattttatattgttta

SEQ ID NO: 391498 - DNA, 609 bp, Homo sapiens
ctttcaatattgcatggagtgtacacccactctgtgacaatcttcctaatattcttgggaggagagaatattactcccaataccgcatggggccgtacagccaccctgtcgatattgtttctaatatccaggggtaaagagtataatatcgccggggtgtacactccccccgtgatattgtttctaatatccaggtggctccaggatgatattactcccagctatcactaggaagtatacacccgcgctgtgattatttctgaatttccaagcgaggagagattgatattactcccaaaacctcaggggactgttcaccccatcacgtattatagtttttagtatccaggggctcagaggaagatattactcccaatatcgcagtaggtgtacaacccctgtgattttttttttaatatccaaggagggaaaggatgatattactcccaatgtcgctggaagtgtacatctcctctgtgatattgttcctaatatccagagactgagaggatgttattaccccaaatattgcmcgggatgtacatcccctatgatattcctaatatgcaaggagagagaggatgatattactcccaatatcacaggagt

SEQ ID NO: 391499 - DNA, 586 bp, Homo sapiens
  misc_feature (1)...(586): n = A,T,C or G
ctggtctatagaaatttcaccagacagatactgtcagagtctccagccataggagtgcaaacagtctttcattgaccccaattgaaaggatttatatctgatatgtataaagaagacccttaaaccattaataaaagtagagataatctcgttttaaaataggcaaagacttgaagaaccaatctacaagaaagactatcaaaaaggtctataaacatatgcaacattaattatcaaataaattcacattaaaattacaataaaataacactacctactagaacagctgaaaagactgacaataagcattagcaaggatatggaacaactgaaactgttacattgatgaggaatgtaagttagaagaatcattttggaagacagtctttaaaaaaacaaaacataaggtactcaagttgggcatggtggcatgtgcyngtagttttagctgtttggcagcctgaggcaggaggatccctttagtccaagagagttcaagtccagcctggaaaatatggcaatactccatctgtaagaacactaaaaggaacactctatgacagagaaattccactcctgaatccat

SEQ ID NO: 391500 - DNA, 586 bp, Homo sapiens
  misc_feature (1)...(586): n = A,T,C or G
ctggtctatagaaatttcaccagacagatactgtcagagtctccagccataggagtgcaaacagtctttcattgaccccaattgaaaggatttatatctgatatgtataaagaagacccttaaaccattaataaaagtagagataatctcgttttaaaataggcaaagacttgaagaaccaatctacaagaaagactatcaaaaaggtctataaacatatgcaacattaattatcaaataaattcacattaaaattacaataaaataacactacctactagaacagctgaaaagactgacaataagcattagcaaggatatggaacaactgaaactgttacattgatgaggaatgtaagttagaagaatcattttggaagacagtctttaaaaaaacaaaacataaggtactcaagttgggcatggtggcatgtgctngtagttttagctgtttggcagcctgaggcaggaggatccctttagtccaagagagttcaagtccagcctggaaaatatggcaatactccatctgtaagaamactaaaaggaacactctatgacagagaaattccactcctgaatccat

SEQ ID NO: 391501 - DNA, 598 bp, Homo sapiens
ttaaaatacatcagctaaactgataagactaatgactgacctaagtagctaaatgacatggttaaatggtcatgatatataagccatgaatatcaaatgcccggcaccatcctttttttggagtggttcagatccaaagaaggaatcatggaaaggacataggaatgaaaagactgaacatggacaggagagtgtttaaacaaaaaatattttttcccatttaaatgaatatgtatttgttgatttttttaaaaaagttaattttattttccttttaagttctgggatgtatgtgcaggatgtacaggtttcttacataggtaaatgtgtaccatgatgrttttctgcacctgtcaacccatcactcaggtattaagccgtgcgtgcattagctatttatcctgatgctctccctcccactcctccctgacaggtcccagtgtgtgtttttcgcctccctgtgtccatttgttctcattgttcagctcccattactagttatatgcccaaatgaatataaatcattccataataaagatacatgcacgtgtatattatagcactattcacaatagcaaagacatggaacccaaatgcc

SEQ ID NO: 391502 - DNA, 598 bp, Homo sapiens
ttaaaatacatcagctaaactgataagactaatgactgacctaagtagctaaatgacatggttaaatggtcatgatatataagccatgaatatcaaatgcccggcaccatcctttttttggagtggttcagatccaaagaaggaatcatggaaaggacataggaatgaaaagactgaacatggacaggagagtgtttaaacaaaaaatattttttcccatttaaatgaatatgtatttgttgatttttttaaaaaagttaattttattttccttttaagttctgggatgtatgtgcaggatgtacaggtttcttacataggtaaatgtgtaccatgatgattttctgcacctgtcaacccatcactcaggtattaagccgtgcgtgcattagctatttatcctgatgctctccctcccactcctccctgacaggtcccagtgtgtgtttttcgcctccctgtgtccatttgttctcatygttcagctcccattactagttatatgcccaaatgaatataaatcattccataataaagatacatgcacgtgtatattatagcactattcacaatagcaaagacatggaacccaaatgcc

SEQ ID NO: 391503 - DNA, 619 bp, Homo sapiens
gttccattgattattaggtataatgtgagatatttgccagaacggtttgactactactgactatatcattattttagttctttgtatttttagtkatcattttttgcctttattatttgctcaactatattgctaattcctcatgaaccattgttaactcttagagaagaaatgataatttatactttgtattcttagcacctatgcttaaacatagatggtcactaaaaataaatgcttgttgataattttatgtagaagataatttaatatatgcatataattgggagccaacagttcccaaatgaataaaaactgcgggaagaaaagcttctttcaggttactaaatctaccatacaacttaggcattgctcaccatctgctgtatttaagctttttatattgtatcatgtttcatacaggaaatgtcactgtaagactaacttcatgatgttttccttcatttcaatatagtatattttgatctatttgaagttcattcatccaacaaatacttaccaatctccctttctatgccagacactggatatgagctcagcccatagaaatatgcataaaattggcctggactttaagaaactttacattttatagtta

SEQ ID NO: 391504 - DNA, 607 bp, Homo sapiens
aagttcattcatccaacaaatacttaccaatctccctttctatgccagacactggatatgagctcagcccatagaaatatgcataaaattggcctggactttaagaaactttacattttatagttaatttaaaacatgtgcattctctatttttaaaacatgtacattctatttctatctcttctcaattcccatttctccttaacttttttcgtatttgtttatctagtccagcagcaaataacaaaaaggcttcttttaytgaatactcactgagtagctagctgtgaggaactctgctaagtgctcttagcacaatgccttgttgaattctatgtaagccctggagcaaacctacttggtgttattattatctgtttattttgcagtggagaaaataaaagtatagagtagtctaatgatttgcatacgatccatggctcacgtaggggagccaggattgaacccagatttgttctcttcaaattcccttcacttgcccattgtgatgggtatactaagaatgaagtaaatgatttatacaactgttggacttttgtggcttgcacactttttcttttcctgatgtatgtgaatcaatagaaac

SEQ ID NO: 391505 - DNA, 559 bp, Homo sapiens
caaatcaagcttgacaagtagagatggaggaggaggaaagatgcagtgggaagtttggaaagggtacaacatgagggcaggtcaacagatctctgggccttaaacacgaggatcttcctgttctgcctgatcacagctccagctcacttgctctgtttctttcaagctccctacatttctttacaattaaaagccatcaattcatgtgtatcatatgaacccaaccactgwgcgaaatctaaaagaatagagagaattttttttctagtttccttggctaaggaacataattctttcaccttcctgtgttaaaagaaagagcgaattaatttcaacatgattttgcacctatttcctcactgaacaagctgataaaagaacctcatgtgtgttgtttttttctttcatgggtgtttcattgattaaaattcacctcctattccactaaaattaaacccaggtctccgtacaatctttctcatttgcagttttgcaaacatcccacagtgaactacttagtggagtacaaatggaaagctggaagagagggggcgtggcc

SEQ ID NO: 391506 - DNA, 559 bp, Homo sapiens
caaatcaagcttgacaagtagagatggaggaggaggaaagatgcagtgggaagtttggaaagggtacaacatgagggcaggtcaacagatctctgggccttaaacacgaggatcttcctgttctgcctgatcacagctccagctcacttgctctgtttctttcaagctccctacatttctttacaattaaaagccatcaattcatgtgtatcatatgaacccaaccactgtgcgaaatctaaaagaatagagagaattttttttctagtttccttggctaaggaacataattctttcaccttcctgtgttaaaagaaagagcgaattaatttcaacatgattttgcacctatttcctcactgaacaagctgataaaagaacctcatgtgtgttgtttttttctttyatgggtgtttcattgattaaaattcacctcctattccactaaaattaaacccaggtctccgtacaatctttctcatttgcagttttgcaaacatcccacagtgaactacttagtggagtacaaatggaaagctggaagagagggggcgtggcc

SEQ ID NO: 391507 - DNA, 519 bp, Homo sapiens
taattgtgaacaattacaaattaggttaagaagaaaaggcaggcctagcacttgcttaaaattgtattttcatcagattttatctttctcataagaagataattgcgtaaacattgcatcttggcctggggattgaggatgagagtggcgactggagagaatcttgcctttacgtttttcttctccaatttccagtcttggataagccattagtcaaactccctcatcgtaagggaatgataatgtcaatatcaaaacttccagagctgttgatttccccaaaggcttaccaaaattaactgctcatctcagcttggggtagaggatttggagcttgaaatacaagtctttctcaaacttcagcatttcycatgtatcctctgataattataaaaggaagtcaaccagtgccgttggaatgcacatgatgtcagttgttaagtgattaacagtaatgtttagagcttctgtggcctggagagcttttaatggcattacgtagcaagtgccatagtatta

SEQ ID NO: 391508 - DNA, 572 bp, Homo sapiens
  misc_feature (1)...(572): n = A,T,C or G
tattctattggttgctcnatcagccctatttattgttggagggggctacacaagggtttacactggaggtcatcttgacagctggctgccacaatcattcattttattcatcaaaacattgatcaacttttgctgagggctaattacgcagaagtgtctgggctaggctctggcagtagtagcaactatttttaaatttatctaacaaatatactttgagcatctactatgtgctgggtgctcctacatgcattgaggtttttgcaaagaacaaaacaaatcagctttggcttccttgcagcttacattttagttaggrtggggaaacgcaataaaaaataaatgtataatatatcgggtataagcctgtatacaaaaagcagactaagaaagatagaagagttagtcctatttaatataggtggtcaaggaagatttctgtgacaaggtgatttggcaagaacctaactaaagtcgggggtgggagcagaatgcttcaggcagaggaaaccttcagtgcaaatgttggtggaaggatacatagaagagcaaaacaagaagagcctacaaga

SEQ ID NO: 391509 - DNA, 550 bp, Homo sapiens
aatatactttgagcatctactatgtgctgggtgctcctacatgcattgaggtttttgcaaagaacaaaacaaatcagctttggcttccttgcagcttacattttagttaggatggggaaacgcaataaaaaataaatgtataatatatcgggtataagcctgtatacaaaaagcagactaagaaagatagaagagttagtcctatttaatataggtggtcaaggaagatttctgtgacaaggtgatttggcaagaacctaactaaagtcgggkgtgggagcagaatgcttcaggcagaggaaaccttcagtgcaaatgttggtggaaggatacatagaagagcaaaacaagaagagcctacaagaagtcgtttataaagatgtgttaaactataagttagggctattattagactttgagtcacctgtgaatcttttctgttttactcttttaaaatctacattcaacatttaaagcccatctaatgcacaatcattcatctcatactggctggagtggctccagtggggcattctgaggaaccacgcca

SEQ ID NO: 391510 - DNA, 549 bp, Homo sapiens
aagtgcttagttccttgtgagaaatgacagaagcccagactgagttggttaattttattaaatgaggatggagagataagcaatggccaggacctacagggctttcttattgttttttaatcactttagttcctatgaattggaatgggacgrtggtgtctggaggggaagtatgagaagcagataaaagtttgtggcaatagttcaggagagataacagtttcttggatgagggtgatggcagtagcaatggataaatgtggatagatttttagatatacattggagtagaatcagcgggagttgctgatagactggcaaataccattataacagcactaatgccttatacttaattcaattgcttatatttctatctaccctattagactgtatagttttgacagcagggattatcagaatcatctttttaatttctaccacttagcataaagctcagtaatcagttgttgaaatacatatgtctacacacacatacatatgtttgtatatatgtatatatcttactttgcatcatacagtttataa

SEQ ID NO: 391511 - DNA, 510 bp, Homo sapiens
taaattttaactaatctgaacaagaaccacaaatgccttcttatttcacctttgcacctacactatgaccatttctttcttcattttaaaatgtcattctcctctcttttttataaaccaaaattctgcccatcattcagcatcttaattaaaattccatatgctcaaaactttctrtgattattccagcttacttttgtattttaaaacatgtggctctttgttctacttttagggtgcattccactttttattaggtcatttgtctacatttcgtccctccacagagagtataagctccttaagagaatgcaaccaggagttacacatgttttatagattcttaagaagtccttgttgaagtagttcataggcaatgaagagggcaggtttagagaaccccatcagctcttttcctctctctgtctttgaagtttctttgaagttaaagaaacctctacccagagaaaagctccccagggagacaggtcaaatgaggatcaggtcctg

SEQ ID NO: 391512 - DNA, 572 bp, Homo sapiens
cactgcttgattaaagccaacttataggctccaccaacaataaagaagctataaacattatctcctgttgctcatgtggcaacattaaaaatgtgttgccacctgacatggtggctcacgcctgtaatcccagcactttgggaggctgtggcgggtggatcacttgaggtcaggagtcagcctgggcaacatgatgaaaccccaccattaataaaaatacaaaaattagcccggtgtggtggtggatgcctgtagtcccagctacaggctgaggcaggagaatcgcttgaacctgggaggcagagcttgcagtgrgccaaaatggctgctctgtactccaatctaggtgacagagtgagactccatctaaaaaaaaaaaaatgttgcaccgaatctaatatatcttcctgtgggtgcttccacaagctatggtatatataatctagatttatgttctattttttaaaaaatctaaataaaattttattttaatgttttgataggtcattttatttttgctaatctttctgcagaaagacaatgctgccaacaaaccatcaaccaatgtatga

SEQ ID NO: 391513 - DNA, 601 bp, Homo sapiens
agtagggatggctttgattcttttacatattattctactttctgtctccaaccaaagtatacataggggaaatgctcaaccagaatttaaagtacaacacagctaactgacccacaaaatgattgaacccagaacaccagcttgatcagtatgccaagtcagttttctgttacatggtagccttttaaataaagaacatggcaagctggagttggttagtcaaactcattttccttaaatcaaggaagaactaatagtctcttgtaatgaatgtctcttttttcccatttgctttgttattgactacatgcctgaacartttagcaaatttaatgcagcagattttacaaagaactttttttgacctgtcataatattaaaaagccgagtttgggtaatagtttctgactattttgataaagggattatatttttaaactcacaggtaataactctgtagctttctttagtccagaatatctaatcatggaagatctctggagacagaaagaagatttctagatatgagtccctccgttttttaaaaggacacattctatttttataaacaagtctcgaactgaggtcacagatagagttt

SEQ ID NO: 391514 - DNA, 500 bp, Homo sapiens
tgatggctccacaaggaaaattaacaggttaagaaggtgtatgtacatctgtgtatctgtcataaataatgacaaaatgctttgaaatatctactaaaggaaaatagaattaatttatgattgggatactttatttgtattaattaatatgataattattttaagcaccattatttgatacaaatcaattataaatagaaatcaaatcaaagtaaaataaaatattccyatgaggaaaataaaatatgattagatttctttatataaactgcacttcatacatagcccatttttaattataataaggatgtaggtttagtcaaaattttaaccatgttaaaagttaattctactaactgatttgtgagatattgagcgtaaggctgcctcagtgtgtacatacttccaatcattccactttaaacagtcttcatttttactcataaaatcatgaggattactgtaacattttcaacctaacaggcataaaccgcaaaata

SEQ ID NO: 391515 - DNA, 594 bp, Homo sapiens
tgcctccgatataactgggctggcgtcaacactaaaagcttggactccaaatattgtgtatatctgttatttcaagttagtatattttatgtttccttcttgatggaagcttgtcttattttgttctctacagtctgtatttttttcttttcataattctgtagcaattgttttccaaatataaaaataattctttcgtgctgtgtgaaaatacgtgtgcttttatttaagctgccagacagatgtgttatttcaagtgggagactatgatttttctctacagatgatgggtagggttttgttgttgttgttgccgtttgtttgtctaactttaccagtaggtagattatttgaatgactgatctcattaacgatcattccttctaaatctgtctcctttccttcaggtctttcacctgagtgacattagaaattctcaatacagttggtattgtgcccagctaaatccatctgatttttacttttaaaaatggcaggttgatgtaacatttcatcatactatataaaagagaaaaatcagagcaaaatrtaattgacagttttctgagtttcttttagtcttaagttttgaaa

SEQ ID NO: 391516 - DNA, 512 bp, Homo sapiens
ttctcttcagctgaaatgccagttctggaggaaaacatatctaataatatatgaaactgaaggccatttttactttttattattcttgtagcatttaaagaccaaaagcctgtcttatatctagttgcatgttttcaggaaatatgctttttgaaactattctcatgaatatgaaattaacctcaataaataatttatttttgaaatcttatttcatgctaattaagtatctttggccaaaacatttttaatcctcttatttgttctttgagaaattttcacaataaattcaaaacttttaatggagaatatttaaaaggtcttcttaaaataaaaaaaaaatttactttttttcttcatcaaagttgtgtatccctrtatttctaatgtttaggacataaacaattagatgtgattatgaccactaaataactaagaacaatatacatttttagatttcaggctttaaaagtaaaacacttgttagaattttatggttaaatcatgttctt

SEQ ID NO: 391517 - DNA, 433 bp, Homo sapiens
tgatatggttaaaagcaaccatttcagagaaacatgctaattaacaacagatcaaacacttaacgaagggaattctcacctggccttactctgtctcacaattgtccctggcaacataatagacacttgataggttctgatacgactagagcacagatcagaagcaaggtccaaacatacaccaaacacatagctaaaaagtaaagttgaaaaaaatattcatggtctgtgcttggtagaatggattatctcaaactaytaatacttgtcggaaatatttaacttaaaggtcaaatagttaattgtagacataaaaaagttgcatctccatatttggttttcagttgattcagtttatttttgaatccataaagttggaaactcttcctttttgaaaatgcttaaaaatgtttttctgccacaagcaactctt

SEQ ID NO: 391518 - DNA, 565 bp, Homo sapiens
aggacaggtttttttcacaatctaacctattgggagcacatggaaattctcttctggcacataatttttagagttgttaatggagatttaggacataacatgcataaaaatgccttgtctactgggtgtccaaaataagttgggtgctttatgtgtttcttgtgtcccttcaatgtctatataaacttcttaagagccttagcattctgaaattcagatgatgaccattaaaacacaacctttatttcttctaagcctgaaagctacacattgttttagttaaattcttaatttcttccaaagtataaattttgtagatataatgttgatatcctttaatccaatatttaggaagtgtgccatttaattttatgtaagttgcttagtttattttctcacactgttttttcaagaaattccatttcctaaaaartacccataggagccgtggataaggataaaagtgctgaattatatgcatcatacaaaattaaaaatcagtcagtgacatttttcaagttatataaacttgtctcacatttgtagtaggtgttttcatgttgct

SEQ ID NO: 391519 - DNA, 565 bp, Homo sapiens
aggacaggtttttttcacaatctaacctattgggagcacatggaaattctcttctggcacataatttttagagttgttaatggagatttaggacataacatgcataaaaatgccttgtctactgggtgtccaaaataagttgggtgctttatgtgtttcttgtgtcccttcaatgtctatataaacttcttaagagccttagcattctgaaattcagatgatgaccattaaaacacaacctttatttcttctaagcctgaaagctacacattgttttagttaaattcttaatttcttccaaagtataaattttgtagatataatgttgatatcctttaatccaatatttaggaagtgtgccatttaattttatgtaagttgcttagtttattttctcacactgttttttcaagaaattccatttcctaaaaaatacccataggagccgtggataaggataaaagtgctgaattatatgcatcatacaaaattaaaaatcagtcagtgacayttttcaagttatataaacttgtctcacatttgtagtaggtgttttcatgttgct

SEQ ID NO: 391520 - DNA, 596 bp, Homo sapiens
ctttcttttattttgtcttgaaaaatactacacccacactttttgccaatagcctaagacatttagccataytaatctatcctattggctccttggctttgattgatggactaacaaaaataggttgcttgatgtttccagaaaaagtatcctaccctcatctgtctaaagtattcctaacataggattgtcagatttagcaaataaaaatagaggatttctacttaaatttcaatttcatgtaaaaaacaaataactttttagtacaagaacatcttaaatacttagtggcttatctgaagttcaaatttaaatgggtgtcctgtaagttaccaggcaatcctgtcctaatggaataatatttaaatctctctttagcttttcctccaaatgttgattaaaaattttctgagaaaatcattagttttatctccagaagcaagacactgttgtcagaaaaggatgggtttcattttatattattttcatgtacttgattatttatgatattagaactgggatctcaggagtggccttgcgtagcaaccaacagtggctcaccattggttgctctttaggaaagagggtcataagcc

SEQ ID NO: 391521 - DNA, 593 bp, Homo sapiens
tgaaatcagtaacctcaaaagggacttctgagaagctatgagtaaaaggcacacacaaaattcctctgagataaattcacaaatgaaatggaaaaggatatctgtgtatatccaagaagaatagtaattattagaaaacaagaaaacttctaaattgaaagaatccctaaagtaaaagtagaccaaagaaaaagaaataaagatgagaagtgagatgaggcagaaatggtgagtgacaaggagacatattgagaaaaaaagtagctaaagatagtgtgttgttatttcagcaaaattaagtatatcaatactgagaaatatgacttgaaatagattcagtacctcaacagaaacataaacaaataacatctggctttttattttgataaccagtattttaaatacaaaaatctaaaaatatgatctttgtgtaagagttacacatttatcattccaatcctcagggtgcattatttcaaactaaacagtaatcatttcaataacaaaaatgcactataaatacygtatggaaataaatgtcctaacagatgttaaccagacattagtcttcactggtaaggattagatttgaa

SEQ ID NO: 391522 - DNA, 572 bp, Homo sapiens
tgaagcaataaaaaaattaagttatcagaaaagtatttcattattattagagtcatgattagcattctcctcatcaggagagtttgatgtttttttccagccctactctacactttttaaacacagtctccaattttgaaaataaaagtttcttatttttaattcaaatctcaattaaaataaaacaaaaaccaaaaatgtagaagttccttattttgaccatctatatcatacacaacaaaaagactgataaaagtccactaaacacaacagctagatccttattcccattaatgcttaagcccattccaataaggattttgtaccaaatctgcccttgccaaggctacctggggccttcattttattatttgcaatgggcaattgtaacttcacatccgtgttggcttccttacatcctagakgcacatacagccagattttttcccatcagatgtgatttgatcttccaacttcagaatgccttgaggacttcctctttatctaaagatcactttaaaaagcctgaagtatttggctcttccctaaatctttggccagacataatgtca

SEQ ID NO: 391523 - DNA, 268 bp, Homo sapiens
gacttgaagccagtatgtttttccactttcaagtatcttgactgtagagataaaaggtatccacttagagatattaactcattaccactgcctaaatttgggttccagaaacacaacttaatatgamatcaatggatgtgataatcatttgaaagtagctttatcaaaatcatccaacagaacaagttacttttctaattagcatcttcagttaaatacctaaatctgatgaataataagttatgcattatgctaaattgcattggct

SEQ ID NO: 391524 - DNA, 268 bp, Homo sapiens
gacttgaagccagtatgtttttccactttcaagtatcttgactgtagagataaaaggtatccacttagagatattaactcattaccactgcctaaatttgggttccagaaacacaacttaatatgacatcaatggatgtgataatcatttgaaagtagctttatcaaaatcatccracagaacaagttacttttctaattagcatcttcagttaaatacctaaatctgatgaataataagttatgcattatgctaaattgcattggct

SEQ ID NO: 391525 - DNA, 633 bp, Homo sapiens
atatacaactattcatatacaaaggcacacatgcatttgtggttttgaaaaatatctatttcatttcaaaaattcattgaacaatattacatatggcaagaaaactgctctttttgaaggatcttttaaaaagtgttaaactttattagatacttcaaactagcaaagstcaacttcatcacaattatataataacactgcacactttcaattttatctggagtaatacacctatcccttgaaataaactctgtgaacttcctgcttacagatttcatttcaagccttaaaaatgcggaaaaaatgccaaatatacttgccccaaaaggaaaagaaaatttcaggggtgtcaggatgttttatcacataaaatacggaaatgcaatttgtatctgagcaggcaacacacctccaaaaataataatcctccaaaacacacctccaaaacctccaacacacctccaaaaacaatacttatcacaaaatacactcagagatactagatttggcacaaaccactccatacagctattgatcaaatcagtattgaaagccttattacaaaatctatggcccttttctactctccaacagacatttcaggatgccacaaccttacagctccactctatc

SEQ ID NO: 391526 - DNA, 572 bp, Homo sapiens
atgggtcatcaattcctcttcttagcatattacagcacacagtctaagccagaaaaacacagcagagcccattacagctctygagttccagttattaacattgatttttttcaatggaaaattttcattagaagccatcacatgactcacattcagtaataacttagattaagatgtatactggagcctttgtccttagactaggtgccactgagtcactattaaaaggagtctttttgaccttagtaaattctcacaggcagggcttatctcagtctaaactgtacctggcctttaatagtgatgtccaaagtcttgtgtaattcaaattaatattgtaatgtatataaattgtatatatagatataacacatgcatgtatttaaaattatttattttattttttaataagataaaacttagaggttaaaatatgactctaggccatcgtgctttagaatgaagagcacagacatgggttggaaatgtaaattttgaccccatttaatttctgtgacaaattaattaatgtcttcaaggttcaggctctatgtatgagacaaatgaaaaca

SEQ ID NO: 391527 - DNA, 633 bp, Homo sapiens
gtggggcctagtgggggtagatttctcatgaatggcttagcactatcatcttggtgctctcctcatgatagtgagtgacttcttgtgagatctggctgttcaaaactcttcgctctctctctcgatcctgctttcactatgtgacatgcctgctcctcctttgtcttccaccatgattgtaagtttcctgaggcccctccagaggctgagaagatgtcagcattatgcttccggtatagcctgcagagccatgagccagttaaacctcttttttctataaattatccagtttcatgtattttctataacaatacaagaacagcctaacagaatctgcttgtgtggttcaaaagcctgagtcactccaatcctcctgtgcagagatcttgacggagaggagccctttctgttccatgctcaggcagttctttaggaatctgaagcacccaccctcctgtattagattagattgtccctcaaccatgtgcagaaaacttggarctgagaaggtttcccagctttacgtctacacatatagctgggcatttggtagttacccactggcttctccctcagcattgatgtttgtgccagccattaggggacttggaggaagcctcgccaggtttagcc

SEQ ID NO: 391528 - DNA, 531 bp, Homo sapiens
tagtttatgttttatggttttatgtatgctaaattacattttccttattggcttttgaaacagaatctatgaaataatataataatacagttggaaagggtcttacaaatcttcagtatyaaactctcaatgcttttgtaccatctacagcctctaaaacatgtttctaatgagtaaaacacatttgtgtttttcagttcattcatgtctttaaaatttgactgtgcaaaatatattttttaaaaattgttatcaatatagttttactgcaagatttttatgaggaatatacttacttattagcttctttctctcacactttgatctgattctgccattcaataaaattgcaacgcttggataaacatacataagtattagaaggcataggctcctacttataatgattaacaaatgaataactgttatttcctcctcactattttttcaataataatttcttattgattgtaactagtaaattatgccctataattgatattgcagacatcatttgctataataacttgc

SEQ ID NO: 391529 - DNA, 601 bp, Homo sapiens
gggcatgtctcagccctgtttgtgttacagattttttatcctcaccatttggtgcatgctgagttcttgtcctgcaaccaggaagaataaggtacgcagacaagtggagagtgaacaagatgaagaggagctttattgagcaatagaacagctcagaggaaaccgacaggggcagctcctttccacactcaatgtgtcccaatgagtgttcagctcctagcagagagggtagctcctctctgctaggcaagttgtctccattagtgttcagctctcagcagagagggcagctcctctctgcagctggttgtcccattgtctgttcagctctggctaaccatggcttttataagactcagagaggtggaagtgctggctgattggtctatgagcagcaatgggcagccccagaaaaggcacctgctcccactccagtcgtgggactggcagcccggcccccaaccttcagccctccatggcctgaaggtggggcctcacygggacccgctcccttccacccaggagcctgtctgcctcctgctgctgtccatggtacccaggctgcttgtgccaaggggaacctgcaggcaagcaccaagct

SEQ ID NO: 391530 - DNA, 533 bp, Homo sapiens
tgaaaatgaaatggcattactcaccattacccttagtgagtcacagaatttttgctttctttttccacaacgtcatgctctgctggtctggagatcttagaaatcttttagatctttaagagagaagaatgcttctaccaggagcattcctggtagaatgtttccattcaatttgaagtgcagatttccccccagccactttgtgctcagatgcctctgagtctacaagccaagaaaggaattatagtgtttgctgctgtgattgatacagactaccaagaggaaattggctaatactccacaagggagataaggaagagtatgtctgtaatactgtagatgccctagggtatatcttagtattaccttgcctgaataagatctatggaaaaccataacaacccattccagaagggattgaaartagctcagactcttcaggaatgaaagtttgggtcccttgtttggataaagaaccacaaccagctgaagtgcttggtgaaggcaaagagaataaagaatgggcaatagaa

SEQ ID NO: 391531 - DNA, 479 bp, Homo sapiens
catttccaaccacaaagagtaatatacatgctccatgtttaggtcacatatctaagtaatatgatacagtttgcaaaataatgttgttgacattgatttattaatattgatttctaagctgtaaaatatagacgaagctattttctattgctttctttcctaagcagatcaaagtaaaagtggtgaattatagattgtgagctgtcttgatttttgataaaatatcagcagggtggttttgaatgtcatatttcatcacagttattaaytgccttaaagtgtgcattttcaataaaacttattcagtcactttacatttaaaacatggttgtatttaaaataaaacaatgttatatttttaaaaatgaagccagaaattcaacactgtatgattaaaatggcataaaataatatatttgttaatttcaacatgataaatttagacacagcataattatagtggtgtaattatttacctc

SEQ ID NO: 391532 - DNA, 484 bp, Homo sapiens
ctgtcataattctctctatatatgttcatgagaggtatgatgagtctagctctgtttaataaaccccttgttttacaatgcttttctactgagaagctaagaagactacttttagggtcttcattaaccttgtgcttaaagtatatgttcccaatctyattgcaaattatgttttagctaaccatttctcagtatatctattctaacattccagtttttcacctgcacccctgaaatatgctccaaagaggactatactttccattttgcctccagagtcaattttgtaaacttcaaacagagtaatcctttgaaaaataaaataaaatgatttcatctcctgttcaaaatcccaccaatggctgcccacaacacataagtgctaagtggttataatggtttatagtattttgtacgttgtggctcttagaaaactttccaatatctctactctttgtccttcttgcttagcctatttaaaaag

SEQ ID NO: 391533 - DNA, 484 bp, Homo sapiens
ctgtcataattctctctatatatgttcatgagaggtatgatgagtctagctctgtttaataaaccccttgttttacaatgcttttctactgagaagctaagaagactacttttagggtcttcattaaccttgtgcttaaagtatatgttcccaatctcattgcaaattatgttttagctaaccatttctcagtatatctattctaacattccagtttttcacctgcacccctgaaatatgctccaaagaggactatactttccattttgcctccagagtcaattttgtaaacttcaaacagagtaatcctttgaaaaataaaataaaatgatttcatctcctgytcaaaatcccaccaatggctgcccacaacacataagtgctaagtggttataatggtttatagtattttgtacgttgtggctcttagaaaactttccaatatctctactctttgtccttcttgcttagcctatttaaaaag

SEQ ID NO: 391534 - DNA, 484 bp, Homo sapiens
ctgtcataattctctctatatatgttcatgagaggtatgatgagtctagctctgtttaataaaccccttgttttacaatgcttttctactgagaagctaagaagactacttttagggtcttcattaaccttgtgcttaaagtatatgttcccaatctcattgcaaattatgttttagctaaccatttctcagtatatctattctaacattccagtttttcacctgcacccctgaaatatgctccaaagaggactatactttccattttgcctccagagtcaattttgtaaacttcaaacagagtaatcctttgaaaaataaaataaaatgatttcatctcctgttcaaaatcccaccaatggctgyccacaacacataagtgctaagtggttataatggtttatagtattttgtacgttgtggctcttagaaaactttccaatatctctactctttgtccttcttgcttagcctatttaaaaag

SEQ ID NO: 391535 - DNA, 484 bp, Homo sapiens
ctgtcataattctctctatatatgttcatgagaggtatgatgagtctagctctgtttaataaaccccttgttttacaatgcttttctactgagaagctaagaagactacttttagggtcttcattaaccttgtgcttaaagtatatgttcccaatctcattgcaaattatgttttagctaaccatttctcagtatatctattctaacattccagtttttcacctgcacccctgaaatatgctccaaagaggactatactttccattttgcctccagagtcaattttgtaaacttcaaacagagtaatcctttgaaaaataaaataaaatgatttcatctcctgttcaaaatcccaccaatggctgcccacaacacataagtgytaagtggttataatggtttatagtattttgtacgttgtggctcttagaaaactttccaatatctctactctttgtccttcttgcttagcctatttaaaaag

SEQ ID NO: 391536 - DNA, 567 bp, Homo sapiens
ttcccagccctggttaccagctgccagtctagaaatgtggggctgttggggaaacatgacaggagtaaactagcctttctcactgcatgggagctggatgaggctggtcgctgccagcttttctctacttccctggagacctatatgaagcagtggaggcagccataacccccctggggattccatctgcctgataacctaactcccatcccccacagcaaccacagcaaaccccacccaacaatagtctgagctcagacacacctaacactgcctccacctaatggtctttctctacctggcctggtagccaaaggcaaaagacataatctcttaggagctatatggcyctgcacatcacctgaaaaaccccaacacttacctaggctacgctagagcaagcttgtttcctctctacaacaccacagctgatgctctcttgaaagcaccacctccttgctggaggccaagaaactcaagccattacagcagaacaatcctgccccaagaaagcaatagctaactccactgcctgtaacatcctggctaaccagaggtcctgagtct

SEQ ID NO: 391537 - DNA, 582 bp, Homo sapiens
cttcttgctaatttctacatcagaaaaattggtgtgtgtttcttccactctagattatgggtcacatttttccagcttcactaaatggctcataatttatatttacactggccattttcattgttgtgtacattctggattatgttatyttcttttacaaaatgatatgttttattcaagcagagggtcaagttatcagtagatgacctgatcttgtgtgggctgatattagaagtttattacaatttgccttgtgtccaaggacccacaccttgttctcactatatgatacttttctgctaaagtgcgacctctctcaaattttctgaaaatatccaattgtttaccaaattctgaattgatagtacttgactctgtcttcatagcagcaaacagttgctgaaatctcagctcaggtatttctgcctatcagctattgctttctttaggatcctgttgtctggcccaaaatatgcctacattatgacccagtgaaaggctggaaaataatttatactcagattttggggctctccttctatgatttccccttttcttcaatttccagttattctgtaatcc

SEQ ID NO: 391538 - DNA, 455 bp, Homo sapiens
tgttaattgtccattggtaagagggttcatctaataaaagtgactaatcaattattagaagcagtaaggctctgctagatgtgtatgtacatacatataaattttatatctattaccatatctttccagaaaatttctaatcctacatgttcaccaatgatatttgggagtattcttcctaaattcctaagaacaaaagatgttatataacttctaaaacatttatagccatatataaaacataaagtgatatgattttatgactttaatttgtatttctttggctactaacctatttgaatctcttttcatatacttggctataattttgatttgcttttttatttttttaaattcacrttgcttttttagtttctaattaatgttcattttttaccttgtcagtttgtgagagctctttctagaagtacagcaggtccccaaataacatcact

SEQ ID NO: 391539 - DNA, 634 bp, Homo sapiens
taatgttcattttttaccttgtcagtttgtgagagctctttctagaagtacagcaggtccccaaataacatcactccattccacctcattttgttttaatactgatgagaagaaaatcaatatcaagccaggtccactttctgagtggagtgtgttcattctaccatgtttgtatgggtttcccstggctactctggttttctcccacatcccaaatacgtgcatgtttggtgaattggcatgtttacatggtccccatctgagttagcatggatgtgtgtgtgagcgtgctttgcaataagatgggggtctgtccaggtatagttcctgccttgggccctgaggttccaggataggctctggccacctgccaccctgagctggactaaccatgttggaaaatgaatgaatgaatgaatgaatgaacgaatacattttatttgtcaaataaaaatttagggaaaatttccaacctgcttaagataagcatacaactgcagaataataaacaataaagtgtggttaaaataaaaaacattgaacccaccataattgctattgttcatttttgaactgtgtggtggtacaagatgcacattacaattttcattttgcacacatttatttgatttaa

SEQ ID NO: 391540 - DNA, 601 bp, Homo sapiens
tacatccatgttgctgcaaaggacatgatttcattctttcttattgctgcatagtattgcatggaggatttatwccatgtttactttatccaatccaccactgatggacacctagattgatttcacatttttgttgttgcaaatagtgctgaaatgaacatggtagtgcatgtatctttttcgtaaaataatttatattccttttgatatatacccagtaatgggattgctggaatgaatggtagttctgtttttcgttctttgagaaatctccaaactgctttcctcaggagattaattaatttacattcccaccaacggtgtataagtgttcccttttctatacagcctcaccagcatctgttgttttttgtttgactttttaataatagtcatcctggtatatcattgtagtttttattttcatttctctgatgattagtgatgtggagaatttttcatatccttgttggctgcatgtatgtctagttttgagaagtgcctgttcatgtcctttgcctaatttttaatgaggtggttttttttttctctttgatttgtttaagttccttatagattatggatactaggcctttgttgg

SEQ ID NO: 391541 - DNA, 601 bp, Homo sapiens
tacatccatgttgctgcaaaggacatgatttcattctttcttattgctgcatagtattgcatggaggatttataccatgtttactttatccaatccaccactgatggacacctagattgatttcacatttttgttgttgcaaatagtgctgaaatgaacatggtagtgcatgtatctttttcgtaaaataatttatattccttttgatatatacccagtaatgggattgctggaatgaatggtagttctgtttttcsttctttgagaaatctccaaactgctttcctcaggagattaattaatttacattcccaccaacggtgtataagtgttcccttttctatacagcctcaccagcatctgttgttttttgtttgactttttaataatagtcatcctggtatatcattgtagtttttattttcatttctctgatgattagtgatgtggagaatttttcatatccttgttggctgcatgtatgtctagttttgagaagtgcctgttcatgtcctttgcctaatttttaatgaggtggttttttttttctctttgatttgtttaagttccttatagattatggatactaggcctttgttgg

SEQ ID NO: 391542 - DNA, 601 bp, Homo sapiens
tacatccatgttgctgcaaaggacatgatttcattctttcttattgctgcatagtattgcatggaggatttataccatgtttactttatccaatccaccactgatggacacctagattgatttcacatttttgttgttgcaaatagtgctgaaatgaacatggtagtgcatgtatctttttcgtaaaataatttatattccttttgatatatacccagtaatgggattgctggaatgaatggtagttctgtttttcgttctttgagaaatctccaaactgctttcctcaggagattaattaatttacattcccaccaacggtgtataagtgttcccttttctatacagcctcaccagcatctgttgttttttgtttgactttttaataatagtcatcctggtatatcattgtagtttttattttcatttctctgatgattagtgatgtggagaatttttcatatccttgttggctgcatgtatgtctagttttgagaagtgyctgttcatgtcctttgcctaatttttaatgaggtggttttttttttctctttgatttgtttaagttccttatagattatggatactaggcctttgttgg

SEQ ID NO: 391543 - DNA, 592 bp, Homo sapiens
atttggtttactagtagtttgttgagaatttttgcttctgtgttcatcagggatattggcctgtagactttttttttgtctctttgacagatgttggtatcagggtgatgttatttttctagaatcacttaggaaggagtacctctgcctcaatyttttgaaatagtttcggtataattgctcccagctcttctttgatatctggtagaatttagctgtgaatccatctggtcctaagattttttcctggttgttaggttttctattactgattctatttcagaactcattattggtctgtttagggtttcagttttctcctgatgtaaacttgggagactgtctttacaggaatttatccatttatcctaggttttcaagtttgtgtaaacagaggtgatcaaaatagtctgtgaagatcttttgtattacagtgggatcaattgtaatgtcaccttcgtcatttctgattgtgcttaattgtaatgtcacctttgtcatttctgattgtgcttatttgggtcttctctctttttttctttgttaatctagctagtggtccaatgatcttgtttatccttcaaaaaaccaa

SEQ ID NO: 391544 - DNA, 586 bp, Homo sapiens
atacttgttttataaatctgagtattccagtgttggatgtttttatgtttagaaaaattaaggcttctcgttgaatggaacccttcattattatgtaataaccttaattgtcctttttaactgckattggttgaaaggctcttttatatgatgcaagaatagcaacctctgctcttttctgagtgatcaatctgtctctatgcctttacttttagcctatggactcattacatatgagataggtctctggaaaagagtagaattttgggtcttgttttttcattttcttctttttttttaaaattggcatttacattcaaggttaacattgatatgtgaagttttgatcatgtcatgcccccatgccatggaaaaggcatccctgctctctccctacctggcaatcagcagggctattattaatcagaatgagatggagagcttgggggatggacacctatagtcatatttggctgcagtagcactgtgcaccatgaaaccttctgggttccatgcaagttggagctctctctctgcctacactccaggcaggtccccctggcaattcaaatctttatgtgagatc

SEQ ID NO: 391545 - DNA, 563 bp, Homo sapiens
ttatatgatgcaagaatagcaacctctgctcttttctgagtgatcaatctgtctctatgcctttacttttagcctatggactcattacatatgagataggtctctggaaaagagtagaattttgggtcttgttttttcattttcttctttttttttaaaattggcatttacattcaaggttaacattgatatgtgaagttttgatcmtgtcatgcccccatgccatggaaaaggcatccctgctctctccctacctggcaatcagcagggctattattaatcagaatgagatggagagcttgggggatggacacctatagtcatatttggctgcagtagcactgtgcaccatgaaaccttctgggttccatgcaagttggagctctctctctgcctacactccaggcaggtccccctggcaattcaaatctttatgtgagatcatgagatctcttgcagctatgatctcagagatctttggcaggactgtggtgccctagagttccttcacttacccctttcttaggatgtgttcaggaacgggagccagtcctgatgctcag

SEQ ID NO: 391546 - DNA, 540 bp, Homo sapiens
aaaaaaaaaaaaaaacaaagttttccagacagcctagcgcaagttttaaaccatttgctgtacttatgtggatttcctgctcccamggggctccaagtctgagtggggagaagcagcagcaccttgaggacggcccaggccactgaagccatgctcacttcagccaggcgccctgagacccgggcacggcgacggctgctctgcgtcgctcctgctctcactcacgtcccctgcgcggctctgacgctgctctgtctcccgtgtccagtctctagctctcttcctcacgcactagcagcctccctcggcgctgcagaccctcccgccaagccgcgcccggccccagctgcgtctccgaggtcggccccgcggactcgcaccgcagctttctggagcgctcggggccgcgcggcgccgccccaggcacggaggcggcaggttcaggcgcgtcccggacactaggcgcgggaggcggccggcagcaacgcgagtcaagaagcgagcgggagggtacgccccagctacgcctggcgctctcct

SEQ ID NO: 391547 - DNA, 540 bp, Homo sapiens
aaaaaaaaaaaaaaacaaagttttccagacagcctagcgcaagttttaaaccatttgctgtacttatgtggatttcctgctcccaaggggctccaagtctgagtggggagaagcagcagcaccttgaggacggcccaggccactgaagccatgctcacttcagccaggcgccctgagacccgggcacggcgacggctgctctgcgtcgctcctgctctcactcacgtcccctgcgcggctctgacgctgctctgtctcccgtgtccagtctctagctctcttcctcacgcactagcagcctccctcggcgctgcagaccctcccgccaagccgcgcccggccccagctgcgtctccgaggtcggccccgcggactcgcacmgcagctttctggagcgctcggggccgcgcggcgccgccccaggcacggaggcggcaggttcaggcgcgtcccggacactaggcgcgggaggcggccggcagcaacgcgagtcaagaagcgagcgggagggtacgccccagctacgcctggcgctctcct

SEQ ID NO: 391548 - DNA, 538 bp, Homo sapiens
gagtttggttttggatggttgttccagagatggctaaaaaatttatctagctcatgaataggtgatattttacattttgaaaaataatattagagaaatatttatttaggaaaatcactattttagttccaagttgagatttctgtgcatcattgaaatagtcattttaactaggcaattgctatagtgtgtgtgtacacatgggtttaaattaaatagcatatgattaccatataaatcrtatgaggatacaacgaacaatcaatgtaaaataagaaaaacataaacaaaaacatcagtatcaactcctgaattagagcatgattaatgctgatgaaaatgattcagtagagactgaagattgaatctaggagggaatgatccagaggaggagaataaatttaacataacatagaataatatgagtctgtaacaaattgtgaatattacagactgcaatgctcttttagggttgatatggtttggctctctctccccaccgaaatttcatctcaaattgtaatccccatgtgcccag

SEQ ID NO: 391549 - DNA, 538 bp, Homo sapiens
gagtttggttttggatggttgttccagagatggctaaaaaatttatctagctcatgaataggtgatattttacattttgaaaaataatattagagaaatatttatttaggaaaatcactattttagttccaagttgagatttctgtgcatcattgaaatagtcattttaactaggcaattgctatagtgtgtgtgtacacatgggtttaaattaaatagcatatgattaccatataaatcatatgaggatacracgaacaatcaatgtaaaataagaaaaacataaacaaaaacatcagtatcaactcctgaattagagcatgattaatgctgatgaaaatgattcagtagagactgaagattgaatctaggagggaatgatccagaggaggagaataaatttaacataacatagaataatatgagtctgtaacaaattgtgaatattacagactgcaatgctcttttagggttgatatggtttggctctctctccccaccgaaatttcatctcaaattgtaatccccatgtgcccag

SEQ ID NO: 391550 - DNA, 575 bp, Homo sapiens
attagagcatgattaatgctgatgaaaatgattcagtagagactgaagattgaatctaggagggaatgatccagaggaggagaataaatttaacataacatagaataatatgagtctgtaacaaattgtgaatattacagactgcaatgctcttttagggttgatatggtttggctctctctccccaccgaaatttcatctcaaattgtaatccccatgtgcccaggaaggtacctggtgggaagtgattggatcacgggggcaatttcccccacgctgttcttgtgatagtgaatgagttctcacaaaatctgatggtttaatagtttgtggaagttcccacttctctctcactctctcctgccaccatgtaagatgtgccttgcttccccttcactttctgccrtgattgtaagtttcctgaggcctccgcagccatgtggaactgtgagttcattaaacctcttttgtttataaattacccagtctcaggtagttttttatagcagtgtgagaacagactaatacagaaaattggtaccaggagtttggagcactgctataaagatactgaa

SEQ ID NO: 391551 - DNA, 572 bp, Homo sapiens
tgaaactgatctttctgaatcattctttgtcaaagaatgctgcatctaggttttgcaaacatcctttaaaaatggactttgagcacatggacattaaaaagtaatagtcaatagaattgtcaatagtagaatgaaaaatgagatttagcactgaatttttaaaagttaatttattgtttgtttttgtttttgttttgttttgttttgtttgagacrgatttttgctcttgttgcccaggctggagtgcaatggtgagatctcggctcactgcaacctccacttcccgggttcaagcgtttcccctgcctcagcctcccgagaagctggaattacaggcgtgcgccaccatgcccagctaatttttgtatttttagtagagacagagtttcacagtgttgggcaggctgctctcacactcctgatttcaagtgatctgccagtctcggcctcccaaagtgctgggactacaggcatgagccactgcgccctggctattgtattttttttaatgagcattccctgtagccattcttcattttaacataagtaaacaacatgaaatttttaaaag

SEQ ID NO: 391552 - DNA, 572 bp, Homo sapiens
tgaaactgatctttctgaatcattctttgtcaaagaatgctgcatctaggttttgcaaacatcctttaaaaatggactttgagcacatggacattaaaaagtaatagtcaatagaattgtcaatagtagaatgaaaaatgagatttagcactgaatttttaaaagttaatttattgtttgtttttgtttttgttttgttttgttttgtttgagacagatttttgctcttgttgcccaggctggagtgcaatggtgmgatctcggctcactgcaacctccacttcccgggttcaagcgtttcccctgcctcagcctcccgagaagctggaattacaggcgtgcgccaccatgcccagctaatttttgtatttttagtagagacagagtttcacagtgttgggcaggctgctctcacactcctgatttcaagtgatctgccagtctcggcctcccaaagtgctgggactacaggcatgagccactgcgccctggctattgtattttttttaatgagcattccctgtagccattcttcattttaacataagtaaacaacatgaaatttttaaaag

SEQ ID NO: 391553 - DNA, 572 bp, Homo sapiens
tgaaactgatctttctgaatcattctttgtcaaagaatgctgcatctaggttttgcaaacatcctttaaaaatggactttgagcacatggacattaaaaagtaatagtcaatagaattgtcaatagtagaatgaaaaatgagatttagcactgaatttttaaaagttaatttattgtttgtttttgtttttgttttgttttgttttgtttgagacagatttttgctcttgttgcccaggctggagtgcaatggtgagatctcggctcactgcaacctccacttcccgggttcaagcgtttcccctgcctcagcctcccgagaagctggaattacaggcgtgcgccaccatgcccagctaayttttgtatttttagtagagacagagtttcacagtgttgggcaggctgctctcacactcctgatttcaagtgatctgccagtctcggcctcccaaagtgctgggactacaggcatgagccactgcgccctggctattgtattttttttaatgagcattccctgtagccattcttcattttaacataagtaaacaacatgaaatttttaaaag

SEQ ID NO: 391554 - DNA, 642 bp, Homo sapiens
ggtactttcaaaattttatgcaggtttttgagagttatataaacatttttatcaaaatttctcaacactgtgcaagatgaaaaatcaaaggtttatattaatggtccaattcaggagaaacaatttgctctaaaatatttaactgctattggattttgtatgcaagagaaaaaactcacttaatgtttctgttcaggcccagattttcttttgttctgtgaacttatgtatgttttaatttcttacatctaagtagtaaactgagttttattaattgyattaggttttcaaataataatcataagaacgtgaaacacaaaaacaagacacacacaaacacgggcttgtccagagcaattccccagtacaacgacctctccaaatttgttgttatttatcccatgagtggaacagacttgtaaaataattttataaaccttgaaggttgttatgattgaacattgttataagcacatagttgggtcttcccaacacacatctctaccataaaatttcatttagacaaatataaacagttgttatttttcaaatccaaatttaaaaatataacacagtgatgaaggggcatgttgtataccttaatctaatccctaaagactaattaggctttagctttagtgc

SEQ ID NO: 391555 - DNA, 529 bp, Homo sapiens
aaattgtgttggatcccacacacttcctgaggcccaagaagctgcagcctggtgctattttgggagctcagctcccaccagactacgtcctgccctgggaccaatagttctacatctccatattcctagagccagccaggctgacatcctcccacatccaaccaggaagctacttccattgccagcagcacttgtatgcgttgtctgggagcctggagattaactcaccctgcccaccaccaccagtgcccgtgcacattgtctgtggttytgaagataggcctgcttctcctactacttgtgccacaactacacagattattcaagtgcctggggatctatctgccctgctcactcaatgctgctgcctgcaaatactgtctgggggcctaaggataggcccatcctgcccaccaccacctgtccatgtgcttgctgccagaggcataatgatgagcccatccatcttgccaatggcagctatgcaaacctcctggagacctgggtaccagccgacctacaatattgc

SEQ ID NO: 391556 - DNA, 597 bp, Homo sapiens
ttatagctaagacttacttcaaagattccggcaataacaactaaaataaataaatgaaactatattaaactaaatagcttctgaacagcaaggaaaacaacagaatgatgagacaacctgtagaattggagaaaatacttgcaaactcttcatccaacaagagactagtatccagaatataaaaggacctcaaacatatcaacagcacacaaacaaacaaaaaacccacacataatcccactaaaaatggctacaaacctgaatagccatcactaaaaagaagatttacaagtgaccaacaggtatattttaaaatgctcaacattgttaattatcagggaaatgtaaatcaaagccacaattactgcaccccagttagaattactattatcaaaaagacaaaacaaaattacaaatgctgaggaggacacagacaaaagggcactcataccctsttggtggaaatattaattattagagccattaagaaaacagtttgatggtttttcagaaaactaaatatagaactaccaacaatccagtaattccactactgggtatttacccaaagaaatggaaatcagtatatcaaaagaa

SEQ ID NO: 391557 - DNA, 587 bp, Homo sapiens
ggagttgcatggtttttttctatcttaccctttgctctcaattttcacttttaggaatgtcccttcttagcattttgtcctctgaccttcttaccatcagaattagctctgatgtgcgttgagaggatatgaattagctctgatgtgagttgagaggtatcagtgactttcctgcrcagactactttgtgtagtctaccaggaagggttttgtggaagccttttcactgtctcagggcctgcaaattaccagatgcttgacattttcgttgtagtattaaatatattatcttatgtaaagttcttaatgtcatttttatatcaaatccagacaatatattgggacgttaatttgaagaaagaatgtaacactcttctaatttagttccccaaaaatgtaaaatttattaaaatctcagactaaaattaagaaaaaatacaagtacttttaaaatgtgctcaatttttattttagatatatctttgatgttagctaatgatagtgaacttactatggacattttttttccagaaaataattgcttataacgcatatgtccaggttcgtacaagtatcggttaagtaaa

SEQ ID NO: 391558 - DNA, 572 bp, Homo sapiens
ctctcaggatcctaaaatacatcactttatgtactataagtttattaattgcctacaaaggattttagaaatcacatacacatatcaaatatagttattgtgaatatccaaaattagaaaataaaacagctaagtatagcatctttatctgcatagaaacactattttaaaaacattacatagtaagtcctgccaaatataacttcttaatatgtatcaaaagtatcaawtttttttttttttttgagacggagtttcactttgtcgccagtctggagtacagtggtgtgattttggctcactgcaacctccacctcccaggttcaagcgattctcctgcctcagcctcctcagtagctgggattaaaggtgtccaccaccacacccagctaatttctgtatttttagtagagacggggtttcaccatgttggccaggatgtcttgatctcttgaccttgtgatccatctgcctcagcctcccaaagtgctggcatcaaaatgttaaaatacattaagatttacttctaacatggcttatttcaagtgctcttttatggaatattttgaaat

SEQ ID NO: 391559 - DNA, 572 bp, Homo sapiens
ctctcaggatcctaaaatacatcactttatgtactataagtttattaattgcctacaaaggattttagaaatcacatacacatatcaaatatagttattgtgaatatccaaaattagaaaataaaacagctaagtatagcatctttatctgcatagaaacactattttaaaaacattacatagtaagtcctgccaaatataacttcttaatatgtatcaaaagtatcaattttttttttttttttgagacggagtttcactttgtcgccagtctggagtacagtggtgtgattttggctcactgcaacctccacctcccaggttcaagcgattctcctgcctcagcctcctcagtagctgggattaaaggtgtccaccaccacacccagctaatttctgtatttttagtagagacggggtttcaccatgttggccaggatgtcttgatctcttgaccttgtgatccatcygcctcagcctcccaaagtgctggcatcaaaatgttaaaatacattaagatttacttctaacatggcttatttcaagtgctcttttatggaatattttgaaat

SEQ ID NO: 391560 - DNA, 591 bp, Homo sapiens
ggagacagaccatggattccacaagataaaacagaatcatttataacatccaaaatacaaacaagaataaatactgctgttttatgcctgaaaaatgcatgttatttttgaatacttccttgtatattttgtggctatttatgtattaacctttgattattataaattcaaggagtctataacatgtatttttcctttaacagcaagattctagccaaatgctagaaagcctcatgaagtctgagttttaattacttttcatgttataaaaatgamagcctaggaattctaagtttaacatcaatgttcaaacaagtgcaagtgaaatttattgactaaattgcctttactttttgttttctggcaccgggcagatgccttcttcaccccttatcaggctcatagtctcacctgtatgatcatactcttaaatacgctttttccggacagcagctggcctagagatcagtgtctaatcatgacagactgtgacaaactgctcctattcctttgtttccacaacatttactatcccaaggccagagataatcttacagaatccccaacaggtggcctggaggaagatttgca

SEQ ID NO: 391561 - DNA, 620 bp, Homo sapiens
aatatttctagtgctgccaactgcacatgatattagaaaattatttttttcatagcatagactgtaaagaaatctaaaaatctcactgagccacacaactagagctgctagacttagcaaattaaaatacaagaaacacaaataatttaaatttcaaataaacaatgatttttttttcaatataagcatgtctcagatattctatttcatctgataacttcacatgcaatattatgrttatttagatttggtaaaagatacttaaaccctccctaatattaaccagttagtaggttagtttgacttgatagaatgactactggagaatatgtcaaaagacagaattctcagcctcattctattttccaccagactctgtaactctaggtatactccctggcctctatgagctccattatcattacaaaacgcataatatacctttcctgtaaaccatgcaagattgagaatcaactaagtgaacagaagtgaaagaattctaaaatctaaatataagagaaatctatatatgagtcatcaataattagtaagtttttaatataagaagctcacattatcttttcacatataaagaaattacaacccatctgtttgaaaat

SEQ ID NO: 391562 - DNA, 569 bp, Homo sapiens
tcaaataaacaatgatttttttttcaatataagcatgtctcagatattctatttcatctgataacttcacatgcaatattatgattatttagatttggtaaaagatacttaaaccctccctaatattaaccagttagtaggttagtttgacttgatagaatgactactggagaatatgtcaaaagacagaattctcagcctcattctattttccaccagactctgtaactctaggtatactccctggcctctatgagctccattatcattacaaaacgcataatatacctttcctgtaaaccatgcaagattgagaatcaactaagtgaacagaagtgaaagaattctaaaatctaaatataagagaaatctatatatgagtcatcaataattagtaagtttttaatataagaagctcacattatcttttcacatataaagaaattacaacccatctgtttgaaaataaaactactgcatgcatttctcctactaccccaatctgtttctacccaaaccactccactraactatttttgtaaaggtcacaatgacttccttaaataaac

SEQ ID NO: 391563 - DNA, 630 bp, Homo sapiens
cggcccaacttaggacagccttgaaaaaccattctagctccaggaatccccagggtgtcagtgagcctactgatgctccacttcttcttatcctgtttctktcctttcttttcctaagggcttgatcccaaaggccttctaaataaatatccttcacattacacatctcagaatctgcttcccagggaattcaacctgtgacaccctcaaaacagcttttaatagtgatgaaactctctctgaaacaacctcctctcaaggttttcctcttttcatctgttgcctgacctcctttttccttttgcaaacattaaaataccagactaacccaggaccaatcctagtcctctcctgttttcattttttttacactgtctcttaattgatctcagccatttctatacttcttgacattgagggtctccacactgatttctagtctatacctctgttctgagtttcacacttctagagccaaaagttcatctgaatagcatctctttttagtgccatcatctggaattagggatacccttgctgcccttaatcaatttgccaatactgaccactgatcttttcaaaacaaaactggaatcacattattcttttgttcagtgggtttccatttga

SEQ ID NO: 391564 - DNA, 630 bp, Homo sapiens
gctgtgttcctttttgatttatttatctcttcttgtggtatgctttcatttttttctcttaattttttctgtatcaattagaggctttttctttgtgatgtcacaagcttgyataaagcaccttatttgtaacattctagttgaagctgataataactttaatcatatacaaaaattacactgacttctcctctaacctcttctttcctctcttccaccaataacatgctattgatatcacactttacactatttcatactgtgtatccattaacaaattacagctataattatatttgacaattttctcttttaatttttatactagagttaaaatgacctatacacaccattacaatattagagttttctgctcttcactacatatttaccttttccagtgagttttatcatttcatgtattttcatcttgttatttagtgtcctttcatttcaacccaaagaacgccctatagcatttcttgtaagacaggactagttatgaactactgcagcttttctttgggactctctttatctctcattcatttatgaaggacagctttgctggaatgagtattcttggttgccttttttctttcagcacttagaatatataatcctcctcct

SEQ ID NO: 391565 - DNA, 648 bp, Homo sapiens
tccaactacagttgcaaaaaaatggcagttccttcctcaatttcctgttatctagctgtaaaagtaagagcctggggccaaaagctctctaacgaagaaaagcaaactgaaatctctactcatctccactctttccgaattaaatactagtaatttctctcaccttctcacaaaaataacccttctcataaaaataagcaaatatgcagtgacatawacatacacaatatccttgctttgctttttcattcttggtaactgctttgcagaattatgtactagagtcagataaaattgaagggaaaagtagtgagatatgagaaatgtctagtctgtgccctaccattgccttcactcaaggccctccctcttattctttctgctatgactttctccattccaaagagtttattgcaaatacggaaaatatggtatttctagataccaaattaggcctattatctccaagtggtaatatatacttgagaagtgcttgaaacaaatcttcacaaggatgttaatgctaaatgtggcctttatggatcatctcttactccagagagctgcatttaagagtaaaataatagtatttgcataaagttttacaaatttacaaagtgcctccaaaaacatcattttatcctcctc

SEQ ID NO: 391566 - DNA, 616 bp, Homo sapiens
atcttatattttagaaaaacttgcttccacaacacaaattaaaacttttgatgaagtaaactaagacatctttctgagcctgttctggtttcaagtacttacaaagccaagaaaaaaaatacatacttctgttatattttctatagtttctagcatctgaagttattacagtcatgtagagctgtcagcttcatctgatttttcatggtttttattaagatccatggaaataaaattgaacacctctgtaaagtaaaacaagctttttatcatgaaggaaggtatatttttaagttattttgccatttgtcttttccatatcctgaggtatatgcctatcacagggtaagcagatattgccatatatatgctcacctgcatcccaggattcatccaattgacttgtttctcttarataaacctaaagtcattggatttgtgattgccaggaaataaaaggcagaaaggctccatttttcaaatagtcatcactgcaaaacgtaggaaaaactcaattcttctgtttcccagataaaaatgtcaccatgatttcccttgagcatgcagaaggttaaacaaagctgcagttgaccacaaacataaacagtggaaaaaa

SEQ ID NO: 391567 - DNA, 619 bp, Homo sapiens
tgcagttgaccacaaacataaacagtggaaaaaaccaacagattttcaaaaaaacataataaccccttcatattttcaggcaaaagctctaaggagaaataaagttaatttaaatggttgccaattactgtagtgctatacttactcagtcataggctactctagatttgaagttgataggactttgattgaaaataataaatwattttgcatatatctattaagttattcattcaaaacttatatttaaaatcttactcatgtgcaaaacaggtatcagcaatggctatgtttccagctcaatcaaagctacatataagaacctatagatgacaataaacagattaaactgtgaaattagagaagtggccccaatcttctcattgctttctaagttgcatcctctttccccttaaaagtaacatgtgacttccctctttcagaccttttcccttatgaaaaaataaaaaggctcaatgtcatctggccaatatcgcaatcatactggaataaagtctccaaaatcctttcatttttgtattttgtggtgtaaaatggaaaagaatttcaggcaaaactgagtaaatgaaaatttattgaatgctgtatcttaagtatg

SEQ ID NO: 391568 - DNA, 555 bp, Homo sapiens
ggggcaaactaaaagtaaaattaaaagtaaatatgcctcttatctcagctttattaaaattcttttaaaaagagggggagttaaagtatctacaaaaaatctaatcaagctatttcaaataatagaacaattttgcccatggtttccagaacaaggaactttagatctaaaagattggaaaagaattggtaaggaactaaaacaagcaggtaggaagggtaatatcattccacttacagtatggaatgattgggccattattaaagcagctttagaaccatttcaaacagaagaagatagyatttcagtttctgatgcccctggaagcggtataatagattgtaatgaaaagacaaggaaaaaatcccagaaagaaaccgaaagtttacattgcgaatatgtagcagagccggtaatggctcagtcaacgcaaaatgttgactataatcaattacaggaggtgatatatcctgaaacgttaaaattagaaggaaaaggtccagaattagtggggccatcagagtctaaaccacgaggcacaagtcctcttccagc

SEQ ID NO: 391569 - DNA, 555 bp, Homo sapiens
ggggcaaactaaaagtaaaattaaaagtaaatatgcctcttatctcagctttattaaaattcttttaaaaagagggggagttaaagtatctacaaaaaatctaatcaagctatttcaaataatagaacaattttgcccatggtttccagaacaaggaactttagatctaaaagattggaaaagaattggtaaggaactaaaacaagcaggtaggaagggtaatatcattccacttacagtatggaatgattgggccattattaaagcagctttagaaccatttcaaacagaagaagatagtatttcagtttctgatgcccctggaagckgtataatagattgtaatgaaaagacaaggaaaaaatcccagaaagaaaccgaaagtttacattgcgaatatgtagcagagccggtaatggctcagtcaacgcaaaatgttgactataatcaattacaggaggtgatatatcctgaaacgttaaaattagaaggaaaaggtccagaattagtggggccatcagagtctaaaccacgaggcacaagtcctcttccagc

SEQ ID NO: 391570 - DNA, 555 bp, Homo sapiens
ggggcaaactaaaagtaaaattaaaagtaaatatgcctcttatctcagctttattaaaattcttttaaaaagagggggagttaaagtatctacaaaaaatctaatcaagctatttcaaataatagaacaattttgcccatggtttccagaacaaggaactttagatctaaaagattggaaaagaattggtaaggaactaaaacaagcaggtaggaagggtaatatcattccacttacagtatggaatgattgggccattattaaagcagctttagaaccatttcaaacagaagaagatagtatttcagtttctgatgcccctggaagcggtwtaatagattgtaatgaaaagacaaggaaaaaatcccagaaagaaaccgaaagtttacattgcgaatatgtagcagagccggtaatggctcagtcaacgcaaaatgttgactataatcaattacaggaggtgatatatcctgaaacgttaaaattagaaggaaaaggtccagaattagtggggccatcagagtctaaaccacgaggcacaagtcctcttccagc

SEQ ID NO: 391571 - DNA, 556 bp, Homo sapiens
ctatttctccatgtcaaatccttacattctccccctaatacttactggattttggtatttatttatttatttatttatttatttatttatttatttgagacagggtctcaggtctcgctctgtcactcaggctggagtgcagtgttgcaatcatggcttgcagtagccttgacctcttgggtcaaggattctcccatctcagcctcccaggtagctgagactacagacgctcgccataccgcccagctatttttttgtatttttagtagagacrgggcttctccatgttgtccagactggtcttcaattcctgggctcaggcaattcacctgcctcggccttccagagtgctggaattacaggcatgagccaccacacctagcctggatttttacttgtactaaagttgttcagacatatgccataggatagttttataacatttattccatagcaagtaacaccctactcctttccaccatcacctctatttgcaactcttctagctgattgtttttgtatttacctgtattattctcaataacataaaaaatac

SEQ ID NO: 391572 - DNA, 481 bp, Homo sapiens
actgttctccttccaggccttcttatatctctaaatagcacctccatgcacccagttgttaatgatcagaaactaggaatactgttgatgtctatttctccatgtcaaatccttacattctccccctaatacttactggattttggtatttatttatttatttatttatttatttatttatttatttgagacagggtctcaggtctcgctctgtcactcaggctggagtgcagtgttgcaatcatggcttgcagtagccttgacctcttgggtcaaggattctcccatctcagcctcccaggtagctgagactacagacgctcgccataccgcccagctatttttttgtatttttagtagagacagggcttctccatgttgtccagactggtcttcaaytcctgggctcaggcaattcacctgcctcggccttccagagtgctggaattacaggcatgagccaccacacctagcctggatt

SEQ ID NO: 391573 - DNA, 555 bp, Homo sapiens
ggggcaaactaaaagtaaaattaaaagtaaatatgcctcttatctcagctttattaaaattcttttaaaaagagggggagttaaagtatctacaaaaaatctaatcaagctatttcaaataatagaacaattttgcccatggtttccagaacaaggaactttagatctaaaagattggaaaagaattggtaaggaactaaaacaagcaggtaggaagggtaatatcattccacttacagtatggaatgattgggccattattaaagcagctttagaaccatttcaaacagaagaagatagtatttcagtttctgatgcccctggaagcggtataatagattgtaatgaaaagacaaggaaaaaatcccagaaagaaacsgaaagtttacattgcgaatatgtagcagagccggtaatggctcagtcaacgcaaaatgttgactataatcaattacaggaggtgatatatcctgaaacgttaaaattagaaggaaaaggtccagaattagtggggccatcagagtctaaaccacgaggcacaagtcctcttccagc

SEQ ID NO: 391574 - DNA, 604 bp, Homo sapiens
ttccagttttacatccttcacaagagagtagccagagaaagaaataaaagttgcctctcataatcttccagagaatgaggagaaaagttcccagaagcctgaaggaagccatttctggggcctcaccggactgaaatgcaccaagtttctatacctggcaaaggagattaaattagaattatccttagaccaagaagctctgtgggtagcggcatggcctatttggaagaaggcatagatattttattaaaatcaaagggtaagagtcaaaattaatactggttaggtatagtaagcagaaaaaaagccctcaaaagatatccacataaagtccctagaatctgtgaytgttaccactttatttagaaaaagagtctttgcttctacacagcaaaaaaacaaaaacaaaaacaaaaacaaaaaaaaaacaattagcagagtaaacagacatcccagagagtgggagaaaatccttgcaatctatacatccaacaaaggactaatagccagaatctacaatgaactcaaacaaatcagcaagaaaaaaaaatcccatcaaaaagtgggctaaagacatgaatagacaattctcaaaagaagataa

SEQ ID NO: 391575 - DNA, 564 bp, Homo sapiens
ctcttcccctccaccttcctcaagcagatggaaggggtcttggaggtacaatctgtactgcctggggttggtggaggggtgacacaagcacttccttggttgtctcagctggtatctcactaggttccatgcactccaagttccctggctccaagcccaacacagcaccaggacttgtgcaggaattgcagtccttgtggtctaggttgcctttcatgtttatttagaaccccagaacactttagcccatggtggcaggacttgccaaaagtcaggttccaattgctaggatggatgatttgcctctggacaggcctagtataaacrttccctctatgggcacaagctgagttctgccccctgttgcttcccactgacaggacagcactaagctgcaaagcaaagtcccataatcagtatgttctctctaccccaaacacacagatcatctttctgtgccatatggccgctgccagggaatagggaaggggtggtgtaggcaattcaagacagattttcttgccctcttccatgcctctttccttaatgtaatgttaaaatcag

SEQ ID NO: 391576 - DNA, 550 bp, Homo sapiens
gaaaggttcctgcaggatcagatgtaatctcagaatatgtaaaagcctgtgatggaatcggaggagctatgcataaagctatgcttatggctcaagcaataacaggagttgttttaggaggacaagttagaacatttggaggaaaatgttataattgtggtcaaattggtcacttaaaaaagaattgcccagtcttaaayaaacagaatataactattcaagcaactacaacaggtagagagccacctgacttatgtccaagatgtaaaaaaggaaaacattgggctagtcaatgtcgttctaaatttgataaaaatgggcaaccattgtcgggaaacgagcaaaggggccagcctcaggccccacaacaaactggggcattcccaattcagccatttgttcctcagggttttcagggacaacaacccccactgtcccaagtgtttcagggaataagccagttaccacaatacaacaattgtcccccgccacaagtggcagtgcagcagtagatttatgtactatacaagcagtctctctgcttccaggg

SEQ ID NO: 391577 - DNA, 550 bp, Homo sapiens
gaaaggttcctgcaggatcagatgtaatctcagaatatgtaaaagcctgtgatggaatcggaggagctatgcataaagctatgcttatggctcaagcaataacaggagttgttttaggaggacaagttagaacatttggaggaaaatgttataattgtggtcaaattggtcacttaaaaaagaattgcccagtcttaaacaaacagaatataactattcaagcaactacaacaggtagagagccacctgacttatgtccaagatgtaaaaaaggaaaacattgggctagtcaatgtcgttctaaatttgataaaaatgggcaaccattgtcgggaaacgagcaaaggggccagcctcaggccccacaacaaactggggcattcccaattcagccatttgttcctcagggttttcagggacaacaacccccactgtcccaagtgtttcagggaataagccagttaccacaatacaacaattgtcccccgccacaagyggcagtgcagcagtagatttatgtactatacaagcagtctctctgcttccaggg

SEQ ID NO: 391578 - DNA, 590 bp, Homo sapiens
tattagcaaatgaacagttagaaaagggtcatattgagccttcgttctcaccttggaattctcctgtgtttgtaattcagaagaaatcaggcaaatggcrtatgttaactgacttaagggctgtaaacgccgtaattcaacccatggggcctctccaacccgggttgccctctccggccatgatcccaaaagattggcctttaattataattgatctaaaggattgcttttttaccatccctctggcagagcaggattgtgaaaaatttgcctttactataccagccataaataataaagaaccagccaccaggtttcagtggaaagtgttacctcagggaatgcttaatagtccaactatttgtcagacttttgtaggtcgagctcttcaaccagttaaagttttcagactgttatattattcattatattgatgatattttatgtgctgcagaaacgaaagataaattaattgactgttatacatttctgcaagcagaggttgccaatgctggactggcaatagcatctgataagatccaaacctctactccttttcattatttagggatgcagatagaaaatagaaa

SEQ ID NO: 391579 - DNA, 590 bp, Homo sapiens
tattagcaaatgaacagttagaaaagggtcatattgagccttcgttctcaccttggaattctcctgtgtttgtaattcagaagaaatcaggcaaatggcgtaygttaactgacttaagggctgtaaacgccgtaattcaacccatggggcctctccaacccgggttgccctctccggccatgatcccaaaagattggcctttaattataattgatctaaaggattgcttttttaccatccctctggcagagcaggattgtgaaaaatttgcctttactataccagccataaataataaagaaccagccaccaggtttcagtggaaagtgttacctcagggaatgcttaatagtccaactatttgtcagacttttgtaggtcgagctcttcaaccagttaaagttttcagactgttatattattcattatattgatgatattttatgtgctgcagaaacgaaagataaattaattgactgttatacatttctgcaagcagaggttgccaatgctggactggcaatagcatctgataagatccaaacctctactccttttcattatttagggatgcagatagaaaatagaaa

SEQ ID NO: 391580 - DNA, 591 bp, Homo sapiens
tgtttttcacagtgacaaccataaactgttaaagaaagaagtaaatgatattacaatgtgtgaaatttatggaaaacctcccaaatgagatagtattgtttcagacattcatgttataaagaaataataaaaatagttcagagtcaattctcaaagtataataaaaagaattgacattttatagactatggtgttgtttgctttacttttctgttttgttttttttttwaatttttaagtgttacataggtaaacttgtgtcatggagtgtgttgtacagacaatttcatcacaatagcaaagacatagaatcaatctaaatgcccctcaattataaactagataaagaaaatgtggtacatatacaacatggactactatgtagccatacaaaagaatgagatcatgtcttttgtagggacatagatagagctggaggccattatccttagcaaactaacacagaaacagaaaaccaaataccacatattcttacttataagtaggagctaaatgatgggaacacttaagacatgatcttaactgtgacagaaaaaaaaactgtagaggcaataagcatggcagacaacc

SEQ ID NO: 391581 - DNA, 591 bp, Homo sapiens
tgtttttcacagtgacaaccataaactgttaaagaaagaagtaaatgatattacaatgtgtgaaatttatggaaaacctcccaaatgagatagtattgtttcagacattcatgttataaagaaataataaaaatagttcagagtcaattctcaaagtataataaaaagaattgacattttatagactatggtgttgtttgctttacttttctgttttgttttttttttaaatttttaagtgttacataggtaaacttgtrtcatggagtgtgttgtacagacaatttcatcacaatagcaaagacatagaatcaatctaaatgcccctcaattataaactagataaagaaaatgtggtacatatacaacatggactactatgtagccatacaaaagaatgagatcatgtcttttgtagggacatagatagagctggaggccattatccttagcaaactaacacagaaacagaaaaccaaataccacatattcttacttataagtaggagctaaatgatgggaacacttaagacatgatcttaactgtgacagaaaaaaaaactgtagaggcaataagcatggcagacaacc

SEQ ID NO: 391582 - DNA, 518 bp, Homo sapiens
aattttattaagttccaatgatgattttctcattagatataagtaaaaggaaaaaagccaattaaacaaacaatgatacagatcctatgagaaacagtaaatgatacaaggaataatgccctaaattcaataaagcagrgcaaagctctgaaaataacttactaaagaaacgagaataaccagaggagataatttgacatgttcagtggcatgaaatgatacatgtccattataaaaagctgaaatccaataaaagataaaaagataaacacatcgaatgacaaaaaaacatatataaggagtgaaatcaaaatggaatgtgatgaactgaggacagaattaaaaaagaattaaaattccaataagaaaagtgaaattcaggcaggagaatggcgtgaacccgggaggtagagcttgcagtgagacgagattgcaccactgcactccagcctgggtgacacagcaagactccatctcaaaaaaagaaaaaacaaaattgaaattcatattgaagataa

SEQ ID NO: 391583 - DNA, 633 bp, Homo sapiens
gagcataataaaaaaattttaccagagaagcgtcaaaggaaacgtaatcattcaaaacacctgagtgttttgaatgattcaaacacccaagtgtagtaaattcaaaacatccaagtgcagtaaattaagagggatttgtaggccggcttctgaaagatttctcagtaccaagtgacatttggcacctggtcaccaaagaataagtgtttattaagagcctgattgagctgagtggcagaaatgagagaaaatgaaccaacaacagcaacaaaatagtagtgctacaatgaccctaacagcaacaacaacaataaaaataatagtgctccaatgaccctagcaactatgtttgatactgtttcatactgtttagtgcaatatgtagataaacataatagggatctaacaattgggtgttgttgattcttgttctaggagaactctctcccttctcccctccatcttactgccttcgtttgttcttaataagtacccatatgtgaggagacattttgggtaggaaattcagtgtatcatacactggaaaccagtagaaaacctkaaattctaattaaactatactattatatcaatccatagaaaagtacataaagtgacatagctaaaaagaaa

SEQ ID NO: 391584 - DNA, 465 bp, Homo sapiens
actgtgcatagtgatgttcaagtcacttctgatcagatgtactctgcatcacagttcattctaagtacataagaaacatcagcttttgtatgggtgtgtactttttagtaatttgtgtgataaactgatgacatatttttgtgtttataatgcctaaaactataaaaggaatcatattcaggtataagttttatctgtcatatctacaatgaatgaagtcttccatctaarattacacaatagtttcagttatctaacagagagtaatttgtttaggaatctttattatattggctgtaaagaagtacccttgaagaaagaaataatttgactttgttttccattgctatgttgtttgtgaacaaaagagttggacttttatttttattttaccatcatggcatattaagtatgtcacctaatagatgtacctagtctagttaatgcattaatgctcaaaggcat

SEQ ID NO: 391585 - DNA, 622 bp, Homo sapiens
ggttcagctctcatcttctccatgatggacattttggtgatctccagtgtttatccactatatagcaatgctgtgacagacatccttatatgtaaattattgttcatattcttgatgattgcctcagaaatgatcccttagagtaaaatgcctgggccaatgagtattagacacatcttaaaggagtttaatacattcattcagactgctcttcagtttatgtgcccattatcattcccatttcactgtattcttgtcgatgatggataatgacattattttattttattttattttattttattttattttattttattttattttattttattgagacagggtctcactctctcacctgggctggaatgcagtggtgcaatccagctcacggcagcctcatcctcctgggctcaagcaatcctcccacctcaacctcccaagtagctgggactgcaggtgcaygccaccatgcccagctaatttttgtatttttttttttttttgtagagacagggtctcactatgttgcccaggctgatctcaaactcctgagctcaagtgatatactcacctcagcctcccaaagtgctgggattacaggtgtgagccactgtgcctg

SEQ ID NO: 391586 - DNA, 517 bp, Homo sapiens
ggaaggggggcattgtcttttatgttcagattttaaaattatttttatttatatgttaacaacacattttttcatttttaaattataaaatatttttaaacgcagatgactgatgaacacactgaccctatatccagctctatgaaattttaactttttatagatacaatgggggcttcttcaataccccttcccaaatcccatgccygttcctgccttcccaaaggaaatagctatttggtagttatcaaattggacttggtagttatcaaggaaaagtatgtatggaatttctttcattgtctgtagcaaaactagaaatttgaagataacagatataataatatacgttggaatataatctcttagcatattctgtgtcatacatttgtcatcattctcagtagtttattaatacttttcaatcctacataatacgattgatgactttcaggctgggtatttgaaaatgctacatgcctcctttccttagatctcattaaatggaaaagagaaa

SEQ ID NO: 391587 - DNA, 517 bp, Homo sapiens
ggaaggggggcattgtcttttatgttcagattttaaaattatttttatttatatgttaacaacacattttttcatttttaaattataaaatatttttaaacgcagatgactgatgaacacactgaccctatatccagctctatgaaattttaactttttatagatacaatgggggcttcttcaataccccttcccaaatcccatgcccgttcctgccttcccaaaggaaatagctatttggtagttatcaaattggacttggtagttatcaaggaaaagtatrtatggaatttctttcattgtctgtagcaaaactagaaatttgaagataacagatataataatatacgttggaatataatctcttagcatattctgtgtcatacatttgtcatcattctcagtagtttattaatacttttcaatcctacataatacgattgatgactttcaggctgggtatttgaaaatgctacatgcctcctttccttagatctcattaaatggaaaagagaaa

SEQ ID NO: 391588 - DNA, 639 bp, Homo sapiens
tcttagtgcctggaactgttaatgttactttatttggaaaaaggatctttgcaaatgttattaagtcaaagatcttgagatagagaaattaccctcggattatactggaaagtcctaatacagtcatacagattctttaagacagaggcagagagagattttccacatgcaaagaagaaagtgatgcgatgacagagcagagacgggagtgatgtggtcacaggcaaagggatgccatcgsgcactagaatctggaagatgcaaagagcggcaacagcacctggatttcaggccagcgacactcacttcatacttctccccccagaactatccaagaataaacttctgttattttaagccattcaattattggccatttgtcacagcagccacagggaactaatgcagaatcacaccctaacattgggacttcgattcaatttgacctgcaattgttgggttccttctatgtgccaagcactatgctgggcaccaaggatgcaaaggtgaatgagccactgccctgcctcgggaggttcatgatcttttgcaagacagaccagcaaatagccgggataaaccatgagaagtacctgtgggccctacctctccgtgcagtttcaagtgaacctcaaaccc

SEQ ID NO: 391589 - DNA, 639 bp, Homo sapiens
tcttagtgcctggaactgttaatgttactttatttggaaaaaggatctttgcaaatgttattaagtcaaagatcttgagatagagaaattaccctcggattatactggaaagtcctaatacagtcatacagattctttaagacagaggcagagagagattttccacatgcaaagaagaaagtgatgcgatgacagagcagagacgggagtgatgtggtcacaggcaaagggatgccatcgcscactagaatctggaagatgcaaagagcggcaacagcacctggatttcaggccagcgacactcacttcatacttctccccccagaactatccaagaataaacttctgttattttaagccattcaattattggccatttgtcacagcagccacagggaactaatgcagaatcacaccctaacattgggacttcgattcaatttgacctgcaattgttgggttccttctatgtgccaagcactatgctgggcaccaaggatgcaaaggtgaatgagccactgccctgcctcgggaggttcatgatcttttgcaagacagaccagcaaatagccgggataaaccatgagaagtacctgtgggccctacctctccgtgcagtttcaagtgaacctcaaaccc

SEQ ID NO: 391590 - DNA, 569 bp, Homo sapiens
accacaacctctatttcagcatgactggagaaggaagaataacggaggagaccaggcatatctcacgtgttgtgttgtgggtataaagtgaatccatcatttgctggagaggcagaggaaaagtgacaggctcattcatgccttcgagacatttttgggtctattgaaaattttaatctgtgcactctggttgaacctccgcactccttaatttagtacacacagccatgcgctaggtctgtctgcctcagatagggccggctggcttctgtaggacagcaacccccctgaggagttttcttctctaaattcatcctgccttgaactttacacacacatataagctccatttacgggaggattycagagttaattaaacgctgaatttgtttctttagaaatcgcatatgcctcggggttaaggaatagcgtttcagcaaccacgttaatttaggattaagcatactgtacattttctgaataaattttatttttataagtatacattgagagagatggggaaattttccccctctgttaccataaaaggttttaaaaatagatttaaa

SEQ ID NO: 391591 - DNA, 554 bp, Homo sapiens
cccctctctaacagttcccagtgtctatggatgccatttttatgtccatgtgtactcatagtttagctcccacttataagtgggaccatacagttttcagttttctgttcttgtgtcaatttgcttaggataatggtctccagctccatccatgttactgcataggacatgatttcattcctttttggccacatggtattccatggtgtcagtatatcatgttctctttatctaattcacgatggatacacacctaggtagattccatgtctttgctataaataataattttttaaaagcttaaaatttatttagaaggaatttgaaggaaataatttcatacgatacatattgcttttaattttaaaaatcatttattattctctatcactatatatgtatgtgtgtgtgtgtgtatatatatatatgatacattttagttccaaatcagaacacattcctttactratttatttacactaataaaaataggcgatgattaaaataatggcaagcttttctataattttacttcttagttgttattttcttgt

SEQ ID NO: 391592 - DNA, 551 bp, Homo sapiens
tctctgagtgttcaggatgctggaatttctctgccatttctcaacataatgatttcaatctttgtgttcatattagtaaccccagtttttgctgtgtcccagctaacagggatgggggaaagtgaagtgcgggaaacttcctttttaagaatacaaacaagtgcccatattacttctactcacatctcatctctgcaaacttaatcactgttgttcactgaaaggaaaagggagataatgtatgctggggacaattattgtctctgccacactttgaatgtatccctgagaggacattcaagaggtattaaacaacctagaaacacaaactgacttgttcagacacagtgacaggtccagacatatgagcaattcaaacaacatgtatctctcgggcaaacttacatttcagacyttatgctgaagaaagttacccagtgagaacagcctggaaacactccctctcccactctgcaacccacaagcagttgtgattccatacttactctttattgcacacgaatgttctggtcatcctcactcactaatta

SEQ ID NO: 391593 - DNA, 479 bp, Homo sapiens
ggccagcaggaaaatctctccttctcaagtaggctcacatggaatctcatacaatataatgaaatctgtgggtaactatcccattaccttggccatataaaataatcaaaagaataccccattacctgtgttacactctgttaaataggaatgaatcataggtgctaccctgctaccaactcttaaaaagagaggcttacaccagagtgtggattattttgggtatttcaaaattctaccttccccacatattaacaagttattttatatatatatatatatatatatatatatatayacacacacacacacacacacgtatatgcgtgtgtgtgtgcatatctccaacataatacagtgcatgaaattgattataataattttgtaaacatgtgggaatattacaaaattgactttgtaagagaatctgattatatacacttacacctatattgaattatatgtatatgttcatgtat

SEQ ID NO: 391594 - DNA, 516 bp, Homo sapiens
acctgagtctgctttgattaagtctgcaaggcttgcaaaaataattaacttttctgaaattcattctcctcaattgtgaacggggaaagtaatacttacatgaagaattacggcgagaattaaatatcattatattagccaacttytggtttcacctgtatgttccacaaaaataacctactgctactattgttatgactagagttttaacatttttaataaataaaaatagatttatgtttttatattttatttgactaagtgaattctctacttcaaatacctagaagtagatactaagaaaatttgtattatgaatattatttttctcgaatttgctctagtctttaatttagaagtggaaacatacctgttttgactagggcaaccttgtcttgggtagtacaggtaaaatagttcacaattcatcaaatgctgaagcccattaacagttctttcaaagaatgactgtctaaacttgcaaacgtgctgatgcaagagttgatgtgcttataa

SEQ ID NO: 391595 - DNA, 516 bp, Homo sapiens
acctgagtctgctttgattaagtctgcaaggcttgcaaaaataattaacttttctgaaattcattctcctcaattgtgaacggggaaagtaatacttacatgaagaattacggcgagaattaaatatcattatattagccaacttctggtttcacctgtatgttccacaaaaataacctactgctactattgttatgactagagttttaacatttttaataaataaaaatagatttatgtttttatattttatttgactaagtgaattctctacttcaaatacctagaagtagatactaagaaaatttgtattatgaatattatttttctcgaatttgctctagtctttaatttagaagtggaaacatacctgttttgactagggcaaccttgycttgggtagtacaggtaaaatagttcacaattcatcaaatgctgaagcccattaacagttctttcaaagaatgactgtctaaacttgcaaacgtgctgatgcaagagttgatgtgcttataa

SEQ ID NO: 391596 - DNA, 529 bp, Homo sapiens
ggactttcccttgtggtaatattttttattgctaaggcaatattgttgcttgttatagatctactcagattttctatttccytttgagtcaattttggtagtttatgtttttccaggatttcttaaattccatattgtttatcaaattactgattgtttgttggtgtacaattacaagaacaaatataagagaatcacaatttttttataatgctttgtattttctggggtctctaataacatccctacttacattttagtaatgtgaatctgttctattttttctttttcagcctaacttatggtttgactttaaaaagacatttcaaagaactaatgttctttttgtgtgtgatatctattgctttctcattctttatatcatttatttgtttgtttgtttctattaaaccttttctatttcctcccctctgcttgctttgagtttggtttgctcttcttagtctagtttatttaaatgaaatattgttattgatttaagatctcttttcttttttaatatagtcat

SEQ ID NO: 391597 - DNA, 581 bp, Homo sapiens
gtgtcaatgactcaatcagctttttgaagagaaagatggtaaaatacrttgatccaatcatttgaggaaaatcagaggtataagttacctaaaagtgtcacctaaggaattgacaacttttagaattgcatcattaatacgaccgacatgagttaccaagattagatcctatcattttaagttataagtacatcaaactcaacttactataatttcattaaacagaaaaactaactctcgtgggcattttttaaagtacatggcttaattactgaacatatttttagactatgactacatctgtacaaagttaaaaaacttggaaagtgacaattttagttaatcaatgaattggtgtttgttgctggcgtgtcatcagtttatttaattgtttgtccatggtccatgtttacttctggatgtagcaatatagtttggtataacagtgattgaaacaaaagtcttagacatgtgtttgttcatttagagtcctatcaccagtgggaaaacttgtgcttacataaatgtcactgtactaattagtggaacttttagatggcacctttcataactacaggaac

SEQ ID NO: 391598 - DNA, 580 bp, Homo sapiens
ataagttacctaaaagtgtcacctaaggaattgacarcttttagaattgcatcattaatacgaccgacatgagttaccaagattagatcctatcattttaagttataagtacatcaaactcaacttactataatttcattaaacagaaaaactaactctcgtgggcattttttaaagtacatggcttaattactgaacatatttttagactatgactacatctgtacaaagttaaaaaacttggaaagtgacaattttagttaatcaatgaattggtgtttgttgctggcgtgtcatcagtttatttaattgtttgtccatggtccatgtttacttctggatgtagcaatatagtttggtataacagtgattgaaacaaaagtcttagacatgtgtttgttcatttagagtcctatcaccagtgggaaaacttgtgcttacataaatgtcactgtactaattagtggaacttttagatggcacctttcataactacaggaactcagcagctgtgactcttggctatttcacatagtctttgttaagaagtcctaggggtatattttataagctcctccaa

SEQ ID NO: 391599 - DNA, 580 bp, Homo sapiens
ataagttacctaaaagtgtcacctaaggaattgacaacttttagaattgcatcattaataygaccgacatgagttaccaagattagatcctatcattttaagttataagtacatcaaactcaacttactataatttcattaaacagaaaaactaactctcgtgggcattttttaaagtacatggcttaattactgaacatatttttagactatgactacatctgtacaaagttaaaaaacttggaaagtgacaattttagttaatcaatgaattggtgtttgttgctggcgtgtcatcagtttatttaattgtttgtccatggtccatgtttacttctggatgtagcaatatagtttggtataacagtgattgaaacaaaagtcttagacatgtgtttgttcatttagagtcctatcaccagtgggaaaacttgtgcttacataaatgtcactgtactaattagtggaacttttagatggcacctttcataactacaggaactcagcagctgtgactcttggctatttcacatagtctttgttaagaagtcctaggggtatattttataagctcctccaa

SEQ ID NO: 391600 - DNA, 614 bp, Homo sapiens
tgattgaaacaaaagtcttagacatgtgtttgttcatttagagtcctatcaccagtgggaaaacttgtgcttacataaatgtcactgtactaattagtggaacttttagatggcamctttcataactacaggaactcagcagctgtgactcttggctatttcacatagtctttgttaagaagtcctaggggtatattttataagctcctccaaaattccacagtttcatctgctctggattcttcattgagggaccctgcactgcctctgctaggaactaatatgagttctcagaatgcctatgttcatgaaagacaagaacaacctgtctgagatggagaaagaattgacctcagcccaaatttgcacatcacttttccttataatgctgactgtaattaagtttgaaagagttttgcagttgtcgaattactattattaaatagcttctttagcttctgatcctaacggcactttctctatagagttctctcaaaagtagtctaccatggtgggcagactactgatggccatgccactactctctctctctctctcatacacgcacactctctctctctctcatacacacacacacactctctctctctctg

SEQ ID NO: 391601 - DNA, 499 bp, Homo sapiens
atcagaaattatgaacttatctgtgcccttatttctttacttttgtccccttcactgaactgtaacagaagtaacatccattttgtgaatatagcacaatgtctgatacagagtgggcacccagtgaatatgtaaaactgaataaataagtcataccatcaaaagagtgcagtattcttaattgtccagtgttatacttcagaaattatgcttgttgagagatacttctccgtagatgtcttgtgctgctacacatctttcaggcttgccacaaatacaaaaccttggcttctctgtggcagggacttctcaaggtgatgtttacactaaatggyctttgcagatgaaataatatctccctccagaaataaagaccaggttctcttactgcctgctataaaagatgtagattgtacatgactgatgtttctcaactatgacacaaaccactgcctacatagcatctatttggtctcctctcagggattaaatgagagtt

SEQ ID NO: 391602 - DNA, 550 bp, Homo sapiens
aatggtcttatactgatagtaaattttatatttctaagagaaataatgagtacatcttaaatttcttttttgatcttgttttctgaaagataatctacatataatttttcatttttagtaagcttagaataagagaactaagtatgttttaagtatgaaagtaaatcttatcaagcttagttgactggatgattgaaaaggaygaaaagtggtgaatcacaaaaaagacataaatgcacttttaatatttcatttgaagtcaaaacatgtaaacatatatgggtttgctcatcagttgatatgtgagtcagtatatggtatttaaagcttgttctctggaaccagatgtcctgagttcaaatcccatgaaagatactgagcagctctataacttagggaaattattcattttcttgcctctcaattttcttgcctctcaattttctcgtttgtaaaatttggaagaagaatattaaatgagttaattttataaagctcctagaaccctgtgtggctcatgctatatacatttgcaaaatgtatatatggt

SEQ ID NO: 391603 - DNA, 550 bp, Homo sapiens
aatggtcttatactgatagtaaattttatatttctaagagaaataatgagtacatcttaaatttcttttttgatcttgttttctgaaagataatctacatataatttttcatttttagtaagcttagaataagagaactaagtatgttttaagtatgaaagtaaatcttatcaagcttagttgactggatgattgaaaaggacgaaaagtggtgaatcacaaaaaagacataaatgcacttttaatatttcatttgaagtcaaaacatgtaaacatatatgrgtttgctcatcagttgatatgtgagtcagtatatggtatttaaagcttgttctctggaaccagatgtcctgagttcaaatcccatgaaagatactgagcagctctataacttagggaaattattcattttcttgcctctcaattttcttgcctctcaattttctcgtttgtaaaatttggaagaagaatattaaatgagttaattttataaagctcctagaaccctgtgtggctcatgctatatacatttgcaaaatgtatatatggt

SEQ ID NO: 391604 - DNA, 550 bp, Homo sapiens
aatggtcttatactgatagtaaattttatatttctaagagaaataatgagtacatcttaaatttcttttttgatcttgttttctgaaagataatctacatataatttttcatttttagtaagcttagaataagagaactaagtatgttttaagtatgaaagtaaatcttatcaagcttagttgactggatgattgaaaaggacgaaaagtggtgaatcacaaaaaagacataaatgcacttttaatatttcatttgaagtcaaaacatgtaaacatatatgggtttgctcatcagttgatatgtgagtcagtatatggwatttaaagcttgttctctggaaccagatgtcctgagttcaaatcccatgaaagatactgagcagctctataacttagggaaattattcattttcttgcctctcaattttcttgcctctcaattttctcgtttgtaaaatttggaagaagaatattaaatgagttaattttataaagctcctagaaccctgtgtggctcatgctatatacatttgcaaaatgtatatatggt

SEQ ID NO: 391605 - DNA, 563 bp, Homo sapiens
aaaatgaccagatacagaaatagtgtagaaggaattaaaagagacttacctggcttgttcgtatttgtgtgagtctattccctgactctgtgtctgcagaattgaagtttctgtttaatttcctcttgataatatcaactttggaaatactattaggttggtgtaaaartaattgcaccaatctatagtaatgacttttgcagcaacctatagtaattctaatattatgaaatattacttatgatttttaacatttaatttagtttttgttttttcttttagagacagggtcttgttctgtggcccaaactggaatgcagtggtgcaattgtaattcactgccatcttgaactcctgggctcaagtgatcctcccacctaagcctcccaaagtgctggaactacaggcgtggatgaccatgcctcaccaaaaatgatattttgggcttttgcttttgtcttgtttcaagttggataactggctcaaaataatctttaaaatgtaatgagattttatgttcttactatatacaatttatattatctatatctatatttgttttc

SEQ ID NO: 391606 - DNA, 556 bp, Homo sapiens
tctcctgtgcttttcctggagtgctgtaatacatgttctttaaataagggcatgtttaataaaacatattttgtttccttgagaaatgactgaaagtctttagtggattcaggaagactctagagatacccaggaaaatccaatggccatgtattaattcctcaaggtatagtaagggttaggttaaaccatatgaaattgccatttttgaaggtcgatatgaataaacataagcaatatcttatggctgaagctattgtgatttgatgtcataaaccaaattttacaaaattcgtttttcctatgctttgtgycttagcatagcataggaagcacagagtgtctttcttttttcttaccataagagttttttgagaaagtgaaggttatttcaaagcaatcgtccatgcaaaatcataaaaatgtattgacaatacaaaacagaaggagtagcaatttgtctttcagtaatactactttttaagaattaaataaagggtattttttcagtagtttagaatttttaccttaaccataaactcatgtattgacaata

SEQ ID NO: 391607 - DNA, 600 bp, Homo sapiens
actattttcagttctttaaactttatattttttgatttttaaattaaattttaaatagacaatttcccttgacttcagaaacataaaaagctatttgggtccatatttagtttatagagattcttcrtcattgagaggaagggcatctgaatgcatcatttacatttaaaattttaataaaatcaatatatgcatcaggcaccatgatgcactgcacagaaaataagataatgatgaatatgacaaagataactcatagtttaatggggagaaaaatcttcatgcaatcaaatataaacataatccaatataagtggagtttaagcactccttttagtcagcatcatttactttgctctgcatcctccttggttccagtctccatctccaccttctttatttccttctttttttggtacaatcaaaaccactgcaataaaaaaaattaaatatatctttatatactgtgcatttagttatgggactgtgctgggccgaatggcagacatccaaagatgctcatgtcctaattatgactgtgattatgtctctttacatggttaaaaaacttcttataaactattaagttaaggatattac

SEQ ID NO: 391608 - DNA, 540 bp, Homo sapiens
gcatcaagagaagcaaatagacaataattgrgagtccagattcaaacacatatagtcatttaatttttggcaaatatgcaagagtaatccagtcttttcaacaaatgtattggaacaattataatcttttcaacaaatgtattggaacaattatatacccatatgtaagaaaataaaattccacccatttaatgtaccatacacacacacgagtttggtaagttttaaaaagctgaagacataaatggacacttctcaaaagaagacatgcaagtggccaacaaacatatgaaaaaattctcaacatcactcagagaaatgcaaatcaaaatcacaatgtgatactatcttacaccagtcagaatggctatttgtaataagtcaaagaataacagctgctggctaacctgtggaggaaagggaacgcttatttaacgctggtgggaatctaatttagttcggcctgtgtggaaagcagtttggagatatctcaaagaacttagaactaccgttagacccagcaatcccattattgggtac

SEQ ID NO: 391609 - DNA, 604 bp, Homo sapiens
aaagcatgagccataagaaaatatattgataaattttccttcactgaaattaaaaacttctcatcataagacactgccaagagtatgaaaagacaatgcataaactgggagtaatttttgcaaagaaaaacacctgataaatgtttttttttccasaatattcaaagagttgtcaaaattcaatgcaaataatctgataaaaattcaataaaaataaatgagtgaaagatttaggcacttcaccaaatttatttggatgacatattagcacatgaaaagaatgctttggagcaatgggaattttctaggtctttacatatacacatttgtaaaaatgtaaaaattgagtgttggggtgtggacggcaagtaagggtataatgaactactatggccaactgttgacaattgtccaagattgaggatggatggaagggggataagttacactattctgttttttcacattgtatgtttttaaagttttcaggataaaaagttaaaacaaacactacagcacaggattcgatattagtttcctgtgtgtctagctctggatcacctgttttttggctgtttatgaaggagacatgatgtcctatatt

SEQ ID NO: 391610 - DNA, 482 bp, Homo sapiens
caattgtccaagattgaggatggatggaagggggataagttacactattctgttttttcacattgtatgtttttaaagttttcaggataaaaagttaaaacaaacactacagcacaggattcgatattagtttcctgtgtgtctagctctggatcacctgttttttggctgtttatgaaggagacatgatgtcctatattgtatcccattggtatttaaacttttggcttaattttgccctctgtctttcctgcaagaaagtataatggttacacatacttaagtatatataattaagccmaatatattttaattaaatccccgtaattaaatacattttctattattttaaacaaacacaaatctcctcatcaagacaattatcactctctttgcaaacaaatttgagacactaagaaaaccaaacttttttttttttttttttttaatcccaactcgattcccaacactaaagttgtgtt

SEQ ID NO: 391611 - DNA, 481 bp, Homo sapiens
ttgtgacattgagcattttttcatgtttcttgaccatttgtatatcttcttttgagagttgtctcttcatgtcctttgcccactttttgagcaaagtaagcagacaacycacagagtgagagaaaatatttgcaaactatgtatctgacaaaggactaatatccataatctacaaggaacacaaacaaatcagcaagatcattttttttccatgtgtcttctttctcagctcatttcttgtaccacatgcgccatagtaaggagaaagtatcttgttatgtacaatttactgttatagtaatttggtgattaaaaagcacttaatgaaataattctaaattgttatataaaaaactaaaaatcagcaggcagaggccctcctgactgccttaattcaactgtacaattgtataaatcattaaattcccaggagtctcattttctcatgtataaaatggtggagatggaaaaaatgactctt

SEQ ID NO: 391612 - DNA, 481 bp, Homo sapiens
ttgtgacattgagcattttttcatgtttcttgaccatttgtatatcttcttttgagagttgtctcttcatgtcctttgcccactttttgagcaaagtaagcagacaacccacagagtgagagaaaatatttgcaaactatgtatctgacaaaggactaatatccataatctacaaggaacacaaacaaatcagcaagatcattttttttccatgtgtcttctttctcagctcatttcttgtaccacatgcgccatagtaaggagaaagtatcttgktatgtacaatttactgttatagtaatttggtgattaaaaagcacttaatgaaataattctaaattgttatataaaaaactaaaaatcagcaggcagaggccctcctgactgccttaattcaactgtacaattgtataaatcattaaattcccaggagtctcattttctcatgtataaaatggtggagatggaaaaaatgactctt

SEQ ID NO: 391613 - DNA, 571 bp, Homo sapiens
caatccaaccaacttttaagaaaatactacctgtcaagttttggtgtggtgtgaaaaagaatatccacaattatctgaagttggttaaaatagtcctcccatttccaactatatatttatatgagtattaggatggattttttttcatctattacaagcaaaataaatatagcaatagctgaatacgaaagtagatagaagaatctgctgtgttctattaagtgagatttttaagagatttacaaaatgcaaaacgtaccagtcttttcaactttgtttatattattatttttcataaaatatttatctttttgtaaaaatatgtcatttatgttaatatgcatggctttatcgtgttaaaaatatatatatgtatttcaacatttctcagttttgatttctagtatagtgaatatcaatatatatgrcccatttaaacaaaagaactttagaatccttggtaactgttcaaggtttaattaagtcctgacagcaaaaggattggtttcaacaatctgtatcttaagtgttgagtttagaccattcaatgtaattgttgatacacttataa

SEQ ID NO: 391614 - DNA, 515 bp, Homo sapiens
ttccttactggaagggagaaaagtatctatttcgaattttggactgaacattcttttcttaatgtctatcctgaaaggaaactatttcactagagcctaacccatggagattttaccagagcctaactgacccaggagaagggaaatgcccaactgcagcctgcttgtagtagttagggttcaccagagtaacataaacaaaagacatacacacacacacacacacacacacacacataaacacacacacacacatacacacacacacacacacacacacacasagagaaagagaaaagagaaaagagaaaaatgtaagaaatttagcttaaatgattatggaggccaaggagtctcaagatctgcaatctaaatgcttgagaaccaggagaattgatggtaaaagttccagtccgagtccaagggcaggagctattctcatgcatctctggttattacagggatatagcacaatgaacgtggtgactttgtactttgtcaacctaggtaagcta

SEQ ID NO: 391615 - DNA, 515 bp, Homo sapiens
ttccttactggaagggagaaaagtatctatttcgaattttggactgaacattcttttcttaatgtctatcctgaaaggaaactatttcactagagcctaacccatggagattttaccagagcctaactgacccaggagaagggaaatgcccaactgcagcctgcttgtagtagttagggttcaccagagtaacataaacaaaagacatacacacacacacacacacacacacacacataaacacacacacacacatacacacacacacacacacacacacacacagagaaagagaaaagagaaaagagaaaaatgtaagaaatttagcttaaatgattatggakgccaaggagtctcaagatctgcaatctaaatgcttgagaaccaggagaattgatggtaaaagttccagtccgagtccaagggcaggagctattctcatgcatctctggttattacagggatatagcacaatgaacgtggtgactttgtactttgtcaacctaggtaagcta

SEQ ID NO: 391616 - DNA, 529 bp, Homo sapiens
ttaatgtgaaaagtaaacatactactctcaaacctttctgaaacttctgaattaaagctatttacttgctctgggactttaagatatatattctattaaatacatgtagtttataatatccaacctcattatttttataactagagatgacctggtggacttaaaaagtgaaaaggatataataaaaaaacattagagaccaacaagccatgtttgaacttgacatttgcgtgttttctattcacagtacctggatctttgtgtgtctataacagaagaatatgactgggcttggatatatgtaggatggttaacaaaaaaagaagaatgawgaacaagaaatttttagggacactcatgcggttttttagtggtgtagtctgagccctctgcctctgtatacacatcaattgagcaaaacaacctgtcttcccaaaacatgttagtgaaatactgcaaaaaaaaaaaaaggccttcactaatttagcacgttgaatactatccacagttgataaacgaaagggctaga

SEQ ID NO: 391617 - DNA, 524 bp, Homo sapiens
tcacctaaactaaattaaaatgacattatcattatcctaggaaataaaaaaattctaaaagacattaaaatttgtatgcgaatctgtattcattaacagttaatcacaaagatatgaatgtaattgccgttaagtacaagtaagaatgtttttttaacaaaagggagtgaaatkgactagggaatttattaaccaatcaataaccaatttaataacctaccaatttattaacatatattgaaaacagaataagttgtactttttaaataagaaatatctttgctatgctatgtgatttttagctgtttgagatttatcaaacatagatttgttttttactgtattgcatcaataattctatctggtattcgatgtattaaatataacagagtttagcacatccacagcttaataattggtgttattttacaaattcagtaagctgcatctaattgaaaatacctctgccagtgagaatggaatgaggcagtaaaagtgagagataaagcagattagaaaataat

SEQ ID NO: 391618 - DNA, 588 bp, Homo sapiens
gtagaaaacaataatactaaaacgccaaacatcacatcaaccttccagtcaatccaatgctcttggtcctagtactatctagagaattttaaaagaaaaaaaattacttccattgcttcttttattcactcatgtatttagtactttttaagttcacttattcatattttttcatcaaatgctgaatacacctgtgaatatgaacttgatgtgtatttgatatctatatcggtaataagtttataactgtaggtaatgcttatattaattaagacatgaaaaatctctttgaaacttacagaattttatattaatattaggtaatgtaaatgatgataaatgagagatagcttatacccagtggcacaaataaattgctcatgaaggagaagaaaaactcaagcagaattatacaatttgaagacaacaaggagcaccaagtaatgagtggaaggagtgtgtgatcattgggtaacgaagtaaaaaatttaattttactaaagcaaacaatgtttctacatgasaatagtagaacacaagacttcataaatctgtaaacacacacaggagcatgcataaatgttgtac

SEQ ID NO: 391619 - DNA, 607 bp, Homo sapiens
ataaaataaagtaactctctcaaaaaatgtatgaccagagacttacctttggaacagtaattcacatcatctgagtagttcaggaagttttacatagagaaattagcataaaatgtataacatatgatatccctgacataaattaacacagcatctctccagcgataggtcctcagtacagggtagagagaaatctcaaggataaaaactcasaaagcataagcctccatccaatactacaaatacatgagggggaaatacccactctcagagaaaatcagtgaaaaataaaaataaagtttggccctcattaaaattagaaaaggagggttttttaaaatattaaatataaaagtaagtgtgcctaaaataaatcaatatataaatgttggaataaaaatatgttattaataaaaaatataagacaatgtagacaaacacttaataagataatagtaaagccactaagagaaattctgggaggcaaaaaaaaaaatattctcacatattaagacaataaaacttgttaagtcagaaaatgtttgtgaaggtatattgtttaggagcaaaacagaaattttaaccaccttctctaactataatgata

SEQ ID NO: 391620 - DNA, 604 bp, Homo sapiens
tccatggtagctttgtccctgggtttgacatctgcagccctcccaggttggaaatcagctctaccagtctagggtttcaggggcagcctatcccatgattccatcaggtattgccataatggggactctctgaaaacccccatggtggttttctgcttaggctttgtggttatctgggcatcctctgaaatctgggtggagctttgctgagtactgtgcgtgctgtgcagggacccaccagtgtagccaaggaatatagcgaagagttcaagtagcagagccttgaggcagcatggggagccagcaccaagrtcccatgggcactcctgtccccacttttaaaatcaggctctggaactctagccctgtgatgggaaggggagcgcctatagtctctgaaacgccttaaagttcattcttccattgtcttgttgaataccacttcaatgatccacatcaattcctatccaatggtcccttgtctaccctattgtttttctctcccaaacacatttttctcattttttataatatggataggctgagaagttatttttaagctttaagtttttcttatatttttaataaaagttctttcttcata

SEQ ID NO: 391621 - DNA, 604 bp, Homo sapiens
tccatggtagctttgtccctgggtttgacatctgcagccctcccaggttggaaatcagctctaccagtctagggtttcaggggcagcctatcccatgattccatcaggtattgccataatggggactctctgaaaacccccatggtggttttctgcttaggctttgtggttatctgggcatcctctgaaatctgggtggagctttgctgagtactgtgcgtgctgtgcagggacccaccagtgtagccaaggaatatagcgaagagttcaagtagcagagccttgaggcagcatggggagccagcaccaagatcccatgggcactcctgtccccacttttaaaatcaggctctggaactctagccctgtgatgggaaggggagcgcctatagtctctgaaacgccttaaagttcattcttccattgtcttgttgaataccacttcamtgatccacatcaattcctatccaatggtcccttgtctaccctattgtttttctctcccaaacacatttttctcattttttataatatggataggctgagaagttatttttaagctttaagtttttcttatatttttaataaaagttctttcttcata

SEQ ID NO: 391622 - DNA, 443 bp, Homo sapiens
tcagcaattgtagtttttacagctttaaatcacctatcatactcaaatctttttggcctccaagtatataaaatcaactgagccttttgctttgtcatatgcaaatatccacagtataaatcaatgtgcttcatgatatgtagaagttacagcttctgagatattagagaatcatgcagcaaaataaactctttagttctattgttattaaaatatttaaaatgttcattawttcagacctcaacaaattggatattaagtcaattgccacaaatgactatagaaattattttgttttccaactaactgtattgacagattagagaggaaattaaatatttaaattgatttcttactcgaggctaatctttccagttgtcatatttttctttttatttgtaaacttcattgaagtatagttaatattaaatgaaacacatcaa

SEQ ID NO: 391623 - DNA, 528 bp, Homo sapiens
ctaggtccctccctcaaaaccatccttccattgaggcaccggtattctgggcctgacggatatggtagcctccgagatctctaaaatccctttggagtcattctcccattgtgaatagcacctgacttctctgtattcatggtaatcttcttatcaaatagtcggttaggttgctggaacatacacccttggttctctcccctatacatacttttttattttctaaayggtctggctgagaatttacaaatcgtaatgttctgcttcacttttaaactaaaaattctacctttgaatcattttcctcttctcatattttactctaagcagttaagagaaggcacgcagccttctgaacactttgcttcttagagatttattctggcaagtattcaggttcaatcatatcatctggcagttccaacaccggatatttatctaaaggaaaggatttcagtataccaaggagatatttgcaactccatgtttactgaagcaccattcaccatggccaaaatacaaagtcaa

SEQ ID NO: 391624 - DNA, 588 bp, Homo sapiens
ggtacacagggcaataagtaggaggcagcgtataaatgcacagaggattccagacagaatcttaaagtagtaaatgcactttcaaaaatgaaaaggttcatttcaaggtcctgcttctttacactgttagaaatattattcaggaaaagtcttttaaagaagctctgttcacatagtgtgcaattttatacacacaggacagtcaagctaccagggactagttttgtattctataattcatttgccaccttcaactgttagcttgcatgtatgtttacrtaagactctattttacatttactaccagatcaaataatatatatgcagcaccaagagaaagtattcctactgcccctgcaataatatcattcactaaaactttaaaatataagagagatgcctttctagccatatacttactctgtctctttttttcctctcactgtctctctcttcgctcaaaagaaataactatcttggaattttactgagtttataagcctgcaaataagttatactgatataacgaaagtcaggagggacaacatctgagcaagataaatctgaggtaagagaaaaggaaaacgt

SEQ ID NO: 391625 - DNA, 573 bp, Homo sapiens
agcaagcatgagatctagtaaaaggagcatgaatattgttatgcattgagcgtctatgtccctccaaaatttgtgtgttgaagccctagtaaatggggttttggggagtgattaggtcaagaggataaagcccccatgatgggattagtgtccttacaagagaaagagacaccagagcttcctctctttaccacatgaagatacagggagaagctggccatctgcaagccaggaacaggaccctcacgaagaactgaacctgaccataccttgaccttggctttccagcctccagaactgtgagaaataatgtctgttgtttaaactacccagcctatggtatgttattatcatagcccaagctgactaagacaaatatcaaaccagttttstgtatatctttgttttaaaaagaagtacattgaaaaatcatctggaaactgcattgtacttgagtccattaaccttctcattctaatatgtgaaaaaatgaataacatccctatataagatcataaagaaattatagttttcagaggaaagctaatacttaggtagggcaaggaggaggag

SEQ ID NO: 391626 - DNA, 592 bp, Homo sapiens
gtcatttcctgaaactattctgcctgagtacatatgggaaagtgatcaaattgagcaaatgtttaatgtaactctgacctcaaagtctcatgactgagcattatagccttttcaagggayaattttgcttattggtggttctcactgacatagttgttcaattttttcctccttatttcaccaagatggatagtcaaaaatattgcagtcatattttctttgataaaagtgtctatctgtaaggtgccacaatgaaactactgggttattttgttgggaatgctggtactagataaataagtacttgaagaaatgtaaggtaaagcaacttttgccacaccattttccttcatcccttggccatctgaaagcaggaatctgcagaaatggttttaacaccatacatcaaagtccatcaaagtccacattgactagaataggacagcatcatgccacaagaacctcatgtttacctactgaatgacatgggaaacaattgaggatttcttctctaatcaacctcaactactaagaaatatcactcatgtaagtctgaaacatggatcctgtcttagtccattctcacactgct

SEQ ID NO: 391627 - DNA, 536 bp, Homo sapiens
agcttaaatagttgaaattatttgcagtgtttatgcatagaaggactcaaaatttgtaaggtatcaattctctgttagttaatctgtagatgcaataaaatcccaaataaatttctatttgacttttatagaataattgataaattgattcttmaattttatgttgatgctaacaatctagtctagccaaactaatcttgaaaaaaatatgtagaggacttacattttctgatttcaaaactcaatataaagttacagtacttaagacagtgtgcttttagcataggatatatagagataaatggaataaaataaaatgtccagacataatcatgcacagatatggcctttgtatttcaaccaaaaaaccacagaaattcagtagagaaataataatcttttcaacaaatgatgctgggatattctgcatttctgattgaagaaaagtaaaactataccattcataaaaattaactgataaaatggatgattgctcagaatataagagctaaagctatgacgaacatagaaaaaaa

SEQ ID NO: 391628 - DNA, 580 bp, Homo sapiens
atgaaactttggggtagagaagcatttcctagctagaacagagaaagcactaaccraaaaagaaaataataatcaattggatttcttcaatattacaaacttctgtttgtcaaaaaacgccattaagaaaatagaaaagcaagccagcgagtaagagaaaacattcttaatgaacatatctgtcaaaaaatttacatccgtaatacttacagaaattgtacctcaataataataaatcaaatagcttcataaaaattaatatacaaaacatttaaatactttataaaagaagaaagtgaaaagttggttaatatcataggttgctaggaaaacgtaaattaaaaccacaatgtagtactactgcacatatactaaaatggctgaactttaaaaaatttataccagttgttggtgaggatgtagagcaagtgatactctcacatgtagctggtgggagtgtaataaggtaaaacaattattgaaaaccgtttgtggcttctaataatgttaaatatgctgttatgcaattctaagcaattcctctagtatttgactcaaagatgaaaacgtgtctttataa

SEQ ID NO: 391629 - DNA, 580 bp, Homo sapiens
atgaaactttggggtagagaagcatttcctagctagaacagagaaagcactaaccgaaaaagaaaataataatcaattggatttcttcaatattacaaacttctgtttgtcaaaaaaygccattaagaaaatagaaaagcaagccagcgagtaagagaaaacattcttaatgaacatatctgtcaaaaaatttacatccgtaatacttacagaaattgtacctcaataataataaatcaaatagcttcataaaaattaatatacaaaacatttaaatactttataaaagaagaaagtgaaaagttggttaatatcataggttgctaggaaaacgtaaattaaaaccacaatgtagtactactgcacatatactaaaatggctgaactttaaaaaatttataccagttgttggtgaggatgtagagcaagtgatactctcacatgtagctggtgggagtgtaataaggtaaaacaattattgaaaaccgtttgtggcttctaataatgttaaatatgctgttatgcaattctaagcaattcctctagtatttgactcaaagatgaaaacgtgtctttataa

SEQ ID NO: 391630 - DNA, 577 bp, Homo sapiens
aaatataatccagaaccctacactttaattctcaaccactttatcagttcttaggcaaaggaggtatgaagttttaaaatatttctcaggggtctggaatttatttcagtcattgtaaatgatcactttacatgtttcatagtgaattatatgattttctctrtataatactacattgaattttataataaatgacaagtaaataagccacaaaagcaaaaaaaaaaattattctgtaattattatgactgagacttagtaaaaaggatgacatattataggaacaaaataaagtatattttgcttgcacactgatagtattaaattatggatatcttacaacattgagtgtctttgtatatgtacactagtctatattgaagatccaagacaaacatgaaattgctgaaaatgtcatttgatatcgtgtatgacactgatacatgccagtcaggctttccaagcaaagtataagtgatcagttgaacaatgtcaaaaaagattttgaagaccagtgtaaccagatgattattataaatcaggaaaatagaataacaaacactcaagaaattataaa

SEQ ID NO: 391631 - DNA, 648 bp, Homo sapiens
aacaaacactcaagaaattataaatctatgaatggtaagttttcttttcttaatcttctcaatgacattttgaagaaaagtaagattcaagagatagaagtcaataaagttattagtgtcttgtgttagatttttaacaattctttccttcaaagaagtcagacagctacacagatatgcgatggagaaaacagcctcaaataatagcttcctcgtgttcaacaattcactatgacaatgcttattttaagmaggaaattcatatcacattttgcatctctaggaatgtgggtacttctatcttgctaataacaggtcacaccacaaaacacacgtttttataattcctcctgatgaagatttgcattcaacatagaaatttagtagatggcactcaatctactaattgaacacctgactggtgatctttcaagttcttttggaaaaactagcatggaagagttaagcctctttctcagaatctttaaacagtaattttgctcaatattgggagtgttaactattgacttctaaatgttgttacaaagggaaatttatcctgcctactacctctttcttacctacaaatcatgcaatagtgtaaattgttttttccattatgataatttgtcaagcaaatgaaatttc

SEQ ID NO: 391632 - DNA, 648 bp, Homo sapiens
aacaaacactcaagaaattataaatctatgaatggtaagttttcttttcttaatcttctcaatgacattttgaagaaaagtaagattcaagagatagaagtcaataaagttattagtgtcttgtgttagatttttaacaattctttccttcaaagaagtcagacagctacacagatatgcgatggagaaaacagcctcaaataatagcttcctcgtgttcaacaattcactatgacaatgcttattttaagcaggaaattcatwtcacattttgcatctctaggaatgtgggtacttctatcttgctaataacaggtcacaccacaaaacacacgtttttataattcctcctgatgaagatttgcattcaacatagaaatttagtagatggcactcaatctactaattgaacacctgactggtgatctttcaagttcttttggaaaaactagcatggaagagttaagcctctttctcagaatctttaaacagtaattttgctcaatattgggagtgttaactattgacttctaaatgttgttacaaagggaaatttatcctgcctactacctctttcttacctacaaatcatgcaatagtgtaaattgttttttccattatgataatttgtcaagcaaatgaaatttc

SEQ ID NO: 391633 - DNA, 580 bp, Homo sapiens
tgggggatggaaaaatagacaggtaaataatgcgtcagacggggataaattttaagacttcacctatggtaactgagggatcgagatatgcacatatcttaaggaagatctttccaagcaaaggaaatagcaattgcaaagcttgagaagtttgtttgaagtaactgacaaatagcaagggaacagtgaggacagactgaaaggcaatgcaggggaagaaagacgtgaaaactaacaggtggtatcaaaaaactgagtagacgcatgaaagatatgtaggctattgataggactttggatttaattcgargtaaaataaaattaattgatgcatttaagcagagtagaatatgaactggattatactttaaacaaatccttctgacagctgtgtcagggcaaacacagaagttaaaggactaggtgagtaactacagcaatgctccagggagaagtagaagtgtgcaggcagtaagaaatggctaaatgctaggtgtattagaaaaatagagtatactggattttttgatgaattgcatctggcatgtgaaaaagagtcgaggatgatttcatatatttt

SEQ ID NO: 391634 - DNA, 622 bp, Homo sapiens
aaggggcaaggtaatgatggtgttggatttggatgctcctcaggagttacaacacactcatatttctccaggtgatctccaagatcctactcttctgttgctatttaatttggkttcaagtaatattaaatcatttcccctctttccccatctctctaatcacatgtgtatttcttcttacctgataccctttttggatcatcaaatggttctccatctctttattttgttcttctttgacagacaggggtgatattaagatccaggttttcaacaatatagcggtttaaaaaattaaaatactgtactctcatctcctgaaagcattagatggcatctcattcatatcctatagcgataccagtcaaaaccccatctccagtgcccaattctccagtaccaccaatctactctgaaacctagcacatgccaaaccctaaacctctgccttatgccctacctataactagtaaatattccctctcttctccatctgtcagaaatctttgtgactctttcaacactgccttaactagaagttaaatctctttttcatagattgtacaatatatacaaaaaatgagtagtgagacatacggaagagggtgatatggtgttgatg

SEQ ID NO: 391635 - DNA, 622 bp, Homo sapiens
aaggggcaaggtaatgatggtgttggatttggatgctcctcaggagttacaacacactcatatttctccaggtgatctccaagatcctactcttctgttgctatttaatttggtttcaagtaatattaaatcatttcccctctttccccatctctctaatcacatgtgtatttcttcttacctgataccctttttggatcatcaaatggttctccatctctttattttgttcttctttgacagacaggggtgayattaagatccaggttttcaacaatatagcggtttaaaaaattaaaatactgtactctcatctcctgaaagcattagatggcatctcattcatatcctatagcgataccagtcaaaaccccatctccagtgcccaattctccagtaccaccaatctactctgaaacctagcacatgccaaaccctaaacctctgccttatgccctacctataactagtaaatattccctctcttctccatctgtcagaaatctttgtgactctttcaacactgccttaactagaagttaaatctctttttcatagattgtacaatatatacaaaaaatgagtagtgagacatacggaagagggtgatatggtgttgatg

SEQ ID NO: 391636 - DNA, 484 bp, Homo sapiens
gagctcgattccaggggaggtgagggagaacatataatgaaagaatgagagcagacttctcatgaaagaaacaaagaaaagagaagagaaaatgaaaacacccaaggcgtaagataatggaataatggaacattaaagtactaaaaaatattaatacaaaattctataccaagccaaaacatatgcaaaaatggaggccaacttatagctctggccaagatggagtagctccatttctctcagtttctacctcttaaaactataaaccctggacataacacaaaaagaaacacaggaaaattytgaaagttggaaaagagaagatgaagtgtctagggacttcaaggattaaggaacaacatgttggttttctggatttttttttaattttaatttttatttatttattttttattacttcctgtatattttggagagcaggagagatgacttcaggaacttttaacctggaactaccaaaaca

SEQ ID NO: 391637 - DNA, 624 bp, Homo sapiens
agacaatacattttctgttttttaagcaactcgatatgtggtactttgttacagtagcactacagtagccacttggaataagttttgtggattttgtaataaagttaaacacatccttactatactaaaaatctcagtcttagatggtcccaacataactgataatatacactcactaactgattcataagggaatgttcatagcagctttattcatattagccccaaactggaaacaaccagtgcattagctggtaaatataaaaactaattgtaatatgtctatacaatggaatgctactcagcaacaaaatggaagaaactagtgatacacacaaaaagcatggaggsatctcgatgatatgctaaatgaaagaattatgtgatgccattttatgatagtctgggaaagacaaatgtatgggaatagtcaggaaaccaatttttagcaggttctggatgaggaaagggattactatacccaggcaaaaaagcttttcaaggttatggacatattctatattttgttcgtgatgattgttacatacctgtataagatttttaaaattacattaaatagtatatttaaaatggttaactttagtttacatacatttttacctc

SEQ ID NO: 391638 - DNA, 585 bp, Homo sapiens
ttgtttccatcattacatctctgattatgatgtactcctaaagaagaataacctctcttttacttcttctgtgcgaatctcacagatttgtcaaaaaacagttcaactccagtctgtttctggaagccttccctgactcatgccatcatgctgatttttccactgcagagtgctgcctatttcataaatctgtttctccaaaacaaaatcaattgctttctaatactttattagtgtatattctctattctcaatttaaagtcagtaaccaaatcatatcactcctgtatgatttgacacagamttggtatttggtaaacgcttgctgttgcttttaacagaatcctggaaatctaatcatatccatcctctggctaaaaatattttaaatatcatagttacttaatatgttacagtcatcttgcattatttacctgttgctgggtaacagaatatcctaaaactttggcgttaaaaacataaatatttattctcttgtacaatttctgaaagttgggtatctggaaatggcttcgctggatagttctggctcaaggtctcccacaaagttgcagtcaagtatcc

SEQ ID NO: 391639 - DNA, 680 bp, Homo sapiens
agtgctgcctatttcataaatctgtttctccaaaacaaaatcaattgctttctaatactttattagtgtatattctctattctcaatttaaagtcagtaaccaaatcatatcactcctgtatgatttgacacagacttggtatttggtaaacgcttgctgttgcttttaacagaatcctggaaatctaatcatatccatcctctggctaaaaatattttaaatatcatagttacttaatatgttacagtcatcttgcattatttacctgttgctgggtaacagaatatcctaaaactttggcgttaaaaacataaatatttattctcttgtacaatttctgaaagttgggtatctggaaatggcttcrctggatagttctggctcaaggtctcccacaaagttgcagtcaagtatccactagggctgaagttgtctgaaggctttacaggagcagaaggatttgcttacaaagtggcttacaactgtacagtcctgaatttcttgctggctgttgatgggtctcaggtttttgtcatgtggatctctccacagagcaacttgagtatcctcatggcatgggcagctaatttaaaccagagtaagatgtccaagagagacaaacaggaagttaccttgccttttatagcctagtgtcaaaagtcacatacttgctagcata

SEQ ID NO: 391640 - DNA, 551 bp, Homo sapiens
cctacactgaacagtgaatatttaaatttacattttttaagcacacaaggctatactagcattgctacatgaattattctttcaagacttaggacataaaattaaccaaaaaaatcagggtcccatgaggaggggggcaagaattaastgcaaattaatgaacacaagacaactttttgaagcaatggttataaaactttataaatttaataaaaatcattagattgcacaattataatgggtggatttatggtatgtaaattatacctcaataaagctattacataaaaaatcagggcaccaattttttaactaggcttaaaaaatgaagtctaaaaatatcatacttgtatatatatcaaagaacaagcaaacatcattattaattgctgcacttctcttcctttcctgacccatttctaaaaggatgattcatttttaaacattatcgttcattaattcattcagcaattgtttttagtaccaaccatgtaccaatcactactcttaaggcacttggaatatatcagtgaataaaacaaagatccctg

SEQ ID NO: 391641 - DNA, 551 bp, Homo sapiens
cctacactgaacagtgaatatttaaatttacattttttaagcacacaaggctatactagcattgctacatgaattattctttcaagacttaggacataaaattaaccaaaaaaatcagggtcccatgaggaggggggcaagaattaactgcaaattaatgaacacaagacaactttttgaagcaatggttataaaactttataaatttaataaaaatcattagattgcacaattataatgggtggatttatggtatgtaaattatacctcaataaagctattacataaaaaatcagggcaccaattttttaacyaggcttaaaaaatgaagtctaaaaatatcatacttgtatatatatcaaagaacaagcaaacatcattattaattgctgcacttctcttcctttcctgacccatttctaaaaggatgattcatttttaaacattatcgttcattaattcattcagcaattgtttttagtaccaaccatgtaccaatcactactcttaaggcacttggaatatatcagtgaataaaacaaagatccctg

SEQ ID NO: 391642 - DNA, 551 bp, Homo sapiens
cctacactgaacagtgaatatttaaatttacattttttaagcacacaaggctatactagcattgctacatgaattattctttcaagacttaggacataaaattaaccaaaaaaatcagggtcccatgaggaggggggcaagaattaactgcaaattaatgaacacaagacaactttttgaagcaatggttataaaactttataaatttaataaaaatcattagattgcacaattataatgggtggatttatggtatgtaaattatacctcaataaagctattacataaaaaatcagggcaccaattttttaactaggcttaaaaaatgaagtctaaaaatatcatacttgtatatatatcaaagaacaagcaaacatcattattaattgctgcayttctcttcctttcctgacccatttctaaaaggatgattcatttttaaacattatcgttcattaattcattcagcaattgtttttagtaccaaccatgtaccaatcactactcttaaggcacttggaatatatcagtgaataaaacaaagatccctg

SEQ ID NO: 391643 - DNA, 466 bp, Homo sapiens
actttttctaatacttgataagcttgagagagtaacttaaactctacttcttcatctgataaataagacacctaccactataaggttgttgacaagactaagtgagattaagtgataaagtatgcaaatcacatttagcaacctaaaaaycagagtaggaaaacaagaaaaagagctatcataaaaagcaggggcttgtttttcaaggtaaaatcagagaatggaactggtcaaaggaatattttagcaaatgccaatagtctgaaatgtaagaaagtacagtgcgtaacacacaaaaagttacggacccactcactgcagcaattatctcatcaggggaagaattcaagaatgcctttgtgcttgctattctctctccctggaatgctattccccctctggattgtgctaaaatatcacctcgtcaaagacaccctgaccctatctgaactattattcttattat

SEQ ID NO: 391644 - DNA, 466 bp, Homo sapiens
actttttctaatacttgataagcttgagagagtaacttaaactctacttcttcatctgataaataagacacctaccactataaggttgttgacaagactaagtgagattaagtgataaagtatgcaaatcacatttagcaacctaaaaaccagagtaggaaaacaagaaaaagagctatcataaaaagcaggggcttgtttttcaaggtaaaatcagagaatggaactggtcaaaggaatattttagcaaatgccaatagtctraaatgtaagaaagtacagtgcgtaacacacaaaaagttacggacccactcactgcagcaattatctcatcaggggaagaattcaagaatgcctttgtgcttgctattctctctccctggaatgctattccccctctggattgtgctaaaatatcacctcgtcaaagacaccctgaccctatctgaactattattcttattat

SEQ ID NO: 391645 - DNA, 464 bp, Homo sapiens
ttttccaatatgtcactaaaaggaaacatgaacatctatctccaagtgtttagccagaaacactaaatatttgtcctatttgatgagaaaaggtgacagtcygctgtctccctctgacaaatagctaaagcaaaaaaagagaaacagcgctacccagtgggaagtctgagaactgcacctctgaatgcaaacatggtttgggggacctcacaatcaagctgttcagctagcatgaggtaagtcagctcctaaggcttctagatagtttgcagcccccaaaagcatagggacgggcattgcatcctgcccaaacctcattgcttactctaggaagcagctgctagagtggtgcaggggatgtggtgtggagcagaggagaaggaaggggcaaagagatggagaaagtttcatgccacagaatactttctcctagggacatctctgagcttgcttgaaataaacat

SEQ ID NO: 391646 - DNA, 585 bp, Homo sapiens
atctatcttgaaaagataagcaaatccatcctccctcacaaacacaaccacaaatccaacccagcctgataagcagaatcaatcaatggacacttaaagaagataataacatccaatgggcaaatcattggttctccaagtttgttcacttgtttttttaacaatgcttctctagccttctccttttgagttgatttttcctcttttttttatgyttgtgccaaacaatatgctcatttgtttgcatattcatttattttaaggctgtctcagggctgaattccaattttagaagtccttggataccgaactattatctctttgttgcacaaacccaattatccaaaccaggcaaactaatctgaaaataaaactaaattatagccaaaatcattagaaaactttattaaatggaatagttacataattctattcctagaaagtttatttggaataattgttttatttttgttgactctgctgtactccatagaattacttcataagagatgaaagctcaattgaattatatcatactcccatattcaaattactgctagttattcacctaatagcattacatgc

SEQ ID NO: 391647 - DNA, 454 bp, Homo sapiens
gaaagtgacatattaggagataaagtagattattgtcttatagtgaagttttcaatgctagctttgtttaaatgtcccaggtctggccaggtgcggtggctcacgcctgtaatcccagcactttgggaggctgaggcgggtrgatcacctgaggtcagaagtttgagaccagcctggccaacatggcgaaacccggtatctactaaaaatataaaaattacctgggcatggtggcacatgcctgtaatcccagcctgtggtcaggaggctgaggcaggagaattgcttgaacctgggaggcagaggttgcagtgagccaagatcacaccattgcactccaatctgggcaacaagagcgaaattctgtctcaaaagtaaataaataaataaataaataaaaatttcccaggtctgaagcatacaagaagttgagcagtctttctttctctcaaca

SEQ ID NO: 391648 - DNA, 454 bp, Homo sapiens
gaaagtgacatattaggagataaagtagattattgtcttatagtgaagttttcaatgctagctttgtttaaatgtcccaggtctggccaggtgcggtggctcacgcctgtaatcccagcactttgggaggctgaggcgggtggatcacctgaggtcagaagtttgagaccagcctggccaacatggcgaaacccggtatctactaaaaatataaaaattacctgggcatggtggcacatgcctgtaatcccagcctgtggtcaggaggctgaggcaggagaattgcttgaacctgggaggcagaggttgcagtgagccaagatcacaccattgcactccaatctgggcaacaagagygaaattctgtctcaaaagtaaataaataaataaataaataaaaatttcccaggtctgaagcatacaagaagttgagcagtctttctttctctcaaca

SEQ ID NO: 391649 - DNA, 583 bp, Homo sapiens
atagtgtatgcactgagggaaggccacactccaaaagccaaaatatctctcttgggtacatctgcctctaggaaaaatgyaaagcggacagtgaatgtaaagaggccctcgcccctccttcctacatccttctcctttagttctattccatcaaccgaaccctgagtctcttcactctcagtttatctgtgtgccatctaaaatcatgagaaccctggtgttctcaccatgggctcagtccctttcaagtcactactaacagcactgctccatttcatttgcttcacagcacctactgctgtcagcactgatgttatgtatttgttcccatgtttactgtcttcctgcaaaggaatgtaagctctgtggcagtaggatcacgtctgttaccccctgccacatcctcaggtctcagaatgtgtacctcataaatgaatcaacctgaacataattttatgactcccatgtgtatttctattttgagatacaattgtgcatgtcctttgagacaaaattacaagctctgtttctaggaatgtatatgtaccagacacttcttgtagcctaccacaaatcttctcag

SEQ ID NO: 391650 - DNA, 583 bp, Homo sapiens
atagtgtatgcactgagggaaggccacactccaaaagccaaaatatctctcttgggtacatctgcctctaggaaaaatgtaaagcggacagtgaatgtaaagaggccctcgcccctccttcctacatccttctcctttagttctattccatcaaccsaaccctgagtctcttcactctcagtttatctgtgtgccatctaaaatcatgagaaccctggtgttctcaccatgggctcagtccctttcaagtcactactaacagcactgctccatttcatttgcttcacagcacctactgctgtcagcactgatgttatgtatttgttcccatgtttactgtcttcctgcaaaggaatgtaagctctgtggcagtaggatcacgtctgttaccccctgccacatcctcaggtctcagaatgtgtacctcataaatgaatcaacctgaacataattttatgactcccatgtgtatttctattttgagatacaattgtgcatgtcctttgagacaaaattacaagctctgtttctaggaatgtatatgtaccagacacttcttgtagcctaccacaaatcttctcag

SEQ ID NO: 391651 - DNA, 583 bp, Homo sapiens
atagtgtatgcactgagggaaggccacactccaaaagccaaaatatctctcttgggtacatctgcctctaggaaaaatgtaaagcggacagtgaatgtaaagaggccctcgcccctccttcctacatccttctcctttagttctattccatcaaccgaaccctgagtctcttcactctcagtttatctgtgtgccatctaaaatcatgagaaccctggtgttctcaccatgggctcagtccctttcaagtcactactaacagcactgctycatttcatttgcttcacagcacctactgctgtcagcactgatgttatgtatttgttcccatgtttactgtcttcctgcaaaggaatgtaagctctgtggcagtaggatcacgtctgttaccccctgccacatcctcaggtctcagaatgtgtacctcataaatgaatcaacctgaacataattttatgactcccatgtgtatttctattttgagatacaattgtgcatgtcctttgagacaaaattacaagctctgtttctaggaatgtatatgtaccagacacttcttgtagcctaccacaaatcttctcag

SEQ ID NO: 391652 - DNA, 583 bp, Homo sapiens
atagtgtatgcactgagggaaggccacactccaaaagccaaaatatctctcttgggtacatctgcctctaggaaaaatgtaaagcggacagtgaatgtaaagaggccctcgcccctccttcctacatccttctcctttagttctattccatcaaccgaaccctgagtctcttcactctcagtttatctgtgtgccatctaaaatcatgagaaccctggtgttctcaccatgggctcagtccctttcaagtcactactaacagcactgctccatttcatttgcttcacagcacctactgctgtcagcactgatgttatgtatttgttcccatgtttactgtcttcctgcaaaggaatgtaagctctgtggcagtaggatcacgtctgttaccccctgccacatcctcaggtctcagaatgtgtacctcataaatgaatcaacctgaacataattttatgactcccatgtgtatttctattttgagatacaattgtgcatgtcctttgagacaaaattacaarctctgtttctaggaatgtatatgtaccagacacttcttgtagcctaccacaaatcttctcag

SEQ ID NO: 391653 - DNA, 491 bp, Homo sapiens
ttagctcatattaatggctaataacacaagatcttccagaataaatcccttctaggggtttttaacattttaagagaggttgactcttaagcagaatacaactgcaattggtggcatttccaatgttataattaatgaagtagaaaagcaaaggtagtatggagagragaaatttgggggcaaagcagcctcaggcagactgaaagccatctctcctacactatcctttttccagttgctacttctactacttttaacccaaggtttctcttaaaagtccaacttatttgagagtggctcaaatggataatgaagacaccacctacctttcagggttattgaaaaattaaatgtcagtcaacgatttaacacaatgcatggcaatgaccatgtagcacatcagctctgactcagcgctttttttcttggattgaacattctacctcatgagaattgaacaccaagatttactctctcccgcataagatgat

SEQ ID NO: 391654 - DNA, 491 bp, Homo sapiens
ttagctcatattaatggctaataacacaagatcttccagaataaatcccttctaggggtttttaacattttaagagaggttgactcttaagcagaatacaactgcaattggtggcatttccaatgttataattaatgaagtagaaaagcaaaggtagtatggagaggagaaatttgggggcaaagcagcctcaggcagactgaaagccatctctcctacactatcctttttccagttgctacttctactacttttaacccaaggtttctcttaaaagtccaacttatttgagagtggstcaaatggataatgaagacaccacctacctttcagggttattgaaaaattaaatgtcagtcaacgatttaacacaatgcatggcaatgaccatgtagcacatcagctctgactcagcgctttttttcttggattgaacattctacctcatgagaattgaacaccaagatttactctctcccgcataagatgat

SEQ ID NO: 391655 - DNA, 510 bp, Homo sapiens
accctgctacttcccaggaagaaaaacatctctttgtatgacaagggaagtaggagagttaatgagaaagatgtacctatacctacatagcaggatgaaaggggactgagttgtatgtctggtgctacrgcaaatgtttttcccctgcttacagaaaggaggaaaaaggaaggtcaaggaatacagaaaaataagtcttcagccacatataaggcacctttctctatcctattcttgctggatcctgtgaatagttggggtataaactgatagtctgtataaactgaagcctcttttgtgccaaaagttaagacattctggtgattcccacttggacttgagacaaaggccataactgattcacctacagagccccaataatatgcaaagcccttcagggcctggggccacatgagcacaaagccaaacagccagtactcagttaagcgtgacttaccttaggcaaaaccaagtgggactttaatttacatgtatgactgaaaaataatt

SEQ ID NO: 391656 - DNA, 510 bp, Homo sapiens
accctgctacttcccaggaagaaaaacatctctttgtatgacaagggaagtaggagagttaatgagaaagatgtacctatacctacatagcaggatgaaaggggactgagttgtatgtctggtgctacggcaaatgtttttcccstgcttacagaaaggaggaaaaaggaaggtcaaggaatacagaaaaataagtcttcagccacatataaggcacctttctctatcctattcttgctggatcctgtgaatagttggggtataaactgatagtctgtataaactgaagcctcttttgtgccaaaagttaagacattctggtgattcccacttggacttgagacaaaggccataactgattcacctacagagccccaataatatgcaaagcccttcagggcctggggccacatgagcacaaagccaaacagccagtactcagttaagcgtgacttaccttaggcaaaaccaagtgggactttaatttacatgtatgactgaaaaataatt

SEQ ID NO: 391657 - DNA, 510 bp, Homo sapiens
accctgctacttcccaggaagaaaaacatctctttgtatgacaagggaagtaggagagttaatgagaaagatgtacctatacctacatagcaggatgaaaggggactgagttgtatgtctggtgctacggcaaatgtttttcccctgcttacagaaaggrggaaaaaggaaggtcaaggaatacagaaaaataagtcttcagccacatataaggcacctttctctatcctattcttgctggatcctgtgaatagttggggtataaactgatagtctgtataaactgaagcctcttttgtgccaaaagttaagacattctggtgattcccacttggacttgagacaaaggccataactgattcacctacagagccccaataatatgcaaagcccttcagggcctggggccacatgagcacaaagccaaacagccagtactcagttaagcgtgacttaccttaggcaaaaccaagtgggactttaatttacatgtatgactgaaaaataatt

SEQ ID NO: 391658 - DNA, 510 bp, Homo sapiens
accctgctacttcccaggaagaaaaacatctctttgtatgacaagggaagtaggagagttaatgagaaagatgtacctatacctacatagcaggatgaaaggggactgagttgtatgtctggtgctacggcaaatgtttttcccctgcttacagaaaggaggaaaaaggaaggtcaaggaatacagaaaaataagtcttcagccacatataaggcaccttyctctatcctattcttgctggatcctgtgaatagttggggtataaactgatagtctgtataaactgaagcctcttttgtgccaaaagttaagacattctggtgattcccacttggacttgagacaaaggccataactgattcacctacagagccccaataatatgcaaagcccttcagggcctggggccacatgagcacaaagccaaacagccagtactcagttaagcgtgacttaccttaggcaaaaccaagtgggactttaatttacatgtatgactgaaaaataatt

SEQ ID NO: 391659 - DNA, 530 bp, Homo sapiens
cacaaaatgccacctttcaacagttgctctttggtcttctccaaaagctagcaatctaattttgtcaataaaacttatytgggccagcctagccaacatggcaaaatcctgtctctactaaaaatataaaaaattagctgggtgtgacggcacgcacctgtaatcccagctactcgggaggctgaggtgggacaatcgcttgaacccaggagtcggaggttgcagtgagctgagatcacgccactgcattccagcctgggtggcagagtgagattgtctcgaaaaaaagaaaaagaaaaaacttacctggggtacagtctgcttctctgtcccctctatagacctaatacagtgtgttgcacattataagcattctgtgaagatctattgggttgattttgaaaatgttggtgttttgaaaaatttcccccatccacacttgggaaatttagagttaagatctgaatttcccaccagagatgcactgctgacctaaaagccatcctttcacaactccaacatcattaatc

SEQ ID NO: 391660 - DNA, 530 bp, Homo sapiens
cacaaaatgccacctttcaacagttgctctttggtcttctccaaaagctagcaatctaattttgtcaataaaacttatttgggccagcctagccaacatggcaaaatcctgtctctactaaaaatataaaaaattagctgggtgtgacggcacgcacctgtaatcccagctactcgggaggctgaggtgggacaatcgcttgaacccaggagtyggaggttgcagtgagctgagatcacgccactgcattccagcctgggtggcagagtgagattgtctcgaaaaaaagaaaaagaaaaaacttacctggggtacagtctgcttctctgtcccctctatagacctaatacagtgtgttgcacattataagcattctgtgaagatctattgggttgattttgaaaatgttggtgttttgaaaaatttcccccatccacacttgggaaatttagagttaagatctgaatttcccaccagagatgcactgctgacctaaaagccatcctttcacaactccaacatcattaatc

SEQ ID NO: 391661 - DNA, 530 bp, Homo sapiens
cacaaaatgccacctttcaacagttgctctttggtcttctccaaaagctagcaatctaattttgtcaataaaacttatttgggccagcctagccaacatggcaaaatcctgtctctactaaaaatataaaaaattagctgggtgtgacggcacgcacctgtaatcccagctactcgggaggctgaggtgggacaatcgcttgaacccaggagtcggaggttgcagtgagctgagatcacgccactgcattccagcctgggtggcagagtgagattgtctcgaaaaaaagaaaaagaaaaaacttacctggggtacagtctgcttctctgtcccctctatagacctaatacagtgtgttgcacattataagcattctgtgaagatctattgggttgattttgaaaatgtyggtgttttgaaaaatttcccccatccacacttgggaaatttagagttaagatctgaatttcccaccagagatgcactgctgacctaaaagccatcctttcacaactccaacatcattaatc

SEQ ID NO: 391662 - DNA, 530 bp, Homo sapiens
cacaaaatgccacctttcaacagttgctctttggtcttctccaaaagctagcaatctaattttgtcaataaaacttatttgggccagcctagccaacatggcaaaatcctgtctctactaaaaatataaaaaattagctgggtgtgacggcacgcacctgtaatcccagctactcgggaggctgaggtgggacaatcgcttgaacccaggagtcggaggttgcagtgagctgagatcacgccactgcattccagcctgggtggcagagtgagattgtctcgaaaaaaagaaaaagaaaaaacttacctggggtacagtctgcttctctgtcccctctatagacctaatacagtgtgttgcacattataagcattctgtgaagatctattgggttgattttgaaaatgttggtgttttgaaaaatttcccccatccacacttgggaaatttagagttaagatctgaatttcccaccagagatgcactgctgacctaaaagccrtcctttcacaactccaacatcattaatc

SEQ ID NO: 391663 - DNA, 565 bp, Homo sapiens
gccttagggaaacactgaaacctctctacatttctcactcctggttcgtttttggacttaaacttttaataagcaaatgcmtttcttattttaacatgatgactctttcagtttttactctattattgtagtcccctcatcctaaaatatccggtggtgtgtcccgatgttaactggagtggcagacgttatctttgccagaaacttctcttttctcttactcttgaaccaaatttagatgactaaaaactctccactttcagggtgagttcgtttcagtggagtactggagctggttctcacaagcttgagggctgattgttaaatctgcagtaattttggagccaattgttaaacaccatcattctaaaaaattaagttataaaatctgacaattcattttaaaacagtggtaaatattcagtgctcatcaattttgaataattttactattgtctaagttcttgaggttatgtctattatatctaaatggtaaaagtgtcatatgatgtggtacttctgtgcatctcttctcaaatttgcgttcaatgatgtcaggttggta

SEQ ID NO: 391664 - DNA, 551 bp, Homo sapiens
ccctttcatttcatacatacatgaaacacttaaaaaggaagaagtaaacarcatcaaaaaaagcataggactagttagagatgaagtagagatttaaaatagcacaatagaattttccaatgaatttgataatttatgtcaaattgatttatgtttaatagaaatatacaaattaacaaaactgacataagatgaaacaaacatcactagtagatgaataacatgaacaaaatttaacaggtatacaaaaagtgacctattttagatgtcccttcaattgtggaaaccggggagttgctacatgtatattttttaggagataatatttttctgggttttaagctaatacttcttaatattgttcctattgcagcaatttcaaacaatgaaagaatcagaacccttgtgtttttccatttttgcagcctagtccaaagacgtttacatcctggaagagaacttgctggcttttcacctcagcatgtatgggccaaactaatataacaaggtaaaatgtttttattggcacctatctcctattttgatgctta

SEQ ID NO: 391665 - DNA, 551 bp, Homo sapiens
ccctttcatttcatacatacatgaaacacttaaaaaggaagaagtaaacaacatcaaaaaaagcataggactagttagagatgaagtagagatttaaaatascacaatagaattttccaatgaatttgataatttatgtcaaattgatttatgtttaatagaaatatacaaattaacaaaactgacataagatgaaacaaacatcactagtagatgaataacatgaacaaaatttaacaggtatacaaaaagtgacctattttagatgtcccttcaattgtggaaaccggggagttgctacatgtatattttttaggagataatatttttctgggttttaagctaatacttcttaatattgttcctattgcagcaatttcaaacaatgaaagaatcagaacccttgtgtttttccatttttgcagcctagtccaaagacgtttacatcctggaagagaacttgctggcttttcacctcagcatgtatgggccaaactaatataacaaggtaaaatgtttttattggcacctatctcctattttgatgctta

SEQ ID NO: 391666 - DNA, 632 bp, Homo sapiens
ataacttattgaaataaaaggtgagctctgagaaaaggagttagcaagcaacaaaagagattaaactcaactgcattgggaatataacaggactaatggaataaagaaagaaagggaatcgaccyatgcagagggagaagaatgactcagcaatgtggtgaaggagctaaaatgagttttagagttaagaatgcctcatctaaaatcaaacctagagaaagaaagaaggagtccacttaaattagatgtatgtaaaataccaaactcagtgcttggccatggaaagctatcaacaaatgtagttattattatggggatctaaatgtaatgaaatcgtaaggtttattttcaagttttctttctttttgtatttatagcttggatttaagctagtaaaaacgaggaaatttctttaggctaatacaaaacaaggaactgttgaataacaaataatacttcatcttcaattttaaacctgtttatattgccacagggctaagtgccaatctctttggtatcatcaaatatccaatctattgaccacatgatcaatacttagcagttacttttaacctgtcattcaagcaaagtagctgagtcctatgcctagttctagacctagcataaaacag

SEQ ID NO: 391667 - DNA, 504 bp, Homo sapiens
aatggaaaaactcacttatgtaatggacataaaagaagctctaataccatagtacgaacactcaaacttgttattctcaaaacaaaactttaactacagttcttgacagtatcaatatcaacacagtgatgccagctatcatgaagctgaccagatcatgattgagatcttgaagtcatttgtttttgtttcacttaagaagctatttttacagatgaacaaatgtaagctcataactcaagtatgactatggtttatatttcttatatgtatttctatttttagcatcaatccaatcacatggaagaaacttattttcaagtccctacctaatacattttcctatagttggaactaacawccaggggacacacatagttttagggaacacagatttctatacgcatgtatgtgtgtgtacacatgccttataacctgagattctgccatttttatctacagacacatcttctgaaatgtccgtcttctgtgttattcatatgt

SEQ ID NO: 391668 - DNA, 661 bp, Homo sapiens
tcatcaagaaattagaatttgtaatcgggttcatttaacaattaatagttttccacatgtgactcttcttccaataatttctttctagggcattctaaactctcaaatgtcacccatgcactttgccacctttagtgaaagctgtagagttacagtagagtttgttcagaatctgtggctccttagtgatggagagcaatttgttcagcattctatcgaaataggaagggttaatggccttgtttgtcctgaggcttttttttcagtctctgaaaatggaattgtatgttaatatgtaaatgaattctatattttttgcagctacacagctctttactggaggggacctcgaatacaatttctctaaaaactaatgtaggtctcttctattattccgaaaagtctgcctctttttttttttttttttaacctgtcaggcatatttggtctaaccttctatatccaggtaggcaagttgtcatttagytacagtttgcagatgtggcaagtgaggctcataaaatttaagtaattctcaatatacctagtaataaaacgctagaatctaaattgtctatttctaattaaagttatgctgctatctcccacagggcttccgtatcacttcctctttcaaccctgagttatggattattttgtc

SEQ ID NO: 391669 - DNA, 661 bp, Homo sapiens
tcatcaagaaattagaatttgtaatcgggttcatttaacaattaatagttttccacatgtgactcttcttccaataatttctttctagggcattctaaactctcaaatgtcacccatgcactttgccacctttagtgaaagctgtagagttacagtagagtttgttcagaatctgtggctccttagtgatggagagcaatttgttcagcattctatcgaaataggaagggttaatggccttgtttgtcctgaggcttttttttcagtctctgaaaatggaattgtatgttaatatgtaaatgaattctatattttttgcagctacacagctctttactggaggggacctcgaatacaatttctctaaaaactaatgtaggtctcttctattattccgaaaagtctgcctctttttttttttttttttaacctgtcaggcatatttggtctaaccttctatatccaggtaggcaagttgtcatttagctacaktttgcagatgtggcaagtgaggctcataaaatttaagtaattctcaatatacctagtaataaaacgctagaatctaaattgtctatttctaattaaagttatgctgctatctcccacagggcttccgtatcacttcctctttcaaccctgagttatggattattttgtc

SEQ ID NO: 391670 - DNA, 607 bp, Homo sapiens
aagtaagaatttattttttccaaaattatcctcccaaatgaaagatatgcttgtgtccttacaaagccttccaaatttgggggtactycatctactactttattttgggtagcaatatataattgatgaaaggcttttagtctttaataatgtcaataaaagctagtttagatgcccatagcggtctcttgttggagtcaaatacagatgctaagaaatttaacatagatttagtgagggatgtggtctcactattattgcaagattgtacattgtaaacaagcctttacagatgtttaattgatttcctaggctaaattgcttaagaatatgtttcactattttatattatagtttaagttgaccaactttctcctccctgctttttggatgttctctctctctctctctgtctctctctttctatttatctatctatcttatcagccaaatcagttgagaataacattgatatatctactgcttatctggattattttaactatcagtgaaagcttaatctatccacattgtctatatttagcttcttcaacttctaaaagaaatcaacaacagattttctatagaatttggtgatgattgacaa

SEQ ID NO: 391671 - DNA, 501 bp, Homo sapiens
gcctgcacaggtgaaggcctttttgcaggtggcagatagccaacttctcatatactcacatggtggaaagagagctagagagctctccagattctcttttataagggcactaatcaaattcgtaaaggctccaccctcatgacctaattacatccaaaggycccatctcctactaacatcacacaggggattaggatttcaatgcatgaatttttaggggacacaaatattcagtttatcacagatagatttattgggctcttgacatcaaaagttttggaaaatatctatgcttgtaccaccttctcctctcattaatctgtgggagtaccttcatagaaaaattgaagccttataggaaattgaattcttagaaaacctttaggactttgcattttttcaatcatatccaaacatctattagaatttgcccttttcttatagccatttttacaacataatcaataaaatatgtaatatttactggatagagaagtcaat

SEQ ID NO: 391672 - DNA, 499 bp, Homo sapiens
gtgtggacagatggcctattttctgctctgggtttgtggaagttattactttccctttcatgcttaaayatcttacatttattccctctcatggctaatattttctatttcaacttagattttccctcatagaagcatgatggttttactgctgcagtgaaattatttaggtctgtaagtcaaaacttttcaaaatagatggatgatccagttatctttctgagcagtgaccatagttctcagacataaaatcaatattttcaaatgaaattgataaaaataaaacataagtggactgcagaaaacccagactacaccctttcaaattcatctgagatttgctgtggacccgccatgtatcaggcatttccctagaatttcagaaaacctaaacgtagtgaccacctaggagaaacttctttccagataaagaatgttctgaagagagtacctcgattgtttactgagaggtataattactacaagattttctttccac

SEQ ID NO: 391673 - DNA, 519 bp, Homo sapiens
ctacatatatatatatatatatatatatatatatatatatataattaagtagccaacttgaggaccaaagagaattttgaaattagcaagagaagagaaaaaacctagcaaaaccatctttcaaaaattaatggagagattaagttttccccatccaaacaatcactgaaggagttttttagcattgtacctgccttacaaaaaatacttaaggggaktcttcaaattgaaacaaaaatatgctgaacagcaaaggaaaagaatatgaaagcataaatttcattgatgaaggcaaatatgcagaaatatgtagattaatgtaacgctgtaatggtagtgtgtaatttagttttaactctattataaaagttaaaagataaaagtttgtttatagatacacaatataaaaagaaactgactacaagaatataaattatgtatatatgtgggagtaaaagtacagtgttttatatacttaaaacagagaattacagctacaagctattttatgcaagcttt

SEQ ID NO: 391674 - DNA, 666 bp, Homo sapiens
tggctgactccaattattttaaaggtctaattgttttgtaagcctagtggaatttcaagttaaaaattgtgagtataaaacaattacttatatattcatattaagtttaaattataaactaatctgctaccacaataagaaaaagtgtcttaaaagctacataaactaaaaacataaaatatgagaatttttctttaatacagaattatcactattaaagatttaattacttttgtcattaatatttaattttaaaactttaacagtaaaatatgcttaaccagtagggaatcaataataccattttaagaggattttagaatctgttttcaggcttagttgtttttggcttaaatgctcagttcacctgggaaatagactgcaataacacatatcaagctgtttgacagtaattttatctkcaaaggcagtagtactgagagaggagaaatgaaagggggatttttcactgtttactccatttacttgtaggttgtttgatttttttaaaataagcatgtttttatgtatgacaagtaatttcctaaattcctcttcaccatagaaaacttggaacatgtacaatatgttatccctttaaaaaacgctcagttggcttaggttgcgtggcaaccaaatattaggacaagataggaaatcttggag

SEQ ID NO: 391675 - DNA, 610 bp, Homo sapiens
gttggtccataaatgaggagctctcttatcccatctctcccttattaaactgaaacattcctaaacttctgatttactggaatccccaggtcggtttttacaatcaccacatgagttttacatattgtattctattagcttatactattgtaacactaattyatccttttagaaattactttttgagtgtttactatgtgcccagcattgctctaggtaattgagaatattgttgagcaagacaaaaattcctgccttgtagagcttacacactaacagaaggaaagaaacactgaatgacaaggatgccaagtaaataaaaggtttagtaggcacacataagtaaattatttggtatggtagaaggggataagtgttaaaaaaataaagaaaaaaattgaacagaatatgggattgtgagtgctgtggagaatgtgttgtcaggatgcaaaaattgtataagatggtcaggaaggatctccttagtagttgttatttgagaaagagtttgaagtaattaaagaagctagtcaagtggttattaggggaagagtggtccaggcaatgggtacagatagagctaatgagctagggctaaagcatgcttatt

SEQ ID NO: 391676 - DNA, 610 bp, Homo sapiens
gttggtccataaatgaggagctctcttatcccatctctcccttattaaactgaaacattcctaaacttctgatttactggaatccccaggtcggtttttacaatcaccacatgagttttacatattgtattctattagcttatactattgtaacactaattcatccttttagaaattactttttgagtgtttactatgtgcccagcattgctctaggtaattgagaatattgttgagcaagacaaaaattcctgccttgtagagcttacacactaacagaaggaaagaaacactgaatgacaaggatgccaagtaaataaaaggtttagtaggcacacataagtaaattatttggtatggtagaaggggataagtgttaaaaaaataaagaaaaaaattgaacagaatatgggattgtgagtgctgtggagaawgtgttgtcaggatgcaaaaattgtataagatggtcaggaaggatctccttagtagttgttatttgagaaagagtttgaagtaattaaagaagctagtcaagtggttattaggggaagagtggtccaggcaatgggtacagatagagctaatgagctagggctaaagcatgcttatt

SEQ ID NO: 391677 - DNA, 597 bp, Homo sapiens
atattccattcatcagcacatggaacattctccaagatagcccatattatagaccacaaaacatgtctctataaatttaagaaaagtgaagttatatcaagtactctctcagaccactacagaataaaactgaaaatcaactccaaaatgagcccycaaaatcatgtaaatacatggaaattaaatgacctgctcttgaatgatcattgatccaacaatgaaagaaaaatggaaatttaaaaattctttgaactgaacgataatagtgacacaacctatcaaaacttctgggatacagcaaaggcaatgctaagagaaaatttcatagcattaaatgcttatatcacaaagtctgaaattgtaacagcctgaccaatgtggagaaatcctgtctctactaaaaatacaaaattagccaggcatggtggctcatgcctgtaatcccagctactcgggaggctgaggaaggagaaacacttgaacctgagctgacatcatgccatttcactccagcctgggcaacaagagcgaagctccatctcaaaaaaataaaaacaaaagaaaaaaatctgaaagagcacaaatggacaatctaag

SEQ ID NO: 391678 - DNA, 595 bp, Homo sapiens
tagctgtgttcctaggtattttattctctttgtggcaattgtgaattggagttcatttatgatttggctcttggccaaaagtgatgaaagcaagaaatttgctttgcttccattcttagagaaaaagttttcagttttttatcattaaacattatgttagctgtgggatttttagagatactttttattaagttgagaacatttcctttaatcaatattttgatataatttttttaatcaaaagaggtttcaaattttttgaaatgtttgttctatatctactgagatgattatataaaattcccatgttcttatgttaatagcgtgaattacacatcaactttgcattcctgggataaacaaatttcactttttcaggtttcattttcttgatgttgttgaatgtggcttctaaatattgtattaagaatattgcttctcartaataaaaatattattaattttcttattagtaatattcttcttaatagtaagaatattacttcttaataccatgtttttggtagtcagaaaaatggctcccccaaatatgtccacatcctaatccactttatctgtgactttgctacatcac

SEQ ID NO: 391679 - DNA, 598 bp, Homo sapiens
ttttatacaaagcattttgtagattcaggaggttcacaaagatcattaacatttttttttcctcctctgatgcaactacttctaccttttttagtttaccatcttactatttgccaatctttttagagacagagtctcgttctgtcacccaggctagaatacagcagcacaatcaaagctcacttcagcctcaaactcctgggcttaagctgttatcctgcctcagcctgtcgagtagctagaactacaaatgcacaccactacacttggctattttttttttttttttgttaagagatkgggtctcgctgtgttgcctaggtgggctggccttatactcttggcctcaaaggatcctcccactttggcctcccaaagtgctgggattactggcatgagccattacactcggctcctatttatcaatcttttgtcataacagagaaaggagctcttgaatagcttccatactaattttttaaagcttctagttttagttttgtgttttttcctcacttctgtgaattcctagtgcctcaaatttcttagtcttttggaactttgcagcataagttaggatgttataaaatgacttttc

SEQ ID NO: 391680 - DNA, 598 bp, Homo sapiens
ttttatacaaagcattttgtagattcaggaggttcacaaagatcattaacatttttttttcctcctctgatgcaactacttctaccttttttagtttaccatcttactatttgccaatctttttagagacagagtctcgttctgtcacccaggctagaatacagcagcacaatcaaagctcacttcagcctcaaactcctgggcttaagctgttatcctgcctcagcctgtcgagtagctagaactacaaatgcacaccactacacttggctattttttttttttttttgttaagagattgggtctcgctgtgttgcctaggtgggctggccttatactcttggcctcaaaggatcctcccactttggcctcccaaagtgctgggattactggcatgagccattacactcggctcctatttatcaatcttttgtcataacagagaaaggagctcttgaatagcttccatactaattttttaaagcttctagttttagttttgtgttttttcctcacttctgtgaattcctagtgcctcaaatttcttagtcttttggaactttgcagcataagttargatgttataaaatgacttttc

SEQ ID NO: 391681 - DNA, 629 bp, Homo sapiens
attgttatgccatgacaaaatgattttttctttttaaaatatttatttaaattttgtaataaaaagagaaatcaaataaatcttgatcttggtcatttcctgtggtccttcatcctgtattacattaagatgtaatgatacctgaagcatcctctttctgaaaccaccattcattatgtaattacagktctgcaaggtaccagccttaagccagcataaggcgtaaaatgagtgagcctagactctgcctgcaacatgttactgtacacctcatgaagaaccctggaagtatgtttagaagtaaaatattttaatgcaatttagtttagactatatttctttcattctgccttcctatcacacgtcccttcatgtagggtggatcaggtccatttgggattcagctaaggggaggtagagacggcaataccattggtttgtgttcagggggatataattgggtgtgtcacagtcatgttcatgtatagctcagttgttgtcatctatttcagcatatcatttcctttagcacacagcactggatatatatgagttgtaaagaaacgcattttgaaatgtacaaagcagaagcacgtcattggaaaatgtgtctcatcattggatgtgta

SEQ ID NO: 391682 - DNA, 629 bp, Homo sapiens
attgttatgccatgacaaaatgattttttctttttaaaatatttatttaaattttgtaataaaaagagaaatcaaataaatcttgatcttggtcatttcctgtggtccttcatcctgtattacattaagatgtaatgatacctgaagcatcctctttctgaaaccaccattcattatgtaattacaggtctgcaaggtaccagccttaagccagcataaggcgtaaaatgagtgagcctagactcygcctgcaacatgttactgtacacctcatgaagaaccctggaagtatgtttagaagtaaaatattttaatgcaatttagtttagactatatttctttcattctgccttcctatcacacgtcccttcatgtagggtggatcaggtccatttgggattcagctaaggggaggtagagacggcaataccattggtttgtgttcagggggatataattgggtgtgtcacagtcatgttcatgtatagctcagttgttgtcatctatttcagcatatcatttcctttagcacacagcactggatatatatgagttgtaaagaaacgcattttgaaatgtacaaagcagaagcacgtcattggaaaatgtgtctcatcattggatgtgta

SEQ ID NO: 391683 - DNA, 564 bp, Homo sapiens
agaatttttcacttttcccttctctatgctgtttaattaaactctctctcttctttcatatttcagttcaaatctcatccttgccggggatatcttcaatgctaccagatgtctccctctattacatgtcctgagaacactttattctttccttctgtagcaagagtttgtatgacgtacttattcttttgaatatttgtttcatggccatttcttttcattggatcactactcygtgtatctcactgttattagtgaaaactccttggtagaacctatgacttgctactgaccaatagaatatgacaaagatgatgagatgccacttctgtgattccattcctgtgattccatgattgcgttacatcattctcacttagcaaccgagagagggggagaaagggaaaaagagggagagacagagagagagggagggagggagggagggagagagagaaagaaagtatttgtctttctggcttttatgaagtaagcaaccatgttgaggcagtccatctgacaaggtactgcaggtggcttctagaagctgtgagcaggctccag

SEQ ID NO: 391684 - DNA, 529 bp, Homo sapiens
ctacttttgtatttctcttagctccctaaatccatttcaactctaggtaaggctaaatctttctcccactatctggatttttcagaatactcagcagggatgtatgttcagaggcagacgttccctcctctcacactttgggaactcacagttttttggctcttcatggagtttgcagcracacaccatttctttcaaagcctctgaactctttctgtttccctggtatgttcctgaagtggttctttgatatggtttggctgtgtccccaaccaaatctcatcttgaatttccatgtgttgtgggagggacccggtgggaggtaattggatcatgggggcagctctttcccgtgctgttctcgtgagagtgaataagtctcacaagatctgatggttttaaaaagaggtgttcccctgcacaagctctcttatttttggtctgtcaccatccacataagatgtgacttgcttctccttgccttctgccatgattgtgaggccttctcagccatgtgaaactgtaagtc

SEQ ID NO: 391685 - DNA, 520 bp, Homo sapiens
ttactaaacactgctgaaagaaatcagagatgacacaagcaagtagaaaaacattccatgctcatggctgggaagaatcaatattattaaaatggccatactgcccaaagcaaattacagattcaatgctatcctagtaaactaccagtgacattatattagtctgttctcacaccrctaggaagaaatacccaagactgggtaatttttaaaggaaagaggtttaattgactcacagttccacattgctggggaggccccaggaaacttacaatcatggtagaaggcaaaggagaaacaagcaccttcttcacaaggcggcaggatggaaaaatgctgagtgaagggggatgagacccttataaaaccatcatatctcatgagaaccatcagattcattatcatgagaacagcatgagggaaactgactccatgatccagttgcctccacctggtcccacccttgacatgtggggattatgggattatgggaattacaattcaagatgagagttgggtg

SEQ ID NO: 391686 - DNA, 520 bp, Homo sapiens
ttactaaacactgctgaaagaaatcagagatgacacaagcaagtagaaaaacattccatgctcatggctgggaagaatcaatattattaaaatggccatactgcccaaagcaaattacagattcaatgctatcctagtaaactaccagtgacattatattagtctgttctcacaccactaggaagaaatacccaagactgggtaatttttaaaggaaagaggtttaattgactcacagttccacrttgctggggaggccccaggaaacttacaatcatggtagaaggcaaaggagaaacaagcaccttcttcacaaggcggcaggatggaaaaatgctgagtgaagggggatgagacccttataaaaccatcatatctcatgagaaccatcagattcattatcatgagaacagcatgagggaaactgactccatgatccagttgcctccacctggtcccacccttgacatgtggggattatgggattatgggaattacaattcaagatgagagttgggtg

SEQ ID NO: 391687 - DNA, 520 bp, Homo sapiens
ttactaaacactgctgaaagaaatcagagatgacacaagcaagtagaaaaacattccatgctcatggctgggaagaatcaatattattaaaatggccatactgcccaaagcaaattacagattcaatgctatcctagtaaactaccagtgacattatattagtctgttctcacaccactaggaagaaatacccaagactgggtaatttttaaaggaaagaggtttaattgactcacagttccacattgctggggaggccccaggaaacttacaatcatggtagaaggcaaaggagaaacargcaccttcttcacaaggcggcaggatggaaaaatgctgagtgaagggggatgagacccttataaaaccatcatatctcatgagaaccatcagattcattatcatgagaacagcatgagggaaactgactccatgatccagttgcctccacctggtcccacccttgacatgtggggattatgggattatgggaattacaattcaagatgagagttgggtg

SEQ ID NO: 391688 - DNA, 626 bp, Homo sapiens
gttgatactttgaagattaaaacaaatcataataataatgctaatatcagatataataatcataattgctaccatgtactaagtgcctaccacatatgataggtcccatatcagacactttatctttaaccttcataaataaaatgtaagtagcattttttccactttaaagctaaggaaaaagaaaacaacacagataaattaaagaattggatctcagctcaggtctatttgaggccaaacttgtgctcttaagaatacaaattgacataatataacagaactaatttaatataaagtggatagctttgagatggtaaaacttgaaaaacaaggataagagttamatttgcagcatttagtcccaagaggcaagatttctgaggaacacactgaactggatttcttcttgccatttactgctggcattcacttccgtttcatttgctttaagtgttgtatttcatttcaaattgcttccactgttactaaaaatgaatttagagcacagaggaaaaaaatacagacaagttatttccagttccttagatgagattttcagggcttctgtcatttgaaagcagaatcttttcttttgctactcttagaggtaattatataactaa

SEQ ID NO: 391689 - DNA, 405 bp, Homo sapiens
tggaagcccactgtgagaatttctaaaatactgtaccctgaaaaatgagaatggctcaccgaacaggtcaagtgatttaggtatcacaagctatgacactatcttgtaatgctaattctgtcacatcccaatgcaacagactgtagttttagtagacttaactttggatttaataaggtagataaagtgggtactgttattgaaggtcagtctttctaacatctaatgctaaatattttttctaggcaaaaaaaaaaaaaarggccatcattaccttctttgatctttaaaacatctcctctgactactttgtaaccatcaatttcagaaatggtacacacgtcagagacacaatcatggccagaaaatgggcaaaacagaggatcactacaatgattatcctgc

SEQ ID NO: 391690 - DNA, 648 bp, Homo sapiens
gtgactcaagttagagtcattcaagtagaaatcctttcaatgtaccatatgttatacatacaactttatgcaaataaatttcagatcctatagagtacaaaaytgaaaattttgaatgattcttactttaaggattactttttaaaactgcctattcaggtaaagatatatcattaatttactcctctaaaacatctttctcttccccactcccacctagagttcgttgtagatcctctgtaaatgccaaatgaaaggatctgatgaatgattagactgttctgaattttaaaacattcataacccaaaagaaagttttaaaatatgaattcagaaataaaatcagtaacagctggcttgtttaactctaatatgcacaagagtggaaatactccaatcatccattactatatctcatgaaaatgcttcacacaggtttcagcaagtactcccataaatactggtcacaggactaaagctatcactggatcagtgtccagtacagtcagaaacaaagcattcagccaacagtctcaccaagagtggcagggctgggggcactcaaaggggaagtgtccaaaaagaatcacagattttcctgctgtgacacgtatacaaatttttatagatacttacacacacatatag

SEQ ID NO: 391691 - DNA, 531 bp, Homo sapiens
gacctggcattgatgtggctaccctctctgtctcagcagctagaaaccagctggggcagtggtggttccctcacctagcacagcagcctyatgccctcctccagagctggccatcgtgatggccacactgttcagtgtgccaaatacaccatgtgctggctgggagggctgccgtgggattccttcctcctagactccagctgcgtggcaacctgttccccaaagaactgctcaaagatctgctttcatctttaaccccatttgctccaagttggggttttgatgaagttccaacagaagccttgtttatttccaccccgggtatctttcttcctgatgtgctgatggatggcatgccggctggtgctgcccttactccttacctgtctgtggctgaaatattttaatatatagttggcaccctccctcatttcttgagtttctcgttttcttgttcatattagtaggtcagggaattaaatataaaggcttatttcaccctattgtccaaaattcatactaagagtctgt

SEQ ID NO: 391692 - DNA, 531 bp, Homo sapiens
gacctggcattgatgtggctaccctctctgtctcagcagctagaaaccagctggggcagtggtggttccctcacctagcacagcagcctcatgccctcctccagagctggccatcgtgatggccacactgttcagtgtgccaaatacaccatgtgctggctgggagggctgccgtgggattccttcctcctagactccagctgygtggcaacctgttccccaaagaactgctcaaagatctgctttcatctttaaccccatttgctccaagttggggttttgatgaagttccaacagaagccttgtttatttccaccccgggtatctttcttcctgatgtgctgatggatggcatgccggctggtgctgcccttactccttacctgtctgtggctgaaatattttaatatatagttggcaccctccctcatttcttgagtttctcgttttcttgttcatattagtaggtcagggaattaaatataaaggcttatttcaccctattgtccaaaattcatactaagagtctgt

SEQ ID NO: 391693 - DNA, 531 bp, Homo sapiens
gacctggcattgatgtggctaccctctctgtctcagcagctagaaaccagctggggcagtggtggttccctcacctagcacagcagcctcatgccctcctccagagctggccatcgtgatggccacactgttcagtgtgccaaatacaccatgtgctggctgggagggctgccgtgggattccttcctcctagactccagctgcgtggcaacctgttccccaaagaactgctcaaagatctgctttcatctttaaccccatttgctccaagttggggttttgatgaagttccaacagaagccttgtttatttccaccccgggtatctttcttcctkatgtgctgatggatggcatgccggctggtgctgcccttactccttacctgtctgtggctgaaatattttaatatatagttggcaccctccctcatttcttgagtttctcgttttcttgttcatattagtaggtcagggaattaaatataaaggcttatttcaccctattgtccaaaattcatactaagagtctgt

SEQ ID NO: 391694 - DNA, 531 bp, Homo sapiens
gacctggcattgatgtggctaccctctctgtctcagcagctagaaaccagctggggcagtggtggttccctcacctagcacagcagcctcatgccctcctccagagctggccatcgtgatggccacactgttcagtgtgccaaatacaccatgtgctggctgggagggctgccgtgggattccttcctcctagactccagctgcgtggcaacctgttccccaaagaactgctcaaagatctgctttcatctttaaccccatttgctccaagttggggttttgatgaagttccaacagaagccttgtttatttccaccccgggtatctttcttcctgatgtgctgatggatggcatgccggctggtgctgcccttactccttacctgtctgtggctgaaatattttaatatatagttggcaccctccctcatttcttgagtttctcgttttcttgttcatattagtaggtcagggaattaaatataaaggcttatwtcaccctattgtccaaaattcatactaagagtctgt

SEQ ID NO: 391695 - DNA, 453 bp, Homo sapiens
catctaccaggcagcatctaatagctactcactcagaacccaaaacctaacaacatcaagacaagaggagagcagtagtcttggctacctatgaccaatgaaacaaacacaagatacaaagacacagagaggtcataaacaactgaatgtgtcaagtaaacggagcatgtgacttccttttatattgaagtgtatgaaaaggaattctatttctggtcctttctgatggagagaagttactcaccctctcttagcttcagcttcctcacctatggagygtagtactgccacagccccttaagcttacgctgggcacaaaagaagaaaatgtatgggaaatgtctatcagtacatagcccttagtatggccttgataaatatttactaagttggaataagccctatggatgaagaaatgcattaagtttattttttttaattttatttttttga

SEQ ID NO: 391696 - DNA, 453 bp, Homo sapiens
catctaccaggcagcatctaatagctactcactcagaacccaaaacctaacaacatcaagacaagaggagagcagtagtcttggctacctatgaccaatgaaacaaacacaagatacaaagacacagagaggtcataaacaactgaatgtgtcaagtaaacggagcatgtgacttccttttatattgaagtgtatgaaaaggaattctatttctggtcctttctgatggagagaagttactcaccctctcttagcttcagcttcctcacctatggagcgtagtactgccacagccccttaagcttacgctgggcacaaaagaagaaaatgtatgggaartgtctatcagtacatagcccttagtatggccttgataaatatttactaagttggaataagccctatggatgaagaaatgcattaagtttattttttttaattttatttttttga

SEQ ID NO: 391697 - DNA, 453 bp, Homo sapiens
catctaccaggcagcatctaatagctactcactcagaacccaaaacctaacaacatcaagacaagaggagagcagtagtcttggctacctatgaccaatgaaacaaacacaagatacaaagacacagagaggtcataaacaactgaatgtgtcaagtaaacggagcatgtgacttccttttatattgaagtgtatgaaaaggaattctatttctggtcctttctgatggagagaagttactcaccctctcttagcttcagcttcctcacctatggagcgtagtactgccacagccccttaagcttacgctgggcacaaaagaagaaaatgtatgggaaatgtctatcagtacatrgcccttagtatggccttgataaatatttactaagttggaataagccctatggatgaagaaatgcattaagtttattttttttaattttatttttttga

SEQ ID NO: 391698 - DNA, 419 bp, Homo sapiens
gcaggcgctacttaggaggcttgaggcgggagaatcacttgaacccaggtggcagaggttgcagtgagctgagatcacaccattgcactccagcctgggcgataagagcaaaactccrtctcaaaaaaatagaaataaatacaaacatacatacataaatcaggtaattttcttcaaatctgcttagaaattaagaagaaaagtcagaaaattgcatctcaaagattgctttattccttcatctgcctctattaaccaaggaaaatttgaaagatagggagagggagagaaagtgatacaggagctagaaagaaattattaaggcagatagtgagggaaagagagtccttggcaaggtttctcttttaatgcaaaagcaacccccaaatcatttcttttctgacaaagagcagcctgaa

SEQ ID NO: 391699 - DNA, 534 bp, Homo sapiens
ggaagaacattctaggagggtggaagagcaaggccaaaacccctgaggcaggtgcaggtttggcatgttcacaggacagaaagcaggccagtgtcactgggaggcagtgattaaagggtagaggaggagggatcagatccaatagagccttgaggatgaggcaaggattttagattttcttctggagctagtaaaagtcactggagagtcttggcagagtattgacattatccggagcaaaggactagtgaacgccatacatgtkttgcagccagtcctatctcagagtattcatgtcattagtttctgttgaatatattttcaaataaaaatcaaagcacatggattgacaagtttacacgtgcttctagggtgaccaggacagaatattttagattagaactgtttggggaaaaccttgtctctaattgtgcctagctgtatgcatcctgtcatggggctggattcttggttctatatgatttatagcaagtgtttcctaagtgctattgagtagcaatttcaaggagttcc

SEQ ID NO: 391700 - DNA, 587 bp, Homo sapiens
cttatgaagatgatgggattaagagattaaagtaaagacaggcataggaaatcacaagagtattgattggggaagtgataaatgtccatgaaatcttcacaaattatgttcagagattgcagtaaagacaggcgtaagaaattataaaagtgttaatttgggtaactaataaatgtccatgaaatcttcacaatttatgttcttctgccatggcttcagccggtctgtaagatacttaaaactttccatcaaggaatttaaaatatactgaactaaaatttagaatccagtggtaaaaatggacaagtacattgtatctggtggggtggggggagaagatattggttagragatacaaaatttcgtgaagaggaataagttcaagctatctattgtatgacatgatgactatagttcttaataatgcatttttttaaaaggtgggcaagtagattacatttattagaaatgcattcagcagcaaaaaccaacaaattcagttaagaggatgatgcaataaataattttaacttctcacatataagaagtctacacatgagcagtcctgagtagatgcagtagttcaa

SEQ ID NO: 391701 - DNA, 633 bp, Homo sapiens
caatgtgttaagtgtatttgcagtgactgggacatagcaagtgctacctaagtgttagctctttttattattcttgatatgaaattttatatattcaagtttctgcttattgctcctcttagccccatccttttttgccctactcactggcctaatgtgtcagcaggttcctgtttctctttgataccatatcgcattttgtaagtactcatggacttccacatcaagctctataacctcagcacaaaaaaaaaaaaaragagagaacagtatgtctaaaatgcagtgggtaggggggaaagggtttagacagatttcaagagacaggaagcggcttgatcatgcactccaggtgttttagtatgcctattctttgctagcttttggtattttattttagcgaaatagccaaactaatgtatgtgcccacattcattacagtctcaagtgccttccaacattggttgcatattcccagatgctggctgcacctccaggtaaataggtagactgaacatcaaagagacgagaactgtctaggctgtcatgtattttaaccatatctttgtgactattggcttctgaatcaccgttataatatgattaatatttatgatgagctgctaattaaaa

SEQ ID NO: 391702 - DNA, 589 bp, Homo sapiens
cttggtagccattgttttgattatgctttgtctctaagattgtacaagattaaaaatgataaagccatgtttaatctcctgttacaattcttcatataaatgcttcaggattctgatcccacgtatttagaatttccattgaaaactctgctctgatctgagcatgattctgaytcccagcatgttgaaactttgctcaactttaatttttcagtcagaattgtgtaacctgaaccaattgagatgtcaatagtatttgctattgtttctgctgttaatcattgtccctcttcaattagggcacaaataagataaaaattttccttgcaaattgatatgatgatctgtactgcaggcttcacattcaacattgtctcatcccttcttaaaacgagttatccattggtaaactgctgatctctttggtacattgtctcaataaacttttagtagatcattaatgatttcactattctatccaaacttcaccataaatttggtttttgtctttccttaaatggaaagaattctgctaaaattcttcaattttggaagaattaatgttgctctgacaggggctcttttcaaa

SEQ ID NO: 391703 - DNA, 589 bp, Homo sapiens
cttggtagccattgttttgattatgctttgtctctaagattgtacaagattaaaaatgataaagccatgtttaatctcctgttacaattcttcatataaatgcttcaggattctgatcccacgtatttagaatttccattgaaaactctgctctgatctgagcatgattctgattcccagcatgttgaaactttgctcaactttaatttttcagtcagaattgtgtaacctgaaccaattgagatgtcaatagtatttgctattgtttctgctgttaatcattgtccctcttcaattagggcacaaataagataaaaattttccttgcaaattgatatgatgatctgyactgcaggcttcacattcaacattgtctcatcccttcttaaaacgagttatccattggtaaactgctgatctctttggtacattgtctcaataaacttttagtagatcattaatgatttcactattctatccaaacttcaccataaatttggtttttgtctttccttaaatggaaagaattctgctaaaattcttcaattttggaagaattaatgttgctctgacaggggctcttttcaaa

SEQ ID NO: 391704 - DNA, 596 bp, Homo sapiens
agttcagtgtggacaagatccagttggttatttaagggggtatgtcaaggatgcaattggatgcatgagtcttgagttctaagggagagatcctgctaaatttcagactatagaggaaaagaagagactaagaattgagcattgggctgtccattgtatagaggtgaggaagatgaggacaaataagcaaagggaacttgaaaaggaatggccaatgagaagaaaaactaagaaagtgtggcaccctggaagcctaggcaggaaagggtatcagggcagaggaaggaatcatttgtgttaagaaggaagatcaacaggaggaatattaaggattgaacattggatgtagcaatcctggtttagtttaacaggagctgatacagggagaatgggaggtggaaagcgttattagaaacaataaatatgggcaactcttttgagacctttgtttataaaggagattaaaaaaaggaatggtagctgaataacaggatatttggatttgttcagcttttgttttaatatgagaaatattatamcacatttgaatataaattagaaaaatctagtagaaagggtgaactaatgatgcagga

SEQ ID NO: 391705 - DNA, 371 bp, Homo sapiens
tgcttattgttatttttccatatccttcttcagttgaaagaaccacaaaaacactagctaaaacttattccacactctgcctttattcattttaaccatgcagaaaattattaattcccccatgacagaaaaaatcaggattactaagaaaaaagttgaaagacattaaatcatagagtttttatttgcatgttaaaascacatgccaataaacctcatttcattttaccgtgtttcttggagaattgtatagttcaccagaaaagtgaaaacacagaatcccattacagccattgaagtgaaacataaactacttcatggagggaataaaaatgaaaggaaatgtataacacacttccacggagcattag

SEQ ID NO: 391706 - DNA, 584 bp, Homo sapiens
atgacaagacaagaaatttctgttgttttaagcttaaaaaaaaataaagtaarataaattttaagaaattttaaagtgttactgattgtgtttgatatagctttctatatactccaacatcattcttatttctcctccccagaagcaaattgttgcctattactgggctctcttaggtagtttttttcaatgattctgcccttttctggatcttaatttttcacaaggagtccagttaacctaaattaaccaaatcttagggcccctacctccatgcaagcattgagagaccctaaggtggaaatgcaggctggagctttagctgggcccatcatcttgactgggaaccctatacctcttttgactttccaaattctctctgattcctatagcattgagcatttaatccagtttccaatcacttatttattacctacttgcaggtacaaaatagagaatatacttgcaggtaaaaaatagaggatatattatggtatttccttttgagactataaatccttgaaacagtattaatctctttttaaagcaagctgagggaagttcccctaaagagttcctactct

SEQ ID NO: 391707 - DNA, 648 bp, Homo sapiens
tgctgtgcttctgctgcatggagctcagctttctattgcacccatctgcattcactatggagggaatttgctttttgttttggtttggggtttatgtttctttttattttttctgtgtgtagagagtgagttgtttcatttcttcataaaaatttgtattctgtgaatcaacaatgttctagaagtaaacaagctkttaaaaagttttaactcataccacagaagaagaaatacaacattcccctgaatgagtgaaggttacccggtggctcacgcctgtaatcccagaactttgggaggccaggagggtggataactggaggtcaggagtttgagaccagcctggccaacatggtaaaaccccatctctactacttaaaatacaaaaaattggccgggcatggtggcaggcatctgtaatcccagctactcaggaggctgaggcaggagaatcacttgaacccaggaggtggaagttgcagtgagcagagatcactccatggcactccagcctggacaacaagagcgaaactccatctcaaaaaaaaagaaaaaaagtcttggatctagatctagattttttatatatatacaatatatacatataaaaatatatatgcatcaacctgtgcatatatattttgctaa

SEQ ID NO: 391708 - DNA, 648 bp, Homo sapiens
tgctgtgcttctgctgcatggagctcagctttctattgcacccatctgcattcactatggagggaatttgctttttgttttggtttggggtttatgtttctttttattttttctgtgtgtagagagtgagttgtttcatttcttcataaaaatttgtattctgtgaatcaacaatgttctagaagtaaacaagctgttaaaaagttttaactcataccacagaagaagaaatacaacattcccctgaatgagtgaaggttacccggtggctcacgcctgtaatcccagaactttgggaggccaggagggtggataactggaggtcaggagtttgagaccagcctggccaacatggtaaaaccccatctctactacttaaaatacaaaaaattggccgggcatggtggcaggcatctgtaatcccagctactcaggaggctgaggcaggagaatcacttgaacccaggaggtggaagttgcagtgagcagagatcactccatggcactccagcctggwcaacaagagcgaaactccatctcaaaaaaaaagaaaaaaagtcttggatctagatctagattttttatatatatacaatatatacatataaaaatatatatgcatcaacctgtgcatatatattttgctaa

SEQ ID NO: 391709 - DNA, 557 bp, Homo sapiens
tgaggtacttagcttaatggcctctcacagagctactagctcacaatagactacatttgaataaggaaagtgttttgatgataaatgtgatagattctcataaaattgttggaatctagaaatctagaatttagaaaatatgcattacagaagatgaggaagtatttgaatcagatataaggagcatatcatgaaggacrgagggattatttgaaccttttgtttgagtactcctagaaggggccaggcattaccctttgacctttgaccagaatctctaaatgcagaaacagggaaaagctgtctgtagtgagcaggcaccccagtggggaggtgcttggtacagatacaacctaaagaagccctgcaaaaatattgattgatagttgcttaaaactggtaaatgctattctgtgagttttcttacaactttattcattttttctgtggttaatcttttataacaacttatacctcaacccattttttcacattttaatcttaaaattataacatgttatggcaacatattcattaacagaaaaaaaggatcactg

SEQ ID NO: 391710 - DNA, 557 bp, Homo sapiens
tgaggtacttagcttaatggcctctcacagagctactagctcacaatagactacatttgaataaggaaagtgttttgatgataaatgtgatagattctcataaaattgttggaatctagaaatctagaatttagaaaatatgcattacagaagatgaggaagtatttgaatcagatataaggagcatatcatgaaggacagagggattatttgaacyttttgtttgagtactcctagaaggggccaggcattaccctttgacctttgaccagaatctctaaatgcagaaacagggaaaagctgtctgtagtgagcaggcaccccagtggggaggtgcttggtacagatacaacctaaagaagccctgcaaaaatattgattgatagttgcttaaaactggtaaatgctattctgtgagttttcttacaactttattcattttttctgtggttaatcttttataacaacttatacctcaacccattttttcacattttaatcttaaaattataacatgttatggcaacatattcattaacagaaaaaaaggatcactg

SEQ ID NO: 391711 - DNA, 557 bp, Homo sapiens
tgaggtacttagcttaatggcctctcacagagctactagctcacaatagactacatttgaataaggaaagtgttttgatgataaatgtgatagattctcataaaattgttggaatctagaaatctagaatttagaaaatatgcattacagaagatgaggaagtatttgaatcagatataaggagcatatcatgaaggacagagggattatttgaaccttttgtttgagtactcctagaaggggccaggcattaccctttgacctttgaccagaatctctaaatgcagaaacagggaaaagctgtctgtagtgagcaggcaccccagtggggaggtgcttggtacagatacaacctaaagaagccctgcaaaaatattgattgatagttgcttaaaactggtaaatgctattctgtgagttttcttacaactttattcattttttctgtggttaatcttttatarcaacttatacctcaacccattttttcacattttaatcttaaaattataacatgttatggcaacatattcattaacagaaaaaaaggatcactg

SEQ ID NO: 391712 - DNA, 392 bp, Homo sapiens
tgctgagttccaaattcccattaaatgaggaatcacattcaaactctagaaagtacattttctagaacttatgaatctgaaagattctgcacattttccctttgggctactgtayggctaatggccaattttatggaaaggaaatcaacaggcaaattggatatgttcacattatttcctcatttttctcacttgattttctattacaagtaaacactgtgcaaggagaggtagaaaactgtccaggaaggaagagtggcacactgtaatatagcactctccatcctgacttcatttctcagtaatcagttggtgggccatcaggactatgatattaatgggtgtttttttctatcaaaacggaggtctcagtaggcccccaagggttgctg

SEQ ID NO: 391713 - DNA, 582 bp, Homo sapiens
agggcaggcacagataattcccagcataagctttgcttcctattttaagagcgaccagttctgaatcttagatactgtgtcaggaggtttttccttgcagccagagacttttgccttaggagtttttggaaatgtgtcataaagctatgtagttcagggtcccactatgtgcattttatgaactgcccaaacattgttttcctgggaagtgaggcaccactctcctctcatcaaattcacccagatattagcacatgacctctagagcagaacagtgaagaatcacaagttactcatggcaggcgacttgaacacaattatttttcaactgatgtgggttttttctgtaacataaaatatacacttcaatttatttatataaatataaaactatctttttctgkaaatcttataaaaaccactttaaagtgtcgttcccatttagcaatgcagcatgattatctgggtacaatctaaacatggagagagcactgttctcagacacatcctgatgaagctcacgattggaggacgtggaattagttccctctagtggagaacttcatgttgacacagttgtta

SEQ ID NO: 391714 - DNA, 496 bp, Homo sapiens
ctcaaatttaatgataaggaaacggagacacaggcattcaagyacatttccatggtcgcagagtacattactgcagagataggattcgagcccaggtaatgtgcccccagatctcacgcttgtttctatttcctgcttcccctaatgactaaggcacccgaggatttttctttttccaccttctccatattcataattagactatattaaattttttcagtggaggaatggaagcattttaaaataaaataatctcttcagcctaacacagaccaattccactttgagaagagcgatggttgcgccttgcaccctccaggtggcgcttgtgcgccacttacagacaggagaggtttcagggtcgtcggcagggtgggctcttggttttgttcaaaggacatttgagcattgtttctctgtcctcaacaatcctacttgagacacttgttgccattgtaagatttaaaggcaaatcagataaacaaagaaagggcca

SEQ ID NO: 391715 - DNA, 563 bp, Homo sapiens
atttatatttaaatcagctgaaattcaaagaagacttctcatttcacaaggaatggcttagtcattgagatttattaatttttttagcatctttttcttaaataattatataaactaggaaaaattaacttaggaactaaaaatagaactactatcattttgttattttgttgaaagggaaacagcctcctcaccatgartgacagtcaaaacaataccaaatgacaaaaaaaaaaggagtaaaaattaatcatccttggttacaaaacaaagcagtacattttcttcctttttctgaataaaattaacataggatgtaactttaggatgttaatgctcagactttattgatgcttaaacaagattcaaactgaatcacaactgtaacatttacctatgtaagcttggcttctacactccaaattttcagactcctgtttaatatagtccccccaattcctgtattttcagaggactggaaaaaccgtcaaagcacagtaattacatatagcatccccctaaccaattcatttgcaactattcatccacgcagatgccaaaag

SEQ ID NO: 391716 - DNA, 622 bp, Homo sapiens
cctacttcctttttttaaaagtaaatcataaaagaatatattgaataaaaatctagatttttgtcatacatataaggacttgaaggacatacacaaaaaatgttcttagcagttactctaaatatgggtattatgaaatttgtaaaatctctatttttagctttagttaacatgcattatttttgaatcatgaaaacattgttaactttaaagacattaggtataaatgttaaggacttgaagtatgaaaaatagtcccaacttagaygaccattgattttgcatgtgtgatactgctgctaactcttaatcactaaccaattttctcaactttacctccctcaaatgttcatcagtgtgtactcatgtagctcccacatagctgtgtaaatagagagtgaagcaaaaatcaccatgttattattaattatgataataattcatatatgtttattatatcccagacattagggtggaagtattcacatattcttgcttatttatcttttatggtgtgagtcaattttgtgagttttattattattcccatttgcagattatgcagtctaaggtccaagttgcttaagcgaaatgcagaacaatgattgaacgcattttccaa

SEQ ID NO: 391717 - DNA, 650 bp, Homo sapiens
tggtgctgcagcaggagcttgataaagctttttattatgttcccttttgtccaacagcaatcatgaggcattaaaaaggctaaacagtttgcccacagttccaagacaaaataaaagtaaagctttcagtagagttcgttttcttgctttccacattccttttttattaaaggtatagttctcctattatttatgttgattttttttctaaattctgtcaatttttttatacgtcttaattagaattttcccataagtttatatgtttatcttgtttttgaaatgtctttctgactgtaatatataaatggttattatttaagtcagttagcatgaaaatgcttccacagctctctgcttaccacagaatccttagaaaattaactcattaaatcaaatagaccttagacacgggatgtcaaaggcttctaatctcccaggtttaggcagcgtatactgtgggaagtcaaaacagaaattaatacaccctgatgatgttctggatcctcttttatctggctttttttttcgttatttatgtatttatttatttatttatttttgacatggggtctcactctgtcacccaacctggmgtacgacagtggtgcaatcttacctcactgcagcctcgaactcctgggctcaag

SEQ ID NO: 391718 - DNA, 562 bp, Homo sapiens
tattttattttttgtagagacagggtcttgctatgttgcccaagccagtctcaaactcctggcctcaagtgatcctcctgcctcagtctcccaaagtgctgggattacagatgtsagccaacatccctggactatttttgggctttttatagtcttatagtgtctatgactgttgcttctctctcatctctcttacataagcctgctccccaatttcaaaatacatttttatacaagagaactctagctcaaactgcttctatgctgttcttcaaagttgtattaatttattctcctacactttttttcctaccagattctttaactctagaccaaaaactcacctattaaacgtttgctttcaaagcccaacttaaatgacttctacctcatgaatctgctctgaccactccagatggaagagatctcaccatctatagcacaagcatcactccattgacagagggcagacaattttgtctcttgaggctgaaaatttgactgaatggcatggtgattttaaagggcataggactagccatcccttaagcggcctctctca

SEQ ID NO: 391719 - DNA, 554 bp, Homo sapiens
aagaaaccctagccttaatatatgtttaggagcttggactttatcttatgttttggatagatcattctatttgcagtggagtaggcactaaaagggagcagtttagaggctctagtgttaatcctgtggaactgcgttggtggcctaaactaatatagtagaagggaaaatggaaagaatctgtaggaatctacaagaagtgggattaattgaatgaggcagccaaaagtaatggaaaagtcagggattgatattcgtgtttttggtttggccaacagggtgcatatggtgccctttaacgaaataaggaacacaggaggaagaccaagtgtgggctaaaaagaatgatgaattcagttttagacataccagtgttgctagtgaaagcttaaagcatgataacatayatcaactcagagaacatgaagtaagattaaaccttcttaggtctaattgttgcccaaggagaatattgactttgttgatcacctcttgcatcttaagccgtattggttgagtacaataaattgattattagttcaggcatttgcagc

SEQ ID NO: 391720 - DNA, 523 bp, Homo sapiens
aaatcacaaaagtagtaggaaaaaacaatcatacatcaatagaaaattattagcagacaataaaatataatactgtaataataatcatacatcaatagaaaattattagcacacaataaaatactgtaataataagtttaaattttttatttttactttagattcaggggstacctgtgcaggtttgttacaagggtatattgtgtgatgctgccgtttgggcttcttctgacggcatgacacccagagagtgaacatagtacccaataggaagattttcagcccttctccctttccctccctccctttttttggagtcccagttactattgttttcatctttatgtctatgtgtatccagaatttagctctcacttataagtgagaacatgcaatatttggttttctgttcctgtgttaatttgcttagaataatggcctccagctgcatccatgttgctgcaaaggacatgattttgttcttttttatgacttcatggtgttccatggtgtatgtgtacca

SEQ ID NO: 391721 - DNA, 582 bp, Homo sapiens
ctaggcctttgtaggtgtatcctcccctggcttctgctacaattttcctaattttgattcatttctagrtgcccatttactgtccttgtacttcactctatgtctgtgtttgctcatggtagcttcactagcctttgctaccagcttataatctttttcttcactatgttcctgtgatatcatttttatttatttttgtttccagttatatgcctccgccatattctgaatttaagtgttctttcccagccaaccaaataacctgaaattccaaatagcccagattcttctctttcactcccaaatagtctcaatcaatgacctgtgatgcaaatcatctttatgctgacagcagacaagagctttctcctttgtcaagatgcattaggaaagaatgacatcagcaggtcttatgttttagtgttattgacctttagagtagataaaactaatgctaaacagttagtagccctacttaagcaaattggattgctttgagaccaaatccatgttagactgtaaatatgcaacctcattcatgaaaacacatctatcctaatgtagtgaggtgggcgagtcttg

SEQ ID NO: 391722 - DNA, 590 bp, Homo sapiens
gcagcaaggagcatgcactttcaaggtcagtgtgagttgaacatagtgatcctaatggaagaagggcaggagagtgatgagaaggggctagattacatggggtatggttgatcatgttaaggttttggactttagtccaaaacaattttttgatttgtggtgatatgtcctatttctgcagaagtgcagcaaaattatytaagcttcccagagagggtaaagaaaacatttgtagaaggtgtaatgtatgcattcagatttaaaggaaaaatagggcgtttccaggcaggcagatgaagcaagagcacaccagtccgagaaaaaaaaaaaaaacacatgtcttgagatactgccattagaattgttcccagttcataagcagagaggaaaagatgagatagctctggtaggcagggaccaactcatacatgccattcaagggtgcctggattctatcctgtaggtgatgagaaaccgctgaggttatctgagctagtgaatgacatcaccaggttcaagtattagtggagtccttctgcagcaatgtggaagacaggctacagacaggatggccagtgcaatgggcatcc

SEQ ID NO: 391723 - DNA, 592 bp, Homo sapiens
ttctgttctcaacatgatccctgggactgttgtgatatcctcttggttcctatccccaccccagttttctcctcttagaccacctcttaaccattctaatataaatgtaaatctaaccatgtcacctgcaagtaagatgcaagtgaatgtctagtcccatttcctgctattccccactaagcactcaccaccctatcacatcaaatgacttgaatttctccaaatgtatcatgttctctctagttccctttacctgaaatgccctttatccataatattttaaaattaagatagcatttaaaaatcagaagattgyacatttttaaaaacctgaatgttgaccttctcttggaaaaaaactgatctagcagcatagagcctgcttccccatacagcaaaaattgggcagagctttggggcagcaggcccaagccctactctacttacatacttgtctagccaccaaaggtatttaaatttacaatccctgacccagagaaatgcaaaagctcacaaaatcatttgttaatgcatcacagagcgtccagcatatggagcgacaggaacactatgccataaatgaatagtgctg

SEQ ID NO: 391724 - DNA, 630 bp, Homo sapiens
tacttataactgatgctttcatggaagtactgtctttcattaaattttggtcagttggtttaccagtgatctacttccctgatgcattcaagaggacttgtaaatttgcaggttgtctagcattttttcataggtgtagaaatgttctttcaattttatcaacattcaaggtagaagttacacaatactgatattttaaaatcacaggctctagtatacagcatgtcttaagacagtctctcaataaaggcttatttaatgaattatttgtggtattttatatattatagatgattaaatctttggagtagtattcaaattacatttatggatttagagggctatgccatgraagactcctacagtagttataaaaattaatcagtatgtttaggggaaaatccagcaacagaaacacagttactgtggtttgactattttattaatgatgagtgtttaggaatatttagcaggactgatggtgaagcaaaatggtgttttcaattctggaggtttggctgatgaactgcttcctagaggtatgctacaagaaacaaatgtgttctgaatgtaaaatgacacactaatccctggatgggagtattaaaaaagttcgttggaaactacttt

SEQ ID NO: 391725 - DNA, 621 bp, Homo sapiens
  misc_feature (1)...(621): n = A,T,C or G
atcacctgatcaccatctctaaagctactattctcttatgaaacctgagtttccctcatcaattcttacttagttctaaaaatttcyaacttcactttgttttctctgtagcctaaacttcttaacaaattgcttcaaatgtactctcaaccccaaccttaattcctttanctttatcatccttccacagcatgtcttgttaaaactcttcacacggtgaatctaaacatctgctttctccattcctaccctcaagcccctgaaacatgttggaaaaaattacataactggtctgactagtgccaaagaatagtcgtcgtttcaaattccaaactcatgggaacttcaacagtgctcaacagtggtattatttacctcaacttagtcttctttcagtgaagtggttgctgtgaagtgccttatcttcattctgtctaaattaattgcctacattccaatagatagtttacttcataatgcatatggaaaataaaaccacttaagtgtggcttctcttaatacctccatcatgccctgggtcaccttcctgaatgtttaattcccaatttcccccaagttgctgtattttatacagaattttaatgtacttattttatttct

SEQ ID NO: 391726 - DNA, 564 bp, Homo sapiens
aaatatttatggtccaccattttatgccacttgcatcctaaaactttgcctaccacaatcttttgcatgmtgtttgtaagacacgagacttatgaatcaaggattaaaaatgttataagtcacagatcagtcagcttcatgagcattagcatctgtgttgccttccctagatcccaagtcccgaggaaacaacacaatatgggcccacatgtactgcacttgcagtaagttagcttaaaagaaaggaactccgaatgtcctgtactgggcaatgagcatgactgcccctcttttcaggaagaatatattatctttacaatactatatagtcagcatgactggacttggttctagagagagacactaatcttgtaagaatgtatgctgtaaaaacattcataaaaagattgtccactgctaaggatatcaagttacttgcttgaaagctatacaaacacaagaaatccaaagagattcctaccttgatttaataactttttggcttatgcatcttttacatgagtataccactctaccatctactctaattaatctaacttagaa

SEQ ID NO: 391727 - DNA, 545 bp, Homo sapiens
atcagtattaaacttgaatcctatcatttctctgttgtatatttaaaattgatgtgagaaaataaacttaattttcttctttttgagggattatgctaagtagaatggagctttgaagtaataatctaggatcctttgccgaatttgctgaattggtagcatgttgttaggtttcaccaaaaacaaactgcgttggaagctgcatgacccacagatggtaacctcccctctcatgaatctggggttctgaaccaatgtgagaattctgccacaattttgtaatgaatattacagttttatttatctaagatttccagatattgataattcaatttaacttccatagctgtaaaataaaaaactaaaataatcacatccagttgttgtcatttaatgtatttctccatttctgagtttggatgctcagtttgctttgtctctactaattggtaagatytgacttcaagaggtttcttgaacatcttgttagtcctctaggtcaaaaaactacccatttccttcatgcagctttaaatagtggtaac

SEQ ID NO: 391728 - DNA, 569 bp, Homo sapiens
tgtgattctttgcttaactataatgatatacatataataatttatcattgcttttcatttcagtgactgctttgtattaaacaaaattttaagaataaaattcagaagaacaataaacaaaatatttgcytaaggtgcttaatttaatttgccaatatttatgagacagccatgctgaattacctttgtttgacactttcacattcacatttatatgtcaccagagtgattcatgttttcttttcctcaaagaactctacttacccgtttgattcctttcttcattaattacaaaagtgtttattgaacactatgaaaatataaaattctcaaaattattatttcctaacttaatttgaagataactttgtaacttttaatacaaaaggccaatcttcctgtcctgcctatcactagcatctgttccttcatttcgctaataatattactgatccaataactctccaaatattagtgattggatgatgaaatggatatgatatatttttcaaatttatgattgtcttattttaccagagaaactgatataccatttgtgtttctacagc

SEQ ID NO: 391729 - DNA, 553 bp, Homo sapiens
cttgtgcagttgtacagggctccatgttctgaagtcttgctctggatttagtgcttaccagcagtcatacaatacttccttcatctatttactcccctagtctcttacacaattatttcataatattccctttctctttgaaactccaactccctgtcatggaatgactatttttctagttcacttcaaaaaatagaaccatttgtaacattactgccacaagctcccaacatctrtgttatctagctacccttatctatggccatatactataatttttctattattgctataaattaatttacaatttctctagcaaaaaccaacccatctatttacatactaggcatcatcttttaattaattcagacatggatccataaattcctttctttctctctcttgaatcatattttcactttttcttgatgtttcctaatgaaacatacatgttatgcttaatcccatgtttaaatacaaaaaccccagtcataaattcataaccctctcaagttatcatcccatttctctacttttaggtacagtgaataca

SEQ ID NO: 391730 - DNA, 476 bp, Homo sapiens
gttttatacatgttacatttggtatataccacttagacatccatttagatgttgagtagacatttgtgaatataattctggcacttgggagagaacacattaaaatattaaagtgtaaatcttcagcaaatatgggatatttaaaacatgagtgagaataagataatctaggatgtgagggaatattgacaggagtctaagatcaaagttcaaaactgtgagaacacttataagtaagcaaaaaaaaaaaaaaaaaaaaaaggagaacttgtggcagagatcaagaaggagtacccagtgagatagaggaaaaatcaggaatatatagtgtccctgcatttgaagtgaagarcccatttaaagaggaaaggtaatcaaccatgcaaaatgcttccaagaaattaaatgaaatgaagacaatgaacgagtcattaaaactggcaagatgaaattcattgagatggtgtggtacagag

SEQ ID NO: 391731 - DNA, 454 bp, Homo sapiens
gattataatgctttgtcccatgttaggaatagtagatggatgatgattgtcatggaataaaagactttttatattttttataaatggatttttaaacagcaaaaagaatgatgtatccacattatgaatatcaaaatagatacacttaaaattggaggctagtaaaaattctcctcttacaaaaattgtttttggtcaactcatttcagtaagtagacatatctttaatgttctcattgtggataattttattgtaaatttttctttactttcctaataataaatttgtattatcaatgctaagagatatttaatttttaacttgggaaagagattttatgacatatattcatgagtttttaggaatagtagaaaataaacagttccttgkgatttattggacttcaacaaaaatatagcatataagataagatgtttctggtcaccagtaaca

SEQ ID NO: 391732 - DNA, 589 bp, Homo sapiens
cttagaaaatggcacataaaccacggtataaaatggagatgtatcatgattaaacactctcactatatgagataataactcaatattttacttagagatcctgtctactctgaaccaagcacatgtctctgatgtagagaggatctgagagctaccctcagcatctctgatctcttgtgctttgtctgagcctctttattacctgacctgcatacttgaaattagaagtaaaactcaatagtggttactgtctccgattcttcagaacctgattagacaatttgctttatctcaccctcctgggaaaaaaaaaagaaaagaaagaaacctgtggctgctytcatccttgcttgagcagaaggagaagcaagaagctaccattgacatgggtaaaacacaatagtttatttaacaacttttaataaacttttaaggctgatggttcagcatccctaagcttctcaaaaacagagtctacacccacctcccagcttttatccataggccttccccatgtgcttacaagaagactggggacagaccacagtttctgagataaaatcccctgagacccaggcataatggaccc

SEQ ID NO: 391733 - DNA, 594 bp, Homo sapiens
ccattacactctgaatgttgatgtagaacaccaagtgctgttgtaactcacacatattgttactgagctgttgcttcatctggcacacatggatcctacagcaactcaatctcccattggatctgctctcttaacttctcttgagtcctgagcaatgcacatatgcacgtctatggtgaagggtgaccattccttctgtaggtcactcgtttcatgaaaagaattaaaaggcttttttcttcrcctccttctctgcctcttttcttaaatttagtatttttagtattccattttacctctggatttactttttagttatgcttctttatgttaattaaaaggaattaaagattcatgttctggtctatcctgatggagtccactttttccttacaaatttcaatttgtaatttcctttctctgcttcaatctaatttttatttcttactaccagctccactaatccatatcaagtttagagctagcaccaggaagagaggaaacaacagttcataggtttcttcaccagctcttaaaattgcataaagtctcaaaactgctctaaaaaataaggtctgttttataattgcataa

SEQ ID NO: 391734 - DNA, 581 bp, Homo sapiens
aaaactagttgcctacctccatttgcaataacctgactttcatgggtctggacattcccctyatttgagtcattctcctgtgttagacaacaaagttgagtgcacggtttgtaggagaccatagttaataacattggtgtgatctgggggcaggaatgaaggacctacctgcatctcttattagcctttctgtcagggaaagacctcagcaaaattttgatgtagacaaaggctttccaatctttccttccttttcagctcttcttgtttcagacaccgtatgccctcagcctctcccctctcctttcgttttctcccagaaactagcttctgaatcttatactaaaatggaacaaactggctaatagcctaaaataagccaaaatgtttgtatattactaaaatcttaaacttggtgaaatcttttgtttgggccagcagtgagttaaaatgttacaggacctcacccttaatgctgaaactgcccccttctagcaaacagttgtcacattgaaagacaggacaggaaagcatcgagggagaccccaacctgccaaggacaaacctggatagctggggaa

SEQ ID NO: 391735 - DNA, 557 bp, Homo sapiens
gctttcttttttccctggagaataggtttagtttatgatcccaactcctacttctctgtagataatgcttgcctctatttctccagcccccaattttcacctgcgttcaaacactatttttagctgccttcttagatgccttcattattatgaactcattcagaaatcattgtgtccaagcctgaatttatcttcctttaaaacctccctaagtttctcccagttttatctgtgtaatactgaaatagtttaagtccctaaaaacattcattacctcatcctatacaatttccttgaaatagttctttacttactttgttttatcttccttcccctttttactgtcacctttaaaacctcacattctcaagtaataacctyttaccttatcttcctactgctagatagagactctccaaacattatttctactatgaaaccatttattgctttccatagcctaaaggggagaccatggatcctgagtggcctacagagaggtaggctcgataagaaggagatggagcgtgttataaaggcgtctgtcaccacacaca

SEQ ID NO: 391736 - DNA, 548 bp, Homo sapiens
aaaaactcactgttttttttttaaattgtattttatttttacattaacagataaaatcccaactttttwattttatttatttatttatttatttattttagatgtggtctgtctctgttgcccaggctggcctcgaactcctgggcttaaacaatcctgcctttctcctgagtagcagggactacaggtgtggccatggccatgtttttattaataactacaccattgatcttaatgagacagatgagacagactcattaaaagaaacccaactgtaaagtctctgtggaattgcccagagattatgtaacctgatagactagcactcttcctgccaggtagtgatattaccataacctattctcgtagatatgttttcaggttttcttactgtaagagtcatgtttatactatatgatgtggtccactgtgattggagcagaggtgataacttgattggcctggatcaatcagatactcttctataattagggaattggaactaaaaccttctagtttagtctagttacattttatggtagtcagaa

SEQ ID NO: 391737 - DNA, 533 bp, Homo sapiens
cataccaatatcacactgtcttagttactgtcatttataatgtctatatgtaatttataaagctgtcttggttattttagatcttttgcattttctatttgaattttaaaattagctggcaattcacatataaaagcctgtgagratttttattgggattgcattaaatctttagatcaatttggggagaaatgaccttatagcaacattgattcttctgacatatgaacattgtatatctctccattgttgagtttttcccagtaatattttttagatttcagtaaacagatcttgctcaccttttatcaaatacagcggtattttcatacttttcaagctattttaaatgatttttttcaatttctcatgttcattgttagtatgtacaaatacaactgatgtttgcatactaatgtatcctgccatctggctaactcagttcttatagctttttgtagattccattggattctctgcatggaagattatattgtctatgaataaagatggtttcctttcttcctttccaa

SEQ ID NO: 391738 - DNA, 533 bp, Homo sapiens
cataccaatatcacactgtcttagttactgtcatttataatgtctatatgtaatttataaagctgtcttggttattttagatcttttgcattttctatttgaattttaaaattagctggcaattcacatataaaagcctgtgaggatttttattgggattgcattaaatctttagatcaatttggggagaaatgaccttatagcaacattgattcttctgacatatgaacattgtatatctctccattgttgagtttttcccagtaatattttttagatttcagtaaacagatcttgctcaccttttatcaaatacagcggtattttcatacttttsaagctattttaaatgatttttttcaatttctcatgttcattgttagtatgtacaaatacaactgatgtttgcatactaatgtatcctgccatctggctaactcagttcttatagctttttgtagattccattggattctctgcatggaagattatattgtctatgaataaagatggtttcctttcttcctttccaa

SEQ ID NO: 391739 - DNA, 443 bp, Homo sapiens
  misc_feature (1)...(443): n = A,T,C or G
tgactaccctaaatcccaccaaggagacaaatccaaaaaacaattaaaatacaataacatagtacattgtgaatcatgcagtgatagaggcaggtctaagtgttatgaaaacactctaagtagggcaatcatttaactcatcattaaaccagaatgctttgaaagtagaaggnggcattatcaataattatactgtgtcaatgggcataaactgggaytgttcctggacaaaccaggatgaatatcatcctagttgtaaggaaaaaaactggggagaggccaggcatggtagctaatgcctgtaatcccagcactttagaaggccagggttgggggactgcttgagcccaggagtttgagactagcctgggcaacacggtgagaccctgtctctattatttaaaagaaataatgtttttctaaagtgggaagaaaaggataaa

SEQ ID NO: 391740 - DNA, 477 bp, Homo sapiens
cagttttccctagattttcttctagtatttttacagtttcaagtcttacagttaagtctttaatcttgaatcgcttttgtgtattgtgagaaataggcatccagtttcattcttctgtctgtggcaatcagattttccccatgccatttactgaaaagggtgcaagagggatactttaaaaacataaaagtttcagtccatagacatatataacaaatataattcatatacccttagtaacatagcatcaaaatatataaggcaaaaaaatgaccraactaaaagagaaaatggacaaatccaccatcttagtagaatcttagcaatatcttactaaagatattgaagatctgaacagcacaacaaataatttgatttaactgacacacagaggacacctaagaacttcagaatacacattcttttcaagtataaacagatatttacaaaaattgaaagccataagcaagtcttaca

SEQ ID NO: 391741 - DNA, 629 bp, Homo sapiens
acagcttaactaatatttgttgttttttgaatttttattaatagccattctgactggtgtgagatggtatctcactgtggttttaatttgcatttctctaatgattagtgatgctgagcattttttcatgtttgctggccatatgtatgtcttggtttgagaagtatctgtttatgttctttccccattttttcttaatttttagttctagggtacatgtgcaggatgtgcaggtttgttacataggtaaacatgtaccatagtggtttactgtacctgttaacccatcacctaggtgtaaagcccagcatgcattagctattttttctaatactgtccctcccccacccaacccccaacaggccacagtgtatgttgttcccctccctgggtccatgtgatcttattgttcagctcccacttataagtgagaacatggagaacatgcagtgtttggttttctgttcctgtgttagtttgccrgggataatggcttccagcttcatccatgtccctgcaaaggacatgaactcattcctttttatggctgtatagtgttccatggtatatatatgcaccacattttctttatccactctatcagtgatgggcatttgagttgagcccgt

SEQ ID NO: 391742 - DNA, 595 bp, Homo sapiens
tttgcttcttaatattaaacagggtagaaggaaatgggtggaagtacagtttttaaaaatattggttatgaagtaataattataaaatctagttaatgagtctattctgctcattatgcctttctgtctccttttgtatttgtttaaaattttccaataaaaggagkttaaaatattgaaagaatttacaatgaaagtttggagatgaaaaagaaacttgagatagacacaggccacacataatgtaattggttacaaaaccaaatgccagttaaaaagtttaaggtattgatacagcagatactgcctgattcaactcagcctgttcacctgtgattactaaagaatcattctgtgacccagtcttgaatttgcattgcagtctattctaggattcctttttatttcaatttgaaatgtatgattgatatctgatttgatgttttaattttaaaagtataaaatcatttgatttgtttctgaatgcatttgaaagttgagaacctgatttccttgagttatgaatctttttatcagatatacaacagttgcttaagaactcagaaagatgataccatgagagacatttgaagtg

SEQ ID NO: 391743 - DNA, 384 bp, Homo sapiens
cacacataatgtaattggttacaaaaccaaatgccagttaaaaagtttaaggtattratacagcagatactgcctgattcaactcagcctgttcacctgtgattactaaagaatcattctgtgacccagtcttgaatttgcattgcagtctattctaggattcctttttatttcaatttgaaatgtatgattgatatctgatttgatgttttaattttaaaagtataaaatcatttgatttgtttctgaatgcatttgaaagttgagaacctgatttccttgagttatgaatctttttatcagatatacaacagttgcttaagaactcagaaagatgataccatgagagacatttgaagtgtttgagaaaatcaaggtacttat

SEQ ID NO: 391744 - DNA, 563 bp, Homo sapiens
gtgttcttctttttcacaccttcttggtcttccacagaatggctacaccgttgtttatttaagcattctccttattgatggacatttaacttatttccagtttttcagttttacaaacagagctgcactgaacgttcttgtgcaaattttcaaacatctctttaggtatttttccaaagrgcatgtgtttccaagaactgaacagtcttgtgcaagtttgcaaacatctttttagaaaatgcacaaaagtggaaaacttgtttcaaaagttatgagcacattatactttgatagataatgtcaaattgctccatgaataggctgcagcagatcatgtcccagacaaagcataaagggtatctgtttccaaaattatcagtttacttaatttttgccactctgatagttaaaaacttaactcctgttttaattttcatttccctgatactagtgatgtcaagtgtattttcatgtattcatttcttgaaaaaggtagtcagtaagagcaaagcttctggagtaatagtgtttggttgcagactccaactgccacttggcgactt

SEQ ID NO: 391745 - DNA, 543 bp, Homo sapiens
acatcacacactggggcctgttgtggtgtgggaggagggggaaggatagcattaggagatatacctaatgtaaatgacgagttaatgggtgcagcacaccaacatggcacatgtatacatatgtaacaaagctgcacattgtgcacatgtaccctaaaacttaaagtataataaaaaaaaataagtggaagaaatgtttgtttcttttgggccaaggcaaactgggaggggacatattctagatggcgcaagcacaagatggtgggactctgtcagcctgggttcctgggacactatgtgcaagatagtgttctactgaccagggctggatgaggaacttgagtaagaaamgaacttttcaagatttgagaattaatgtgttctccacccaacccaccttctcttaactaatatagcagttaaacaacacataccaagggttaggtaacttgtaaatgtattaaactaatcaaatctgaatttccttctcctcctccagtggtattttgtgttggagaggacacctggttccttgttaaatgg

SEQ ID NO: 391746 - DNA, 527 bp, Homo sapiens
ttccaaagggcatgtgtttccaagaactgaacagtcttgtgcaagtttgcaaacatctttttagaaaatgcacaaaagtggaaaacttgtttcaaaagttatgagcacattatactttgatagataatgtcaaattgctccatgaataggctgcagcagatcatgtcccagacaaagcataaagggtatctgtttccaaaattatcagtttacttaatttttgccactctgatagttaaaaacttaactcctgttttaattttcatttccctgatactagtgatgtcaagtgtattttcatgtattcatttcttgaaaaaggtagtcagtaagagcaaagcttctggagtaatagtgtttggttgcagactscaactgccacttggcgacttccgtcaaaacaattactggtgggcaggttacttaacctctctgtgcctcaagggatgttatgaagactttatgagataacaattgcaaagttcttagaaaggtttctggtttatattaagtgctcactaaatgtt

SEQ ID NO: 391747 - DNA, 553 bp, Homo sapiens
actttctacagtgatgattcatcttcatgctgccttctagcccactcaggtgatccaaatgacttttctgatggggctttcccagcaggcacaaaatgagtagctgggcacattcagggtcccaggtattttatattaaatagaacagaagggtgatttagcttcctttttggtaaagtaaataaatatgaattaaaaattttggtaaagtggtaaatatgaataaaaaattcatattttaaatgtgaactttaaatcacaaaatataaatgtcccttttagctctgtagttttggtttgttttatcttaatttctggtgatattttatcagcattggattggaatactacagcttttagttcttcacactattgagcatttaatgatctgtgaagaaacccttgagaaattaacctttatctgaacaattcttttgtaatccttaatatggtgagttatttcatcttctaatttatctgttyacaattaatatctcaaaatactactattaagtgttttgtttaataatgtaaaagggaaagacttgctgtg

SEQ ID NO: 391748 - DNA, 606 bp, Homo sapiens
accaaaacagtgaaaaattgatattgtagttcattctgttctaatgaagatagtgttggtcatgctatttcaagttcttaaaagaaaactaggatcagttaggtatagaacataaatactatagttccataggacaataaaaaagaacaaggaaaggacaacatcatccctgatatcaatggagctgtaaaagatggaaagtggataaagatgcagtaactaacttagtgtatgctaaaggtatttagattgcatcttcctctagtgagttgagcaaagagacacagaggtagcagacataaaaaatagaagtgtaaagctcrgggatgaatgaaagagttggtttaaagtatatagactatttaaatgccatattcttttatcaaactgaagaatctaggcaattacctcctcttcatctcacagagttgaggaatttttgctgaaaattttaacctgagagatctagacttataacacagaagataagaagatcaagagctaacaaaaatatgcatagtaaacagtgggggtaaccagctcccatttcacctttatgccaagagccaggtctcacctctcagaccaaagagttgataattcttc

SEQ ID NO: 391749 - DNA, 560 bp, Homo sapiens
tctgatgttaggtatctcacagacgttttatattcctttttagactttagcatactgccacatattttcctatctgaattatcattgtttcactttgaacttttagtcatatattgagtcattaattcaacatagtattggaaattcaggccagggcaatcaggcaagagaaagaaataaagtgtagtcaaatgggaggagaggaagtcaagttgtctttctttgcagatgacatgatccaatatctggaaaaccccatcgtctcagcccaaaatactccactctaggagctgtaaccctgatctttatatcaactccaacagttctatgcccagccccagaaccagactrgagagtaaaatggaagacctacactgtaggtgcgtgtggtggattggtcatcgttcagactaaagacctaggaagcaaaaggacactccaattggaatttggaatatatttttccatggaaacagtgatgcagatagaaggctctactgcaaaggttttaatatagttcagttattgtcttcattatgaggtttccagatgcaaatcac

SEQ ID NO: 391750 - DNA, 560 bp, Homo sapiens
tctgatgttaggtatctcacagacgttttatattcctttttagactttagcatactgccacatattttcctatctgaattatcattgtttcactttgaacttttagtcatatattgagtcattaattcaacatagtattggaaattcaggccagggcaatcaggcaagagaaagaaataaagtgtagtcaaatgggaggagaggaagtcaagttgtctttctttgcagatgacatgatccaatatctggaaaaccccatcgtctcagcccaaaatactccactctaggagctgtaaccctgatctttatatcaactccaacagttctatgcccagccccagaaccagactagagagtaaaatggaagwcctacactgtaggtgcgtgtggtggattggtcatcgttcagactaaagacctaggaagcaaaaggacactccaattggaatttggaatatatttttccatggaaacagtgatgcagatagaaggctctactgcaaaggttttaatatagttcagttattgtcttcattatgaggtttccagatgcaaatcac

SEQ ID NO: 391751 - DNA, 560 bp, Homo sapiens
tctgatgttaggtatctcacagacgttttatattcctttttagactttagcatactgccacatattttcctatctgaattatcattgtttcactttgaacttttagtcatatattgagtcattaattcaacatagtattggaaattcaggccagggcaatcaggcaagagaaagaaataaagtgtagtcaaatgggaggagaggaagtcaagttgtctttctttgcagatgacatgatccaatatctggaaaaccccatcgtctcagcccaaaatactccactctaggagctgtaaccctgatctttatatcaactccaacagttctatgcccagccccagaaccagactagagagtaaaatggaagacctacactgtaggtgcgtgtggtggattggtcatcgttcagactaaagacctaggaagcaaaaggacactccaattggaatttggaatatatttttccatggaaacagtgatgcagatagaaggctctactgcaaaggttttaatatagttcagttattgtyttcattatgaggtttccagatgcaaatcac

SEQ ID NO: 391752 - DNA, 592 bp, Homo sapiens
  misc_feature (1)...(592): n = A,T,C or G
ctgggtaaagttctgagttaaataaagcataatctctcctcaactcaactggtagttgtattcttggaacactcaattttattanaatgatgctagggctgtgaatggtggcctgcatctgtaattccagcactttgggaggctgaggtgggagattgcttaagcccaggagatcaaggctgcagtgwgccatgatcttgccactgcactccagcctgggcatgagatcttgtctctaaaaacaaaaagagaggaaaaaaaaccatgctaaaaacaatttatgcttatatgtaaaacagatagggcattaaacattgtgagagataggacaataatttttcattgtcaagggttgacctatgctctgtaatatgtttaacatccctggctctctcacgcatatttttaaaaattaacattattttaattgacaaatgataattttatacatttatggggtacaatgtgatgttttgatataggtatacaatgtggaatgattaaaacaggctaattaacatatcaattacctcacttaccattttttgttgggagatattctaaatttattctcttagctactttgaaatta

SEQ ID NO: 391753 - DNA, 592 bp, Homo sapiens
  misc_feature (1)...(592): n = A,T,C or G
ctgggtaaagttctgagttaaataaagcataatctctcctcaactcaactggtagttgtattcttggaacactcaattttattanaatgatgctagggctgtgaatggtggcctgcatctgtaattccagcactttgggaggctgaggtgggagattgcttaagcccaggagatcaaggctgcagtgtgccatgatcttgccactgcactccagcctgggcatgagatcttgtctctaaaaacaaaaagagaggaaaaaaaaccatgctaaaaacaatttatgcttatatgtaaaacagatagggcattaaacattgtgagagataggacaataatttttcattgtcaagggttgacctatgctctgtaatatgtttaacatccctggctctctcmcgcatatttttaaaaattaacattattttaattgacaaatgataattttatacatttatggggtacaatgtgatgttttgatataggtatacaatgtggaatgattaaaacaggctaattaacatatcaattacctcacttaccattttttgttgggagatattctaaatttattctcttagctactttgaaatta

SEQ ID NO: 391754 - DNA, 587 bp, Homo sapiens
cctatagttcaaattagtcataaacaagagctacagcaagactgatagagtaaaaactatataaatacagtaaaaaaaaaatagaatttatggtgtgaaatatgaagtatagcaatatataacaagaacatgtaagcacttgcttccacagcataaatgtaatttacatctgcattaaaggataattttctctgtgaataagagcaaaatggtcttcagagaaacagactgttcatttgaagccatttctgtaaacatcttccaagatagaactgtaatggattgaggaaataacacagaaaagacaaaaacttttgatttcaggcatgcaaagtgcktgggcagatggacagttcccattgtgcattgcctttgataaatttggccttaatttatataacgatgctgtgttcacatccctctcctacctaaagttgtctttattggtttatattgtgttaaaattagcttataattattacttttgtattgtgttcagttttttaagttgcatgtttatactatttgctacagtatttttaagtttggggtgaaggccatcagctgtatcaaaaagacaaaacaat

SEQ ID NO: 391755 - DNA, 587 bp, Homo sapiens
cctatagttcaaattagtcataaacaagagctacagcaagactgatagagtaaaaactatataaatacagtaaaaaaaaaatagaatttatggtgtgaaatatgaagtatagcaatatataacaagaacatgtaagcacttgcttccacagcataaatgtaatttacatctgcattaaaggataattttctctgtgaataagagcaaaatggtcttcagagaaacagactgttcatttgaagccatttctgtaaacatcttccaagatagaactgtaatggattgaggaaataacacagaaaagacaaaaacttttgatttcaggcatgcaaagtgcttgggcagatggacagttcccattgtgcattgcctttgataaattkggccttaatttatataacgatgctgtgttcacatccctctcctacctaaagttgtctttattggtttatattgtgttaaaattagcttataattattacttttgtattgtgttcagttttttaagttgcatgtttatactatttgctacagtatttttaagtttggggtgaaggccatcagctgtatcaaaaagacaaaacaat

SEQ ID NO: 391756 - DNA, 559 bp, Homo sapiens
agttcccattgtgcattgcctttgataaatttggccttaatttatataacgatgctgtgttcacatccctctcctacctaaagttgtctttattggtttatattgtgttaaaattagcttataattattacttttgtattgtgttcagttttttaagttgcatgtttatactatttgctacagtatttttaagtttggggtgaaggccatcagctgtatcaaaaagacaaaacaatcactatttattcagtattgctgctttacatctccagaataagctttcgatgccaggacagtgactgcctgaaagctgcaggagctcttttcaatgcattttatatatttttagaaaccaaataaatgcagaaaactatttmgtatactaattatattaaaccagcagaaatataaaggcaataaagtatatacatatatatggggggaggggaaagattaaaaaatagatttacagccagacatggtgatagccctaaatgtatttctcaatatgtttttctttattgaccctaggaggatttgagttgctgcagctttaaac

SEQ ID NO: 391757 - DNA, 571 bp, Homo sapiens
gccctgcagaactttcattgaaaacaagcacaattacatggaatgaatttgtttctgcttcttgtagcccctctacctgggcttataaaccatgagaaagaaggaagatttacactgtcacagaaaatacttaaaaaccaaggcttttgaataaaatgagtttttattttctcctgaataaaacattatttggatcatggggggaaaaaaacctactaagaattattttatcactaagtgtaattaatacaagtcactataatgtttatcaattatataytagaaaacaaatgaactgaaatcaactttgagacaatttagacatacggtatcataatcaaaatcccaagagaaagatactttatctttttgccacattttatttcaaaatttatttttacaaaaaataaattagttgccctaaactctttttaaataaagtgatgcacaaataagcaaaccagcaaagactgtaataaaaacaaaactgacgatttggtggtcatttactggcagactaaacaagttaagaataaatatctctgaggaagcaagccaattaaatgttggt

SEQ ID NO: 391758 - DNA, 548 bp, Homo sapiens
aagaaaaataaatagtgatagtgcttgagtccttgacaataaaagtggaccaaatatgcaagaaaaagttcaaatgcatgagagaaaagcaaaacatgctcaaattaacttctccccaattaaacataaactaatagataatatcagatatgacatttaaaacattttawaaagcaaaacaacatagacattgaactaaaataatagatacaggccagtctatccatcaggagaatatccactctttatcagttctggatacaagattcttctcaatagatgccaatttatatttaattattcagaaatgcttggaataacttcagagactattctttgaaaaataaaattattaacattcagtgtcttcttgatctagcccatgattctatttttttcttcagctagttgtttagtcacctatttagattttgaattttcagcagtttttaataatgctgacttttcatagcttttgctgcaatttaaattacaatttccaccaatatttcttttcagcattataatgtgcttagtgatattaagaa

SEQ ID NO: 391759 - DNA, 654 bp, Homo sapiens
acattatatttatttgtaactctagaacagcttttcagccacagttcatagaaaattaaggaccattattattttcatttatcccatggaagatgcatttctaggatcattccagatgcttaagagatcaatcaatttattaaatgtatgcctagtacagaaaggaattctctcatgaaaactcagttgcaaagatctgctttgaaactagattaaatccaacttgagcacccatcttcaaaaatcaaagagaaatctaatgtcggctactttgacctatctttagatctatacaagggacctgtttggaggcaatagggtttaccagatgtggtcactgcagctgcatttttccttccagtcatgcaatactgctatgaaaaaaatctgacactgatgctccatcggaagtggtttttgttttggtttggtttttatcatactaagaacacaacatgagatgtactcaaatttttaagtgtgcaatattgtgttgttaactataggaacaaarttatacaaatctctagaacttaaccatcttgtatatctgaaacttcataccaattgaatagctatttcgcatttccttctcccttcagtctctagcagccatcatttgactttgtttcaatgaatttgactattttagat

SEQ ID NO: 391760 - DNA, 402 bp, Homo sapiens
ccctgcaacccatttcttgaacatagagccaattactaatgctgcatatttatgcactaagatttttgcatttttatcgaaggaaaagtactctgttaagaatattgttgaggagaaaacgtgttttctaagcttgcttaaatctagattgaaagataaaaatctacaaacacaggtaaaaacaaaaacaaaaacaaatctatttattgagcaatcaataagcaaatgtatcagataaatacattaatggagtgcaggtgaagtacttgagtcattgtcatttgcaaaacaatatgcttttgactyggtagttactcagaaaatatagaatttagttgcataagtacctccctaggttgctttgttcctgatttggaaagtgcaatctatttttctacaaat

SEQ ID NO: 391761 - DNA, 605 bp, Homo sapiens
ctggtggcattttgcccctgccctagagatttgtggaacttttaacttgagggagatgattcagggtatctggtggaagaaatttctaagcagcaaagcagtgaagatgtgacttgggtgctttcaaaagcattcagttttaaatgaaaacagagcatgaaattttgaaaaatgttcagcctgactatgcaatagaaaataaaaaaccattttctaagaagaaawtcaagcttgctgcagaaatttgcataagtaacaagaagccaaatgttaatcaccaagacaatggggaaaatgtctccaggatatgtcagagaactttgtggcaatctctcccatctcaggcccagaagcctaggagaaaaaaattgcttgtaggccaggcccgggggccccttgctgtgtgcaatctaaggacttggtgccctgcgtcccagctgctcttgctgtggctaaaagggaccaaggtacagctcaggccatggcttcagagggtgcaggccccaagccttggcaacttccacttagtgttgagcctgcaggtacataaaagtcaagaactgaggtttgagaactccaactagatttcagaggatttatggaaa

SEQ ID NO: 391762 - DNA, 584 bp, Homo sapiens
ttttgtaatcttttgaggcatgtttggcatcatcaggctaggcatctgaatcaattttgtttgaggagtgttgatcccatactccttggagtaaccaccaaagaatgtttttttgcatttaaatgtatctatacacactcatacacacacacatacatacaraaacatgaacatgtaaattatatattgcatattatatataatatatctagctgtctatatcttctaaattcatagattcagttttattctggggaatttttatggtcttttgagaacataatcataccttaagaaacaaaatgtttaaccacttttttttttttttttttgagaaggcgtttcactctgtcgcccaggctggattgcagtggggccatcttggctcactgcaagatctgcctcccaggttcagaccattctcctgcctcagcctcctgagtaactgggactacaggtgcccgccaccatgcccggctaattttttgtagttttagtagagatggggtttcactgtgttagcaaggatggtctcaatctcctgatctcgtgatccacccgcctcagaatcccaaagtggttta

SEQ ID NO: 391763 - DNA, 536 bp, Homo sapiens
gatggcagatgtatatgttccatatacgccctactctcagacccaggaaagccgagttgtgtaccacaatgaagctgtgtaacattcatcgatctaccaaacagattttctctacgtatcccctagccaaagaggttttctgattatcataccaaatgcagaattctacaatgttctctgttgaaatattttatttattttcttcataagtctttttaaaaccctctattatcatggttattttttctttactttttttttgtatatttaaatttcagggttgytttattcccattgtttctcctagtgtctagcatatatagtaggtgctttgatgtatttgttgaattaataaatcaatcaatttctcatgcctctggcataaagaaaatagagatcattttgttttttgggtgtaagaagtgttatcaacaatgtggacctaagaatataaggggagcaagaattcttactactcaagtccaactcaaaataactgatattcctagagagttataaagattattttgtccaat

SEQ ID NO: 391764 - DNA, 563 bp, Homo sapiens
gttttcagtctcactttcttcaacctgattaacttcctgtagtggctcttagattgctggtcagttagtaacatattcttgtgggctttttaatctaaagtttttctatgtcaccttcatttcgaaggatacttttactattaaaatattcaaggtagatgggtttgtttctcatttttgaaagtacttttaatatatcatttcattgctttctgcctttcattacttctggtgagaaatgtttattgttttttcactgcatgcattatcttacttgttttttactggctcctttaagatgctttcttctatttgacaatttttatttgttttattttttgacagttttttttgacagtttttaattgtgcctttattcartttaattcattaaaaatatacttgttttgagtgggcaaggtgcctcacgcctgtaatgccagaactttgggaggccaaggagggtagatcacctgagctcaggagttcaagaccagcctggccaacacggtgaaaccctttctctattaaaaatacaaaaaaaaaaaaaaaaaattagccaa

SEQ ID NO: 391765 - DNA, 604 bp, Homo sapiens
tggtagaaggaagggatattgatgatcctgaccctgtgcagactagactaatgcatgtgcttttgtcttagtttttaacaaaaaacttaaagagtgaaaaagaaattttaaaaatataaaaaagtttatagagtaagactatacaaaaaagaaaatattcctacatagcatacagtgtgtgttttagactgtgttattacaaaggagtcaaaaagttaaaagaagtatataaagtaaataagttacagtaatctaaggataacattgaagaaaaaaatttattttatgtttattgtagcttaagtgtacagtgttgataaagtatacagtaatgccctaggcctttatattcagtcaccactcactcactgactcactcagagcaacttccagtcttgcaagctccattcatggtaagtgccttatacaagtgtaccattaaaaatatcatttatatgctatttttactgtaccttttctaygtttatatacaaaaatttttacaattgtattataattggctacaatgttgagtacagtacctgctacacaggttcgtagcctaggaggaataggctataccatatggcatagatgtgtagta

SEQ ID NO: 391766 - DNA, 604 bp, Homo sapiens
tggtagaaggaagggatattgatgatcctgaccctgtgcagactagactaatgcatgtgcttttgtcttagtttttaacaaaaaacttaaagagtgaaaaagaaattttaaaaatataaaaaagtttatagagtaagactatacaaaaaagaaaatattcctacatagcatacagtgtgtgttttagactgtgttattacaaaggagtcaaaaagttaaaagaagtatataaagtaaataagttacagtaatctaaggataacattgaagaaaaaaatttattttatgtttattgtagcttaagtgtacagtgttgataaagtatacagtaatgccctaggcctttatattcagtcaccactcactcactgactcactcagagcaacttccagtcttgcaagctccattcatggtaagtgccttatacaagtgtaccattaaaaatatcatttatatgctatttttactgtaccttttctatgtttatatacaaaaatttttacaattgtattataattggctacaatgttgagtacagtacctgctacacaggttcgtagcctaggaggaataggctayaccatatggcatagatgtgtagta

SEQ ID NO: 391767 - DNA, 559 bp, Homo sapiens
attagcttcacatactaatagtgataataatttattacctgtgcatattataattggtttgtttaaagaatccgcattataatcacattaactcacttcagggtgtttaatgtaacaatatcatttcctgctgtgtcttattacttaaatggagttgcagtttggttttcctgctgactattcaattgtatttcctagacaaagacagatagtaacttacctcaaattatacttgtttatctaaggagaacattgatcaatactgtatgatctgaggccagctacctcttttttccctaatcacactgcatttaaggaagggtaaagatatctggcattttcaaatattgkttcaattcaatttaccacacattaggcagctctgatgtgctgcattatgcttgccattatgtaagattttaagtacacaatgtagttgggcaacacactatttgcccagcactttgcacattacataagagttcacattcattatgatgtctaattatcaagataatgaatatgattagtcataataactagctaagtaaggaagaga

SEQ ID NO: 391768 - DNA, 612 bp, Homo sapiens
attattgaactgctaattttcttaacattcaatttcctttcctccaaaccatcatcagcatggcctttgatgatgtggttatcttattacagcactrtcttccttgaacttgatgaacacatggcagcttttcagatagtttattagactctgaagagaaacctcaaattatcaggccttcagctgtgacccagattgctgggttgtatccatacctcattacagagcccttaatctccatataactacatagctttttccttgtccagaagctcctggtaggtctgttgactgaacatttgctttgggggccagactctatttcttcatcccttttttggagcctgaacaacaatatagttcttcgcatgagtgatctttcactgaatatctacagaagaaatgttttaaaatctggagatgggaagtaggacggaaggctaatattaaacccttttatttagaagcatactttcatcattcattcaacagattttagcatctactatgcactaggcattatgtgttgtatgctgaggatacagcctaaactttcttactttgtcatacaatggcccatgatgtggctcctgactaattgtcctctttgtt

SEQ ID NO: 391769 - DNA, 612 bp, Homo sapiens
attattgaactgctaattttcttaacattcaatttcctttcctccaaaccatcatcagcatggcctttgatgatgtggttatcttattacagcactatcttccttgaacttgatgaacacatggcagcttttcagatagtttattagactctgaagagaaacctcaaattatcaggccttcagctgtgacccagattgctgggttgtatccatacctcattacagagcccttaatctccatataactacatagctttttccttgtccagaagctcctggtaggtctgttgactgaacatttgctttgggggccagactctatttcttcatcccttttttggagcctgaacaacaatatagttcttcgcatgagtgatctttcactgaatatctacagaagaaatgttttaaaatctggagatgggaagtaggacggaaggctaatattaaacccttttatttagaagcatactttcatcattcattcaacagattttagcatctactrtgcactaggcattatgtgttgtatgctgaggatacagcctaaactttcttactttgtcatacaatggcccatgatgtggctcctgactaattgtcctctttgtt

SEQ ID NO: 391770 - DNA, 521 bp, Homo sapiens
gcacagggagtacccactcttttcctctttcagctgtttttattacgttaaagatcaaagcaattagtcaatgaaatgaatcactaaacaaactataacattttaaaagttaactccattttgacacaaacttcacaggacaggttttgcgggacttccgtcttctttttggtccctctcttaacagagctagtcaattcttttgaaattgttctgtcctttttacatgtatatagttttgtaaaacaaattaaatttcaacttcttagtattctgagagactgctgttcttaaaataaatgaagataaaatatgtaggtaaatattcactaacaaggtaagttcaagattaatcatggcaatacagattataatagccctgtactggaaacaaccaaaatgcccatcagcagtagaatgggtgaaatattgtgtgatagtcaatggaattctacacataatgaacatcawctactgctacataaaaaaaaaactcacaaattagtgagtgaagaggccag

SEQ ID NO: 391771 - DNA, 656 bp, Homo sapiens
aatctactgcacagtttggatgtttaagtttgtagaaactttttgattctttaattctctgattttttaktcctttaatcccttagaaccatgagctatgagtcaaaacaacttccaaatctggagtttcctttaaagagaaaacgtccatggtttactcagtaattggataaaattatttgtttaatctcttctgtctttaagcaggtagcttattcggtgtactgtgtaaatcagtatgaaaattcaagaaattacctagtagaaagaagccaacattttgggtcagggaggttgtctgctagataaatcagtacaatgtgaacattaacacaaggttcaagtagtttccaaatcaattttatttagaaaagaatgcagattgcatgtggccttccaagttcaaatgtctatattaccacatttccctttgagggaagaaaaacaggatgtggtttaggatgctgctacaaatcaactcaagggccctttaataattatagtaatacctgtgtggagcccacatttggtttaagtgactttctccaattctaggaattttctagctttaggttgatgttaaaattcagcgccaagtccagagtgagacagaaaccacctactgagaattgtttttttaatgcttccttaacaat

SEQ ID NO: 391772 - DNA, 656 bp, Homo sapiens
aatctactgcacagtttggatgtttaagtttgtagaaactttttgattctttaattctctgattttttattcctttaatcccttagaaccatgagctatgagtcaaaacaacttccaaatctggagtttcctttaaagagaaaacgtccatggtttactcagtaattggataaaattatttgtttaatctcttctgtctttaagcaggtagcttattcggtgtactgtgtaaatcagtatgaaaattcaagaaattacctagtagaaagaagccaacattttgggtcagggaggttgtctgctagataaatyagtacaatgtgaacattaacacaaggttcaagtagtttccaaatcaattttatttagaaaagaatgcagattgcatgtggccttccaagttcaaatgtctatattaccacatttccctttgagggaagaaaaacaggatgtggtttaggatgctgctacaaatcaactcaagggccctttaataattatagtaatacctgtgtggagcccacatttggtttaagtgactttctccaattctaggaattttctagctttaggttgatgttaaaattcagcgccaagtccagagtgagacagaaaccacctactgagaattgtttttttaatgcttccttaacaat

SEQ ID NO: 391773 - DNA, 656 bp, Homo sapiens
aatctactgcacagtttggatgtttaagtttgtagaaactttttgattctttaattctctgattttttattcctttaatcccttagaaccatgagctatgagtcaaaacaacttccaaatctggagtttcctttaaagagaaaacgtccatggtttactcagtaattggataaaattatttgtttaatctcttctgtctttaagcaggtagcttattcggtgtactgtgtaaatcagtatgaaaattcaagaaattacctagtagaaagaagccaacattttgggtcagggaggttgtctgctagataaatcrgtacaatgtgaacattaacacaaggttcaagtagtttccaaatcaattttatttagaaaagaatgcagattgcatgtggccttccaagttcaaatgtctatattaccacatttccctttgagggaagaaaaacaggatgtggtttaggatgctgctacaaatcaactcaagggccctttaataattatagtaatacctgtgtggagcccacatttggtttaagtgactttctccaattctaggaattttctagctttaggttgatgttaaaattcagcgccaagtccagagtgagacagaaaccacctactgagaattgtttttttaatgcttccttaacaat

SEQ ID NO: 391774 - DNA, 496 bp, Homo sapiens
ttgagtggattcaggtaaagcatacaatcagatcagaaaaatctggccttataataatctctaaagtaactgaagtttctgtttagaagaactgtgtctctgtgggatttctttctccatgctagctctggacttaagcaactatttaaaggacagacctctagagactttgataaatgtctctagacatctcccccacccctttcgacctaacacttaaagtcacagttttcattgtcaaaggaatggaatatttttggctggtgctgttattactgggatagattttggaggttgaagttcctatgctgtaaaggcacaattacaataggaattccaaactgaaatgtgaactattaggccccgtggactcaacatccagccttaaaataatatcccaaaaacttttacttctctgaggmtacttttgctctactgcagtcaaaaatacgaattgaaaaaacaaggggccacagataaagatggagagtcttgt

SEQ ID NO: 391775 - DNA, 633 bp, Homo sapiens
cacaatgagcagatgatggaggaccgatatactcttcagttaattggtctgataccccataaatgtgatgtaaggacaaagatcatgtcattgctctgtcccaattctgtcatttttttaaaggtttggttttgatatagacagtaaagtcatcttgtttgggtgacagtatctaatgtaatgccaccttcagaaaagggcaaagtgctttgatctgtcagaccatgtagcaagcaaatgatatggaacattctgagtttgcataaaggtctgactttacatttttaaaaacaaaaccaagccaaaactatcatttaggtctgaaccctaagctttctagatttttccagaaacttttctaccattctctactaaatctagatttattatcataggccaggcacaatggctcacacgtgtaatctcagcactttgggaggccragatggacggatcacttgaggccaggagtttgagaccaacctggccaacgtggcgaaaccttgtgtctaccaaaaatacagaaattagctggtggcaagtgcctgtagtcccagctacttgggaggctgatgcacgagaatcacttgaacccaagaggcaaaggttgcaatgagccaagatcatgccact

SEQ ID NO: 391776 - DNA, 633 bp, Homo sapiens
cacaatgagcagatgatggaggaccgatatactcttcagttaattggtctgataccccataaatgtgatgtaaggacaaagatcatgtcattgctctgtcccaattctgtcatttttttaaaggtttggttttgatatagacagtaaagtcatcttgtttgggtgacagtatctaatgtaatgccaccttcagaaaagggcaaagtgctttgatctgtcagaccatgtagcaagcaaatgatatggaacattctgagtttgcataaaggtctgactttacatttttaaaaacaaaaccaagccaaaactatcatttaggtctgaaccctaagctttctagatttttccagaaacttttctaccattctctactaaatctagatttattatcataggccaggcacaatggctcacacgtgtaatctcagcactttgggaggccgagatggacggatcacttgaggccaggagtttgagaccaacctggccaamgtggcgaaaccttgtgtctaccaaaaatacagaaattagctggtggcaagtgcctgtagtcccagctacttgggaggctgatgcacgagaatcacttgaacccaagaggcaaaggttgcaatgagccaagatcatgccact

SEQ ID NO: 391777 - DNA, 633 bp, Homo sapiens
cacaatgagcagatgatggaggaccgatatactcttcagttaattggtctgataccccataaatgtgatgtaaggacaaagatcatgtcattgctctgtcccaattctgtcatttttttaaaggtttggttttgatatagacagtaaagtcatcttgtttgggtgacagtatctaatgtaatgccaccttcagaaaagggcaaagtgctttgatctgtcagaccatgtagcaagcaaatgatatggaacattctgagtttgcataaaggtctgactttacatttttaaaaacaaaaccaagccaaaactatcatttaggtctgaaccctaagctttctagatttttccagaaacttttctaccattctctactaaatctagatttattatcataggccaggcacaatggctcacacgtgtaatctcagcactttgggaggccgagatggacggatcacttgaggccaggagtttgagaccaacctggccaacgtggcgaaaccttgtgtctaccaaaaatacagaaattagctggtggcaaktgcctgtagtcccagctacttgggaggctgatgcacgagaatcacttgaacccaagaggcaaaggttgcaatgagccaagatcatgccact

SEQ ID NO: 391778 - DNA, 562 bp, Homo sapiens
ctacccaggttcaaatcctatttgttcctcagctgcaaatgcagcctcctccaggaagcaggctgtaagcctttggtaaacagtgtagtgttctgaagcctttcagatgatgtaatgacctggtgacccaggaatatctgaatcttaccgtaaaccaaaatctcctattctcttaagagagctataatgacagatgatgatgacaaatggaaaataccatcatccctcagtatctgcaggagattggttctaggaccatcccrttctggcatacactaaaatctccaaatctgcatatgctcaagtctcaccgttggccctgtggaacctgcataggaagtcagccctccctatgtgtgggtttcacatcctgctaatattatattttcaatccttggacttgcacagttcaaacccacgttggtcaagggccagctgtaaaatcactatattaaaactttcaaagactgggctggagtctttctctactcctatgcccagatccaaatcttaccacctctattaacacataaaagatagaaaagatggtaccaaagaatgt

SEQ ID NO: 391779 - DNA, 562 bp, Homo sapiens
ctacccaggttcaaatcctatttgttcctcagctgcaaatgcagcctcctccaggaagcaggctgtaagcctttggtaaacagtgtagtgttctgaagcctttcagatgatgtaatgacctggtgacccaggaatatctgaatcttaccgtaaaccaaaatctcctattctcttaagagagctataatgacagatgatgatgacaaatggaaaataccatcatccctcagtatctgcaggagattggttctaggaccatcccattctggcatacactaaaatctccaaatctgcatatgctcaagtctcaccgttggccctgtggaacctgcataggaagtcagccctccctatgtgtgggtttcacatcctgctaatattatattttcaatccttggacttgcacagttcaaacccacgttggtcaagggccagctgtaaaatcactatattaaaactttcaaagactgggctggagyctttctctactcctatgcccagatccaaatcttaccacctctattaacacataaaagatagaaaagatggtaccaaagaatgt

SEQ ID NO: 391780 - DNA, 611 bp, Homo sapiens
gccctcagttcaatgatgaatcccttctaaacaagcaaatactctcaatgatgagaaactgcatcaaatgacaacctaattcatttttaaagagttccaaataacagaactttatccttatgttatccctaaatctgcttcactgtaccatctactgtctcccagtttagtcttctaaaactgcattgaaaaatctagtttccttctcactgaatgccactgacattgtgttgaggagcttcgtggaggttggccaggtaacctacatctyccttggaccttaggctggaaaactggtcacaactgtagatgttattgatcagaatggggctttggtcggtggaccttgcactcaggtaaggagacagcctatgcctttaaaatgcatgcagctcactgatttcatcctcaagtttccacacagtgcccagcagaattatgtcccataagcctggcagagggcagacaatacaaaatgggcagccacatgatgggccaagaagattgaagccagagaagggaaagccaagatggcagattttgatcattttaaagtcatgaaggcaaaatgaggaacagaataatcaagaatgaaattaagaagcttcaaa

SEQ ID NO: 391781 - DNA, 611 bp, Homo sapiens
gccctcagttcaatgatgaatcccttctaaacaagcaaatactctcaatgatgagaaactgcatcaaatgacaacctaattcatttttaaagagttccaaataacagaactttatccttatgttatccctaaatctgcttcactgtaccatctactgtctcccagtttagtcttctaaaactgcattgaaaaatctagtttccttctcactgaatgccactgacattgtgttgaggagcttcgtggaggttggccaggtaacctacatcttccttggaccttaggctggaaaactggtcacaactgtagatgttattgatcagaatggggctttggtcggtggaccttgcactcaggtaaggagacagcctatgcctttaaaatgcatgcagctcactgatttcatcctcaagtttccacacagtgcccagcagaattatgtcccataagcctggcagagggcagacaatacaaaatgggcagccacatgatgggccaagaagattgaagccagagaagggaaagccaagatggcagattttgatcattttaaagtcatgaaggyaaaatgaggaacagaataatcaagaatgaaattaagaagcttcaaa

SEQ ID NO: 391782 - DNA, 583 bp, Homo sapiens
cagtacaatgtagcttaccctgactcatggaagagctgaatccaaacttccttaatcaaaaagtaaccatagatagcaacaacaataataacaatcataaaaacttgttgaaaagttaacatgtgtcagatataggctttataggaattatctatttcatttcaacttcacaagaatgcaggaatggtatcaggggggcatttttgcttttgtttgtttgtttgtttttttttttttgaaacacggtatcgctctgtcactcagactgcagtgcagtggtaagatcataacattgaactcctgggacttctagcctcaagcaatcctcccactttagtctcctgagtagctaggactacagacatgcatgtaccacactcagctaatttttagaaaattattttttgtagaaatggggtcttgttatgttgtccagtctggtctcaaacacctggcctcaagtgaccctcctgcttcagcctcccaaagtgctgggattacaggcatgarccactgcacctggccctagggaaaaacatttttaatttcagtatacagatggagaaattaggctcaaggaagc

SEQ ID NO: 391783 - DNA, 561 bp, Homo sapiens
tacatttttccaattcaaaagctattactgggacagtttcttcataaagtgaatttatattttgcaaagatttagaaaattttccatttraattatattaaagtctgttttcttatacttcatattccaaacaatgaatctgctcctttaaatattatcccatcttccaaacccatggaaaatggaagtaaaattccatatttgaactctgataacaggccagattatgatactactcaatgttaccagtgcatatttgtgtaagaattgtaattgggagaacattacagtttcttgccttagttttcccaaaagccaagtaagtcctttactgtagcattagatcatcctcttcacttggctggacctagaattaaatacaattttgatgcctccagggaaagcagacagaaaggaggagcaaataaaatttgataatgataataatacttatactactgaatacttggtgagcctggactaggtccatcatatgttagcagacatatgtaggaatattgtatctaagcctcacaggaactctctacagtaatagtatga

SEQ ID NO: 391784 - DNA, 606 bp, Homo sapiens
agtgctgtaggcaatttatttgccttctgtgaaccacattttccttatttgtaaaatgttctactgagtttataggatcatgatgaagatcaaatgatatatgtgaaagtgctttgtaagccctaaaacactgtatgcatgggaggtattacaatgattacactaagtggcaaagagagacaaagctctttacaacaaattgtgaactgtacagatctgtaatctccctcttttraaaaaaatatggcttaatctggaccatctgtaacaagatggttgttttgattcattaagggcttctggttctcccaactctggaaacccctcagtgtatgtgattgtatatcaaagctatttgaaagatcagtttcctgattattcatagagtcttagaaatctaggcttggaaaatctgcagaacatacacagcataactgctaggagtatgaatttagagaccaaaggcatctcatttgaaacctgacttcaccccttccttactggctttgggaccctgggcaaattaattaacttttcaaatcctcagttatctatgaaatgggtattaaagtatgtgcctcatgggggttataagggttaaatgat

SEQ ID NO: 391785 - DNA, 669 bp, Homo sapiens
tgatgtcaaattatttaaatcgtaacattactcataaaaccaaatatataaatgatcaccttccaaggatgttaaggtaccaatacattattttgataacataagtatcaagctttttgtgtgtgtttgtgcataccatatgaattgcatctcagactaaataaataattcatgagaaaaattttctctttataggctttttccagctaatacatgaaaaatagaatgatactcttcaccctgttgcaactcccaataaaataacagatgtaggcaattgtcactgatggatattaacagtccccaaagagagagaactatttattatgtrtctactgatggaagtacaaatactgcctctgaagtattcttgtagaagaatcaaatattaatgtgataatcactggatcctattaccaatttatggggaatggagagaactatgttaaataataccaacgggtgtaaccagcaaaatccacattgtgggaaactctccaagaaaaatgatctagtatcttcaagtaaagaatgcaagcaaaaaaaaaaaaaaatagggagagagaaattctatagattaaaagatacacaagggccatatcaatccattgcaatgtatgcagctcatttggaacctgatttgaatgagtgaactagaaaatatttgtg

SEQ ID NO: 391786 - DNA, 608 bp, Homo sapiens
actcattctgacttgacctggtagaattatattttattttctggaagttctttctttttcttttcttctgcttccagaaagacatgataaaagtggtattgatcacagtgacatttcctgtttgtcctactgttcacttaggaattyagctcattttctttgtgcaatattaatatgtcaagtgcaagataaagcatttgagccactgcttagatgggctttctaggggctgtagctcatttacatctcactggagaattgggaaacagtgccagaaaatgttattagtcaagtatcttttaaacattttttaaaataaaggagtaattgaatattggaaataacagtaacatatctctgatctgagttattttatgtttctagttattcattcaatgctacatagacatgtaaatagataactcagatatgaagtgttgagggaaaaatgtcagaagaaaaaagcaaacaaggatggttcatggcctgtaaaactcctggagggaggtggcttttgaactgaggcctgataatgttcctggaattttcagaagtggaaattatggatcatcttcaacaaagtcatgaaggtagagacaggtgtcagg

SEQ ID NO: 391787 - DNA, 595 bp, Homo sapiens
cagaagcccagttctgccacctagcagcacattttaaatcttttctgtaccttaatatcttcatctgtaaaatgggaaaactacagtaatgaatgacygtttaaaaaactgcctaaaagttgtcagcataagaagtgtttggaagtacttttcttcacaaattagtactacccctactttgctcagctttcagaccaaatgctgcaagaacttatgaatgccaagtgacaacaagtatttataatgcttgtgaaacattaacaaacaaaatttaatatggtgtagaatgtggcatcactatttacttaaaatatggtccttttggtattctttgtaactgggtcttcttcaaaggaatccaaaacagacctgaattatacacaatcagtttcagcggtgctgttgaccaaatttatccatgaattgaattaaaaattatagaagagtttggaggaagacattcagcatttgagctaacatgtgcagcagatcactccattaagcatcatttctcattttgccgcatcacagttaaaccagaatgtggaccttttgatataaaccactgctggaaaatgactgtaccaagtaactg

SEQ ID NO: 391788 - DNA, 595 bp, Homo sapiens
cagaagcccagttctgccacctagcagcacattttaaatcttttctgtaccttaatatcttcatctgtaaaatgggaaaactacagtaatgaatgaccgtttaaaaaactgcctaaaagttgtcagcataagaagtgtttggaagtacttttcttcacaaattagtactacccctactttgctcagctttcagaccaaatgctgcaagaacttatgaatgccaagtgacaacaagtatttataatgcttgtgaaacattaacaaacaaaatttaatatggtgtagaatgtggcatcactatttayttaaaatatggtccttttggtattctttgtaactgggtcttcttcaaaggaatccaaaacagacctgaattatacacaatcagtttcagcggtgctgttgaccaaatttatccatgaattgaattaaaaattatagaagagtttggaggaagacattcagcatttgagctaacatgtgcagcagatcactccattaagcatcatttctcattttgccgcatcacagttaaaccagaatgtggaccttttgatataaaccactgctggaaaatgactgtaccaagtaactg

SEQ ID NO: 391789 - DNA, 595 bp, Homo sapiens
cagaagcccagttctgccacctagcagcacattttaaatcttttctgtaccttaatatcttcatctgtaaaatgggaaaactacagtaatgaatgaccgtttaaaaaactgcctaaaagttgtcagcataagaagtgtttggaagtacttttcttcacaaattagtactacccctactttgctcagctttcagaccaaatgctgcaagaacttatgaatgccaagtgacaacaagtatttataatgcttgtgaaacattaacaaacaaaatttaatatggtgtagaatgtggcatcactatttacttaaaatatggtccttttggtattctttgtaactgggtcttcttcaaaggaatccaaaacagacctgaattatacacaatcagtttcagcggtgctgttgaccaaatttatccatgaattgaattaaaaattatagaagagtttggaggaagacattcagcatttgagctaayatgtgcagcagatcactccattaagcatcatttctcattttgccgcatcacagttaaaccagaatgtggaccttttgatataaaccactgctggaaaatgactgtaccaagtaactg

SEQ ID NO: 391790 - DNA, 621 bp, Homo sapiens
ttgattagggatgggcttacttttggagggtaattaatctgttttttaagagagctaatagttagattcatggactttcacatacaatttttttaaaaattgaaaccatcctgagcatatggtatgaatgtgtgtgtgcgcacgtgcgtktgtgtacgtgcgtgcacatgtgtgcgtgcatgcatatttgtttgatgattttgttcctcaaaatcattgttataaattacagataacactgtggaaaatccctagaagagaaagagttccaattaacatccaatttgttgttggggtctgtggaactccctggggtgtcctagagccaagaaatccaggcaaaactaaagacccttgggcttccaactcaattatccctcaccctctcaaatgaacaagcaaataaaatatacactcaaaatctgccaagatacacatgtgaataaatggactagtggaatccagcgataactctaatttaaataaaaaatatgatggaatgatgagtaacagcttgggctctaaaatcagtctgggttcagttcccagctctgccagtgactactaaccatgaaaccttggcacatgatataaagcctctgaagtttccctgtgtgtaga

SEQ ID NO: 391791 - DNA, 621 bp, Homo sapiens
ttgattagggatgggcttacttttggagggtaattaatctgttttttaagagagctaatagttagattcatggactttcacatacaatttttttaaaaattgaaaccatcctgagcatatggtatgaatgtgtgtgtgcgcacgtgcgtttgtgtacgtgcgtgcacatgtgtgcgtgcatgcatatttgtttgatgattttgttcctcaaaatcattgttataaattacagataacactgtggaaaatccctagaagagaaagagttccaattaacatccaatttgttgttggggtctgtggaactccctggggtgtcctagagccaagaartccaggcaaaactaaagacccttgggcttccaactcaattatccctcaccctctcaaatgaacaagcaaataaaatatacactcaaaatctgccaagatacacatgtgaataaatggactagtggaatccagcgataactctaatttaaataaaaaatatgatggaatgatgagtaacagcttgggctctaaaatcagtctgggttcagttcccagctctgccagtgactactaaccatgaaaccttggcacatgatataaagcctctgaagtttccctgtgtgtaga

SEQ ID NO: 391792 - DNA, 621 bp, Homo sapiens
ttgattagggatgggcttacttttggagggtaattaatctgttttttaagagagctaatagttagattcatggactttcacatacaatttttttaaaaattgaaaccatcctgagcatatggtatgaatgtgtgtgtgcgcacgtgcgtttgtgtacgtgcgtgcacatgtgtgcgtgcatgcatatttgtttgatgattttgttcctcaaaatcattgttataaattacagataacactgtggaaaatccctagaagagaaagagttccaattaacatccaatttgttgttggggtctgtggaactccctggggtgtcctagagccaagaaatccaggcaaaactaaagayccttgggcttccaactcaattatccctcaccctctcaaatgaacaagcaaataaaatatacactcaaaatctgccaagatacacatgtgaataaatggactagtggaatccagcgataactctaatttaaataaaaaatatgatggaatgatgagtaacagcttgggctctaaaatcagtctgggttcagttcccagctctgccagtgactactaaccatgaaaccttggcacatgatataaagcctctgaagtttccctgtgtgtaga

SEQ ID NO: 391793 - DNA, 558 bp, Homo sapiens
tttctggagaaggcctatagcagagagagtctaggcatgggcataattgcaactcttatttatatgggcatcatttgcttaaactaagagatgatttcactctgattggaaaccatttctgattcaacttaaatgacctgcataaatattttataaccattcaggatcagcatatttgcagataagccagactacttaataaaatgtgtgttttagcrctgcagagaggaaaaaaattgaataattgtaggaaatgttggaatcaaaaaatgtgtgacagaaattctttgggtaaacaaatcattgctatgaaaacactgcttcccataatttagtatttagtaatcacctactaattaaataaatgctagaatattgcgaagcttaagtccttatttttcttaaaactgtaagcatgcttatatttacaattttaccaactgcatattttttcctttattctaagagaaaaagagaagtgagatgcattgagacagtctggagaaattaatgcacagagttaacctgtattatccaacccaaaagttttctcctgga

SEQ ID NO: 391794 - DNA, 452 bp, Homo sapiens
aacaacacacaatggagcctgttggagggtgaaaggtgggaggagagagaggatcaggaaaaataactaacgggtactaggcttcatacctaggagataaaataatctgtgtaactgacccccaggacacaagcttacctatgtaacaaacctgcacttgcacccctgaactgaaaagttaaaaaaagaaaaaaagaaaaataaaaggtttcctgaaagtaatmtataacaaaaaaatcttttgagactgaaaaatgtaacatatatattttttagaaacgaccatgaaaactaataaatgcaaaacttaatgtttgacattcattcattcattcgttcaacaaatactgagcatctgctgtgttctaggcactacatttggagctgtggatacaaaagtgagtatgaaagacatggcagacagacaatatacaagtaagcattaaataaac

SEQ ID NO: 391795 - DNA, 452 bp, Homo sapiens
aacaacacacaatggagcctgttggagggtgaaaggtgggaggagagagaggatcaggaaaaataactaacgggtactaggcttcatacctaggagataaaataatctgtgtaactgacccccaggacacaagcttacctatgtaacaaacctgcacttgcacccctgaactgaaaagttaaaaaaagaaaaaaagaaaaataaaaggtttcctgaaagtaatatataacaaaaaaatcttttgagaytgaaaaatgtaacatatatattttttagaaacgaccatgaaaactaataaatgcaaaacttaatgtttgacattcattcattcattcgttcaacaaatactgagcatctgctgtgttctaggcactacatttggagctgtggatacaaaagtgagtatgaaagacatggcagacagacaatatacaagtaagcattaaataaac

SEQ ID NO: 391796 - DNA, 452 bp, Homo sapiens
aacaacacacaatggagcctgttggagggtgaaaggtgggaggagagagaggatcaggaaaaataactaacgggtactaggcttcatacctaggagataaaataatctgtgtaactgacccccaggacacaagcttacctatgtaacaaacctgcacttgcacccctgaactgaaaagttaaaaaaagaaaaaaagaaaaataaaaggtttcctgaaagtaatatataacaaaaaaatcttttgagactgaaaaatgtaacatatatattttttagaaacgaccatgaaaactaataaatgcaaaacttaatgtttgwcattcattcattcattcgttcaacaaatactgagcatctgctgtgttctaggcactacatttggagctgtggatacaaaagtgagtatgaaagacatggcagacagacaatatacaagtaagcattaaataaac

SEQ ID NO: 391797 - DNA, 634 bp, Homo sapiens
ctgcttcctctcattaatctttctacatagcttctttacacaatgtttcactttgtatcccagtaacaggcttgtcagtattcataccagattatgaacaaggatctcacatataggagacattcattaagaaattgttgagtaaagaatgaatgacctgtattggctcttaaagcaacagaagctcccaagtactgatggagaacccactgccatgagtctctctagacatcagcagatattttggcatgaacttcagcagccattcctagtattaccctatagagctgcttgtccaagctttacctgatggtcatcctctagcaccctgttgtggtgaccctcctctagacagcatatgtgtgtcatgtgtgcctaacttgcccatgttctccaggagaagagtaatgcttcacagactgtgcttcacagattgtccaccactgttgacagcacttyacttgggtgctctgaggaactgtgcatttcttaaacaaaagggttaagacccaaatgagggggttactggttcagagctaactctagattctggcttttgtagccgagggtgcctctgtccagtgttagccatgtagcctgttggtgtgctctaactctggaagcagactaccta

SEQ ID NO: 391798 - DNA, 639 bp, Homo sapiens
agtaggacagtcctttgtcactttcacaggagtttcgtgtcatctgccagcatttaggaagctcagtggagtaaaattgtacacccttctcagttctttaaaatgatagtcatcatcattatcaccatcatcatcatcatcatcattcttttgggtgaaaaaaatgttgaaagcaaatattaaggtcatcatcctaagtgaaactccttttatgattcaggggtaccactccctttgaaggtactaatcatttsacttttatatacagactatgactaatttattatatgcttttccagaatcatgtagaaaaaatgaaaactaaatttactgggaagatattttaaatgtgagtttactgtgtgtttactgaatgtgagttaacatgacttattaaatatagaaatatgtttaaattacagattacagatttgcgttatccttgttaatataaacatgttcatttatttctgctgggttttgaaggcacagaattcaaaatcagagccacccatgcaatttggtatgtatattgtagtgccatgattttgttaaatgtgtttcttaatatgctttttatctatgtcattttagttaaatggtttggaataaaccaaaacaacaacaaaaagattaaaa

SEQ ID NO: 391799 - DNA, 571 bp, Homo sapiens
ttagttggtgagaaatctgtggagcattgttgattttacaggcccaatacccagcttttctctgattttgcagttgtctccatagcaatagtcacagactctaaaatgggtagcctcttcaacaaaagaaactgtcattctcaacagctgtctgtgaaagtgtgcaatgccctgttaaggaggcacctgcrgagatgtggggcttttcctcatttagaggaattattttgcaaacaataatactaatacaacactggatgagaaaaccatgggaggcctcttataaccattgtcttgagggacagaactaccaccattcacttagaagctaacatttccattctgagagtttgtgattcatctgatgggaattggataaaggaaatggaaattctgatgaagcttcccctcaaatacttagctcacttatacccagagtgacactaaaatgaaaatgttctggctgatagtcttgttctttttctgtaagttcaggagcaagagtaggttttaagaaatgacacaaactcaattttggttctacttgtgtttgcttagctcttatcagatt

SEQ ID NO: 391800 - DNA, 615 bp, Homo sapiens
ctttaacaatctgtttacaacctaatcaggaaagttttttctatatctaacactcayctcactttttcctaaaataaattcatttaatttttctggaagatactgagccaaatctcagttttcctttttctgactatatcttcatttccttaactttccgcttcacaaataattgttaccaaaggtcttcagcacccacctcaaatatggcattgaaaactagagctggagcttgagggagattttggattcattgttgtttcatttccaaatgtaaatgttctcttagtgataataacataagtgactgagttatctcattctggaggcttcttggcaaagcctgactgcttgtgtttaatattctcagataaccccttcaaccaaaggaagaagaaagtgaaacatatctgtgttttattctctattatctttaaaataaatattgtaagcttgacttgggggcggcggaaaactagaaagagatgagcaagtgtgtttaaaaccttaagcagcttcttgtgtccactagggtggataactgcttgcaatttggaatgaaatccggaatccctcaaaaaacctgctgggtgaccttcgttagttcacttttca

SEQ ID NO: 391801 - DNA, 615 bp, Homo sapiens
ctttaacaatctgtttacaacctaatcaggaaagttttttctatatctaacactcatctcactttttcctaaaataaattcatttaatttttctggaagatactgagccaaatctcagttttcctttttctgactatatcttcatttccttaactttccscttcacaaataattgttaccaaaggtcttcagcacccacctcaaatatggcattgaaaactagagctggagcttgagggagattttggattcattgttgtttcatttccaaatgtaaatgttctcttagtgataataacataagtgactgagttatctcattctggaggcttcttggcaaagcctgactgcttgtgtttaatattctcagataaccccttcaaccaaaggaagaagaaagtgaaacatatctgtgttttattctctattatctttaaaataaatattgtaagcttgacttgggggcggcggaaaactagaaagagatgagcaagtgtgtttaaaaccttaagcagcttcttgtgtccactagggtggataactgcttgcaatttggaatgaaatccggaatccctcaaaaaacctgctgggtgaccttcgttagttcacttttca

SEQ ID NO: 391802 - DNA, 615 bp, Homo sapiens
ctttaacaatctgtttacaacctaatcaggaaagttttttctatatctaacactcatctcactttttcctaaaataaattcatttaatttttctggaagatactgagccaaatctcagttttcctttttctgactatatcttcatttccttaactttccgcttcacaaataattgttaccaaaggtcttcagcacccacctcaaatatggcattgaaaactagagctggagcttgagggagattttggattcattgttgtttcatttccaaatgtaaatgttctcttartgataataacataagtgactgagttatctcattctggaggcttcttggcaaagcctgactgcttgtgtttaatattctcagataaccccttcaaccaaaggaagaagaaagtgaaacatatctgtgttttattctctattatctttaaaataaatattgtaagcttgacttgggggcggcggaaaactagaaagagatgagcaagtgtgtttaaaaccttaagcagcttcttgtgtccactagggtggataactgcttgcaatttggaatgaaatccggaatccctcaaaaaacctgctgggtgaccttcgttagttcacttttca

SEQ ID NO: 391803 - DNA, 601 bp, Homo sapiens
gtggtattaacactatctacttaagattatgcacacttatactaatacctggcataaatgctaatcctttctatcattgcatgcttttgtatttaaccccttggccttagcatctggatctacttcaagtggggtggtgacagcatccaaaaggttcacattgctgactccactacctgatttagtgtgtcagttttcttagtacccaaattgatgtggagccattgcactctctcaatgtttgcagacagattttacwtgtttctctgagcatgatcgccctcataatggaatgactaagggcttcttccaaatgctccaggaatggtggaatccattaagaaaaattgtcagggagtggaaggatacaaggcatttgcaaatgcccttaactgaaaccacaaaggtgcagagcaggttacaggggagatgacttgctaattcagccccataatgagagaaggtggtttgcacaccagccaaactgatttataaagtggggtctaagagctcagtctttaatatcagagagaccttggatgaaatctcaggtctgctactcactagagtggttttaggcaagttacttaagcattttgca

SEQ ID NO: 391804 - DNA, 601 bp, Homo sapiens
gtggtattaacactatctacttaagattatgcacacttatactaatacctggcataaatgctaatcctttctatcattgcatgcttttgtatttaaccccttggccttagcatctggatctacttcaagtggggtggtgacagcatccaaaaggttcacattgctgactccactacctgatttagtgtgtcagttttcttagtacccaaattgatgtggagccattgcactctctcaatgtttgcagacagattttacatgtttctctgagcatgatcgccctcataatggaatgactaagggcttcttccaaatgctccaggaatggtggaatccattaagaaaaattgtcagggagtggaaggatacaaggcatttkcaaatgcccttaactgaaaccacaaaggtgcagagcaggttacaggggagatgacttgctaattcagccccataatgagagaaggtggtttgcacaccagccaaactgatttataaagtggggtctaagagctcagtctttaatatcagagagaccttggatgaaatctcaggtctgctactcactagagtggttttaggcaagttacttaagcattttgca

SEQ ID NO: 391805 - DNA, 624 bp, Homo sapiens
aaaagcctgtgactgctgtactgcaaacagactctctcttgctggtacaagctgtcaagttggaaagtgtcacatggcaaggaagtgaagacctcagtccaacagcccacaaggaactgaatccttccaacaaccactgagagagcttggctatagatccagccctagttgggaggacagtgactccagccaacaccttcgttgcagcctgtgagagaccctgaagaagtggactcagctaagctgcgcccagattcctgaccctcaaaaattgtaagataagaaacatgtgttgtttcaaaccactatgtttcaagggaaagttacacgrcaagagacaatatagcattcatgcacttattcactgattcacttattcaacaaacctcttttgcaatttcctgcaggccaggcaatggcctaaggaaataaacatgcaccttgcactctcataaactcatagagggaatgctgcacctggtactaaatgacaggacatgtgtactctgtacttttcctgtggttgcaatgtcttatggtggaaacaaatataagggagataatactctgtcaggcagtcagagaaggcaggaagtgaggagactgaggttcagagagggtaag

SEQ ID NO: 391806 - DNA, 624 bp, Homo sapiens
aaaagcctgtgactgctgtactgcaaacagactctctcttgctggtacaagctgtcaagttggaaagtgtcacatggcaaggaagtgaagacctcagtccaacagcccacaaggaactgaatccttccaacaaccactgagagagcttggctatagatccagccctagttgggaggacagtgactccagccaacaccttcgttgcagcctgtgagagaccctgaagaagtggactcagctaagctgcgcccagattcctgaccctcaaaaattgtaagataagaaacatgtgttgtttcaaaccactatgtttcaagggaaagttacacggcaagagacaatatagcattcatgcacttattcactgattcacttattcaacaaacctcttttgcaatttcctgcaggccaggcaatggcctaaggaaataaacatgcaccttgcactctcataaactcatagagggaatgctgcacctggtactaaatgacaggacatgtgtactctgtacttttcctgtggttgyaatgtcttatggtggaaacaaatataagggagataatactctgtcaggcagtcagagaaggcaggaagtgaggagactgaggttcagagagggtaag

SEQ ID NO: 391807 - DNA, 627 bp, Homo sapiens
acatacaaatgtaatgaaggcaaagatgccagaagagcgtctatggatgcttcagaatttgaagaaacttgcctgagagatgagcctaatgttttcattttgttttaataatttgccaaatctgcaaacctagaaggagtctaattaaagttaatgagaaataatctccattttaaaagtcttaataattgatacttttgtacagagctcttgtacatttttctcctgaggtcatgaaatatattacattcaaamttcaaatttaaaaggcactgaaatattttgttttattcctttccttttttatctttcttgtcttagtttccttcccattttatgaggcatatttattgtgaagcatattttgtttatgaggcatacatatgaggcaaaatttttttaatttttacattttaatttgggtagtttttgaggaaaaggtggtttttggttacgtggataagtcctttagtggtgatttctgagatgctggtgctcctgtcacccgagcagtatacgcgatacccaatatgtagtctttggtcccttaccccaaatcctacccttcctccagagtccccaaagctcattatatcatttttatgcctttgcatcctcacagcttaa

SEQ ID NO: 391808 - DNA, 627 bp, Homo sapiens
acatacaaatgtaatgaaggcaaagatgccagaagagcgtctatggatgcttcagaatttgaagaaacttgcctgagagatgagcctaatgttttcattttgttttaataatttgccaaatctgcaaacctagaaggagtctaattaaagttaatgagaaataatctccattttaaaagtcttaataattgatacttttgtacagagctcttgtacatttttctcctgaggtcatgaaatatattacattcaaaattcaaatttaaaaggcactgaaatattttgttttattcctttccttttttatctttcttgtcttagtttccttcccattttatgaggcatatttattgtgaagcatattttgtttatgaggcatacatatgaggcaaaatttttttaatttttacattttaatttgggtagtttttgaggaaaaggtggtttttggttacgtggataagtcctttagtggtgatttctgagatgctggtgctcctgtcacccgagcagtatacgcgatacccaatatgtagtctttggtcccttaccccaamtcctacccttcctccagagtccccaaagctcattatatcatttttatgcctttgcatcctcacagcttaa

SEQ ID NO: 391809 - DNA, 580 bp, Homo sapiens
ggatgacatacctccttaatgaacagagtcctacccactagcagacatgcctcaactggcacatgtcacctaataaatctaatttatattccctcttcttgaggaggagatagaagaggatagaaaaacaggctgacagagaatcaagagtttgcttttgaacgggaggaaaatatttcttttttcctcacctattactaggctcatggctgaggcccctctaataaaggacagattaacaagagaaaagcatacaagtttatttaatacacattttacatgacacaggagccttcagaaatgaggactcaggccgggtgcagtggctcatgactgtaattccagcactttgggaagccaagggaggyggatcacctgaggccaggagttggagaccagcctggccaacatggcaaaaccctgtctctaccaaaaatacaaaaattagccaggcatggtggtacatgcctgtaatcccagctacttcagagtctgaggcagcagaatcacttgaacctgggaggtagaggttgcagtgagctgagatcacacaactgcactccagcctgggcaacagagc

SEQ ID NO: 391810 - DNA, 516 bp, Homo sapiens
agctgctacttttcactaagtgggttagtctcttggacttctgattattctgcaaacaagaaagaatgggtttctcattagctgtatttatttggaattttggccctatgcttgacaatatctttgaaggagataataagctaatgcatgcatttgcttagaacaatgtatagcacatagtaaatttctgataaatgccagtggagatggtgatactgttgaatactatcttttatttcagataacaaggctgactcttattttttggaaaggagaggggctgaatttactaaggtcagtgagaaaccttttgccccgtaaaagggaggccacctaggacttacaacatgcagtaggctatsagggtcaacaccagggctgcaacacagatcttagagggagtgggtgatgtgttctttcaggacagatttaatatcttcttctttatccattctgatatcctagactacttttacatttttagaagggaccagcataaggaagagatttaagtga

SEQ ID NO: 391811 - DNA, 477 bp, Homo sapiens
aaagattcctccaccttcctatagtcttatttgcagatccccagtagaatatttactaaagtctagatgcaattaaaccttttgtgaaatttgtgtttgatcatgaataggggtgagtcagaaagtttgaacgagactgaaasataaagggaagtatacaagaaagcactctcatcttatatttagcaatgacattcaaatgacaaaaaaagagagacaattttggagtaagatgaagttttccaatgagtgtgttcattgctaatcttggtttctttgtttattgctctcattaattcaactaacatatgctggatgttggaagatttgtttataaagtggtgatgggaaaggtagtcttggtctaaactaatctgtctggatttcgaaagtgctttattataaaaggaaaatatagtgagtcctcaaatagtagtgtgtgtttcattaacataacaaaaaatgggcttcagattg

SEQ ID NO: 391812 - DNA, 477 bp, Homo sapiens
aaagattcctccaccttcctatagtcttatttgcagatccccagtagaatatttactaaagtctagatgcaattaaaccttttgtgaaatttgtgtttgatcatgaataggggtgagtcagaaagtttgaacgagactgaaacataaagggaagtatacaagaaagcactctcatcttatatttagcaatgacattcaaatgacaaaaaaagagagacaattttggagtaagatgaagttttccaatgagtgtgttcattgctaatcttsgtttctttgtttattgctctcattaattcaactaacatatgctggatgttggaagatttgtttataaagtggtgatgggaaaggtagtcttggtctaaactaatctgtctggatttcgaaagtgctttattataaaaggaaaatatagtgagtcctcaaatagtagtgtgtgtttcattaacataacaaaaaatgggcttcagattg

SEQ ID NO: 391813 - DNA, 531 bp, Homo sapiens
gctttattataaaaggaaaatatagtgagtcctcaaatagtagtgtgtgtttcattaacataacaaaaaatgggcttcagattgcctcagaaatatgccataaaacctaagctttttaaatttcactccagaaacttgaaagaaagtctgctctcacctctattattgttctgaattagaaattctttttgaackgttgatattttactatgaatatttcaaagacatggttactaaagagttttcctaacctggagaggtatttggagggtcaaacagggtgattatttttaacagaaaggaaggcctgaattagtcaaataattttttttataatttcaagaagaccagaggagagctgtgcatttgagtggtttgcttcagtaaaagagaacagattttcttttgctatgattttgtaggtttaaatttctcagtgtaattttcctgccacctgaccttattttcttttgcaaaggcaaaacaaataaacttgaaaggaagagggaaggaaaacaataatctatgttt

SEQ ID NO: 391814 - DNA, 462 bp, Homo sapiens
aggacaaaaataaacctgtgtgctcttgagaaccatggggaccttggtctcctttctcccatccccactcatggcccaggcctcaccaacttgttgttaatggtgactagcttggttcagactgggctggatgggcacagatggaaaaggaatagcacctcctctctcctttcatttattaaaagatgatctttactactctagcatgctgagagatcaattcagcagttggccctctgtatccacaggttccacattcatgcattcagccaactacagatacaaaatataaaaaataagaaataacaataaaaagtaatataaataaaaccaatatagtatgacaacaattaacataacatttacmttgtattagtttttatgagtaatctagagatgatttaatgtatatgggagaaggccaggtgtggtggctcatgctggtaatcccagcattttggg

SEQ ID NO: 391815 - DNA, 611 bp, Homo sapiens
aagttacaggctacttttttcttgtttcttcaaactgacctaaatttctaggtgttccggggatatacatatgcttacctttcacatcacttcatattaacatagtaactggtrcaagtggctaacccctacccccataaagaccctctttttctgaactacagttgagtgagtattaaaataaggactaaatccccaaacatattttttaatcccagaaaacatatgtattactaatttataatcaaagcccaggacatagcaaaatgcattgcgtaaatgaatgtgggcagggctaggagaatacctaggactttggatgcctaatctagtaactgagtacacgtcgacacagtgcttttcttttaatcctgagtattttctatattcgtttttaggaatgttttcaaaagtattttggcatgatttttaaaattcactacataacattttaacaaatattctttttttttttaacgtcgaagtcgtcacctgacatttgttatagtcaatcagtagggcaaacctccaagtacccctgccatcttataggaactgacaacagagatttctgcagtcttattaaacagtccttttgcaattacaggtac

SEQ ID NO: 391816 - DNA, 600 bp, Homo sapiens
aggtgtgtgttaccatgccagctgctttaaaacatttttttgtagaggctgggtctcattatgttgcccaggctgctcttgaactcctaggctcaagtgatcctccctccttggcctcccaaagtgctgggattacagatgtgagccacggtgcctggccacatttcaaaaaatttatatcaagaaacagttttaaaatttaatagagtgctcgggcacagctaccatcatttagcacttaagcaactattagtactagggtgggatgcactaatatttagcacagtaaagaattaaaacaaaaacctagaacttcaggctgcatgttaataagtagactatctttatgtagaattgcttgaaagttcagcaagaaatttcctaatgtcccagaaaaagtgcctcattcacayactcattgatttgcctcattgtcacttagtttcagagaaaaaataggcatccactaaatatttagtttctgtctttcctcccttccccagaacatgagataagagtgcttcacaaggaggccatttttgtacaccagcatggaattcctcatattgaccctatggctgatcatacggctttataaat

SEQ ID NO: 391817 - DNA, 600 bp, Homo sapiens
aggtgtgtgttaccatgccagctgctttaaaacatttttttgtagaggctgggtctcattatgttgcccaggctgctcttgaactcctaggctcaagtgatcctccctccttggcctcccaaagtgctgggattacagatgtgagccacggtgcctggccacatttcaaaaaatttatatcaagaaacagttttaaaatttaatagagtgctcgggcacagctaccatcatttagcacttaagcaactattagtactagggtgggatgcactaatatttagcacagtaaagaattaaaacaaaaacctagaacttcaggctgcatgttaataagtagactatctttatgtagaattgcttgaaagttcagcaagaaatttcctaatgtcccagaaaaagtgcctcattcacacactcattgatttgcctcattgtcasttagtttcagagaaaaaataggcatccactaaatatttagtttctgtctttcctcccttccccagaacatgagataagagtgcttcacaaggaggccatttttgtacaccagcatggaattcctcatattgaccctatggctgatcatacggctttataaat

SEQ ID NO: 391818 - DNA, 592 bp, Homo sapiens
gtgagaatgttctttgtactgttgtttataatgtagtgggggcagaaagtgaacctaaatgtcaaacaatagaattagagtaaataatttccgtgcctttctaagagatggagtctcactgaggtgcattagcatgatcatagctcactgcagccttgaactcttgagctcaagtgatcctcccacctgagtctccccagtagctggcattacaggtgcatgcctggttaaatacatttttttcaggtccctgtaaagtctgggatgattaaatacattttayagacatctttacaacagcatactctggagctattaaaagacagtgctgtagatgtatatctattcacatacaattgttatgttaattacataatattaaatgaaaaaacccatttgcaaaattctgtatatggcaatttagtttatgaatatgtactaaacatgaaaaaatacacaccataattttcacactagctgtctatggctcgtggaatcagagccattatttttgggaaggggagttctctttttattcaaatgcatttcctaatatttctttaacatgtatatattacttattttttttaaa

SEQ ID NO: 391819 - DNA, 592 bp, Homo sapiens
gtgagaatgttctttgtactgttgtttataatgtagtgggggcagaaagtgaacctaaatgtcaaacaatagaattagagtaaataatttccgtgcctttctaagagatggagtctcactgaggtgcattagcatgatcatagctcactgcagccttgaactcttgagctcaagtgatcctcccacctgagtctccccagtagctggcattacaggtgcatgcctggttaaatacatttttttcaggtccctgtaaagtctgggatgattaaatacattttacagacatctttacaacagcatactctggagctattaaaagacagtgctgtagatgtatatctattcacatacaattgttatgttaattacataatattaaatgaaaaawcccatttgcaaaattctgtatatggcaatttagtttatgaatatgtactaaacatgaaaaaatacacaccataattttcacactagctgtctatggctcgtggaatcagagccattatttttgggaaggggagttctctttttattcaaatgcatttcctaatatttctttaacatgtatatattacttattttttttaaa

SEQ ID NO: 391820 - DNA, 561 bp, Homo sapiens
tgtcaaatatagcctgtattttgttgaggtgtatttcttctttatctgattttttgggagtttttacaatgaaaagatgttgaattttatcacatgctattttctgcatctactgagatgatcatatggttttgttcttcattctgttgatatagtagcatacatttattgatttacatatgttgaaacttacttgcatccctaggataaattctgcttaatcatagtatataatctttttgatgtgctgttggttttggtttgttagtgaaatgggaaaatttcccttgtccccctcacaggggatgtggtgagggtgtggctcacttcttcagtgccccactgctctatcctctagggaagcatacaggcaggcaggctgtgggactccaactccatggcagtgtctgggggtgaatgtttacagctgaagccccagtgggtgtgtgttacagggtgctcttttagtttagctgtccataggtracttgtggtcagctcaattagacaaggacagagggctttctgtatcctgggattcttgccttggtgtaccagaag

SEQ ID NO: 391821 - DNA, 368 bp, Homo sapiens
aagttggcagaacctgtaaggctctctcctgagtactggaaagttaattggataacaccactgcatttatcagaggcttacagcacaaaatacacagcacatttgcaaacagggagcttttctatttctttctttcttttttttttgtattctsgctttagaaacaaatttgatcgaaaaaggttggatgtgtttgggcgttattaagtccctataattgccctcaggcaataccctggacaccggatacaaagatgatgaagacacaagctctacctcttatcaacagaaacaaaataaaaaacattacattcttgaatggtaagactgaatcgagaagcattcaaggtacagtaggagtccatggt

SEQ ID NO: 391822 - DNA, 532 bp, Homo sapiens
attcccagattcatggacagacctagtgctttgacctttttcagacagcccatgttggccctcactccactccccatgcctgcttaagcagtgccctcccatcccaaattgtcaccttgtctatgatggtaaaayatgagcacaggagcccagcaataaggtacttggactcccacctctcaacacattgaaagctggcatacatcaaagaaacacaaccacctaggtcaagcaagtcagttgcttcaaaagaaaagaaagaagaagacaatgagcagtatttaaaaaattcctatgctttttctgagggatattgaaatgagggtctattaccaaactaaacttttgaaggatattatgaaatggaggaatgagaactaacaaccagtagtgagaggtaaaagcttttgatcagccaaggaaaaagtgaaaaagaagcttccaaggatagtcaagaaaggagaatctaaatgacagatggccacaaggctgcagcaggcttggttcaggatacacactgactttaatggaa

SEQ ID NO: 391823 - DNA, 551 bp, Homo sapiens
cacttgccctgtagaagagccttttttccctgaacagagcaagtattcccagattcatggacagacctagtgctttgacctttttcagacagcccatgttggccctcactccactccccatgcctgcttaagcagtgccctcccatcccaaattgtcaccttgtctatgatggtaaaatatgagcacaggagcccagcaataaggtacytggactcccacctctcaacacattgaaagctggcatacatcaaagaaacacaaccacctaggtcaagcaagtcagttgcttcaaaagaaaagaaagaagaagacaatgagcagtatttaaaaaattcctatgctttttctgagggatattgaaatgagggtctattaccaaactaaacttttgaaggatattatgaaatggaggaatgagaactaacaaccagtagtgagaggtaaaagcttttgatcagccaaggaaaaagtgaaaaagaagcttccaaggatagtcaagaaaggagaatctaaatgacagatggccacaaggctgcagcaggcttggttc

SEQ ID NO: 391824 - DNA, 338 bp, Homo sapiens
tacattgcttaataggggatgggacagcttctcacctgacacttcattaaactacctgtgctaaggcctttctagatgacagggccaagtccacatcacaatattaaatatgttgtacatttgttaaataaaaaatttaaaaagttagccaactagataatactgatgttggattcagaaataaatgttsacttccaaatatgccctgttcccctctgtattaaatggtgcttcactgattttttttgcttgtacctcaatcttcattttccaaatcaacacacagattgtggaagccagttattgccacatactttcaatatgagcaaaaaggtaaa

SEQ ID NO: 391825 - DNA, 531 bp, Homo sapiens
tattttgacaggtgatgagtgagaaccagggcaactctgatgatgtagaaacatgagtaaagtcacagaaatatgtgtgtgtgtgctggtttgagctgccctattcctggccactggtgtgtagggcttgtgatagaatgccaagagaatgaggtactaaatgaagacttggaaggagacaaatgttcctcagtgaggatgcaaatgaggagggacccaggacaaagccctggggactgctgacatttaccaggcaggtggcatttggtgaaggttacagatatacaaatgtctcttctttatctttcatagaaaggtaatggaaaataattaaaataaagacaatgaaacaaatattaatactaactgtgaaggaagatcattcccgtcagatatttaytggagcactccccttgccatagtgttctgctattactctgtataaggcatttacaatgggttggtacaggaagaaggttaaaaatcctgtggtggattccaatagcacatattctattcatcctccgccaa

SEQ ID NO: 391826 - DNA, 574 bp, Homo sapiens
aacaaaatagagaacagaagaatagaaaacatcaatgaaattaaaagttagtgttcttaaatcaacaaaattgacaaacttttaatgaaactaattttattttatttttgagatagagtcttgttctgtcacccaagccggagtgcagtagcaccatcttggctcactgcaacttctgcctcccgggttctggcaattctcctgcctcaacctctcaagtagctgggactacaggtgcacgccaccacttccagctaatttttgtgtttttagtagagacagggttttacgatgttggccaggctggtctcaaactcctgacctcaagtgatccacctgcctcagcctcccaraatgttggaattacaggcatgagccactgcacctggcttaaactaactttaaaaatatagagagaagatgtaacaaaaatcagaaattacaaaaaaaatcacaactggtgccaaataagtaaaaaagagaaaagagtactgtgaatatatgccaacaatgtggataacctgtaaataatggataaattcctagaaacaaagtggaaaacctgaaccaacct

SEQ ID NO: 391827 - DNA, 544 bp, Homo sapiens
aagagtgccgtttttctccacaatagaactttaaaagtagatccatcatttaatgttaggaatctgtcaagcatgaatttttagcctccatcaaaattttcaataattaattccatgggtttgggaacctacatattcccttctcaactatgtggaaaaaaattacctctgaaatttgataaacatttctatgtgcagtttattaatattaataaattttataaagtttaaacatttcttcatctttatagaatgatagtatcattttaaagcttattcttgtatgaatgttaatctggctcatttayaaattcccttcagttggatttcttgctcaagagaatttgtatgaaagatggtgctgatatccaccagattttgttcttatttttattgattgtttacttgttttgcataatgataggttatgtgcagaatagttcaggttctttttcttaggtttttttttttgccatgtacatgtccagttgaaatatacatgctcacttttatgtagtccatcctcttctatattgagctaaac

SEQ ID NO: 391828 - DNA, 610 bp, Homo sapiens
cagttaacttaattatagagatatgttcattgctgtgagttaaaggtgcattagcattcagtgattagctggytgtttgactcttttttaacaaacaagagagaagaaacagcatatgatctaaacatcttgttcttttgtaaaataccaaatgatgaccttggagaagaagatctcaaaataaacttctaagtaagttgtgtaagcatttgttaaggtctttctgaaatctttcaggaatgaaaggaaaggaattttgcagcaaattttatcaaaatacataaaaaatattggcatttattttttaaactattgcgaatgaagaatatattcagccaaggaatcaagtccagagcttgtcatggtcttgtcacatgcaggtatttaagaaacatcttttgtttgaatattggaggataggagttcatacaacagaaagcaaacacctggggaaaatggcaatattaataacaactaatattcatttaattaactctgtgcaccaggcaagttaagtgcttcatatatattatttcatttaatccttaccatgactcttagaggaggtgatatcattaactctagtttacagatgaggaaatgggttcac

SEQ ID NO: 391829 - DNA, 610 bp, Homo sapiens
cagttaacttaattatagagatatgttcattgctgtgagttaaaggtgcattagcattcagtgattagctggctgtttgactcttttttaacaaacaagagagaagaaacagcatatgatctaaacatcttgttcttttgtaaaataccaaatgatgaccttggagaagaagatctcaaaataaacttctaagtaagttgtgtaagcatttgttaaggtctttctgaaatctttcaggaatgaaaggaaaggaattttgcagcaaattttatcaaaatacataaaaaatattggcatttattttttaaactattgcgaatgaagaatatattcagccaaggaatcaagtccagagcttgtcatggtcttgtcacatgcaggtatttaagaaacatcttttgtttgaatattggaggatagragttcatacaacagaaagcaaacacctggggaaaatggcaatattaataacaactaatattcatttaattaactctgtgcaccaggcaagttaagtgcttcatatatattatttcatttaatccttaccatgactcttagaggaggtgatatcattaactctagtttacagatgaggaaatgggttcac

SEQ ID NO: 391830 - DNA, 567 bp, Homo sapiens
gggcaggatttgggcaagaggttttgtaataggtacaaaatatttgtggcaaaaatgaagcctggtatttkccaaccaagttctccaggtctttttacagttctttttcttcttgttaatttttgaggccagaatatatcttaatccaaatgtacaaatgaacagtctcaaggggcagagaggaattacaagcctgatagcaactgccacaagttgtgtgtaacagtttaggtgaatcaacagctacaattcaggggaaaaatatatgacatgttctaaagcaattattcagaaatgaaaatgttaagtagagtcaaaagtcatccctaatttaagccattgtaggtggctacaaaagttatctacatctattttctaaaccactctgcaaataaaatgaaaatagtaccttgaggttcactgaaaacttaggctgaaaaaggtacaaaatatagacaccaatctccttccagtggcttctatttaggtcaaacttgctagggaattttgagtcctattatcaacaagatgaaagcttttacaaaactatgatctgtataattagag

SEQ ID NO: 391831 - DNA, 631 bp, Homo sapiens
aaaattctgcagtgcagtctgacaaacagatattgaagttagagaatcttttctaactttccctaccctccttccacacccttcaggggtgaatttccaggctcaaggttacgtacgccctcctctctttattctactttctttgccctccctgtataataatctagagactgagacaaatgctctgtgtgactttccttggccaggagagcagggactgcagaatgatgactgcttttggcagaggcccagagtggaaaatttatttactgccttrtcgatgtctactgagatgggctgctgcctttccacatccattacaaagtactcatatggctagagcagagacttataaaaggctttttctttattaggctggatgaaaatcctaaaatggacaggacaaggagtcatcacgtagggccaatttgggaatttgccagtcagggaaatggcaatgagaaaggaacccactgcacccttgttcttcagggtgtcctggatttgaacttttgttttaaacgatgaaagcaaaattaaaaatacatgtttgcttgtatgatattttaaagcaaaataaacgtttgaataataacttctatttcagctctggtgaagtaacactgcaaaa

SEQ ID NO: 391832 - DNA, 668 bp, Homo sapiens
tttgccctccctgtataataatctagagactgagacaaatgctctgtgtgactttccttggccaggagagcagggactgcagaatgatgactgcttttggcagaggcccagagtggaaaatttatttactgccttgtcgatgtctactgagatgggctgctgcctttccacatccattacaaagtactcatatggctagagcagagacttataaaaggctttttctttattaggctggatgaaaatcctaaaatggacaggacaaggagtcatcaygtagggccaatttgggaatttgccagtcagggaaatggcaatgagaaaggaacccactgcacccttgttcttcagggtgtcctggatttgaacttttgttttaaacgatgaaagcaaaattaaaaatacatgtttgcttgtatgatattttaaagcaaaataaacgtttgaataataacttctatttcagctctggtgaagtaacactgcaaaataatatttatttagcagttttcaaaagactttcaccttcagccctaatcttttaaagctaatgagagtttgtgattcatcaagaactttaaaaattaaggatcattacttttactaatttaaattcaaattacctaggatgctcaattaatcaatctttaaacaatattaaaacagtc

SEQ ID NO: 391833 - DNA, 594 bp, Homo sapiens
gagatctcttgggctataagctggtaactctgtggccwtcctgggaaaccctttttttgtgaatttctattgccacaggaaaggcatagaaactcaaatttctctcattaagcataagcctgaaataacataaaatagaagctccactcttctttttcttaaggaaacataggtgctgggttttcaaagaaggaagtcaagttctctaatttccagactcgtctaataggggtcacatatatttaatctttgagttcttattttttattatcctcacattctggacatttgtaaaccctgttatttttgtgtgtgtgtgccttgactaaggttgtcagatttaccaagtaagaatacaagacccccagttaaatctgacttccagatacagatttttttttttagtttctcctcttattcttttcttttaaagccccaatttattctgcaagactctgaagagctatagccatcatctctgcagactccctttggccagcctaaatctatttatgttcattaccacaagccgctgtctgaggccccatcagtgtgaggagagtaacatctggaaggaagaaacacccaaaaacg

SEQ ID NO: 391834 - DNA, 584 bp, Homo sapiens
ccatattttccccatgaaataaaatacaatactggttttcaattattataaacttctctgatcttacagcaatgaagtagatttgtgttaccttatggtagggaatctgctgtgttgtggaaaaagactgtttttatacgtgtggaggcttctttacaagttagcacagacctggcacagaacactgtctggggattacaactgttgtttgaaccaaaagcatctgtctttgcagagatctcttgggctataagctggtaactctgtggccttcctgggaaaccctttttttgtgaatttctattgccacaggaaaggcatagaaaytcaaatttctctcattaagcataagcctgaaataacataaaatagaagctccactcttctttttcttaaggaaacataggtgctgggttttcaaagaaggaagtcaagttctctaatttccagactcgtctaataggggtcacatatatttaatctttgagttcttattttttattatcctcacattctggacatttgtaaaccctgttatttttgtgtgtgtgtgccttgactaaggttgtcagatttaccaagta

SEQ ID NO: 391835 - DNA, 594 bp, Homo sapiens
gagatctcttgggctataagctggtaactctgtggccttcctgggaaaccctttttttgtgaatttctattgccacaggaaaggcatagaaactcaaatttctctcattaagcataagcctgaaataacataaaatagaagctccactcttctttttcttaaggaaacataggtgctgggttttcaaagaaggaagtcaagttctctamtttccagactcgtctaataggggtcacatatatttaatctttgagttcttattttttattatcctcacattctggacatttgtaaaccctgttatttttgtgtgtgtgtgccttgactaaggttgtcagatttaccaagtaagaatacaagacccccagttaaatctgacttccagatacagatttttttttttagtttctcctcttattcttttcttttaaagccccaatttattctgcaagactctgaagagctatagccatcatctctgcagactccctttggccagcctaaatctatttatgttcattaccacaagccgctgtctgaggccccatcagtgtgaggagagtaacatctggaaggaagaaacacccaaaaacg

SEQ ID NO: 391836 - DNA, 654 bp, Homo sapiens
agtttaccttttctttcttacaaattcctccatacaagtgatttgcaaccacggctgaacattggaatttcctggatgggaattgcctaaaaatacaatactagaccctactatctattctgttttgattgttcggggttggggttcaatcatctgtattttaaaaagctccctaaatgtttccagtatgcagacagaatggagagctactgccagccaaatttgcttttcagttttcagcatcttgtttagagatgtctatcttccttcccaaaaccctataattaatactgttacaaaggcagcaatgatgtcaataataacagcataacaggtgcctcatgggctactgcccactaaagtgaggcaagagtactatatttccttagaaatcatcctttcagttgcctggtctgagaaaatcccataatgaatatccagggataaggcagaatacatttattgttgttttaaagtagagtgtcgcaggaaatatcygattagtttgttaatttctgtctgtaagtatttctactatttgtaacatctccaagttttctataatgtataaaagaagaattcactaaaagtttaggaagggagggagaaaaatgagggagggaataaaagacacagcaagggaaaaatggacag

SEQ ID NO: 391837 - DNA, 598 bp, Homo sapiens
acagtgatcagcccaatgtgtttttaactgaagtaacaagatccaataaaataattatttgtattttttgctgttcaaaccattgtagttgttacacctatagggctatacataactttgatcaccaaaacacaaaacagacaagggaaatgaaagataggaaatgagatarcataaatgtacaaaaccctggaaagatagtgagccttgcatgccaaccgccagttatcatctctctgcaaaggcctttacagagaatggattgaagagttaggtaggaagtcaccccctgatgaatcaactctggcaaacaccagaagcgatctattgcaggcattcagccctgatatcatggctcttatgaacctatatgggagaccatttataaaactaagtctctgtgtacttaggaagagacacaagtgaaatttataaaaaaggaagacaactaggaaaaatgcagaaatagttactaaatcttagacatagagatcataaaagttaccactttgggctaacattttttaaaagttctctttttctcaatgagtgaaatatgtgcaattgtagccttttagatgtaacagaacattcagat

SEQ ID NO: 391838 - DNA, 581 bp, Homo sapiens
ctctctctcttccttatctggctgatgatactttgtaactctcagctgaatatcgtgcaatgttctgacacctttctctgctcaatgcttaattttgctgcatttgttatgaaattttcacttcctgccaaaaatgcaaaaagttacttgcatttatggagaaaagaaaatgtaaattttcttgraatgataattttctttttcatatattgattactgaaagatttatttttaggatacaggtaataatccttatcattttgtgaaaacaatccttacaaataagataaaataataactgatgcctacatgactaaatcagtactgatatggattggctaactgatggaagctttcagagagaagtcagaaactaactaaactgacataacaacaacagcaaccgcaacttctcacctctaggactattatcatttatatccaccgaagtatataatggaatgtaaagcattcagatgaagctatactattcagtaacatgtatctaaatttcatctccagtattattaaaaacaaaaggatgtataaaaaaatagaatgcatactgaagagcatgattt

SEQ ID NO: 391839 - DNA, 581 bp, Homo sapiens
ctctctctcttccttatctggctgatgatactttgtaactctcagctgaatatcgtgcaatgttctgacacctttctctgctcaatgcttaattttgctgcatttgttatgaaattttcacttcctgccaaaaatgcaaaaagttacttgcatttatggagaaaagaaaatgtaaattttcttggaatgataattttctttttcatatattgattactgaaagatttatttttaggatacaggtaataatccttatcattttgtgaaaacaatccttacaaataagataaaataataactgatgcctacatgactaaatcagtactgatatggattggctaactgatggaagctttcagagagaagtcagaaactaactaaactgacataacaacarcagcaaccgcaacttctcacctctaggactattatcatttatatccaccgaagtatataatggaatgtaaagcattcagatgaagctatactattcagtaacatgtatctaaatttcatctccagtattattaaaaacaaaaggatgtataaaaaaatagaatgcatactgaagagcatgattt

SEQ ID NO: 391840 - DNA, 581 bp, Homo sapiens
ctctctctcttccttatctggctgatgatactttgtaactctcagctgaatatcgtgcaatgttctgacacctttctctgctcaatgcttaattttgctgcatttgttatgaaattttcacttcctgccaaaaatgcaaaaagttacttgcatttatggagaaaagaaaatgtaaattttcttggaatgataattttctttttcatatattgattactgaaagatttatttttaggatacaggtaataatccttatcattttgtgaaaacaatccttacaaataagataaaataataactgatgcctacatgactaaatcagtactgatatggattggctaactgatggaagctttcagagagaagtcagaaactaactaaactgacataacaacaacagcaaccgcaacttctcacctctaggactattatcatttatatccaccgaagtatataatggaatgtaaagcattcagatgaagctatactattcagtaacatgtatctaaayttcatctccagtattattaaaaacaaaaggatgtataaaaaaatagaatgcatactgaagagcatgattt

SEQ ID NO: 391841 - DNA, 590 bp, Homo sapiens
cctaaactctgagaactagtccaggaataggttgrtctgtaggaggagaccagactggaaagggtttaagaaatcaaagagctaaaaaattgatacttcatagtctcttgggagtcaatgaagcctattatttgaatctcatcaacaagctaaatctaaatgtgcattttctagggaagctgtaagtaagattactcagggatcgtggaatgacatattcttacctccagagtttgagaatggaaattattctctctagttggagtgcagttttcatggttagaacctgcagagtgaaaaggagagattgattaaatatgttgcttcccatcccagccatccacaagttatcatttttagccactgtgattattttgcattcagcacaaagatggcaatctggcaggtttgtgagccttgagactccaacagattggggccgaattcttgcttgtgtgtcaaggcaacagagcatgctcctgccagtcaatatgccttttcttgccttgtggaaactatttctactccatgccagtgtcaattgcatttcccagatatggctgcaaaatactgtaacaaaggttgctatt

SEQ ID NO: 391842 - DNA, 659 bp, Homo sapiens
aagagagaaaagatgcattgctcttgcttttctgaaaaaaagacatattgaccactcagatccctccaaacatgttaattccattttccattctcctgctccccctgtgtctgtcactgatgttctgtctgcccttttggtcttgttccttcttttccttccttttcttttccattcttctcttttttttttcttttttcctctctctctctcctaattccatcttaactcaaggttctgaaattgttattttatctaactgtgaaagggcgtaaatggatgagctaaagttactccaatccttaaccatttcatgccaaacctgttgtcacactctttattggtacagaacgggtcatttcctacaaatttgacgggaccatctgctcytcgggatgctgctaggtggttttcagtggcatgaggaaagtcttagaaaatatactgtaaggagctacactgattgaccaaagcagttgtgaaaaatcctttagtttctagaaaggtgggactggcttggagttatggatggacagcgaattgttggcagcaatcaggggaagcaatgaagagatatggggtagaagactgttaagaaataaattactctggagaaaggaccagggaaaatggatgaggaggagagtggagagaagaac

SEQ ID NO: 391843 - DNA, 590 bp, Homo sapiens
ctttttttgtgagattttttactcagctctagccaagggtctggatcctgagcatttctcttccttcccacttttcttccttaaatccttattttytgcttccattttctctcagtattcattttactcagcaaaaaggtgaatctaaaccataagacctaaagactcaaatgggtgcttttcatggttactctgttttttctctgaataaaatatcacatgattgtacactttgtacagactgattgaattgttctaagtaaatacacaaaaccaaaatcaataaaggtttagagttaattctgtatctggaagtaggtgaagagagttttacactagttggattccaaagttgcagatattgaaaacagaaacaataacaacagaaggataattatacattatgattgtgaggaagctagaaaccagtgcaaaagaatattttcgcactaaaaatattttagtttttcttgagtgcagagaaaacaaagaaatattctgttgcactacattttttttgcactgacttgatctctagctctgtttgtttagacaatgtgattctgaggacaaatacaggaatttagaat

SEQ ID NO: 391844 - DNA, 587 bp, Homo sapiens
gttcttaatatacatattcactccaaaaaaagaccactttgctttaagtcagttcttgctcctctcagtacactgttacactcacttcccataacattttctccttcacaacacttaccataggttaaaatcatacatgataattttaaaaattttwaaaaatgtaaaagaatagtatctacaatttaatccctcaatcatctatttagcttttttgcatttaataaaatgcaatttcttagtcacaaaaatatttgttagttcttcactggcaacatgaggcaagaaaaaaaatggaaggaacacgcggataggactgtggacccaggtgacaaacgtgagacagaaggtatgctacagagtcaaaagagagcatggaagagcataaattcttgttcggtcattacgggggaagatagcaggctgagatattaaatgatttttgtttgcccatttttaaagaaaatgttaaggagattctcatttgctaaatgtctttgtaaacagacaagagaaacagatgagaactattagatcaaatcgtggttattgtacaagatgttctatacctaatagataaacaagac

SEQ ID NO: 391845 - DNA, 587 bp, Homo sapiens
gttcttaatatacatattcactccaaaaaaagaccactttgctttaagtcagttcttgctcctctcagtacactgttacactcacttcccataacattttctccttcacaacacttaccataggttaaaatcatacatgataattttaaaaattttaaaaaatgtaaaagaatagtatctacaatttaatccctcaatcatctatttagcttttttgcatttaataaaatgcaatttcttagtcacaaaaatatttgttagttcttcactggcaacatgaggcaagaaaaaaaatggaaggaacacgcggataggactgtggacccaggtgacaaacgtgagacagaaggtatgctrcagagtcaaaagagagcatggaagagcataaattcttgttcggtcattacgggggaagatagcaggctgagatattaaatgatttttgtttgcccatttttaaagaaaatgttaaggagattctcatttgctaaatgtctttgtaaacagacaagagaaacagatgagaactattagatcaaatcgtggttattgtacaagatgttctatacctaatagataaacaagac

SEQ ID NO: 391846 - DNA, 597 bp, Homo sapiens
gaagccagctgtctagcttccagccgtagaatgatcataagagctactrcactcaaggtcaaacacactgactcacccatgaaaattgccaaggagtttgagtggaagttctctgatattccaatgactttgaatgggacacggtaattccttcccacagccagggcttacttaaaataagtaaatgaataaataaagtctactccctggatcttttttttgctcttgtccctgcagagtaaggggatgccagccaaggctgacatcatcattatagcaagacaggtgctttttttgaatacttcacaaggacaagggcctggtattatgtaggtcttcaaagaatatatatatatataaatttttttaattcagtctcctacatttatagtatggggaaataagacaagagcgaggaatgccttgcttgggatattgcaattggatggctgcactgaggactatttaagcaaccttaaaatcacaaacacacatctgtgatgactttttaattatatctgtcattttggaaaagatattaaacatcttcctcaaaagttatttttactttacacactctttaataatgttaaaaag

SEQ ID NO: 391847 - DNA, 604 bp, Homo sapiens
aatttatattcctttatacaccaaaaataataactgatactttgatttggtacaatccttaaagtttactaaatgtacacaaacaggagcccgtctaatctccagagcaatctggtataggaggtagaatggtagaattcttttccgcattacatgacacacagctataaatgcagccaggatttgaacctgtgttttctaaagtacaaagagaaaggctcattcttctacttcacactgtcctccaattaacaagtttctcagatatctttctccgttattctgtataaaggcaattattcagaatgcagttaataatctttagcatgcagatttcccatagcctctcataaatacatagtttggttgagcttgaaaaattcccygaatcatcttgtccaactgtctcacctcacatactaggacactgcattttgtgaagctgatttgcctattgtggtatatttgcccaatgtgatatactattttgtgaaaaagtccaggacgcagatggcatggtttctatgcagtgctcttctcccaaccccacactaggtccctttttgaataccaacacatctccctggtgttctgtcccacttaa

SEQ ID NO: 391848 - DNA, 545 bp, Homo sapiens
acacattaacttaaaggacacattcaaactatagcagttaccatgtaagaagttaggttatcccaaagctggagagaccacatgcagatagagggagatacctgaagaccccaagttgttccagactagctgttcaaacactcctggcccaggtgtaaggagaagcagcctttgagagacctcacaccagaaacctcatgaaagaccccaagccaaacttgcccacttgagacacaatcaaatttctttctttctttttgtcttttttgagacagagtctcactctgtcccccagactggagtgcagtggcatgatctcagytcactgcaacctctgcctcttgggctcaagtgattctcatgcctcagcctcccaagtagctgggactacaagcacgtgccatcatgcctggctaatttttgtatttttagtagagacaggttttcgccatgtcagccaggctggtctggaactccccggcctcaagtgatctgcctgcctcagcctcccagtgtgccgggattaaaggcatgagccaccacgc

SEQ ID NO: 391849 - DNA, 592 bp, Homo sapiens
tttcacttatgaaattagcaaagatttaggaaaagaaactactgtcatttgctgctggtaagaccgtaaattggcccaaaacttttagaaagttattttacaatattyctcaagaactttaaatgtctcatatctgtcaatccagacagatagatggatggatggatggatggataaatatcagatggatggatggatggatggatggatttatcagtaatagatacatagatggatagatagatagatacatagacatctatagagatatatgtttctatataaatatatatctatattatcctaaagaaatatatatttgaacaaaatctatttatgaaaatgttcactaatgcaaaacttataatggcaaatagaaagggaatctgctgaacaaaatattatcaatcccaaataatgagatattgccaaaacactatatttaaagaacttaagtgatttgggaaaatattatcttgtgagggcaaatacattaaatttgtatattcagtattgccaaatttatataaaaaaatgggtagaatttctttttaaaaaacaccttaaaatataaacggagtacttcccaata

SEQ ID NO: 391850 - DNA, 639 bp, Homo sapiens
atttccccacttacctccctatttactacgtacactagcaattttaggaaatgctgcaagactgaaccaaaaagatcatttctgctagaaagactgtttacctagaatctttataatgagatcctatctacagcagggttggattaattacacctccagaatgtaatggttaaaggaaagaagtatcttttagacctatgagagaaaagaccctattttcactttattcctagtatctttgagaagtaaaattagttcacaaagcttgccagtaaaatttcagcaaccaggaactgtatataaatgagctgggaaatattccatttgtaatatatgaccaaaataaagcaatacagaatgtaggcatcctgcagcagaattccaagcttgtgcaattcacaaatttaatcataacttcatatgagaaaaaaatttctccattattttgaaaacatgggtgttctttgctactgaattgtayctgaaattcatcttcttccagtggaaaacagttggaatatttgattccacttgaaacatcaatgaaatagtaaaaataagatacttggaaataaggggaatttttgaggctgattaaaaactattttgatgtgttaacagcccttatttaaagttaca

SEQ ID NO: 391851 - DNA, 602 bp, Homo sapiens
gactgttcagtccaaaccaaacattttactgatgaagaaattaagtcctggtgatggagtggccagttacactgccaagccagcgcagagctgccacttgaactcgagtctcctaactctcgggccagtacccttcccacttcacatgacgctagtagaaaaagtggaggaataaatgactgctgtgagaagcaaaggtccattcctaatagtccaggctggtgtcacrgcccctcatggcaaataccctgaggcccttagaactgatagaagatggatttgagccaaagatacagttcatgtattcccatgtttttcccttatataagattatgataaaaaagaaaaatgggtaaattaattatggtataatcgtggcatactaaacaacaaaaagatgaagactgctaatacaacaacatggatgaatctcagacaactgcacaaaatgaaagaatccagatacaaaaaataaatatggtgtgattcttatctgatttaaaagaacatatagaaataatttctggtgatagaggtcagaaagtcattgcctctgagggtggcagatgggacttgaatagaaagaggaataagggaactta

SEQ ID NO: 391852 - DNA, 517 bp, Homo sapiens
tatgtcagtgtgaaatccctccaaagtaaatccccctttatggttttttattggtgtttattcttttttaatacagaaaactgtaaactttttattagggcaggtttttttgtgcaaaagccttgtcatgggctagatgacatttcttttcctgtagagatacttggacattttayaattcaattacttccttccaaaagccatatttagaattccagccaatctgtgagccagaaaggagtgagccagtataataatcaaggtaatgtggcaagaaggtgtgaaatttcttagcctttctagaagagatgggtgaaaataaatgttttcagggtcagtaaataactttcccctagtagccagacagaaagcatcttactttgctcaagctggacctttgtcatttgaaggatctcctcctaatgccatctaagcttgagaggttcatatggctgcagcatggtttatcttgctgtttaaacattgtgtccattcaagctccattgtagacctttct

SEQ ID NO: 391853 - DNA, 517 bp, Homo sapiens
tatgtcagtgtgaaatccctccaaagtaaatccccctttatggttttttattggtgtttattcttttttaatacagaaaactgtaaactttttattagggcaggtttttttgtgcaaaagccttgtcatgggctagatgacatttcttttcctgtagagatacttggacattttatrattcaattacttccttccaaaagccatatttagaattccagccaatctgtgagccagaaaggagtgagccagtataataatcaaggtaatgtggcaagaaggtgtgaaatttcttagcctttctagaagagatgggtgaaaataaatgttttcagggtcagtaaataactttcccctagtagccagacagaaagcatcttactttgctcaagctggacctttgtcatttgaaggatctcctcctaatgccatctaagcttgagaggttcatatggctgcagcatggtttatcttgctgtttaaacattgtgtccattcaagctccattgtagacctttct

SEQ ID NO: 391854 - DNA, 644 bp, Homo sapiens
catacaaattaaataccaaggaaaaacttctaacaaaaaatgtggaaaacttccacactaaaaaccacaaacatattttaagataaattacagacctaaattaaatagaagtatataccatgatcatgaattggcaagatcaatattataaaaatattaattattcttaggaagaagatcaataaagtcttcccttaaaatgatgtagtataaattagagaagacagatgaaatttaatagagcttaagcaagagaaaaaagcaaaattaattcagctagattggagaatgattggccaaaaacagtttttggaaaagggaacatttgtaattgtagtttaataaaagttttttgagcaatgtgtgtccagccacatgggtgttaaagtcatgagactaccaagaaggatgggggcgaataaaggtaggtgctaatattatacaacactttcaatggaataatttttatgtcttcaaggtctctcacagtcccctctactgttcaacagsttgctgggtattataatttgatcacatttagatttgttcagaattctagattgataccactcatattaattatggtcacagattcactggttattgtagacatcagggcttcttgtaacttttgtctttgtagt

SEQ ID NO: 391855 - DNA, 594 bp, Homo sapiens
cttgactttccctctgaaacctgatacgcacgccagtcattcttgggaaatggtaacaccattcactcagctactaataaaaatcagccgggtgcggtagctcagcctgtaatcccagcactttgggaggccaaggcgggtggatcaggaggtcaggagttcaagaccaacctggccgagatggtgaaaccccgtatctactaaaaatacaaaaaattagccgggcatggtggcaggcacctgtgatctcagctacttgggaggttcaggcagagaattgcttgaacccaggaggcggaggttgcagtgagccgagatcgcgccactgcactscagcctgggcaacagagcgagactccatctcaaaaaaaaaaaaaaaaagaataaaaacctcaggtcctgtagtcttttctttcctaacctccacttccagtcccttagcaaccttaaagctatcccaaatgtgacttctcagtatccactgttccaccctactccaagtcaccatcatctcttacctgacaatgcctcctaagcgacctgcctgcttcatctcttatgcctggaaaggccactctctacagagaaatcaca

SEQ ID NO: 391856 - DNA, 609 bp, Homo sapiens
gattctggttccactctctaccaggtttgtgtccttgagtaagggcaagttacttaacttctctaggtctatttattcgtrtgcgaaatgggaataaaagttagtgtttatctttaatggatttggttgagaggattaaatgagctaaaaccataaatgcctagcccagagtttagcataacgaagatgttcagaaagttactcttgttaaattgggatgttccacctttggggtccttccatcgtgggacaaaggtgcacttattgtggtttttttttaaattcatcaccttaaaaacatcatgtttaactcttcctgaacaatttggtaaaaactcccaaaggaccctcccatatgtggtggaaagagaagcttctctctgattctctgctttttttctttctgcctttctgtctttaatagccattccacagtttgacccagattttgaagcagttgcattcctggatatacagaatccaggaaaccaactcatgctttctggtacagctgctatttcttatctcctctcaacactgtgggctatattctctgattttttttttctaacaccactagataaatttcacaagggcagagaccttgca

SEQ ID NO: 391857 - DNA, 609 bp, Homo sapiens
gattctggttccactctctaccaggtttgtgtccttgagtaagggcaagttacttaacttctctaggtctatttattcgtatgcgaaatgggaataaaagttagtgtttatctttaatggatttggttgagaggattaaatgagctaaaaccataaatgcctagcccagagtttagcataacgaagatgttcagaaagttactcttgttaaattgggatgttccacctttggggtccttccatcgtgggacaaaggtgcacttattgtkgtttttttttaaattcatcaccttaaaaacatcatgtttaactcttcctgaacaatttggtaaaaactcccaaaggaccctcccatatgtggtggaaagagaagcttctctctgattctctgctttttttctttctgcctttctgtctttaatagccattccacagtttgacccagattttgaagcagttgcattcctggatatacagaatccaggaaaccaactcatgctttctggtacagctgctatttcttatctcctctcaacactgtgggctatattctctgattttttttttctaacaccactagataaatttcacaagggcagagaccttgca

SEQ ID NO: 391858 - DNA, 538 bp, Homo sapiens
agagcagctactaggaaagaaaagaaagtgtcactgcttctgtcttgggcttcctctctgatcagccgtgtctgtgtgcccatgtcctggcagccagcaaggtttatagggcccctgctccctctagtcatcccacgtggcactaactgactgcaagttgggcctgcaagttctcctaggaggtggtggtgtcaaggtcgctgtargctgctttgcagactccaccttctcctcaacccaggggatcccaggatcttggctcagggaaaaaggcggtagcttcaccaaacacttcaagccagttttgccactgaaaacaaacagaaagcccaaattgacatttttattccaatgttcccccctccacaccaaacacaagaaatcatcaatcaataaatcagtcaagcaaaattagacactcaaagaagtggaagaacatcagtgatgcggagagagggaacctgatatgaacattctctacctctttaaaatacattccttcacatgtgagccttaaaaataacagctctgtgggggc

SEQ ID NO: 391859 - DNA, 538 bp, Homo sapiens
agagcagctactaggaaagaaaagaaagtgtcactgcttctgtcttgggcttcctctctgatcagccgtgtctgtgtgcccatgtcctggcagccagcaaggtttatagggcccctgctccctctagtcatcccacgtggcactaactgactgcaagttgggcctgcaagttctcctaggaggtggtggtgtcaaggtcgctgtaggctgctttgcagactccaccttctcctcaacccaggggatcccaggatcttggctcagggaaaaaggcggtagyttcaccaaacacttcaagccagttttgccactgaaaacaaacagaaagcccaaattgacatttttattccaatgttcccccctccacaccaaacacaagaaatcatcaatcaataaatcagtcaagcaaaattagacactcaaagaagtggaagaacatcagtgatgcggagagagggaacctgatatgaacattctctacctctttaaaatacattccttcacatgtgagccttaaaaataacagctctgtgggggc

SEQ ID NO: 391860 - DNA, 509 bp, Homo sapiens
aagcaattagataaatccagattatagggacattttgcaaaacactggcttggactcttcaaaattattcaagtcataaaagacatttaaaaagctgcagggacaattgaggaagtttaagtatggagtttattttagataatactagwgtatcaatgttaagtaccttggaaggatgattggcattatatttatataagagaatgtcccattggtgaaactgggtgatgttagtgctctttacaatttttttcaggatttttgtaggtttaattttgttttaatttgtaattttaattttttagacacagtgccttgctctgtcacccaagctggagtgcagtggtacaatcatagctcactataaccttgaactcctgggctcaagcaatcctcctgcctcatcctcctgaatagctgggacaatagggccatgccacacctggttaatgctttttaatgttttttttttctgtagagataggatcttgctatgttgctcaggctag

SEQ ID NO: 391861 - DNA, 511 bp, Homo sapiens
ctcaggcccaggccaatcaggttttgcatcttgattttagaatctaagtttaaattttggttacttttttcacattagtaactatcattcaaaaacattattttaataactttatagtattttactatttagttgtacaataatttaggtaaacatgattataagatttttatgtcatttctattttttgtgattacagatcacattagaattaatattsttaatttttaaaataaatccataatttttaccttaggataaaaatcctacaattggaatttctaggctaaaggataagaaaaaaagtttgaatgtattgatatgtatttgccaaattatcctgaaaaatgtttaactcttcccaacaacgaacacacctgcctgctttccctcactctgtgctcactaacaaaggtcttatcattaagagaaaaaaaagtgtttagatttaatacattaaaaaatgttattttattgtgctttattgttatgtttctaaactccctgtggg

SEQ ID NO: 391862 - DNA, 590 bp, Homo sapiens
tattataacaaaattatgtggggaaagtgggatgaaaattggagtccaaacaggaaaaggatcaaggtaaaagttatgatttttaaagcagagcccattcattggctttttagatgaagggtgatgggcgctaacctgctgcagcacctggatgcaattgggtacatctcaatgagtgatgtggctattacaattttaaatgggaacacacataatacgtttgaaattacaccctttgaaactacttacacttatgattaaaaggttgtagtttcaattttttaactgtgaaatgttttaattgtgaagagttttttaaaatcattttagagagcctatgagaaaarcttcagcgtatacaatgatgcttaagacatatacactgtgcatcttctagaaactcacagtttaacaggaaggcaaatgcactgaaaattctaattcaacaatgacatatgattagcatttcttatgatatatcataagagagatgcaaaaacctggcatgaggacccacaggtggaagagatgggtgataaaatcagttttaaaatactcctagtaaatgcagctaatatttattgtacccc

SEQ ID NO: 391863 - DNA, 627 bp, Homo sapiens
cattctgtcccatctccaccccctctcccagtctctgataaccatcattctactctaaacttccataagttcctctcttctacataacacgaataagtgagactgtgcagtatttgtcttcctgtgtctggcttatttcacttagcataatgtctgccaagtttatctatatcgtctttattttttagagctgttttaggttcacagtaamattgtccagaggtacaaaaacttaccatatacccactgcccacacaaattcatagcctcactcactatcaacagcccccaccagagtggtacatttgttacaatcaaatctacattgatgtgtcattattacccaaagtccaagcttacagtaagggtaactcttgcagttgtacattctatgtttatgaaaaatggataacatgtatctaccactatagtatcatacagattcatttcactgccctaaaaatcttctgtgctccacctatttatctttcccaactaagccttggcagccaatgatctttttactgtcttcatagttttttcccttttccagcatgtcatatagttggctacagtatgtagccttttcaggttggcttctttcacctagtaatatgcatttaagtt

SEQ ID NO: 391864 - DNA, 627 bp, Homo sapiens
cattctgtcccatctccaccccctctcccagtctctgataaccatcattctactctaaacttccataagttcctctcttctacataacacgaataagtgagactgtgcagtatttgtcttcctgtgtctggcttatttcacttagcataatgtctgccaagtttatctatatcgtctttattttttagagctgttttaggttcacagtaacattgtccagaggtacaaaaacttaccatatacccactgcccacacaaattcatagcctcactcactatcaacagcccccaccagagtggtacatttgttacaatcaaatctacattgatgtgtcattattacccaaagtccaagcttacagtaagggtaactcttgcagttgtacattctatgkttatgaaaaatggataacatgtatctaccactatagtatcatacagattcatttcactgccctaaaaatcttctgtgctccacctatttatctttcccaactaagccttggcagccaatgatctttttactgtcttcatagttttttcccttttccagcatgtcatatagttggctacagtatgtagccttttcaggttggcttctttcacctagtaatatgcatttaagtt

SEQ ID NO: 391865 - DNA, 615 bp, Homo sapiens
gcatttggtatggtcagtgttctggatttagccattctaataggcatgtagtgatatcttattgtgctaatttgcattgctctgatctatgctcatctattttttatatctgcactggtgatgtgtctgttaaagactttggcccattttataatcaagttattacttactgttaattttaagagttctttgtacagtttggataatagtcctttattgaatatgtcttttaccaatattttcttccagtctgtggcttgaattctcactctcttggtagtgtgttttgcagagcagaagttttattaataattttaatgaagtccatgttatcaattrtatctttcatggttcctgactttggtattgtatctaaaatgtcattgtcatacctaaggttatcaaggctttctcctatgttatcttctaggagctttacagttttgcattttacatttagagttatgatccattctaagttaatttttgtggtgaatataagacccgtatctaaatttgtttttctacatgtagatacctagttattcccgcaccaattgttgaaaaggctgtctttgtattgcctttgcttccttgacaaagatcagttgatta

SEQ ID NO: 391866 - DNA, 615 bp, Homo sapiens
gcatttggtatggtcagtgttctggatttagccattctaataggcatgtagtgatatcttattgtgctaatttgcattgctctgatctatgctcatctattttttatatctgcactggtgatgtgtctgttaaagactttggcccattttataatcaagttattacttactgttaattttaagagttctttgtacagtttggataatagtcctttattgaatatgtcttttaccaatattttcttccagtctgtggcttgaattctcactctcttggtagtgtgttttgcagagcagaagttttattaataattttaatgaagtccatgttatcaattgtatctttcatggttcctgactttggyattgtatctaaaatgtcattgtcatacctaaggttatcaaggctttctcctatgttatcttctaggagctttacagttttgcattttacatttagagttatgatccattctaagttaatttttgtggtgaatataagacccgtatctaaatttgtttttctacatgtagatacctagttattcccgcaccaattgttgaaaaggctgtctttgtattgcctttgcttccttgacaaagatcagttgatta

SEQ ID NO: 391867 - DNA, 615 bp, Homo sapiens
gcatttggtatggtcagtgttctggatttagccattctaataggcatgtagtgatatcttattgtgctaatttgcattgctctgatctatgctcatctattttttatatctgcactggtgatgtgtctgttaaagactttggcccattttataatcaagttattacttactgttaattttaagagttctttgtacagtttggataatagtcctttattgaatatgtcttttaccaatattttcttccagtctgtggcttgaattctcactctcttggtagtgtgttttgcagagcagaagttttattaataattttaatgaagtccatgttatcaattgtatctttcatggttcctgactttggtattgtatctaaaatgtcattgtcatacctaaggttatcaaggctttctcctatgttatcttctaggagctttacagttttgcattttacatttagagttatgatccattctaagttaatttttgtggtgaatataagacccgtatctaaatttgtttttctacatgtagatacctagttattcccgcaccaattgttgaaaasgctgtctttgtattgcctttgcttccttgacaaagatcagttgatta

SEQ ID NO: 391868 - DNA, 531 bp, Homo sapiens
aaggtgtcaattatattgaggtgattgatggtgtttttgagttcaactatgtccttactcattttctaataaaaatcaatataaatattttctaatataaaatagtgttgaagtctctgattagaatagtggattcctctgtttctctaccccttcccattggtttttgcctcacatattttgatgctctgttgttaagcacgtacccattacggatagttatatcttggaattaaggattattattgacccccttatcattaggtaatgcccctctttcttactgataattttccytgctatgaagtctgtcctgtcccaaattaatacagctacttcagctttcttttaattagcgttagcatggtatgtcctttctccatccctttacttttaatcatatatgtccttatatttaaaaatgggtttgttttagacagcatactgttgggttttgttttttgatccattctaacaatctctatctttaagctggtgcatttagaccatcaccatttaaagttattattg

SEQ ID NO: 391869 - DNA, 531 bp, Homo sapiens
aaggtgtcaattatattgaggtgattgatggtgtttttgagttcaactatgtccttactcattttctaataaaaatcaatataaatattttctaatataaaatagtgttgaagtctctgattagaatagtggattcctctgtttctctaccccttcccattggtttttgcctcacatattttgatgctctgttgttaagcacgtacccattacggatagttatatcttggaattaaggattattattgacccccttatcattaggtaatgcccctctttcttactgataattttccctgctatgaagtctgtcctgtcccaaattaatacagctacttcagctttcttttaattagcrttagcatggtatgtcctttctccatccctttacttttaatcatatatgtccttatatttaaaaatgggtttgttttagacagcatactgttgggttttgttttttgatccattctaacaatctctatctttaagctggtgcatttagaccatcaccatttaaagttattattg

SEQ ID NO: 391870 - DNA, 605 bp, Homo sapiens
atcatgggtggagggcaggtggggtgaatcagtacagaaggtggtaatatggtgagggagaaaagaaagtaaatgacagcattgaggctggagctgttgcctctcccagggccaccctcaggaaatgcactcggcatctgcacagtcctcaaggccatgggacaccttgctggccccagtcccaccrtctatgtgagactgtgaccctgtgtccttccccatttcctccctcagactccaggacacactcgcagctcccatcttcatgttccgtgggcacatgtgaacactgacctgctcactgtccacttggaccaacgatcactgttgagggtttgtgaaaacaggttaaggcttcttccaagggagacgcagtgcaaaaagcaactgagacaagagagcgtgcaggagtgtttcaattcatgccagtcattgaatcaggtcctgttccacatgtgtgacttggccaaggcagatgccatgcactggacttctggactctggttgtgtgaccctgtacccttccccatttcctccctcagactccaggactgcgaacagggctgggtctcctctaggatctccttaccagacccaggatggtg

SEQ ID NO: 391871 - DNA, 605 bp, Homo sapiens
atcatgggtggagggcaggtggggtgaatcagtacagaaggtggtaatatggtgagggagaaaagaaagtaaatgacagcattgaggctggagctgttgcctctcccagggccaccctcaggaaatgcactcggcatctgcacagtcctcaaggccatgggacaccttgctggccccagtcccaccatctatgtgagactgtgaccctgtgtccttccccatttcctccctcagactccaggacacactcgcagctcccatcttcatgttccgtgrgcacatgtgaacactgacctgctcactgtccacttggaccaacgatcactgttgagggtttgtgaaaacaggttaaggcttcttccaagggagacgcagtgcaaaaagcaactgagacaagagagcgtgcaggagtgtttcaattcatgccagtcattgaatcaggtcctgttccacatgtgtgacttggccaaggcagatgccatgcactggacttctggactctggttgtgtgaccctgtacccttccccatttcctccctcagactccaggactgcgaacagggctgggtctcctctaggatctccttaccagacccaggatggtg

SEQ ID NO: 391872 - DNA, 537 bp, Homo sapiens
cagagagggaggaactatgctcatggaatttgtgaatcggccaaatgtagagtcgtagagttgtccctgtgtttgcctgcagagcatggagggttgtgggggcaccagaaggagaacaggctcagatctttccgctggkcaattctatcactagcagagcagacctggttctcagagaggtcacaggaaggatcctccagcctccaatatcatctccccactgacgcagtgtttaaaatttgctgctgtcaggtaagacaggccccccacccccacccccccgcccactaacatggaagtagtaccatggcacagggcaagggaacccaggagggcttcatcgacagctgtgtccctcagtcaacagaccatgccccactccgagagcaggaacctggtgtggccaacagaggcgcctgatgcataccctctgcaccccacacatgttccatgtccagtgggaggaggagacagagggtctgccctcagagggggcacccaaaggggacatggggcaggttcattggacacagaaaa

SEQ ID NO: 391873 - DNA, 436 bp, Homo sapiens
tgacaatcaaaaatgcctgcagatatttccaaatgtcccatgggggaaaatcgtaccttccccactctctgttgagaagcactgggttagagcaaagtcagagctttctgactgggaagaaagctctctgttaataagaccagaccagtgggaagatgaggtaactgccaaatggaggtgtgggaagaatggcttggaggcagggtctgccctcctgtgtggactgtctaggcagattgatgggggagcaagattctccaaagctacatgatgctgtcacccatcttggtctggtacagggcctcggcctcggcctagctcctctgggcaatctcctcatackgggtgcagaccttggcaacgatactgtccaggtccaggcagcggtttttgtccatggaaagaaccacagacgtgtcgctggtgtctgactgca

SEQ ID NO: 391874 - DNA, 436 bp, Homo sapiens
tgacaatcaaaaatgcctgcagatatttccaaatgtcccatgggggaaaatcgtaccttccccactctctgttgagaagcactgggttagagcaaagtcagagctttctgactgggaagaaagctctctgttaataagaccagaccagtgggaagatgaggtaactgccaaatggaggtgtgggaagaatggcttggaggcagggtctgccctcctgtgtggactgtctaggcagattgatgggggagcaagattctccaaagctacatgatgctgtcacccatcttggtctggtacagggcctcggcctcggcctagctcctctgggcaatctcctcatacggggtgcagaccttggcaaygatactgtccaggtccaggcagcggtttttgtccatggaaagaaccacagacgtgtcgctggtgtctgactgca

SEQ ID NO: 391875 - DNA, 540 bp, Homo sapiens
atgctgagagtgacaggtcagcacttctctgcccctcagccactcagccagaccagccagcctcaggaggttcccaggatgggtgcacagccccagtgggggcaggaccccaggcaaggactccaaggaagaaaggagaggacgggggagggctgtgaaggtgacgttgtggctgacaaggagaaggaagttgcaacagaagttcaagaatgcacagcagctgcctctaggacctcatccttcagggaggaggtgcacatatgaatgcacaaagagcaagttctcagccacagggacacctagaactgggktctaaggggccttggagggagagctgcaggggaggagagaggaatcagtctgacaaggacaggaatgagcatggctggagaagaagtcaaggtcactgccaagtgccctaggagagggtgagcagagagaggggctgaggccagcctgggcagggtagagagaatggaccacttgggccaggccagaaaaaccatcagcttttcctcttccaaacttgtacaacaaaaa

SEQ ID NO: 391876 - DNA, 538 bp, Homo sapiens
agaaagcaggagcgccttgggaactgagggatcacagcggcagcagggagtcaggccgtagaatgctagccaggtagcaggctctaaattgacacttatagactttttcaaccttcatggcaaccctctagctctttttttacagatgagggaaactgaggctaaggagttaaacaacttttccaggggcccacagccaataagtggcagagccaagcctccagttcagtttctgtcccagcctggagcacatgctacggactgagrcatatacgactcagagctctggaaaggctccttgtgcaggcactggcaggatgttctgtgtctgtcccttccttctgtgtctgtaagttctcagcttacagaacaagccctgactctgagcaattgacctgtatttgatcatgtttgcaaagtggtgtggaattgatagaaaaggcacaaacaggactccgtgcttctctaagcatagtccttagaagggcactttgcatggttttcccagcaaaggggatggtttgtgctgccccagctt

SEQ ID NO: 391877 - DNA, 559 bp, Homo sapiens
tgcctttccttctttgcatacacacctgaatattctgaatccaggattcagatttggagcctaggggcaggtggttgggctgctctgtaagccttggtcctgacccctgtgctgtgctgtcactcagcctaggtggagttaaaatggyattctttggtaacaggttcttgttaagaatttaggagtaaggagttttaaaataggagggcaataggtgagctaggatttgcaaatgcttggggggtcctgcctgtgacagtcactcatgagtccttccatctctcccccctcccttcctcttcgtctctctttctgtctctctcctccctccctcttcaggaatgccccccattcacaagtcaacagacacggtatctttttcatcccaaccaagagcaaataattagaaacagtttaagagtgtgtgtgtgtgtgtgtgtgtgtcctccctaatctctccaatccatccaactctctccctgccagagtgaccatcctggaaaggagacccgataagggcagtgtcccatccaatgccacaacatggcccccgcagttt

SEQ ID NO: 391878 - DNA, 555 bp, Homo sapiens
aagacattttcaacagaaaccttagatctgacaatgaaggacaaataattatttgtattctatggccaattaatgagtgagggttctactcttcagaagatttaacacgagccagacttacagattaatgacaaaattaataatcaaaatttaatatccattgtagttgaaactgcaactacaaagccaatggaatgtcaatgccccttgaaagaggcctattactgatgcaaaatgataccacttatgcatgtgattaatataataaaagagagagaatattcttgaataactcttaggagccagaaactttatatatcrtctccaatttaatccattcttgtaactccaggctacactggtccccaagaacaaatgaaagcatagacgttaatgctcaaattacactgcatttagttcttctcttacttgctgatacctctttccctaggactcgtttcttaggtaagcttggggaagacactgtgccatcccatgatggagacttatttctaaatggcttaagcaaagtggtaattcattggctcacattgc

SEQ ID NO: 391879 - DNA, 509 bp, Homo sapiens
agccaacgaataaaacccaagtcaaacagtcaagctgcacactggtcttttgagtcacctgcttggccctcttccaagtgtactttcctttccttcttgcactaaagtgttttgatcaacttccactcctgctctaaaacttgcctctctctctcccatcttgtgcccctcctcarattcttttttctggggaggcaagacttgaggttgctgcagactcagatcccttccacggcgaacagaagcatcacaaggacggctttctcctatgtgaaggctgcagaaggagatttcagctgttgctcaggacggctccctggcatcaccgggagtcctgagagctcatcggaataccgatcacaatgctggtgaagccaagcgtcgcgcaggggctctggggagaagacgcccaggttaacataggaggtcgttaggcagcaccctcccttcccgcatctccccccaaaaaagcctccgaaaattgctccgtgcccactttgcaatagaaa

SEQ ID NO: 391880 - DNA, 576 bp, Homo sapiens
ttttgggtttaaatttattaccatcataatgcatggctctcaagcaacagagtgctatactaataagtgtaataatagatttgagcttagcgtcataggctgtgagagaacagggtagcagaaccacacctctgtccacctccaggctgaacaccaggggcttttcccatcagggtctctgggtccacctgcaggtcaactttgagaaacagccgctgctgctgccctctagtggcgattctcggaacgggcactcggagagcgaatgctgtttcttacctcactgctggtgggaaaattagatgatcaaaaacgccacaaatatctttggcttaaccttgattcaaattaaggtcaaaactcctggccacagttactaatcacttgagggagtaaaaagcaatcgatgtagcttttttgtcagttggcacaggctttgaaaacgcaaagccctwtttgtaagattagaaggttagtaaatgtttgcatatcagttagcgtaacatttaaggtcaatatatactttttctgggttttggcatcaaatgttacttaggagacgaagaactttctcct

SEQ ID NO: 391881 - DNA, 638 bp, Homo sapiens
attagagcagaaatcaataaaacaacaaaataataaagaaaaatcaatgaaaatgaaaagctgcctctttgagttaacagataaaattcataaatctctagccagactgactgagaaaaaaagagtaaagaaacatattgctaataacaggaatgaaacagggaattatcgctacagatctaaaactacaaaaaggctaataaagcaatatcataaacaatgttatttctatctatttgacaatgtagataaaatgaaccaattcattaaaaagaaaacactaacaaaattcagccactatgaagtagataatttgaataatcctgaaactatcaaagaaattgaacttacaatttaatagcttctgaaaaaaaaattcagacccagatggtttcaccagacaatgtaaaccaaacatttaaagaagttctagctccaaatgtgtagtctcttccagaaaatagaaggaaatactcctcatctcttttacgaagcccgtagtaccctaayaccaaaagtagacaaagacagtatataaaagaaaactacagcaaatttctttcatgaatttagacagaaaaaccctcaacaaaatattagcaaatcaaatatatcaatatataaaataattatatgcc

SEQ ID NO: 391882 - DNA, 599 bp, Homo sapiens
agggagggtaggaattggaggctcataagatgtggttagaaacctgtgctactgtctattcctcagtactgctttcctcatgcgggcttcattttaagacaggctgtctctcaggagaacaaattgtgattgccacttctggttgtctttctgctggctcattcaaatcagcattgggaaggtaagcttgtctctcccatcatatcttcagctcaagggccagggcagaccctcacagacttcactttggtcctaggctaatgcctgactcagctaatattttgtattttttttttaagagtcggggtctcactatgttgccsagactagtcttgaactcctgcactcaaatgatcctccctgctttggcctcccaaagtgctgggattacaggtatgagccactgtgcctggccccttttctatcatttttaacaagtgtcagaataatttattttctttgacgttggccatccatagttgactaatatcaagagttattttgcttatggaggaatattttgatcactgggctggtgctcaaatttccattggaaatttctaatggagacaagtctccattgcataagagacttgact

SEQ ID NO: 391883 - DNA, 616 bp, Homo sapiens
ctggtccaatcagagcgaggcccagggctttgcaagaaccttcagagaagacagccctggacacaaagatgggagcacacggggctgaggcttctgtggtcaccgcacgttgggaaagagagagcctgtttgcgcgtggagtctgcacagaagaacagctaagacagggagagagacagcagctgtttatgacattgtttgagctcaggtgaagccggccctacagacagagctgagccttctcagttccgtggtttaacaaattatcgttttccttacgcagtttgtgttggatgatgaaagtttcatttgtgagtgaaacattaaatggcgaaagttaacatttgatgtttggcttraataattttcttgatgcgaagaggaaggatgacccacttattttttaaaaaatttaaaaaattgcctttacgtcaatcattatgaaagagctcttcccccctgccatttgcagtcctgccccttcacagagagaattaacgatggaaattaggttgaggggtttatttgtttgtttgtttagagatacaccaaattcagccattaggcagcaatacacagaactgagtttctcaccttcattaacaagtgacaaaaa

SEQ ID NO: 391884 - DNA, 616 bp, Homo sapiens
ctggtccaatcagagcgaggcccagggctttgcaagaaccttcagagaagacagccctggacacaaagatgggagcacacggggctgaggcttctgtggtcaccgcacgttgggaaagagagagcctgtttgcgcgtggagtctgcacagaagaacagctaagacagggagagagacagcagctgtttatgacattgtttgagctcaggtgaagccggccctacagacagagctgagccttctcagttccgtggtttaacaaattatcgttttccttacgcagtttgtgttggatgatgaaagtttcatttgtgagtgaaacattaaatggcgaaagttaacatttgatgtttggcttaaataattttcttgatgcgaagaggaaggatgacccacttattttttaaaaaatttaaaaaattgcctttacgtcaatcattatgaaagagctcttcccccctgccatttgcagtcctgccccttcacagagagaattaacgatggaaattaggttgaggggtttatttgtttgtttgtttagagatacaccaaattcagccattaggcarcaatacacagaactgagtttctcaccttcattaacaagtgacaaaaa

SEQ ID NO: 391885 - DNA, 563 bp, Homo sapiens
ttgtgtgttgggtgtggctacaggagcagttaagtcaagagtcttgggtctgggtggggccatctggtcatcagaaatgcaaaagcctgaaaggacatctcaaaaggccaatcttaggttctacagtagtgatgttatctgccagaaattggggaagttgcaaatcttgtgacctccagaataatggctggtaatccttttttttttttttttctttgagacagagtctctctctgttgcccaggctggagtgcagkggtgcaatcttggctcattgcaacctttgatttcaagtgattctcctgcctcagcctccctagtagctgggattacaggagtgcaccaccatgaccggctaatttttgtatttttagtagagatggggtttcgccatgttggccaggctggtctcgaactactgtcctcaggtgattcacccaccttggcctcccaaattgttgggattacaggcgtgagccactgggcccagcctggtaatcatttaactaagcctacatcttagcagaattcaggctcctctcattttcctaacctggtgggct

SEQ ID NO: 391886 - DNA, 368 bp, Homo sapiens
aggaagaactgttcctttttttgtcatcccaaaggsctctggactactgtcctggtcagcattgaacagatgctataaagagaaaaagcaaagcagatcttccgttacaaggatctttctttagaatctgaagcaaactataagataatgtccaagaaactgtggattaaatggaagagttccagctcatttcatggatttaaggaaaacttttctaataatattttagtagcaggtgaagaggaaattctcaaattgcctaaggggtacattagttaggccaggttggctgtgctgcaggaacaggtaatgccggtgtctcagtggcttaatatgggaaaggttcatttgttgttcactcagagtcc

SEQ ID NO: 391887 - DNA, 649 bp, Homo sapiens
ggtgtcaagccattctgttatttatattccaatggatacatttaaaagagtgatgtaacagtttcattttaaaatgtcaagatttacaatacactagaaacttcatccttagcaactattgaaactggatgaaaaatattagataccacttttgaaatttgcaagtgggtacagagtttaaaaagtgttctattaggagttgcaggagcagtagtgtgggaagaccattgtttttacamgagtggttctcagccttgggtacacattagaatcatttctagagttttgcaacagtccagtcagcacctgagccacggtgtagaccaatgacatcagaatatgccaggatcagttccaagcattggtagttttcaaagctcccaaagtgattctgatatgcaatcaaggttgagaaccctggagcaggtccttcaagggaagccatctgttgtgtgtacaagggttgaggcagtgattctgcactctggctacacgttagactcacataagaagatatggtgagtggagaaagtcaggctaattgaagtataatttgcatagagtaaaattccctctactattgaacagttctgtgaattttgagaaatacatatggtctggtaaccgttgccaaaatcaagatacagaa

SEQ ID NO: 391888 - DNA, 574 bp, Homo sapiens
tctcccctgctaccaaatggtgctggagaccaagccatctcttatctctggaccctgctatgaccattgttctagcagggtctagagaaaagagactctcttgttatactwactggagaacaagtgttataggtttgaggcatttatgtttggagggcagcttgtacctggtacacaaaggggtgggcaaccgagattttgagagcctgagccttgtactctctaaccaggatgtagacccaagtcttctgggttgctggcttacatgtggtcataggtttgaccattgttctccaattagagaataacaataacacaacaacagcaacaaaagggagcaagctttaactatgacatagttctatctccctgaagttttcctcagccaacctttttggaacctgacttctatttggaaggggtatctgcatttgacatgaagtctgatgtttgtacaggtaggacctcatgataaatatagattctgagaagctctgagttaaatcaatggccctctccaaggtaattaaagtgagttttttaacggactaatctttttcccgaatttattttc

SEQ ID NO: 391889 - DNA, 583 bp, Homo sapiens
gttgctttcttttacgttaattgtcattttcctctttttagcaagtccgttatgatatacccaggtgtgatttcctttacggctggacatcatatcacttcttgaatctgtggcttgatgttgctcactagctttggaaaattctctgtttctctctttcatctttgctcttgagaatatattctcctgacctgtattccagttcaytcattctaatattctcttaagccaaagtattatatttttaactttggttattctattattcagttctagaatttttatttgattctttgtatatattttaatttcctgctaatcttgtcatgtttccttttattgatttattatagttatttttaaatccactatgaaaattccagtatctggatcatccatgagtcgacttctgccccctctcccttggccttagtttcttgtatgcctgggaaacttttccactggacaccagacaatgtattacaaaaaattataaatactgtggattacgttaatttaccccagagagaatttattttgttgcaagcaggcaattagagtaagaggagagattcttaatcca

SEQ ID NO: 391890 - DNA, 583 bp, Homo sapiens
gttgctttcttttacgttaattgtcattttcctctttttagcaagtccgttatgatatacccaggtgtgatttcctttacggctggacatcatatcacttcttgaatctgtggcttgatgttgctcactagctttggaaaattctctgtttctctctttcatctttgctcttgagaatatattctcctgacctgtattccagttcactcattctaatattctcttaagccaaagtattatatttttaactttggttattctattattcagttctagaatttttatttgattctttgtatatattttaatttcctgctaatcttgtcatgtttccttttattgatttattatagttatttttaaatccactatgaaaattccagtatctggatcatccatgagtcgacttctgcyccctctcccttggccttagtttcttgtatgcctgggaaacttttccactggacaccagacaatgtattacaaaaaattataaatactgtggattacgttaatttaccccagagagaatttattttgttgcaagcaggcaattagagtaagaggagagattcttaatcca

SEQ ID NO: 391891 - DNA, 403 bp, Homo sapiens
agaagtctgacaaccctaaaactatcacgcagtgcggaaccccaaggttgccacgggagaagctcccagacatgcatggggcagccttcagaggactccagccacagccaccacctgcccgcagtagtgttagggactccaagcagaatgacacagctgagctcatcggctccaagaacctgaaatgggggtgtgtctgctcaaattaaaagcactytatgtaagttgtggtttagcaatgactttgcataatgtgttgattgatctgttcaattaactccaataagtgagagttgactcccctctggatgctgagcattgtgatttcttccagcaggatttcctctctgaaccaagggtgcgtcctttgtacctgacatctattaggttggtgcgaaagtaa

SEQ ID NO: 391892 - DNA, 564 bp, Homo sapiens
tagtcttccatttggtaagagcctccactgaaatgtggaattcccatatatttgtggatttgaaaactatgatcctagacttagtttctttctgaaggtattttgtgggagagctgaggaagcgaaaggcccaagtctgaaagaagtggtggatctctctctctcctctctgtctcctgtgctcacattgatttttgcaaagctccaatctggaaggacgaggaacacgtgactcacagacaggaggaaggagctaggggagttcttcccagttctgggtggagaacactccacagggcccccaagtcataattcaaccctgagccctttaacaaatgtgtctttgactggggccaggcctgcccccacggaggatgtgcaccaggcacttagttccaagttcacgggaaacttggccaygcaaagatgaaacatgttaaggggatgtgggtggggcaaaaatgtcagcaaaggcgacatcaagattcctctaagtacacaatgcacacttcaagggcctcagggtgggtgagggttggttcctgtagttgttaacattatttt

SEQ ID NO: 391893 - DNA, 429 bp, Homo sapiens
ttatgatatgatataaaggaaayagagagagacaaaaacacaaaattggcatgattttcacaatgagaagctctcaatgagcttctaaatttctttccctagtgttagctttggggctttagcactttgtgaagatgcaccaggcagctggtacattcccagtttcctactccagttttactcaggtggctgaagtgaatatgagtgtcaaataaatgcaccataaaataaatattcactttttctcttgaccacagttggccacaaataagcagatgaatggaaagagatcacgcaacagaagtagagagagaaattttatttctctccttgatcatctctgaagtaggacagtagctcactattcccttaactttacttttacaaaatctaagtgaatttggttttatacccacagacacacatgca

SEQ ID NO: 391894 - DNA, 544 bp, Homo sapiens
ataagcatttggtcatgttttgacatctctgaaattggagtgtgttagtacaattgttgacatcttattgtcatgggtcagccaggaccatttgtgactttgccgctattgwctgggcaaacttgggcattaattattggtggcctgacagactaactgtaaccccttgccccataggagaactttttgtatcccccactggtgtgagggcaggacagggttttctccactctgtatcttcactagagtgatctggattctctatttctttcatctgttgtcaggaagcttctttgccagggctacaatgcctagtagtccagaagagatgtgagctgaggaaaacatgaggtcccatcctgctcacccttatctcagtgtaaagatagatgtctttccatgcaaaaggaagaacagtcaacctcagagttcctcctctgtaccacagagattaggagcacacacttttgcatttcactagggtaatgtgtcagcctctccacatcctaccattactagatgtgtttggaagaaaagagtgcta

SEQ ID NO: 391895 - DNA, 544 bp, Homo sapiens
ataagcatttggtcatgttttgacatctctgaaattggagtgtgttagtacaattgttgacatcttattgtcatgggtcagccaggaccatttgtgactttgccgctattgactgkgcaaacttgggcattaattattggtggcctgacagactaactgtaaccccttgccccataggagaactttttgtatcccccactggtgtgagggcaggacagggttttctccactctgtatcttcactagagtgatctggattctctatttctttcatctgttgtcaggaagcttctttgccagggctacaatgcctagtagtccagaagagatgtgagctgaggaaaacatgaggtcccatcctgctcacccttatctcagtgtaaagatagatgtctttccatgcaaaaggaagaacagtcaacctcagagttcctcctctgtaccacagagattaggagcacacacttttgcatttcactagggtaatgtgtcagcctctccacatcctaccattactagatgtgtttggaagaaaagagtgcta

SEQ ID NO: 391896 - DNA, 544 bp, Homo sapiens
ataagcatttggtcatgttttgacatctctgaaattggagtgtgttagtacaattgttgacatcttattgtcatgggtcagccaggaccatttgtgactttgccgctattgactgggcaaacttgggcattaattattggtggcctgacagactaactgtaaccccttgccccataggagaactttttgtatcccccactggtgtgagggcaggacagggttttctccactctgtatcttcactagagtratctggattctctatttctttcatctgttgtcaggaagcttctttgccagggctacaatgcctagtagtccagaagagatgtgagctgaggaaaacatgaggtcccatcctgctcacccttatctcagtgtaaagatagatgtctttccatgcaaaaggaagaacagtcaacctcagagttcctcctctgtaccacagagattaggagcacacacttttgcatttcactagggtaatgtgtcagcctctccacatcctaccattactagatgtgtttggaagaaaagagtgcta

SEQ ID NO: 391897 - DNA, 544 bp, Homo sapiens
ataagcatttggtcatgttttgacatctctgaaattggagtgtgttagtacaattgttgacatcttattgtcatgggtcagccaggaccatttgtgactttgccgctattgactgggcaaacttgggcattaattattggtggcctgacagactaactgtaaccccttgccccataggagaactttttgtatcccccactggtgtgagggcaggacagggttttctccactctgtatcttcactagagtgatctggattctctatttctttcatctgttgtcaggaagcttctttgccagggctacaatgcctagtagtccagaagagatgtgagctgaggaaaacatgaggtcccatcctgctcacccttatctcagtgtaaagatagatgtctttccatgcaaaaggaagaacagtcaacctcagagttcctcctctgtaccacagagattaggagcamacacttttgcatttcactagggtaatgtgtcagcctctccacatcctaccattactagatgtgtttggaagaaaagagtgcta

SEQ ID NO: 391898 - DNA, 464 bp, Homo sapiens
agaattaaggggatggggaggtagaagaaaactgacaaattgtctatgaggtagtggagtaccagaatagcatcttatcctagaaaccaaatgggtgatgagcaacccaatatcttcagatgctatgcatgttcaattttttgttaaaaaaaaatgtattattgttgttaagaaaaaagatataaagagtaaatatccttgaaattctatttaggtagaagtaatcacaaaacatctgaaaaactactccctattatgtataagtatttatataataatagttctgtatactcacatatttgctattatctacttacaattgtatagaaatgaattatatkattttatatgattttataatctgcttttatcagccaatgtaacatggccatgttttcacagtcaatagatgtatatttacatcattgtttattccaggatgcattgtataaatatactatatt

SEQ ID NO: 391899 - DNA, 464 bp, Homo sapiens
agaattaaggggatggggaggtagaagaaaactgacaaattgtctatgaggtagtggagtaccagaatagcatcttatcctagaaaccaaatgggtgatgagcaacccaatatcttcagatgctatgcatgttcaattttttgttaaaaaaaaatgtattattgttgttaagaaaaaagatataaagagtaaatatccttgaaattctatttaggtagaagtaatcacaaaacatctgaaaaactactccctattatgtataagtatttatataataatagttctgtatactcacatatttgctattatctacttacaattgtatagaaatgaattatatgattttatatgattttataatctgcttttatcagccaatgtaacatggccatgttttcacagtcaatagatgtatatttacatcaktgtttattccaggatgcattgtataaatatactatatt

SEQ ID NO: 391900 - DNA, 452 bp, Homo sapiens
gtattgcacatctcttccaagagaaactgtgattgaatatctgggtcttccccatagtatccctacataaggttagtggcaaggagatgctatgccagcaatctcacccgccacacccaagatggcatctgcatcctctatgagtacaagttaatagtctcagctgtgaggattgtctccatgagatcaggcaacccaattggttagctcttttycactatatagtttgaagtccctgtcttttccagttgtcctgaagtcacaggtttttgcttcagttttctttctctctctctggcaatgaaacagaagttttcaatgagaaaggaacctttcatttgtcttggctgtcacttgccatcactcattttaatagtcattatcaagagcataaagattaagtggggttttgtacaatattagttttctattttttctcattcaagctccag

SEQ ID NO: 391901 - DNA, 534 bp, Homo sapiens
ctgggacttcacatgtataattccctctgcctggagccctttgytctccttccttcttccactgctgccatgatccttccccttcacctgacctttaaatcttagttccaacttcacctcttcagtggggacttctctgatggagactacattattgtagcacaggctcacaataatgtttcacaaccattctaagtgctctcctgtattttctaatcctcttgcacataaggcagagttatgtgagtttttctgggcaaaaaatggtcagaatggagagaagaaatggcacgaggcaatctcataagcagtgaaaactcatgtttgatttttttctatctcctttctgcttcgtggtgataagtagcattccagacagtagaatctccttcagtctgagctactatctgaccatgtggagtacagagcaccagttgaatatggagcaaagatgagaaagtaatctttgttgtgatgagttttggtggttactttgttattacagcatatgctaaattatcctgactaacagat

SEQ ID NO: 391902 - DNA, 606 bp, Homo sapiens
atgccttacctcccatcttcttgactaatgaccttttgcttcagtcactgctctgagaaccacagagttcagaagtaactggttgcatcttatctctggtgcaccatacatttctttctttctgcagtgtggattttctgatgctactgtgtatgacacctctgggaacccatttgaaacacacaggcaagtatgagggagttgctgccccatagataaatgctttttttccctgtctctcaggaagaaagtggacatttttaaaaattttaatttttgatttttatgagcacatagtatgtgtatatatttatgaggtatatgagatattttgatacaagcatacaatgtataataatcacaccagggtaaattgagtatccatcacttcaagtatttatcatttcttttcgttacaaacattccaattatacttttagttatttttaaatgtacaataaattatagttgactgtaatctccccattgtgctatcaaatactagatcttagtcattctrtctaactacatttttgtagctattagccatcctcactcctgccacccccattacccttctcaccctttggaactatcattctactc

SEQ ID NO: 391903 - DNA, 586 bp, Homo sapiens
gggacactccagctttttgaattgctacagttcttgcattaattctttctcatatgagaaggctggtgttccttgaactgtggtgtatattgagtatagttagtgcattctgtkctggaggttttcagaggggtaagtctctgtagagggtttttttatattaaattcttatctttggtttctgtattagtccattcccatgctgctataaggacatactcgagactgggtaatttataaaggaaagacatttaagtgactcacagttccatatggctggggaggcctcaggaaacttacaattatggcagaaggggaagcaaacatgtctttcttcatgtggcagcagaagagagaaatgccgagcgaagcggggaaagcctgttataaaaccatcaaatcttgtaagaactaactcactatcactagaacagcattaggataattgcccccatgattcaattacctcccaccaggtccctcccatgacacatggggattttgggaactacaatttaagatgagatttgggtgaggacacaacaaaaccatattagtttctcagtggggggaaattagcaaagtg

SEQ ID NO: 391904 - DNA, 603 bp, Homo sapiens
tgggccccacaccaagggtttcctgcctgctcagtgggactgggatgtggtctaaggatctgcatttgtaacacattcccaggtgatgctgatgctgccgtcctgtggtccacactttaagagacactgatctaaacaattctttgctcaatgatccaggaaagggatgcataatggaaatttgagaaaaaatctgagatttgaattttaaaccctagactttgaatagacaatgatttggaaatatactcaaagaactggaagcaagtcttcttttcctgaagggaactgattagagtttagatctggtgagagtccctgagaaatgagcctggattctgacaccttcgctatgagtcgggaatggagatatgggggaaccgacagctgatgagatgtaaaagtataagaaccctccmccccagtccccaggtagagccctgggaatgtgggaaggtgggaaaagcccagagaagatatggatacccggtgtgtccgagtccaagagctggcaaactattccttaaagggccagatagtaaacattttagcttttgtatgcacatggactctgtcacaaatactcagttctgtcatcagcac

SEQ ID NO: 391905 - DNA, 579 bp, Homo sapiens
actctgttttcactttcctttactcctttctgccacaccttgcaagagcttcttaaattgtgaaatttctgacattcatttctgtgagtattctacaaaagtaaggatatttttgtcatcttccaaatgtccaacacctttctggttttctttttatatggcttctagatagattaacttttttctaccacgctgtctgaaaaggttaccatttcaaaagctttattcaagaagggttgtgataaaagtgccctaaatttccaccctattggattgaggatgttggatagaagtctgaaaaatagaaatatagaagccaaaaagaactttttaaaaggagtgatagaaaacccagtagcctagtgaagatcaatagtacagtgaagacaaatgatccaagaggccaagttcacctttccycctggcatccctggtatgttccaggaagaaaatcggtactgctgaagaatgggattgcccgtaaatatttctttaaagctgaaagatatgggggagacagtgtcttattttcactttcccctgaactctccccatccatgttcaacaggagtagctggt

SEQ ID NO: 391906 - DNA, 620 bp, Homo sapiens
  misc_feature (1)...(620): n = A,T,C or G
aacatcaaaaaaggtttaccatatttatttgttggattaaatatgcattaaaaccactgcatatttattagaatggctaaaattaaaacaaaaatattctgacacttccaagtgctagtgaggatgtggagccactggaactttcatacattgttaacgagaatgcaaaatagtccagccactttgcaagtgtgaccatttcttacaaagataaacatatacttaccgtactactcagcaatcacatttctaagtagttaccttagtgaaagaaaatttatattcacacaaaggtatgttcacaaatgtttatagcagccttactcataactgcccaaacctgggaaaaacctaaatgttcttcaactgggtaatggttaaacaaactgtgttaaacaaactgtgatacaattatacaatgaayactacttaatagcaaggaatgaattactgaaaagcacaatataggtgaatttcaatatattaaggtcagacccaaatgttagcatactgtattatcctatttatatgacaggtttcaaagggcanaactatagaacaganaatagatgagtgattgccagggaatgagtgtggggaacaggttgcctgcanacagg

SEQ ID NO: 391907 - DNA, 654 bp, Homo sapiens
taattaacatatctgtcatctcacttattttttcagaggagatatttgaaatttaccctcttagttattttgaaatatacattrttattgactataatcaccctgatgtgcagtacatctcaaaacttactccttaaataagttaagtggggaagtgagacaagggtggaaataggccaataaagggtacatttctgagacagtaaagctgtggtcaactggggtttcacacactgggagctcagggaagccatgcagaattgaaagcaagcagcgagtgggcagatggggaaaatgatgaacaagttccttcgatttggtgatcattgtgttgtactgaaagcttcaaaaatggaagtttttgggtgctccattcactgaatattttgattaaatggtttcaatgggttttaagcaaaaacaaatcaaaaattaaaataaatattttataaaaatgagtaggggcacagtttgatttacacagtagtttttcaaaggttcaaaaatttctaaaatctgatgatcagtaccaaacttcaaataaaaagtgagcaaaattcatttaaaagaacagtcattaaatagaaagtcaccttcctggtgtgatctgtaaatgcgtgttctgtagctgcacattttaaactgtcattttag

SEQ ID NO: 391908 - DNA, 582 bp, Homo sapiens
ccaggctggtcttgaactcctgacttcaagtgatccatcctcctccgcctcccaaggtgttgggattacaggcttgagccactgcgcctggcctctagcagtcctgctctgaggttctcacagtcccaccttctctctgcaagtagctgaagagtcagaatgaagaacaggaggagaagacgtgtgtcattgaatgttatttccaatttgaaatttttgcctcaattgaaacatttacttcatttaagatagtgtaattactgattgatgcaatggactgaatatttgtgttccccgactcccaccaattcatatgtggatayccttaccccagcatgacagtattaggaggtggggcctttgagaggtgattaggtcataagggagaagacttcatgaatgggattagtgccctgataaaaggaacaccaggaagctctcttgctctctttctggtatatgaggcataaaaaacagtcagcagtctgtaagccagaagaaggccctcatcagaacctggggccatgcgggcatccttatctccgacttccagcatccataactgtgagaaatgaattcctg

SEQ ID NO: 391909 - DNA, 571 bp, Homo sapiens
agcctaattctaattcctaatacaagttttcactagacaagaaatatgcaccatggagcaggacccaacattgatggaactaacctttgaaaggagaattaccattattttaattctatgcttaccaagcagccaaacatttgtcactttgtgatctggtagtttattaagaaagtgtcttgagaaaatcacatatcccaagtaattgacaacccttgtgagttaatatattggaatttattatcaggctctgttttttgttattgttttttaaggctcttttttaacactgcctgggcacaataagatgtttataaataaaagctaccttctctaatttattgcaccttgataaactaaaaatctgatttctgatcttattgatctgaaatccacaataaggtgtagacaacacatgtggctgagctgacaatagcctgttttcaacttaatctttttttacctaaagtttccattaaccctctcccatttactccaaatatcgcttctcagctgktgaccaaatttgagaaagattaacttcattgggaggatttctcaaagagggctc

SEQ ID NO: 391910 - DNA, 554 bp, Homo sapiens
aatattcatgccataaaactttaacacttcaattattaaatcgagtgtgtcttacccagaattctgtaatctaggtcagtggacagagtaaatgatgaaaaagcaatcacagttacgttcaatgtgtttctgaggtgattctcatatggtagccagctacaatagtgatctactgtgtacacatagtttgttttttgtttttttgccttatcatataacaaggagtatattgatyagtgtattagtttcttattgttgatgccacaaagtgccacaaatttaatggcttaaaacagcacaacctaaaacagctatattatcttacagttctgaaggtcggaagtccaaaattggcttcactgggctaaaatcaggataccggcaggactgcgtttcttctggagactgggaaataatatgttccccttttcaacttgcatttcttcaggaggcgctacctacactgctgctgtaaaggcagtacaaattgaaaataagaaagaaaaagagccaggcgcagtggctcatgccttgggaggctaacgggggaggat

SEQ ID NO: 391911 - DNA, 579 bp, Homo sapiens
aaataattgggactggtaatgctgggtaatatggtagttatttgtttaaacttctaagaaacagctaaattattttccaaagaagttgtaacatttttcattcctaccagtaacctgggcttattgttaacacttggtactatcagctttaaaaattttattcattctrataggtatgtaatggtattcattgtagttttaattttgcattttcctaatgactagtgaagttgagcatcttttaatgagtataaagataatccactaaagacacttatttggtgaaatctctgcttaaatcttctacatataaaaatcggattgttttattattgtattttgaggggtctaaaaatattctagatacaagacatttataaacaatatgttttgcaagcattttctccaggtctgtgacttgcctttttattttattcacagtgttttgtgaagagccaaagttttgacaaagtcaaatttatcaaattttactatcacactggtctttaaaaataaaaaattattattttttatttttgataccccagtttcttcacctctctgatgagatacagatga

SEQ ID NO: 391912 - DNA, 531 bp, Homo sapiens
cctccaaacttcctaggaagaattaatatcttccttctctgggtttctgtaatcctttgtaccgactttgtccactatacagtaccattattactattatgttagagtcaactcttgtggttgtctcctgctttagactgtgaacttcttgaggacagagactgtccatctttgtatctctatgtgtagtagatgctcagtggatggtcccatccattctcatctatatattggtgtttcccaggtctatctgctgaactcagctttctcccccagttccagatccaatcatctgacaaatatctctcatctgatgttccacagggacttaaagctcattgtgacttaacttgaactcacttcctcccctacccaacctgcttcttctagagtccctatctctgtwtttgacatcatcatctatccagctgctcaatccagagagtgggagttatccttgactacatcccctcttttgccgacattcctctccctcatccaaacaaactgatgtattacttctgcttctca

SEQ ID NO: 391913 - DNA, 625 bp, Homo sapiens
cccaacaactgggtctctgggtaaaaaggcctaatttatagagattgctaatttccatggtgtaaatatttccacaatgcagattccttccttccttttttttttttttttttttgagatggagtttcactcttgttacccagactggagtgcaaaggtgcgaccttggctcactgcaatcttcacctcccgggttcaagccattctcctgcctcagcctcccaagtagctgggattacaggtgcccacgaccatgcctggctaattttgtatttttagtrgagatagggattcaccatgttggccaggctggtctcaacctctggacctcaggtgatccacccgcctcggcctcctaaagtgctggagattacaggcatgagccaccacgcccggaccatgatgcagatttcaagctatgaacatgattctctggagtttaccatttgtcttttaattggcaaatttgatgcagaattgggaagagaagcacacaattgactctcgtcagctggcacaagctggtgccagtgcaccactgtatatatccatggccctctgtgaagctagagtttactactaaaatttgtgctccataaatatacaaaggcactagtaagagaaa

SEQ ID NO: 391914 - DNA, 569 bp, Homo sapiens
atctttacgtctataagtagtaaaatattttttccaggagtgggtgtactttaatttcctttgtgtttttctatgtttcaaaattatctacaatgattaaccagaaaagcaataattatcatacataaaatagaactcttaaagaatatctttcctaggctcgggccaagaaaaaaatatcatattatttttggccagagactaccagaattaagaaattaaagagaaggattttgcagaataacctcaaaggtagtctcaaaatccacaattatactaactgaacacagagaaagagagagagtatacatcacctacctatgtcatgtgtttttctttttctctttgtaaaccagattgaaaaggaagatcaggccaaccccaaagaagaagtgaccaaggaggagtttaaactgaatgaacaacctyggctcctggactcattgcttcacaacccatctacccctggatgaagttatctggcttcaaatattatgcaggggcaaacacctgctgatgtggcaactgctgatgctcatggtccccatggcatgggggcctcagggcag

SEQ ID NO: 391915 - DNA, 464 bp, Homo sapiens
gataaagatgggaagttatttacatcgacattaaccaaatctacccttcatgcagaaagaaagagctcttgggccattctctattaatgaaaccataccagggtcaatattacagtgtctctgaaatacactgaaaatacttccctggctcaggtggtggcccatgctacctccaggcagttctacttgattaatgatgcaatggagataatcctattgcatccaccatcaaggagagttgggcagtcattcagagaaagtgggactcaatagacattctgactattaattcaatcatgtwtacatgcagatcaaagggtaaagtttttctttacaccttatatatccttctcttccaaggtggaagtccattcacaaccaattcactgctaggcagacctctttcctaacaagtacagatggatggcatagtggggattagaacacctcagcactcacagggg

SEQ ID NO: 391916 - DNA, 548 bp, Homo sapiens
ggataacttataaagaaaaagaggtttaatggactcacagttccacatggctggggaggcctcacaattatggcagaaggcaaaaggccgcagacaagacagaaagagagccaaactaaaggggaaaccccttataaaaccatcagatctcatgagactcattcactgccatgagaacagtatgggggaaatcacccccatgattcaattatctcccaccgggtccctcccacgacatgtgggaattatgggagctacaattcaagatgagatttgagtggggacacagccaaagcatataagggtcgaagtctcaccctgtcacttgctagttgtatgacctttagtaaatcacctcatctctttgaggctcagtttcctcaactctaaaatgggaatgggaaaatttactaaaacttgtgtctttcctcctcatgatttatacacctttgttttaaaagaaatacatataaaaagcmttattcatctttcctcctaaaacttaagaaataaccagtaataatccctacctcactgtattgctgtga

SEQ ID NO: 391917 - DNA, 500 bp, Homo sapiens
cagaaatttggtgaaacatttttctgggtgtttttatgaggaagtttctggatgagattagcatttgagtctatagactgagcagagcagattgtcctaatgtggatgggcctcatttcatcagttgaaggccaaactagaacaaaagagttgacgatcctgaaaacaagagagaactcgtccagcctgactgccttgaactaagacatcagctaccttttaactggaactgaaacatcgtcttttttggggtctcaagactactggcttttggaccagaactgacaccatcaactcttccrgttctcaggccttcagattccgactagaactacaccattggctttcctgggtctctagcttgccaaatgcagatcttgaaacttcacattcaaaatcatatgaaccaattccttttaataaatctctctctctctctctccacacacacacacacacacacacacacacacatatgcacacgtccaattggttctgtt

SEQ ID NO: 391918 - DNA, 642 bp, Homo sapiens
tattaactgatcaaatgtaccaattaaaagataaatgagggtgttgctgggttgctttgtactgaggtattgctttttattttttgtttgttttggacagctcacattttgtctcctgccttgggtcctttcatttctgcttggtaatcttccttcatagtggcaattgatttcttaagggtttctcttttttttttaactcatggcaaagtattgggatacaaagattttctggtattcttcatctgataggttttgctgactttttaaattatacctttccactgatgcttggtcagctacctttcattttctcagcactgaattagttggattttcccaactgtctgtgtgcaagtgatggatatctttgttattttaagtttttttgtatgttcattttggtgttttctgaggtttgtcattgcttgctsttcaccatgcattttcattgctttctctctcccaccccctcatagtttcaactcaatctccactgtcttcccagatccttcagctcctaagggcaccttaagacctgctggccctgcaggaggacaccacagtgtttctttttctacagaaaatatatttctgaaatccactgccaacagtccatctttctattcacttcacccaagc

SEQ ID NO: 391919 - DNA, 561 bp, Homo sapiens
cctctttctttctgaaattccaagtacttatayattaaaacttttcactgtgttccatttgtaccttactctcttctcagtgttttgcatcttttttctctttgcttcagtctaaatcttttctactgttttgttttccagtcactctttattcttctgcatctagtctgattaaagtaataatgatttatgtttttctcataattctgtggtttagctaggtagatttttttctcctggggcagcttttctggggcctagtggtctccaatggacttacatatctagggtcttagttaggcccaagtgggatggctggcatggctgaggtcttgctatctctgtggtctctcatcactaagaaggctgacttagagtttttctataacaggctcagggttcacagaagcaagagagagcaagactaatctgcaagtgctttcaattgctgtttatatcacatttgctgatgtcctattggccagaacatgtgacccatccaacaccaaattcaaggggtaaagaaatagactccactttttgatggaaggtggtgcaaag

SEQ ID NO: 391920 - DNA, 471 bp, Homo sapiens
aaacagcagatataaattatccagatttccagggagactctgcatacctcctcctgccatgacctagaggtggtacatccgcagagacaatatagaggaaaggtcttagatttagaattagaccctttagattttggagttagaccctttagaatctgagctctttcacctgctgggtgaggtacctttagcccattatctaccctcactgagccctgtttctttacctatagaaagataacaatgatggcttgttgacaacactggccccactctagcatggcatcagttgtgtgaactgtgtttctgtgggctctctggcctccttcactcatcttcactgactacctggacacttccaggatttsagtttgccagccctgtcttggttaaagcatgaagccatgtacaattctgtggggaaactgagatcctggtgagtaaggaagatggctgcagccatctttctct

SEQ ID NO: 391921 - DNA, 527 bp, Homo sapiens
tactttgcttattaaaaacctcttcattgccactctcttccagcacggggctgaattgcctagtgacatagcttctgcttccacttgagtcaatatggaatgttatttctttctatctattcaatgataaarcccactacctttttgtaagccaatttatactcaaggtctctagaccaccacagcactatacatcctaaaattcaccatgtgtggcacttttatagccaacccccttcccacagaatgtcaacttaactatttttatcaaggcaacaaaatattaagtcgacaactcattatagaccatagcaataaatattgaagttcaaatttcttacataaactcctttgtcaaaaataacatctgcaagaacaattttatgaagcaggcactatcacatttcagcagcttttggataaaatgaacattttctccttattgagatttatttcaccatttgttagaaaagcctgttaatatcaaggccaaatgctagaattccattaatttgcaccaagaagaa

SEQ ID NO: 391922 - DNA, 463 bp, Homo sapiens
gagcaatgctgacctaaacaatccataaatgaataatccagattatttgtgatgtgaggtaaagaaatgtggagagtgataaatttrtggtaccaaaagtgaaagcattaaaaaggcacaagattaggcaagtttaatttgtgaaggaagtaactagtcactaaaactttaatagcaagttgtatgacaggttacctagtcattaactgagtccctcttaaggaccctgagtagaagggtcctaggacaggtaagtattgatatatggaagtagttagaaaatgtatgaaacagaggaaattaattgtataaaaggcatgccacctatagtggtggctttgggtggctggagttcaatcaggacatggaaaggagttagaagacaatgaaagcaaacttcaccatacccacagatttgtctggacctaacctggatcagtgtattcacctaaattcaggagat

SEQ ID NO: 391923 - DNA, 463 bp, Homo sapiens
gagcaatgctgacctaaacaatccataaatgaataatccagattatttgtgatgtgaggtaaagaaatgtggagagtgataaatttatggtaccaaaagtgaaagcattaaaaaggcacaagattaggcaagtttaatttgtgaaggaagtaactagtcactaaaactttaatagcaagttgtatgacaggttacctagtcattaactgagtccctcttaaggascctgagtagaagggtcctaggacaggtaagtattgatatatggaagtagttagaaaatgtatgaaacagaggaaattaattgtataaaaggcatgccacctatagtggtggctttgggtggctggagttcaatcaggacatggaaaggagttagaagacaatgaaagcaaacttcaccatacccacagatttgtctggacctaacctggatcagtgtattcacctaaattcaggagat

SEQ ID NO: 391924 - DNA, 463 bp, Homo sapiens
gagcaatgctgacctaaacaatccataaatgaataatccagattatttgtgatgtgaggtaaagaaatgtggagagtgataaatttatggtaccaaaagtgaaagcattaaaaaggcacaagattaggcaagtttaatttgtgaaggaagtaactagtcactaaaactttaatagcaagttgtatgacaggttacctagtcattaactgagtccctcttaaggaccctgagtagaagggtcctaggacaggtaagtattgatatatggaartagttagaaaatgtatgaaacagaggaaattaattgtataaaaggcatgccacctatagtggtggctttgggtggctggagttcaatcaggacatggaaaggagttagaagacaatgaaagcaaacttcaccatacccacagatttgtctggacctaacctggatcagtgtattcacctaaattcaggagat

SEQ ID NO: 391925 - DNA, 530 bp, Homo sapiens
atcttcatggcagtgagggaaggggtggctggtctgggtggtgtcctctgctaggccttgccatggggtrcctcatctggtctcacccaccttttagcatgaatgacacacattgctactgaccacttgatccaaccaaagccactggtcatcaggctcctgactcagtagcctcctattctggtccagctgtcctctcagctccttcacatctattctaggaaatgtttggttcccatgcattacgagtagggaaccaagagcgttattctgggccattggcttagacagcctcccagccaaagctgtgcagtcactcatagtcatgctggatgaggctgagggcagccttttctagaggcttgcagggcccccactacactattcctgttgaagtgtgtcactgcccctcatacacacacaaaaaattttaaacctatctggatgattctactacaccatacccacatcccccaccatggttttgaggtttcgcctagaaaaaggagaaaacaagtatctgcctcctt

SEQ ID NO: 391926 - DNA, 530 bp, Homo sapiens
atcttcatggcagtgagggaaggggtggctggtctgggtggtgtcctctgctaggccttgccatggggtacctcatctggtctcacccaccttttagcatgaatgacacacattgctactgaccacttgatccaaccaaagccactggtcatcaggctcctgactcagtagcctcctattctggtccagctgtcctctcagctccttcacatctattctaggaaatgtttggttcccatgcattacgagtagggaaccaagagcgttattctgggccattggcttagacagcctcccagccaaagctgtgcagtcactcatagtcatgctggatgaggctgagggcagccttttctagaggcttgcagggcccccactacactattcctgttgaagtgtgtcactgcccctcatacacacacaaaaaattttaaacctatctggatgattctactacaycatacccacatcccccaccatggttttgaggtttcgcctagaaaaaggagaaaacaagtatctgcctcctt

SEQ ID NO: 391927 - DNA, 246 bp, Homo sapiens
tgaatccttatacagtgttggagggggaatgcaaaaagatgctgccrctatgacaaacagcatggagatttttcaaaatattaaaaatagaactagcataggattcagcaaacccacttctgggtatttgtccaaaagaactgaagtcaggatgtcaaagagatattaccattcccatattcattgcagcactatttataatcgccaagctgtggaaataaaaactaagtgttcactgacagatta

SEQ ID NO: 391928 - DNA, 464 bp, Homo sapiens
atgtaaagaaatttgaatccttatacagtgttggagggggaatgcaaaaagatgctgccactatgacaaacagcatggagatttttcaaaatattaaaaatagaactagcataggattcagcaaacccacttctgggtatttgtccaaaagaactgaagtcaggatgtcaaagagatattaccattcccatattcattgcagcactatttataatygccaagctgtggaaataaaaactaagtgttcactgacagattaatggatttttaacaatgtcatatagacatgtaatagaatactatttagttatacaaaagaaggaaagcctgcaacatggaacaacatgtataaatgttgaggacattatagtaagtgaaatgagccagtcagaaaaggacaaatactgcataattgcacttatatgaagcgtctaaaataggcaaactcatagaaacagagggtg

SEQ ID NO: 391929 - DNA, 464 bp, Homo sapiens
atgtaaagaaatttgaatccttatacagtgttggagggggaatgcaaaaagatgctgccactatgacaaacagcatggagatttttcaaaatattaaaaatagaactagcataggattcagcaaacccacttctgggtatttgtccaaaagaactgaagtcaggatgtcaaagagatattaccattcccatattcattgcagcactatttataatcgccaarctgtggaaataaaaactaagtgttcactgacagattaatggatttttaacaatgtcatatagacatgtaatagaatactatttagttatacaaaagaaggaaagcctgcaacatggaacaacatgtataaatgttgaggacattatagtaagtgaaatgagccagtcagaaaaggacaaatactgcataattgcacttatatgaagcgtctaaaataggcaaactcatagaaacagagggtg

SEQ ID NO: 391930 - DNA, 464 bp, Homo sapiens
atgtaaagaaatttgaatccttatacagtgttggagggggaatgcaaaaagatgctgccactatgacaaacagcatggagatttttcaaaatattaaaaatagaactagcataggattcagcaaacccacttctgggtatttgtccaaaagaactgaagtcaggatgtcaaagagatattaccattcccatattcattgcagcactatttataatcgccaagctgtggaaataaaaactaagtgttcactgacagattaatggatttttaacaatgtcatatagacatgtaatagaatactatttagttatacaaaagaaggaaagcctgcaacatggaacaacatgtataaatgttgaggacattataktaagtgaaatgagccagtcagaaaaggacaaatactgcataattgcacttatatgaagcgtctaaaataggcaaactcatagaaacagagggtg

SEQ ID NO: 391931 - DNA, 595 bp, Homo sapiens
ggcccttcacttcctgcttgaaacatgatagatttccagtgccaagtgtcctgaccaagtattttgtggcaaagataaaagacaggaggaaatgggtcaaaaaccccagtgtagactgtctttggggaaagagccaaagagccgagttattctatcttcatgtagtctgaatccttaaagtacaaagcagggagccccagcctcacccaactgaataggccataaggtgccagargatgtggccagaatgtagctctgctgtaagggagaaacttcccagggtcctgctggaaggtgtggggctccttttggtgaagagaaggtatccatggggaaggtatagaagtcacccaaaagaggcagagattcaggatgcctgtgaaagtgaggcaggaattcagctagtacaagttgaaggcaaatagggctataaacacggctgccctaagtaggctaatggagaaatggaccaaaggccacagagggcaaaagcaagatgcaatgagtttcgccactggattccctgggccatgagaatagcccctttctcctgctgcctcccagcctcatgtgattctcatgtgctgagtgcagg

SEQ ID NO: 391932 - DNA, 607 bp, Homo sapiens
aagggtcaggttaccacttgacattaccttgcttctaacattctcagtccattagcaaaatttctrgggaagaacaatgatcagatggcaaatataaaacgtgttcatgctgtgccttctacggcgattagtactatatggtatagtggagtctttcaatgaaatgaggtattctaaatgaattaaaatgaaacataccatagtctagtccaggggttggtgaactgtggcccgtgggccaaatttggcccatggcgtaagcttttaagcccaagagcaaagaattttgtctttttagaaaacatttttaaaaggttgtgaacaaagcaaaacaaaacaaaggagaatgtgacagagacctcatggcctgcaaagcctaaaatatctggtaacttgtctttcactggaaaagtttactgaaccatggtatagaaaaaaataaaccaaagcaagaaagcctagcatcctacctatttttataaatgagctgtttaaacaatgacacatatttctggccacaaatcaagttactaacattgttttctcatgtacaaattggagatgataataacaatgaaatgatattcattacagtgtttgttgcaca

SEQ ID NO: 391933 - DNA, 462 bp, Homo sapiens
gaatttaatatttatgagtcacatgtgtgtttcaaagttttaaccagggccaggtgtatgagcatgtaaccctgttgcactgaacctgtgttgataatagccccatgtttattttaaggctcagctgtcactgttttgaagtgttaataatttttgaacaaggcaagtggtctttgttttgagagattcaaaaactcttttgatggtgggatacaacacattgacatttggatagatgaaaggcagaactctttgtttcttacagctgcaaatgagagaaggatgtcaaacaggaccacacagagttgcctccasggacaggataacagcaagctggggctgtataaggcagcttatctaagacaagtagggtggcatagctaggtctcctggggtccttgtggattggctaatttgaataatttcctctgctctagggctgtctctagttgtctgttgctg

SEQ ID NO: 391934 - DNA, 462 bp, Homo sapiens
gaatttaatatttatgagtcacatgtgtgtttcaaagttttaaccagggccaggtgtatgagcatgtaaccctgttgcactgaacctgtgttgataatagccccatgtttattttaaggctcagctgtcactgttttgaagtgttaataatttttgaacaaggcaagtggtctttgttttgagagattcaaaaactcttttgatggtgggatacaacacattgacatttggatagatgaaaggcagaactctttgtttcttacagctgcaaatgagagaaggatgtcaaacaggaccacacagagttgcctccacggacaggataacagcaagctggggctgtataaggcagcttatctaagacaagtagggtggcrtagctaggtctcctggggtccttgtggattggctaatttgaataatttcctctgctctagggctgtctctagttgtctgttgctg

SEQ ID NO: 391935 - DNA, 596 bp, Homo sapiens
tgctttactgtcttttggctttgaaggatgctgtggaagaaatcagtttgagtctggttcttttccttataggtgtcctgattgatttgcctgacaaaccaggtgatttctttttaatccttaaagttcaaaaattttactacaatttgtgtcagtgctgactgttctaggtcagttgtcacagacatatgctatgccacttcaacatgaaaattcaacttttatttcaagaaaatgtacacgaattataatttcaaaaatttgttctgacctactgttcttttaagacaacaattrtatttatggtggatctcattagcctgttttaaaaaaatctttcaatttctccatcttccttttcaaacttttccttatttgtcttgttttgattgcttttctaatatctacaatctatggtaatcacaattttctcccacaatatttattctctctagttttcgtttaattttgtctttatttatataatgattttttctttcaattttcttctgagttcttgcaatacttaattcacctctttttctcaccatttcctcttcttacaatctgttatttgagattctgtggccttaact

SEQ ID NO: 391936 - DNA, 596 bp, Homo sapiens
tgctttactgtcttttggctttgaaggatgctgtggaagaaatcagtttgagtctggttcttttccttataggtgtcctgattgatttgcctgacaaaccaggtgatttctttttaatccttaaagttcaaaaattttactacaatttgtgtcagtgctgactgttctaggtcagttgtcacagacatatgctatgccacttcaacatgaaaattcaacttttatttcaagaaaatgtacacgaattataatttcaaaaatttgttctgacctactgttcttttaagacaacaattgtatttatggtggatctcattagcctgttttaaaaaaatctttcaatttctccatcttccttttcaaacttttccttatttgtcttgttttgattgcttttctaatatctayaatctatggtaatcacaattttctcccacaatatttattctctctagttttcgtttaattttgtctttatttatataatgattttttctttcaattttcttctgagttcttgcaatacttaattcacctctttttctcaccatttcctcttcttacaatctgttatttgagattctgtggccttaact

SEQ ID NO: 391937 - DNA, 596 bp, Homo sapiens
tgctttactgtcttttggctttgaaggatgctgtggaagaaatcagtttgagtctggttcttttccttataggtgtcctgattgatttgcctgacaaaccaggtgatttctttttaatccttaaagttcaaaaattttactacaatttgtgtcagtgctgactgttctaggtcagttgtcacagacatatgctatgccacttcaacatgaaaattcaacttttatttcaagaaaatgtacacgaattataatttcaaaaatttgttctgacctactgttcttttaagacaacaattgtatttatggtggatctcattagcctgttttaaaaaaatctttcaatttctccatcttccttttcaaacttttccttatttgtcttgttttgattgcttttctaatatctacaatctatggtwatcacaattttctcccacaatatttattctctctagttttcgtttaattttgtctttatttatataatgattttttctttcaattttcttctgagttcttgcaatacttaattcacctctttttctcaccatttcctcttcttacaatctgttatttgagattctgtggccttaact

SEQ ID NO: 391938 - DNA, 596 bp, Homo sapiens
tgctttactgtcttttggctttgaaggatgctgtggaagaaatcagtttgagtctggttcttttccttataggtgtcctgattgatttgcctgacaaaccaggtgatttctttttaatccttaaagttcaaaaattttactacaatttgtgtcagtgctgactgttctaggtcagttgtcacagacatatgctatgccacttcaacatgaaaattcaacttttatttcaagaaaatgtacacgaattataatttcaaaaatttgttctgacctactgttcttttaagacaacaattgtatttatggtggatctcattagcctgttttaaaaaaatctttcaatttctccatcttccttttcaaacttttccttatttgtcttgttttgattgcttttctaatatctacaatctatggtaatcacaattttctcccacaatatttattctctctagttttcgtttaattttgtctttatttatataatgattttttctttcaattttcttctgagttcttgcaatacttaattcacctctttttctcaccatttcctcttcttacaatctgttrtttgagattctgtggccttaact

SEQ ID NO: 391939 - DNA, 494 bp, Homo sapiens
acccaaacacaaatgcaacaaaaacaaaaaataaataaataggacctaagtaaactaaaaascttctgcacagcaaaagaaatgatcagcagagtaaacagacaacacacagagtgggagaaaatattcacaaactatgcatttgacaaagggctaatctctagaatctacaaggaactcaaacaaatcagcaagataaagaaacaaacaatctcccgaaaaatagacaattctcaaaagaagatatacaaatggccaagaaacgtatgaaaaaaggttcaacatcactaaaaatcagggaaatgcaaatcaaaaccacagtgccataccaccttactcctgcaagaatggccataatcaataaatcaaaaaataatagatgttggcgtggaattgctgaaaagggaacacttttacactgctggtgggaatgtaaactagtacaactactatggaaaacagtgtggagattccttaaagaactaaaagtagat

SEQ ID NO: 391940 - DNA, 553 bp, Homo sapiens
aaggtaaaatgccagaagacttacattctttaatttctctacagaatgtctttaacatcttgctcaagaaattgaaaattttagataattcataatgggtgaattttatacaaggaagacaacacagtatttcaatcaacaaactcacatggcaagaaaagaattttgccttacaatgaacgatttacaaatgaatgctcatttacattgcaaataaaagtaaaatgtttaaggtacttaatatgttaaaaatcgttcctctttttaaccaactttttgagcactttttatatggtcacaactgttgagtccatggaaatatttaagaagatgtaacttttatttggaagaaggcatgttcataaaacaaacagaaaataaacaagctrcccccaccaagtgctagtattgattgcaatattgtaaattatagtgttattataaatgctataaaaattccaaaaacaaacaccaacggttctgcaatagtcaggaagcctccatgaaggaaacggggcataagctgagtcttgccagactggtggggagttgt

SEQ ID NO: 391941 - DNA, 570 bp, Homo sapiens
gccagtcaaactttggatgaaatttttagtaactatcattgatgaagatgcactgagaatcctattcttggactacacaccacctgcccactttttacatctaatttcataaagaggctcaaaagtaatagaamaggatcttaagtcagcccctgtttaaagggcagccatcttcttaatcaggatttctcaacgttgacactattgatacttgggactaaataattgttagaggtgatattgagcagcatcctggtttctactcactagatgatagtagtactctccagcctctccccaagttgtgacaaccaaaaatgtctctagaaattgccacatacttcttgaggaacaagacagctcccagttagagccacagccctaaatgacgatagtcaccagcacctgtagcttcctctgttccatctctctttgtcaccattgggccttctcttttaacttcgtatgaaaataagtcaaagggagcagatttcagtgctctgaactctggggcactttatcctgaaaaaatatttaagaaagagcattaggaccaaaattcatctatgg

SEQ ID NO: 391942 - DNA, 619 bp, Homo sapiens
atgtgtgagtgtttattttactaacaaaaatatataatttgggtggcagctttttaaacgaacatgcttaataagttgttgtactgttggcatcattgtttttgagtcaagcatatgtattgtttatakttggagttggggttctcaggagtggggacaagtccaagacacaagccttgttttattctaaactcaaaattcagaaggccaaataactaaatgatatttccatcttataaataattataatttgagatttaaaataattactagaatgttctaatacctaacaacatattatgacaaagtttaccaactctcattaggcacatcaaaggctttctctcatcagggcttttacctacattaatttgcctgagatatcacctttccacagcagaggacccctaagttgtcatggtttttgtcatgaccttataaagttctccattttcagaaggattgttagaaaaaatccagttcaacaacctgcaaaaggccccacttgtctatcaatgaagatttgattaaggttaggctatgaagcacaacttccaagcaaatttctaaagaaatgttcaggcaattaaaataatgtatccatttacctcctgaggaa

SEQ ID NO: 391943 - DNA, 570 bp, Homo sapiens
actctaaccatatgcagggacaatattatgggtatgattctctcacctactccacccatttcatgggaattctgaagaccgctattgtgcctgcaaaatagaagatctggaaagtttccttttttctatttttattttaggttcagggagtayatgtgcaggttttttaccatggctaaattgcaggatatgcagaagattgaaactggactccttcctttcaccatagacaaaaattaacttaagatggatttaaaacttaaatgtaaggcctaaaacaatgaaactatagaagaaaacctaggaaataccaatgtggacatcagccttggcaaagaattatgattaattccctgatacggtttggatttctgtccctgcccaaatctcatgtcaaattgtaatctccaatgttggaggggtggcctggtaggaagtgattgggtcatgggggccatttctcatgagtggtttagtaccatcccctttgggctggtctcgtgataacaagtgagttctcatgagatctcgttaagagtgggtagcacctccccttttccttgctcctgc

SEQ ID NO: 391944 - DNA, 612 bp, Homo sapiens
ctcccaggagggtcctgggaattcacaacaagtcttcaggtggttccaataatcaggttaaatttgggaagtagtgggttagtaaaatgtctcatcataatactcattaggtggactgtgtataaacagatttctgagccacagaaccactggatcagaatatgcagggcccccaagagtgccaggaggtggttatagtcagtgtcttagctcgggctgccatagcaaaacacccattgactggatggctttaaaagcagacatttatttctcacagttcacagttctaagttcaagatcaaggtgctggcaaggaaagtttcactgaagccttcttctcttggtttgtaggcagccaccatctccctgtgtgctcatgggacctcgtcttggttctccctggggacaggcaggtttaggtctctctagtgtctcttcttagaagggtacaacacatcatgatggtcctaccgtcgtgacctcttctaaccctaattacctttccaaagggacccatcttcaaatatccattacactgtgagcttcaacttayggacttgggaaaaggagtgacgcaaacgttcagaccattacagtcagatattttttaaa

SEQ ID NO: 391945 - DNA, 621 bp, Homo sapiens
aaaaagtttattttataatgataaaggatcaattcattaaaagggcataataatcctgtttatataactaacaacaacttatgaatctataatgcaagaacttcatacagctgtatgaagaatatacaratccacaattatacccagatattcctttctcactaattgatagaacaagcagacaaaaatccaataaaaatatagaaggctttatcaatactatcaaccaacttgtcctaattgatatttttagagcactccacctacaaaatgcagaatacattcttctcacatgcacacagaacatttattataataggccacattctaaaccataaaacaagtctcaataaactttaaaaaattcaagttataaaaatatattatcatcacaaatgagttaaattataaatcattaacagaaaaatatatagaaaatcctcaaatacttagaaccaaattatacacttctaaattacctatggatcaaagaagaaatcaaaatgaaaattagaattgtgaactgaattaaaatgaaaacatatcaaaattagtcagatgctactgaagtagtacttagaagagaaatctatagtacctattgcctatattaggaaagaa

SEQ ID NO: 391946 - DNA, 621 bp, Homo sapiens
aaaaagtttattttataatgataaaggatcaattcattaaaagggcataataatcctgtttatataactaacaacaacttatgaatctataatgcaagaacttcatacagctgtatgaagaatatacagatccacaattatacccagatattcctttctcactaattgatagaacaagcagacaaaaatccaataaaaatatagaagrctttatcaatactatcaaccaacttgtcctaattgatatttttagagcactccacctacaaaatgcagaatacattcttctcacatgcacacagaacatttattataataggccacattctaaaccataaaacaagtctcaataaactttaaaaaattcaagttataaaaatatattatcatcacaaatgagttaaattataaatcattaacagaaaaatatatagaaaatcctcaaatacttagaaccaaattatacacttctaaattacctatggatcaaagaagaaatcaaaatgaaaattagaattgtgaactgaattaaaatgaaaacatatcaaaattagtcagatgctactgaagtagtacttagaagagaaatctatagtacctattgcctatattaggaaagaa

SEQ ID NO: 391947 - DNA, 621 bp, Homo sapiens
aaaaagtttattttataatgataaaggatcaattcattaaaagggcataataatcctgtttatataactaacaacaacttatgaatctataatgcaagaacttcatacagctgtatgaagaatatacagatccacaattatacccagatattcctttctcactaattgatagaacaagcagacaaaaatccaataaaaatatagaaggctttatcaatactatcaaccaacttgtcctaattgatatttttagagcactccacctacaaaatgcagaatacattcttctcacatgcacacagaacatttattataataggccacattctaaaccataaaacaagtctcaataaactttaaaaaattcaagttataaaaatatattatcatcacaaatgagttaaattataaatcattaacagaaaaatatatagaaaatcctcaaatacttagaaccaaattatacacttctaaattacctatggatcaaagaagaaatcaaaatgaaaattagaattgtgaactgaattraaatgaaaacatatcaaaattagtcagatgctactgaagtagtacttagaagagaaatctatagtacctattgcctatattaggaaagaa

SEQ ID NO: 391948 - DNA, 498 bp, Homo sapiens
aattgaaagtaactttgtcattgctaggaggcactattgtttagatgatgtaatcagtatgatttatgagaaagctccatatttactgatgaaaagatgtccatggctgagcacagtggctcatgcctgtaatcccagcastttaggggctaaggtggaaggatcgcttgagcttagaagttcaaggctgcagtgagctacgattgcaccactgcactctggcctgggcaacagagtgagaccctatctgtaaaaaaaggaaaaaaaaaaaaacagaaaaagaaaaaagaaaaaaaaaaggtgtccatgacataatggaagaaagcagtttagctgaacctcacatgtaatgtatgtataccatttatgtaaaattcagacatttatttttacatagagggatgttcagaattatgttaatcaaaatgttgactgatttccaccagatagtttcatgaaaatatttaaatgtgttcttacttgtattttaaggtagcg

SEQ ID NO: 391949 - DNA, 595 bp, Homo sapiens
ccatgtggccctgtggaagctgacagcacagctttctgacccgctttctgacgcaggtcagaaaggcagagaaagggcagacagaaaacagccaagccaccgggactggtaatccacacacggcttttagttggatgtgaaattcagagcaggctttgtttgccttrtgcgagaacacatgcctccaagaaggagcctgtgcagacaagcagcttgaggatcgggaaagaactgactctgaaaaggcattttcatttgtcacgtaggtgtcacatgtgggggaaccactcaagacccatgtttttcgtcatccctctttttgcaggtagtgctcagatagccctccctgcactctgtcttttttggattactttccttagaacattgctctctgcacgttcacgtccaattattgttaatccagtcactggggtgatagagtgagtgtgtgaggcattatctgctcccatgagtttgcttactggtgtcctgttacctttttttttttaatgctatatccagaatttggagcttataaagcaagcacaagttaggggttggtttgttctctctatcttaaatctcaagatcagca

SEQ ID NO: 391950 - DNA, 595 bp, Homo sapiens
ccatgtggccctgtggaagctgacagcacagctttctgacccgctttctgacgcaggtcagaaaggcagagaaagggcagacagaaaacagccaagccaccgggactggtaatccacacacggcttttagttggatgtgaaattcagagcaggctttgtttgccttgtgcgagaacacatgcctccaagaaggagcctgtgcagacaagcagcttgaggatygggaaagaactgactctgaaaaggcattttcatttgtcacgtaggtgtcacatgtgggggaaccactcaagacccatgtttttcgtcatccctctttttgcaggtagtgctcagatagccctccctgcactctgtcttttttggattactttccttagaacattgctctctgcacgttcacgtccaattattgttaatccagtcactggggtgatagagtgagtgtgtgaggcattatctgctcccatgagtttgcttactggtgtcctgttacctttttttttttaatgctatatccagaatttggagcttataaagcaagcacaagttaggggttggtttgttctctctatcttaaatctcaagatcagca

SEQ ID NO: 391951 - DNA, 463 bp, Homo sapiens
tcaattaggaaaagaggaagtcaaattgtccctgtttgcagacgacatgattgtatatctagaaaaccccaaaatcttataatattttaagaaagtttactgatttgtgttgagctgcattcaaagccatcctgggccacatgcagcccatgsgctgcaggttggacaagctcggtctagtgaattccaccattacacctctctcatgatctctttctgtgtctttgatagccttcacagctccctatgtgggttcatctgtccactctgagccctttctgtgcaaactaacccactcttattgggagctgacatctgctgtcaaaagacaaaattacaacaaatttaaagatcctaaatggattttatctgtgattctagaattggacaacacctcattctgtacaaaagaaggagtgttccaatgatctgagcaaaggatgtataaccacccgacaggttc

SEQ ID NO: 391952 - DNA, 463 bp, Homo sapiens
tcaattaggaaaagaggaagtcaaattgtccctgtttgcagacgacatgattgtatatctagaaaaccccaaaatcttataatattttaagaaagtttactgatttgtgttgagctgcattcaaagccatcctgggccacatgcagcccatgggctgcaggttggacaagctcggtctagtgaattccaccattacacctctctcatgatctctttctgtgtctttgatagccttcacagctccctatgtgggttcatctgtccactctgagccctttctgtgcaaactaacccactcttattgggagctgacatctgctgtcaaaagacaaaattacaacaaatttaaagatcctaaatggattttatctgtgattctagaattggacaacacctyattctgtacaaaagaaggagtgttccaatgatctgagcaaaggatgtataaccacccgacaggttc

SEQ ID NO: 391953 - DNA, 580 bp, Homo sapiens
tgtctttcacatgaaaatttcctgaatctatgacatcctgcctcttcggtgtgcgcattttgttgtattaaatggagacattatatagcttatgaagatatgaagccctatagttaattatgcttattgagatcatgtttattgagattactagaaaaactctgtcaaatagtgttccctagtttttgaatctaaggggcaggggcaactttgctttgtctttgcatctcagtccctagtatatgttgaatgaatgaatgcttttagacagaaggggaaattacagagtacatttgaaaggcctcagctatatttttttctatcatacttgagctccagtaagaatatctactttgagaatactttaatccttaacaggaaaaattcagtttccttatggagaattctgtaatgctcttggttaggaggcagttattgttccctttttaccttgttccaaagttctttacacagtcaaccaaattgagtacatatctgttycttttcctccaatattaaattaaaagatttggagaattctatagatggagaggatatttggggatcatttaaaatttca

SEQ ID NO: 391954 - DNA, 594 bp, Homo sapiens
atgttagttgatctctgctggatagggccccacaaggacctgttgacacctcacrgcagaatttcacaaaatgttctagggagagataattttctaattataacaccaaattttgcttataaaggcattttccaaccacttcatttccagtagtgggaatagtctgagggtgaaattagacccggggtgcatacttttctttctttctatttttttctttcctttttggtattaggaagtatttcctggaaaactaggccttgctttccaaatgctcacctgagaatgcaaccctaaatgttaccttccttagactaacccctggaagcaacaacaccaaggctctgcccctggacaagcaggcttaacacccccacccccgccccgaccaaggaatgtagtctacccttctggccatcttggccctttttgctctttctgtctgcctagacatcttgtcctccaaccaccagttagaaacacaactacttctcatcctttcgacctttttcactctcaaggcagccttccctgacccactatatcagtgttccccaaatgtggcctgtggaccacccatatcagaattaccca

SEQ ID NO: 391955 - DNA, 630 bp, Homo sapiens
tatccctttggtaccattctcttgaaacgttataataaagcacactggaaaactaataacaaaatctgggttctrttcctaattagctgtttggtttcaggaaatcaactttacctctctgggcctcagttaccttacctgttgaaagagagggcttggattactagaggcttttttttttttttttttaaaaaaaaaaaaagctcactgctaattcttcccttagaatgaagccccatgagggtggctgggtggcagtgaggtaggtagagagtggtctgaggggccaggaagagagttagcaaacctgtgtactggcccacctgggggtcttataaaaaggcagattctggggtgaggcctgagtttctacatttcttccaagaagatcccaggtgatgctgatgctgctggtccatggaccacactttgagtagcaagacgctagatgacttcttccccaactttctcattccataggtgaaactggatcctagaaaagcaaagtgatttacccaagctcacacaacagttgggtagtacaccctatataagaattcatggtatcatgactatcagtttgatgacaatatcacttgctacatctctcatatggcttctgctgctaaa

SEQ ID NO: 391956 - DNA, 630 bp, Homo sapiens
tatccctttggtaccattctcttgaaacgttataataaagcacactggaaaactaataacaaaatctgggttctgttcctaattagctgtttggtttcaggaaatcaactttacctctctgggcctcagttaccttacctgttgaaagagagggcttggattactagaggctttttttttttttttttwaaaaaaaaaaaaagctcactgctaattcttcccttagaatgaagccccatgagggtggctgggtggcagtgaggtaggtagagagtggtctgaggggccaggaagagagttagcaaacctgtgtactggcccacctgggggtcttataaaaaggcagattctggggtgaggcctgagtttctacatttcttccaagaagatcccaggtgatgctgatgctgctggtccatggaccacactttgagtagcaagacgctagatgacttcttccccaactttctcattccataggtgaaactggatcctagaaaagcaaagtgatttacccaagctcacacaacagttgggtagtacaccctatataagaattcatggtatcatgactatcagtttgatgacaatatcacttgctacatctctcatatggcttctgctgctaaa

SEQ ID NO: 391957 - DNA, 630 bp, Homo sapiens
tatccctttggtaccattctcttgaaacgttataataaagcacactggaaaactaataacaaaatctgggttctgttcctaattagctgtttggtttcaggaaatcaactttacctctctgggcctcagttaccttacctgttgaaagagagggcttggattactagaggcttttttttttttttttttaaaaaaaaaaaaagctcactgctaattcttcccttagaatgaagccccatgagggtggctgggtggcagtgaggtaggtagagagtggtctgaggggccaggaagagagttagcaaacctgtgtactggcccacctgggggtcttataaaaaggcagattctggggtgaggcctgagtttctacatttcttccaagaagatcccaggtgatgctgatgctgctggtccatggaccacactttgagtagcaagacgctagatgacttcttccccaactttctcwttccataggtgaaactggatcctagaaaagcaaagtgatttacccaagctcacacaacagttgggtagtacaccctatataagaattcatggtatcatgactatcagtttgatgacaatatcacttgctacatctctcatatggcttctgctgctaaa

SEQ ID NO: 391958 - DNA, 391 bp, Homo sapiens
  misc_feature (1)...(391): n = A,T,C or G
gtgtgcatatgtgtacatgcatgtgtgtgtgggggggcatgtggggggcgtgagggagaatcaagtaaaagtcctcatctcaattgataggagagggatatatgcagagaaccatgggaaataggtgagtgcaatcagggattaggtaacgcaggtaagaggaaaaaactttggagctgaccttgggtgataagtaggagttcagcagatatagaagtcaggatagggcatttggggagagggatcagaatatacaagcacatggmgccataaaatagtgtaggggaatcacaagagttttgcttgaagggaagggagtagtagaagagtgatcatgttataaantaataataatattactaccactactactaatagctgggacttatta

SEQ ID NO: 391959 - DNA, 595 bp, Homo sapiens
ttctgggatttgaagtcataaaaggaaagaactgtaacataactatgaaaattaataycttaaagaatgaggagtttatctttttcttcacttgttcttaaatggtctatttatatcacttgacaactggaacagtgtaaactttatcactatctgcttaataattattccattaaagttgagttagacaagagaaaatgtcacttcactgtggaaatagcaagtaactaccttttgaatatgtaaattcttacctttaagaggtatttttttttttttgaagcaaacaagtaggttagggatagccaactgcttctccagtaaactattctactgtttgaaatgcttgtcaaaagtgccagaataatggttctaaaataaagtatcttgctatatacagaaagtcatcaaagatctagtcctgtaacttttgcctgagggttctccctaggggcagcaatatttcccaaagtgatcatatgattagctcagtgctaaatactatctgcttacattttatatatggtgtttctgaatttatatatttgttggttaatggaaaggcctaagcactgaaagctaattcaaatcactg

SEQ ID NO: 391960 - DNA, 577 bp, Homo sapiens
caatatatgtttttttgaaaaatttacaaaagagtatacatgagggcacaaaactgtctaaaattctgccacacagagttggctattaatattttctttttatttaattctaggtaaacatgaacattaggaaactggggccaggtgtagtggctcacgcctgtaatcccagcactttgggaggctgaggtgggcggattcctggagatcaggagttcaagaccagcctggccaacatggcgaaaccctgtctctactaaaaatacaaaaattagccaggtgtggtggtgtgcacctgtagtyccagctactcaggaggctgagccaggagaattgcttgaacccaggaggtggaggttgcagtaagccaagatcatgccactgcactccagccgtggcaacagagcaagaatctgtctcaaaaaaaaaaaaaaaaaaaaaaaaggaagaaaaaaagaaaaagaagttggcaacaagttatacattctattttgaaatattctttaaacaattaatatatagttaactcatgcataattttaaatctctaccttcaaagataacttatcactattat

SEQ ID NO: 391961 - DNA, 424 bp, Homo sapiens
caggagttcaagaccagcctggccaacatggcgaaaccctgtctctactaaaaatacaaaaattagccaggtgtggtggtgtgcacctgtagttccagctactcaggaggctgagccaggagaattgcttgaacccaggaggtggaggttgcagtaagccaagatcatgccactgcactccagccgtggcaacagagcaagaatctgtctcaaaaaaaaaaaaaaaaaaaaaaaargaagaaaaaaagaaaaagaagttggcaacaagttatacattctattttgaaatattctttaaacaattaatatatagttaactcatgcataattttaaatctctaccttcaaagataacttatcactattattgtataaaagtttataaaactctttagttttcattattttgtgattttcttagagc

SEQ ID NO: 391962 - DNA, 531 bp, Homo sapiens
ctaagttgtgtgtttagcagatgtattttgagaaatgcctattggtgagtagtattctgctctctaacaagcaaaaaagaggaaatgaatttaaattagaaccaaaggaatttaagttagatggaaagatcttattggcagtgaagattttataaaccctggaaaagattcctggagaggttttcaaattctctatctgaatgtacttaaaagaagagagatacctatcggctcagggtggttgaggtagagacctgcctggagttgctttcagctgaattctctgcaagtccagattagttcctgacaatgctcaggatgtcaaagactgtaaatgctagacagtggcaagcaatattgccccttaaacaaaaacaaaaacaaaactcaccaaagtaatcatttccytggaaagttaattggcatatggtagttggttataagtgaaatgttcaattgtaatacattcttgttttattttctttttagcctagtttccaatggaaagaagccttatgaaatttctctggc

SEQ ID NO: 391963 - DNA, 539 bp, Homo sapiens
ccacgaaacatcctgagataaactgttgtggggagtataagctacagagtgattatttgggaaatgctgagcaataggatgacaccctcctcctccacctatacaaattctagtgacaaaagtattcctggaagaatgagcagaacacaggcatagctgtatagaatgtcacttcctcttttatcatagagaaagaagcttggacttcaacaaaattaagtgcatggtgccactctgtttcaggcatctgtgggctaatttgtgtagtcccatagagtctctatgaaagataaattgtctacgagcagttatggctctcccacaaccatttaaaaacttgtctttactayattttatgccataaactaatttaattccacaaatacttaactttggcatcaccgtgaggtgttgaatttggacttctaagaacataggaactggactctccattcaacttattatgacttgagggaggatcagagaaaaatctacttccaaagaaagagttcctaagccagattcgcctgtgttgggca

SEQ ID NO: 391964 - DNA, 556 bp, Homo sapiens
ggcttttgccgtgttccccaggctggtcttgaactcctgagctcaagccatttacctgccttggcctcccaaagtgctgagattataggcatgagccattgtgtccagccaacatttgttaccttttgtttgttttgtttgtttcctaacacagtgggataacctcatatgtggttttgatttgcattctcctgatgattagtgatgttcagcattttaaaatatacctgttggctgtttatatgtcttctttggtgccttatttatttatttatttatttatttatttagagatggagtctgtctgtcctccatgctggagtgcagtggcatgatctcagctcactgcaacctccacatcctggattcaagtgattcgcctgcctcagcctccctagtagctgggactacaggcatggctaatttttgtatttttagtagagacagcatttcacatgttggtcaggctggtctcaaactcctgacctcaagtgatccgcccacctcascctccaaaagtgatgggataacaggcatgagccactgcatccagccc

SEQ ID NO: 391965 - DNA, 507 bp, Homo sapiens
tgacataataataatacctccctcatagagtcgtttggaggaataagtacattaatccatacaaggcactgacaagagttccagactcagcatgaatattatgttaagtactggcttttatgtctattcatctccaaatctcacatttaatttttttttttttttttttttgagtcagagtctcactctgtcacctatgctggagtgcagtggagtgatcttggctcactgaaacctccacctcccaggttcaagccattctcctgccttggtctcccaagtggctgggactacaggcwcctgccagcatgcaactgatttttgtatttttagtagagacagggtttcaccatgtttgccaggttggtctcgaactcctgacctcaagtgatccacctgcctcagcttcccaaagtgctgggattacagacgtgagccaccacacccggctgactcacatttaatttcctatcccaccaccacgtagtctcactgccatcacattgg

SEQ ID NO: 391966 - DNA, 567 bp, Homo sapiens
cttcaggctatctaaaggcaaatagtcatcagtctatctaaagtcaatatgaaagaaagaattataagagcagcaggtaacctatagaagaaaacctatcagactaacagcaaacttctcggcagcaaccttacaagccagaaaggattggggtcccagcttcaacctccttaaacagaaaaaactgtcagccaagaattttgtatcccacaaaactaagtttcataaatgaaggagaaatggtcattttccgacaaacaaatgctgagaaaatttgtcactaccaaaccagcactacaagaaatgctaagacatgagttaagctatctaggtaacaacatgatgaagagaacagtagttcacatctcaatattaacattgaatgtcaatggcctaaacactccacttagaagatacagaatagcagaatggattaaaaaaaattacaatccaaatatctgctatcttcaagagactcacttaacacagaaggattcatataaactcaaggaaaaagggtggaaaaaggtattctatgcaaatgaaraccaaaagtgagcacaagta

SEQ ID NO: 391967 - DNA, 584 bp, Homo sapiens
taatatcaactcaaatcatatatccaataatcttcaaagtctccaggtattttccatattccaggaaaatctaagtatttctgcttcaatcagtgtgggcttttgctttttcaggttcaaaaaagttacctgaggtaggcagaataatgccccctccccctaaaggtgtctatatcctaatccccagaacttgtgaacatattattttacatggcaaaatgaactttgcaggtagggataaatcaaggatcttgggatagsgagattatcctgtattattcaggtgtatcccagtatcccattataacaacaagggtccctgtaagtgaaaaacagaagtaggatggttagagaggaagagaaatttgaagatgctacacttgattttgaagatggatgaaggggccatgaaccaaagaacataagcaggctctagacaccaaagaagatgaagaaacagattctcccttagagtctccagaaggtatgcagcttgccaacaccttcatttcagcccagtaagacctatttcaatcttctgatctccacaactgtaagttacataatatgtgttgtgttaagct

SEQ ID NO: 391968 - DNA, 593 bp, Homo sapiens
gtggggtaggtaattatggcacatgaaatctttgtttttgcatctcaaatacattttatgtttgaatatttatcattaatttacaaataccttgtcttctagtatacactggcctagttctccctagcatctgctcttctcaaaagcacctgtccaaacccagtaaattttaactgagtgaagttatatttttccatttgagtgactgttaagktttttgaatggtgagacaattcagtaactgtcagagattaactctacccttccccaaacttgttcaatctgaaacattttgctttggcatttcgaaagtcacaagtttgtagtaaaaattgcctgcctgagacatttctcatggattataaagtttatagggtttttaatataagacctaaattgcttctcctttcttaaaaattacaagcaaaaaaattgctgtaaaaattcaaataatgtggaagtacagagaatagtaaaaagtgaaagtccctcttcgcctccctttcctctatactttgctcttcccagaagttactattctcatacctcctcctatgtatttacctatgcatttataaaaaacattatatgac

SEQ ID NO: 391969 - DNA, 584 bp, Homo sapiens
taatatcaactcaaatcatatatccaataatcttcaaagtctccaggtattttccatattccaggaaaatctaagtatttctgcttcaatcagtgtgggcttttgctttttcaggttcaaaaaagttacctgaggtaggcagaataatgccccctccccctaaaggtgtctatatcctaatccccagaacttgtgaacatattattttacatggcaaaatgaactttgcaggtagggataaatcaaggatcttgggatagcgagattatcctgtattattcaggtgtatcccagtatcccattataacaacaagggtccctgtaagtgaaaaacagaagtaggatggttagagaggaagagaaatttgaagatgctacacttgattttgaagrtggatgaaggggccatgaaccaaagaacataagcaggctctagacaccaaagaagatgaagaaacagattctcccttagagtctccagaaggtatgcagcttgccaacaccttcatttcagcccagtaagacctatttcaatcttctgatctccacaactgtaagttacataatatgtgttgtgttaagct

SEQ ID NO: 391970 - DNA, 584 bp, Homo sapiens
taatatcaactcaaatcatatatccaataatcttcaaagtctccaggtattttccatattccaggaaaatctaagtatttctgcttcaatcagtgtgggcttttgctttttcaggttcaaaaaagttacctgaggtaggcagaataatgccccctccccctaaaggtgtctatatcctaatccccagaacttgtgaacatattattttacatggcaaaatgaactttgcaggtagggataaatcaaggatcttgggatagcgagattatcctgtattattcaggtgtatcccagtatcccattataacaacaagggtccctgtaagtgaaaaacagaagtaggatggttagagaggaagagaaatttgaagatgctacacttgattttgaagatggatgaaggggccatgaaccaaagaacataagcaggctctagacaccaaagaagatgaagaaacagrttctcccttagagtctccagaaggtatgcagcttgccaacaccttcatttcagcccagtaagacctatttcaatcttctgatctccacaactgtaagttacataatatgtgttgtgttaagct

SEQ ID NO: 391971 - DNA, 572 bp, Homo sapiens
atgattttgtttttatagtttgtactttgagagactacctgaaaagaaatgcaagaatgtggttttaaaaatctatttgcttagattcagttataattctttattccttaaaataatttcttacttggccaagaatgcatcatatcttattttgttccagcctagcatgtgcattgctaagggacctggacaggatatgtttgacagcacacaaattataggacgggccatgtatcagagagcaaaggtaagccatgggcctcgctcctttaatctttgtttaaaattgtcctttaaaatccattgacttggttcattaggaagttgaatacttaaagaaaacagcaaatgctcaggttgtgctggggagtctagaagaggtcagcttgggaggtggcctttgcaatccacatgggaacctctgtctgactkctcaggtctgacttcttataggaagtacatttaaaaccaagtaatcaggaaaacattctattttagaatgtctagaaagccagagtgcttgcttagacactaggaacatagactataagattttcaatttcttgtggcat

SEQ ID NO: 391972 - DNA, 565 bp, Homo sapiens
tataggaatctttttccagattcaatgtcatgaagatttccccctattttcttataagatttttatggttttagctctacatttaagtcttggatccatttttagttaaactttgtgtatcatggaggtaatggcctgcctttattcttttgcatatggctattcagttatcctagcaccacttattggaaagattattatttacccattctataatcttggcacacttgttaaaaattagttgacacatggctttatgtctggatgatcaattctattccattgatctatatgcctaaccttgtgccagtataaccgtctcttggttattgtttcctttaagatcagaaagtatgtctttcyaccttgtcctcctcttccaagattgttttgacttctgaatttcttgagattccacaggaattttagaatcagcttgtaaatttttacaaagaagtcagctgggattccgatgggaatatcattgaatttacagattaatttgggggagtattgccatcttaacaatattatgtaatctgatccacgtacatagatgttttag

SEQ ID NO: 391973 - DNA, 597 bp, Homo sapiens
ccttgtgccagtataaccgtctcttggttattgtttcctttaagatcagaaagtatgtctttctaccttgtcctcctcttccaagattgttttgacttctgaatttcttgagattccacaggaattttagaatcagcttgtaaatttttacaaagaagtcagctgggattccgatgggaatatcattgaatttacagattaatttgggggagtattgccatcttaacaatattatgtaatctgatccacgtacatagatgttttaggattcatttagaccctctttaatttttttcaacaatgttttgtaattttaagacaaatacaaaaaataaattttgtattttttgttaagtttatttcttagtatttcactcttttctatgctattgtaaatggaaattttttcttaatttcatttttggattgttcatagaaaatgtatagaaatacaacagatagctgtattgaccttataycctacaaccttgctgaactcatttattagttctaatattttaatggatgatttaggatttttctctatacaagatcatgtcatcttaaaatagaaatattaatagttttaatttttct

SEQ ID NO: 391974 - DNA, 512 bp, Homo sapiens
gtcatcgtcactttcacatgatgtccctgtgaagcattataataacttgataactatttaccagctctgctgtctttgcatgtgtaggtcccagatatctttcaaatgcccaaatcattgagctgttcccactgaatcattgaactgtgactagggcatcttcccaggtcaacatcaatgaaaacttcagcagttggcctgtcacctgtgccagggactatctgtacttgatattctatttgggatgcagtccttcttgccaaatggatggtgagtgagccagtcctggaaccccattatattacctgttttcctggaccacttatggtaccacctgtgtctttcaaggagcagaagctgagatgggctcaggcgtgctagagatttaatggaaaaacacctatttagggkaaaggggaaaggagcagaaacagtttggtgaaccttcagactgcagtgcagatatggtatttgtgaaaggagagatggaggaaggcatgattgaaaaggaa

SEQ ID NO: 391975 - DNA, 331 bp, Homo sapiens
aacaatttttaaaacacaatatgttgtttttaactgaagccatcaagttgtacagtagccctcttgaacttattccctctgtctaaatgaaattttatattctttgatcaatacctccccaaccccctaacctcctagcccctggtaactaaccttctgccaacattctactctctacttctatgagtttaactcttgaaggttctatatataagtgagatcatgtggtatttatctttctgtacctggcttatttyactgaatctaatgttctccaggtttatccatgttgtatcaaatgtaaggatctcattcttatttatgactgaat

SEQ ID NO: 391976 - DNA, 598 bp, Homo sapiens
atttgttttcttgctatagagttgtttgagtaccttatatcttttggatattaactctttattggatgcatagtttgcaagtgttttctcccattctttaggttgtctcctcactttgttaattgtttttttggttgtgcagaaactgtttagtttgatgtaatatgtgtctgtttttgcttttgttgcttttgcattaggggtcatattaaaaaaaaaaaaacatcgcctacaccaacatcatggagcttttcctctaggttttctttcagttgttttatagtttcaggttttatatttaaatctttaatcaattttgagttaatttttatatttccttcttctgcatgtggatatccagttttcccagcagcatttattgaagagactgtcacttccccattgtgcrttcttggcacctttgtcaaaaatcaatttatcataaatgtgagggcttatttctgggctccattggtctatgtgtaccaatggtgtgttgattactttaggccagtaccatgctgtgttgattactatagctttgtagtatattttgaagtcaggttgtgtggtaccttcatctttgttttttttgctg

SEQ ID NO: 391977 - DNA, 576 bp, Homo sapiens
tggttttcactgtggctgaggatgcattccttatatcaattagctgttcttcccagggcctatagtcacttataatccaaaaataccttccttccaaaagaaccttcccattcctgtttttaaaatgtcattattgccaagatarcaattgtggcaatatgacattctcaaatatgacattggaggaaagtcttctacttcttaggtagtcaatatgcacctgtttgaagtaatttctttagtaagtgaatctgtgccacaatagttacatgtttataacattattttctgaagatatcaaagtgttatatcaaaactgcatgtttagctgtcacctgatatccctagggtagagaaattctatcatcattattgccatggagaagcaggagaacaaaacctttaaactactatagtggtaatagaattaatttcaaagaatgctttgggacttggtataaaacaatttctatcacccttcttcattagtagttatcatcactatttatggaatgcttactattttgcaggtagtatttgcaagtattcctattaaagtgctttatatgcattatc

SEQ ID NO: 391978 - DNA, 576 bp, Homo sapiens
tggttttcactgtggctgaggatgcattccttatatcaattagctgttcttcccagggcctatagtcacttataatccaaaaataccttccttccaaaagaaccttcccattcctgtttttaaaatgtcattattgccaagatagcaattgtggcaatatgacattctcaaatatgacattggaggaaagtcttctacttcttaggtagtcaatatgcacctgtttgaagtaatttctttagtaagtgaatctgtgccacaatagttacrtgtttataacattattttctgaagatatcaaagtgttatatcaaaactgcatgtttagctgtcacctgatatccctagggtagagaaattctatcatcattattgccatggagaagcaggagaacaaaacctttaaactactatagtggtaatagaattaatttcaaagaatgctttgggacttggtataaaacaatttctatcacccttcttcattagtagttatcatcactatttatggaatgcttactattttgcaggtagtatttgcaagtattcctattaaagtgctttatatgcattatc

SEQ ID NO: 391979 - DNA, 576 bp, Homo sapiens
tggttttcactgtggctgaggatgcattccttatatcaattagctgttcttcccagggcctatagtcacttataatccaaaaataccttccttccaaaagaaccttcccattcctgtttttaaaatgtcattattgccaagatagcaattgtggcaatatgacattctcaaatatgacattggaggaaagtcttctacttcttaggtagtcaatatgcacctgtttgaagtaatttctttagtaagtgaatctgtgccacaatagttacatgttyataacattattttctgaagatatcaaagtgttatatcaaaactgcatgtttagctgtcacctgatatccctagggtagagaaattctatcatcattattgccatggagaagcaggagaacaaaacctttaaactactatagtggtaatagaattaatttcaaagaatgctttgggacttggtataaaacaatttctatcacccttcttcattagtagttatcatcactatttatggaatgcttactattttgcaggtagtatttgcaagtattcctattaaagtgctttatatgcattatc

SEQ ID NO: 391980 - DNA, 576 bp, Homo sapiens
tggttttcactgtggctgaggatgcattccttatatcaattagctgttcttcccagggcctatagtcacttataatccaaaaataccttccttccaaaagaaccttcccattcctgtttttaaaatgtcattattgccaagatagcaattgtggcaatatgacattctcaaatatgacattggaggaaagtcttctacttcttaggtagtcaatatgcacctgtttgaagtaatttctttagtaagtgaatctgtgccacaatagttacatgtttataacattattttctgaagatatcaaagtgttatatcaaaactgcatgtttagctgtcacctgatatccctagggtagagaaattctatcatcattattgccatggagaagcaggagaacaaaacctttaaactactatagtggtaatagaattaatttcaaagaatgctytgggacttggtataaaacaatttctatcacccttcttcattagtagttatcatcactatttatggaatgcttactattttgcaggtagtatttgcaagtattcctattaaagtgctttatatgcattatc

SEQ ID NO: 391981 - DNA, 588 bp, Homo sapiens
agggggttattgttaactttgtcagacatgagaatgaccctgtagttaagatttttttaagtcgttatctgttagaaaaatataccaaggtatttacagggtaaatactctccagctcaacctccctctccattccagagaatggtgaggagacagatgaaacaacattagcaaaatgttggtaccttctgaagtcggacaatggggtaggtggagtatcatcaaactattccctctagctgcttgtatgtttcaaaatttccatgataaaaggattttttaaggtctcagaatactcaatgacagtctaaggttggaatcacagtggaattctcacgatgcgcctcccatggtagaggcacagcaagagtaatatgtatggaaggggatcctcaggttccccttggcagggcttcatattccccagcaaggaggaaacatgatayttccacaggaccccactacattttctgctaaaaggtggacactgtttaaagaaaataaaaagcccctcaaagattggaagatctctcttcaatagggtctgtaaagcattctctattcataaacgcatttcctgaaatagaa

SEQ ID NO: 391982 - DNA, 534 bp, Homo sapiens
cactttagggatgatttaacagcactgaactattaaggaccctgggatcctttatattattgccatcttcaacatgaagtttccatctctgggcttttgccatcatgtttgccacacacctattaagaaggaaattagggcaagggagttgtatttgtccattcttgcattgctataaagaaatacctgggcagggtgtggtggctcacacctgtaatcccaacactttrggaggcccaggagggtggatcatctgatgtcaggaggttgaggccagcctgaccaatatggtaaaaccccatctctactaaaaaaaatacaaaaattagccaggcatggtggtgtgcacctgtagctccagctacttgggaggctgagatagaagaattgcctgaacctgggaggcagaggttgcagtgagccaagatcatgccattacattccagcctgggcaacaagagcaaaattccatctcataaataaataaataaatacctgagactgggtaacttaaaaagaaaagaagtctaattg

SEQ ID NO: 391983 - DNA, 534 bp, Homo sapiens
cactttagggatgatttaacagcactgaactattaaggaccctgggatcctttatattattgccatcttcaacatgaagtttccatctctgggcttttgccatcatgtttgccacacacctattaagaaggaaattagggcaagggagttgtatttgtccattcttgcattgctataaagaaatacctgggcagggtgtggtggctcacacctgtaatcccaacactttaggaggcccaggagggtggatcatctgatgtcaggaggttgaggccagcctgaccaatatggtaaaaccccrtctctactaaaaaaaatacaaaaattagccaggcatggtggtgtgcacctgtagctccagctacttgggaggctgagatagaagaattgcctgaacctgggaggcagaggttgcagtgagccaagatcatgccattacattccagcctgggcaacaagagcaaaattccatctcataaataaataaataaatacctgagactgggtaacttaaaaagaaaagaagtctaattg

SEQ ID NO: 391984 - DNA, 534 bp, Homo sapiens
cactttagggatgatttaacagcactgaactattaaggaccctgggatcctttatattattgccatcttcaacatgaagtttccatctctgggcttttgccatcatgtttgccacacacctattaagaaggaaattagggcaagggagttgtatttgtccattcttgcattgctataaagaaatacctgggcagggtgtggtggctcacacctgtaatcccaacactttaggaggcccaggagggtggatcatctgatgtcaggaggttgaggccagcctgaccaatatggtaaaaccccatctctactaaaaaaaatacaaaaattagccaggcatggtggtgtgcacctgtagctccagctacttgggaggctgagatagaagaattgcytgaacctgggaggcagaggttgcagtgagccaagatcatgccattacattccagcctgggcaacaagagcaaaattccatctcataaataaataaataaatacctgagactgggtaacttaaaaagaaaagaagtctaattg

SEQ ID NO: 391985 - DNA, 412 bp, Homo sapiens
ttagtaatattactttctggccctgcttctgttcatcttccttaaagtaagtggttccaaaaggcctgtcatccraatctcttttctctttcttatatgccctcccttttgcaaagtcatcaactttcttgatttcaaccatcagtttgaagtttgatgcttcccatatatctgatctgttgccctactttctctccagtgtctctactccacatttcccactgtgtgctggactttgctatatcttgtcaaagtctcagacatccaaaactagatttaccatcatctctctgaaatctgtttccttttaccttggctcttgtttatagcattactataacccaaatgttatagagtttgggttgttgtaactgtcttctccctaccttatccagtcaatgagtatattgtg

SEQ ID NO: 391986 - DNA, 412 bp, Homo sapiens
ttagtaatattactttctggccctgcttctgttcatcttccttaaagtaagtggttccaaaaggcctgtcatccgaatctcttttctctttcttatatgccctcccttttgcaaagtcatcaactttcttgatttcaaccatcagtttgaagtttgatgcttcccatatatctgatctgttgccctactttctctccagtgtctctactccacatttcccactrtgtgctggactttgctatatcttgtcaaagtctcagacatccaaaactagatttaccatcatctctctgaaatctgtttccttttaccttggctcttgtttatagcattactataacccaaatgttatagagtttgggttgttgtaactgtcttctccctaccttatccagtcaatgagtatattgtg

SEQ ID NO: 391987 - DNA, 412 bp, Homo sapiens
ttagtaatattactttctggccctgcttctgttcatcttccttaaagtaagtggttccaaaaggcctgtcatccgaatctcttttctctttcttatatgccctcccttttgcaaagtcatcaactttcttgatttcaaccatcagtttgaagtttgatgcttcccatatatctgatctgttgccctactttctctccagtgtctctactccacatttcccactgtgtgctggactttgctatatcttgtcaaagtctcagacatccaaaactagatttaccatcatctctctgaaatctgtttccttttaccttggctcttgtttatagcattactataacccaaatgttwtagagtttgggttgttgtaactgtcttctccctaccttatccagtcaatgagtatattgtg

SEQ ID NO: 391988 - DNA, 412 bp, Homo sapiens
ttagtaatattactttctggccctgcttctgttcatcttccttaaagtaagtggttccaaaaggcctgtcatccgaatctcttttctctttcttatatgccctcccttttgcaaagtcatcaactttcttgatttcaaccatcagtttgaagtttgatgcttcccatatatctgatctgttgccctactttctctccagtgtctctactccacatttcccactgtgtgctggactttgctatatcttgtcaaagtctcagacatccaaaactagatttaccatcatctctctgaaatctgtttccttttaccttggctcttgtttatagcattactataacccaaatgttatagagtttgggtkgttgtaactgtcttctccctaccttatccagtcaatgagtatattgtg

SEQ ID NO: 391989 - DNA, 579 bp, Homo sapiens
ttctccctgtttttttccccaaaacacgtttagaccacaaaatcagaagctgaaaaagctgtccctggaaatgcaatattaatgaagggacctgccatttgactcatagttgatacctgattgccttataaaaaaacaatggataaaaattctttgcaactgaaggtggacagccctgaaggaggagcaactggagggctatgcccttctgggtccatggagcaggattatcttgggccagcgcaaaattggcctgcacaaatagtacaggacsccatcaactgtttttgggtttaatttctgcctgttcttcccctccccatctccaaatgatgagtggggccaccagagtccagacaaaccttttgtactcggctatctgaacttggtcctcaggggctgtacttcagcagtctgactcttagcagtagggcattaagtcagggtggaatataaactcttctgcgagagtcaagagtcctgaattcttgtcctggttctgtcaaaaatcatctgataagcttggatacatttcttaacaactttgagtattattaaggatttgctcttgaaaaaact

SEQ ID NO: 391990 - DNA, 572 bp, Homo sapiens
ttctaattcaataaattatgttgagattaagttatacataatagatgttaatactaccattatgaatattgttattattttcaaacctcaaagtttatttttraaatacagattgatttttttccctaaaatgctaaagcttttacatacatacaaaagtatgacctggggtttggaaatttgctttgcagtctgggagcttgtagttaacttaaagaattttaaatgcaattagtactttcagacaatcgatgtcagactgtcatatcttattctttggggtatgaagcaaggtattttacaatgcccaaaaataactttcaaaatagtatttagcaaactgtctggagcctctttccccccaaattagagtatccaacacagatgatacacaagatataacttgaagattactgattttttaaatgcctccccagaatttacatattaaatcgattattttctccttcataatagttaccttttgacacttacacattcaccccaagtacaaattcactaattatcaaggcctaggcactattataattctgggcatataaatcttaaat

SEQ ID NO: 391991 - DNA, 572 bp, Homo sapiens
ttctaattcaataaattatgttgagattaagttatacataatagatgttaatactaccattatgaatattgttattattttcaaacctcaaagtttatttttaaaatacagattgatttttttccctaaaatgctaaagcttttacatacatacaaaagtatgacctggggtttggaaatttgctttkcagtctgggagcttgtagttaacttaaagaattttaaatgcaattagtactttcagacaatcgatgtcagactgtcatatcttattctttggggtatgaagcaaggtattttacaatgcccaaaaataactttcaaaatagtatttagcaaactgtctggagcctctttccccccaaattagagtatccaacacagatgatacacaagatataacttgaagattactgattttttaaatgcctccccagaatttacatattaaatcgattattttctccttcataatagttaccttttgacacttacacattcaccccaagtacaaattcactaattatcaaggcctaggcactattataattctgggcatataaatcttaaat

SEQ ID NO: 391992 - DNA, 572 bp, Homo sapiens
ttctaattcaataaattatgttgagattaagttatacataatagatgttaatactaccattatgaatattgttattattttcaaacctcaaagtttatttttaaaatacagattgatttttttccctaaaatgctaaagcttttacatacatacaaaagtatgacctggggtttggaaatttgctttgcagtctgggagsttgtagttaacttaaagaattttaaatgcaattagtactttcagacaatcgatgtcagactgtcatatcttattctttggggtatgaagcaaggtattttacaatgcccaaaaataactttcaaaatagtatttagcaaactgtctggagcctctttccccccaaattagagtatccaacacagatgatacacaagatataacttgaagattactgattttttaaatgcctccccagaatttacatattaaatcgattattttctccttcataatagttaccttttgacacttacacattcaccccaagtacaaattcactaattatcaaggcctaggcactattataattctgggcatataaatcttaaat

SEQ ID NO: 391993 - DNA, 572 bp, Homo sapiens
ttctaattcaataaattatgttgagattaagttatacataatagatgttaatactaccattatgaatattgttattattttcaaacctcaaagtttatttttaaaatacagattgatttttttccctaaaatgctaaagcttttacatacatacaaaagtatgacctggggtttggaaatttgctttgcagtctgggagcttgtagttaacttaaagaattttaaatgcaattagtactttcagacaatcgatgtcagaytgtcatatcttattctttggggtatgaagcaaggtattttacaatgcccaaaaataactttcaaaatagtatttagcaaactgtctggagcctctttccccccaaattagagtatccaacacagatgatacacaagatataacttgaagattactgattttttaaatgcctccccagaatttacatattaaatcgattattttctccttcataatagttaccttttgacacttacacattcaccccaagtacaaattcactaattatcaaggcctaggcactattataattctgggcatataaatcttaaat

SEQ ID NO: 391994 - DNA, 607 bp, Homo sapiens
ggattaccggtgtaagccaccacgccagtccaaagcagtctctttctattacattttctaagatgctagaatttaggagttacatttcatgcacatttaagttgtatccatattttattattataagcaatgctgtaatgaacatcktcacagtttagtttatgttattagcatgaattcctaggagtggaattaagggtcaaggtggaattaagggtctgagcattcattcagtcaacagatatttctcatcactgccactgctgccagtctggtccatcctcactcacctggatgtctatgggggcctcttaagtagacatacttcttcctcacctcctcctgtggtatattgaaaattagtcccaattcttcacctcttcctgcagccacacctctgccaatgggatggatagatttccgtctcccttaaccttggccttggctattgaatggcactggtcaacaggatggagcataagtgggcccccacctgggatttaagagcattttcactcgccctcttgtgcttctgccatggccactggaacatgccttggctcacccgctgctgctgggaggagaatcagatacagttggagcagag

SEQ ID NO: 391995 - DNA, 500 bp, Homo sapiens
cagatgcctgacctccattttagcagctagagctgctgcccaaggctcacaccagggaccttccgctggagggcccgctctctggaggatagagcactgccccactggcgcctgggaggtatgcctcctctgcccataaccratgacattctagccctctggcctagagaaagacagactgggtgctgtctatagcccagagctctctgaggcatccagctgagccttgacatcagctggccccagatccttgcttaactttttcccctgccccatcctgcttccctccctccctccggagtttctcctgagagcatccctgatcccaaatcacctgcacctgaaccctgtctcagcttctgcttctaaggagcctgataagacattttccagggccccactcctctgttcttgggtttagggttgtcctgaagtgctgtggtgtggaatgtccatgtggtgaatttagaccaggattgagtggatccctgagggcgtca

SEQ ID NO: 391996 - DNA, 653 bp, Homo sapiens
agaagtgtgttgagccactgtgcaagcactagaaaaacctctcctatatgtgccctgatgtaacccttccctatagaaagaccctataatactaacccacatattgcccttggggagcagcctattccttttcctttcttagtgccagctcccttgtgcacgagctaatataattttctctttgctgctatacctgctagtctcttttgatttctatcttgggagattacaagaacccagggcatgggtgacattaccatgtggatggtctcttgactggtgcagatggtacagaccacctctcctttcttcacttggctaccttctcctcatcttccaaggttttgttcttttaaattctcaccctaaagtacccagattccctctttttctggatcaggactatttttctaaaaatttcaagccttcagcctcctcttccatctttggaaactggcacagcctttggctagtctcatcatagctccttaccctcttgctctttctagaccatttgggtaagggagaggctttagtgagggtaaaggagggcaggaaggttttctttttyggaattctacccttttatctttaaaatttgtactctttcactgtttggcttggtctgctgctgctactactcaacaggattc

SEQ ID NO: 391997 - DNA, 262 bp, Homo sapiens
tcactttctccagcatgagttctgtggtccttgcctgcccatcactcccctgccataaattacaactcttgcctatagagagaatactctgagaacacaggcgtsccaccttcctcccttcaggaccccctcctcgcagacaatgctccgccccttccccaaatcatggaccagagttttctgcctcaacttgcatatcccttccatctggccagtgcgatggggtaaaataagcatttattttacatatcgtttatttgga

SEQ ID NO: 391998 - DNA, 617 bp, Homo sapiens
tgtgctctgagctgtggtgggstgggaaaggcaggaagtaagagagtgcctttgtcctcaagggtgatagtagagataataaggatggtaatgacaatagctcccatgcattgaaagctctgtgctaggttctgtagggtttttgctttcttattgaatgatcacagtagccctttgtaataagcattgtgacattcccatgtagcagataagtctctaggaggttgagaaatgtgcccaaagttgggttcagttgtgttagtctgtattctgttggtgtataccagaatacttgaaactgggtaattcatacattttctacagttctagaggctgagaagttcaaggtggaggagccacatctggtgagatcctttctgctcaggggaaggggaactctctaaagagtgcagtgcagggcatcacatggtgggcggggggtgccgagcatgctaacatgcttgctccggtctctcatcctcttctaatgaagccaccagttccactcccatgataacccattaatccattcatccatgtgtagtttaatccatttatgagggcagatccctcatgatccaatcacctctcaaaggccctaactttcaatactgcca

SEQ ID NO: 391999 - DNA, 617 bp, Homo sapiens
tgtgctctgagctgtggtgggctgggaaaggcaggaagtaagagagtgcctttgtcctcaagggtgatagtagagataataaggatggtaatgacaatagctcccatgcattgaaagctctgtgctaggttctgtagggtttttgctttcttattgaatgatcacagtagccctttgtaataagcattgtgacattcccatgtagcagataagtctctaggaggttgagaaatgtgcccaaagttgggttcagttgtgttagtctgtattctgttggtgtataccagaatacttgaaactgggtaattcatacattttctacagttctagaggctgagaagttcaaggtggaggagccacatstggtgagatcctttctgctcaggggaaggggaactctctaaagagtgcagtgcagggcatcacatggtgggcggggggtgccgagcatgctaacatgcttgctccggtctctcatcctcttctaatgaagccaccagttccactcccatgataacccattaatccattcatccatgtgtagtttaatccatttatgagggcagatccctcatgatccaatcacctctcaaaggccctaactttcaatactgcca

SEQ ID NO: 392000 - DNA, 512 bp, Homo sapiens
ctgtgctagattctgtagaggcaaaagtgtttaagatacagttcctagaagtgtttattattgctcagtaacagaatataagaaaagtcatgggaagcccaaggattgaacctctatatctgtctccttaaaaactgggggagggtgatcaagaggatatcacaaaaaaaaaaaaaaaaatctgccrtttgagctgatgttttaaggatggggaaagtcttccaggttgaccaagatggaggtggcagtgaatagtgggtgggctttgaagacaaaggcacagagggtctgagcataggaaggtttcctgggggccaaggccaggcagagggaaataggaacagaaggcagtgaagatggtggagttgggaggagcccacatgctcccagagtgttcaggaaagtcagtttaggctgagtgcagggcttcggggaaggatgcagagaaagccaaggctgaaaagggagaagagggacatagagaggggtctgaaattccacactaagtaact

SEQ ID NO: 392001 - DNA, 548 bp, Homo sapiens
attgctatttatatttcttcttttccttcactcattgtaataattaagaatcatacacaaaatcacggacttagttttcaaaagcctctgtcttcattcaagcctctacctgaacctcccaaattaatgtaaaatctgtatagaattaattgactaataactacattggatgtgataataagtgggaagaaagtagaagcaccgtagagaaggcaaacccaaatgaagtgttaaaggtcacaagtgacacagaagatgtatctcctggtacagaaaataaataagtgaagcttcatctgagtttaatgatttcaaaccatatttccaagaagtaccatctctggttcagtcagctaattatacagactcctgggaaagcgaaactgagaaagcagtagtaaacaagcggtaatcctgacttacggcagcccgggtatccagactgaataaaaggttscagttcaatgaaaactgcagcatttcatccttcccaagatgtacagctattaaaattgccagggagtgaactgaaagacttcccttctagc

SEQ ID NO: 392002 - DNA, 517 bp, Homo sapiens
gcctatatcgtgcatggtactgattctatatatagcaagggattaagtgaatttcaaaacttcagctcaccagaagaaacccagagattttatctacccatgtgtttaaactgcacagtcattaaaaaaaaaatggtactgtagctccaagcctggacgtgatccctgatcatctttgacattttcaaaaacagaaaattatttggctttattttaaatgtcacccctctgcaggtgaggaatgtattcatttaagagagtgcaggagggaacaaactgtgctgatgcttactgtctacagaacgtttaatagaytcgaccacattcttgtgaaatagaatttgggtatttgctgaatcatatagaggcaatgatcaaaaggaaagctcttacttactcttcagaagcagtggggtgtagagggaagtttcctggtttaagaggtagaatgtaggatttgagtcccaacttcatcagtcactagctctgagtctttggacaagtaaactactaccat

SEQ ID NO: 392003 - DNA, 545 bp, Homo sapiens
atgtgtagttatatcttagtttcaataatctcaacagtagaatgtaaatacagtcagccctccatattcatgggttccacatcygtagattcaatcaatgacagataaaacatatttgaaataaaaaaggattgtgtttgtcctgaacatacacagactttttccttgttattattcctcaaacaataccatataaaaatcacttatatagtattcacattgtattagatattataagtaatctagagataatttaaagtacccagagtatgtgtgtaagttatatacaaatgttatactattttatagaaacgacttgagtatcgtggattttggtatttgtgggggctcctggaaccaatccccttatgggtacacagaaaggactgtcatagtcaaagctggctacataatctgcagagctggtggaaaatgcaaatacagggacccgggaataaaggaagaactggtcagtctcctcttcccaaaggctttccactcaacccattatgagtgggtgaagtattgcatcctaaaagaattaa

SEQ ID NO: 392004 - DNA, 545 bp, Homo sapiens
atgtgtagttatatcttagtttcaataatctcaacagtagaatgtaaatacagtcagccctccatattcatgggttccacatccgtagattcaatcaatgacagataaaacatatttgaaataaaaaaggattgygtttgtcctgaacatacacagactttttccttgttattattcctcaaacaataccatataaaaatcacttatatagtattcacattgtattagatattataagtaatctagagataatttaaagtacccagagtatgtgtgtaagttatatacaaatgttatactattttatagaaacgacttgagtatcgtggattttggtatttgtgggggctcctggaaccaatccccttatgggtacacagaaaggactgtcatagtcaaagctggctacataatctgcagagctggtggaaaatgcaaatacagggacccgggaataaaggaagaactggtcagtctcctcttcccaaaggctttccactcaacccattatgagtgggtgaagtattgcatcctaaaagaattaa

SEQ ID NO: 392005 - DNA, 545 bp, Homo sapiens
atgtgtagttatatcttagtttcaataatctcaacagtagaatgtaaatacagtcagccctccatattcatgggttccacatccgtagattcaatcaatgacagataaaacatatttgaaataaaaaaggattgtgtttgtcctgaacatayacagactttttccttgttattattcctcaaacaataccatataaaaatcacttatatagtattcacattgtattagatattataagtaatctagagataatttaaagtacccagagtatgtgtgtaagttatatacaaatgttatactattttatagaaacgacttgagtatcgtggattttggtatttgtgggggctcctggaaccaatccccttatgggtacacagaaaggactgtcatagtcaaagctggctacataatctgcagagctggtggaaaatgcaaatacagggacccgggaataaaggaagaactggtcagtctcctcttcccaaaggctttccactcaacccattatgagtgggtgaagtattgcatcctaaaagaattaa

SEQ ID NO: 392006 - DNA, 545 bp, Homo sapiens
atgtgtagttatatcttagtttcaataatctcaacagtagaatgtaaatacagtcagccctccatattcatgggttccacatccgtagattcaatcaatgacagataaaacatatttgaaataaaaaaggattgtgtttgtcctgaacatacacagactttttccttgttattattcctcaaacaataccatataaaaatcacttatatagtattcacattgtattagatattataagtaatctagagataatttaaagtacccagagtatgtgtgtaagttatatacaaatgttatactattttatagaaaygacttgagtatcgtggattttggtatttgtgggggctcctggaaccaatccccttatgggtacacagaaaggactgtcatagtcaaagctggctacataatctgcagagctggtggaaaatgcaaatacagggacccgggaataaaggaagaactggtcagtctcctcttcccaaaggctttccactcaacccattatgagtgggtgaagtattgcatcctaaaagaattaa

SEQ ID NO: 392007 - DNA, 589 bp, Homo sapiens
ggaaaaaacctacacatggggtaaaatggcaggaaaaaaagtcaaaatgtgagttaagcctttataaattcagaaagatccacaaaaatacagcttctgctggtgagaggatcagctgtgtcccttcgacaagaactgtgttcctttgttgaattaaccaacaagagacctgggkaacctggaacaggaagaagtccttctaagcccagattggttgagagaaattgaggaggcatatcttcacaaagaaacaaatagtggagctctgtttgaagaaaacaggtggtactggttgcagcagaggagagagtgtttgagagaaaaatcctggaagactacaatacacttgcttctcaattactccttcccagacctttgcaggaaacacaaaaggaatatttaacatattcaaccgaatattataagatgatctgacacagccttgataaaagaaactattagatggtaaaaagaaatttgaagaaaaaaaaaggaaactataagaaaggaaggtgaaaacagagaaacataacttactgtcagaaaaagaagatgtaccagaagtatactgtcatgtaatatatgaaaa

SEQ ID NO: 392008 - DNA, 589 bp, Homo sapiens
ggaaaaaacctacacatggggtaaaatggcaggaaaaaaagtcaaaatgtgagttaagcctttataaattcagaaagatccacaaaaatacagcttctgctggtgagaggatcagctgtgtcccttcgacaagaactgtgttcctttgttgaattaaccaacaagagacctggggaacctggaacaggaagaagtccttctaagcccagattggttgagagaaattgaggaggcatatcttcacaaagaaacaaatagtggagctctgtttgaagaaaacaggtggtactggttgcagcagaggagagagtgtttgagagaaaaatcctggaagactacaatacacttgcttctcaattacyccttcccagacctttgcaggaaacacaaaaggaatatttaacatattcaaccgaatattataagatgatctgacacagccttgataaaagaaactattagatggtaaaaagaaatttgaagaaaaaaaaaggaaactataagaaaggaaggtgaaaacagagaaacataacttactgtcagaaaaagaagatgtaccagaagtatactgtcatgtaatatatgaaaa

SEQ ID NO: 392009 - DNA, 589 bp, Homo sapiens
ggaaaaaacctacacatggggtaaaatggcaggaaaaaaagtcaaaatgtgagttaagcctttataaattcagaaagatccacaaaaatacagcttctgctggtgagaggatcagctgtgtcccttcgacaagaactgtgttcctttgttgaattaaccaacaagagacctggggaacctggaacaggaagaagtccttctaagcccagattggttgagagaaattgaggaggcatatcttcacaaagaaacaaatagtggagctctgtttgaagaaaacaggtggtactggttgcagcagaggagagagtgtttgagagaaaaatcctggaagactacaatacacttgcttctcaattactccttcccagacctttgcaggaaacacaaaaggaatatttaacayattcaaccgaatattataagatgatctgacacagccttgataaaagaaactattagatggtaaaaagaaatttgaagaaaaaaaaaggaaactataagaaaggaaggtgaaaacagagaaacataacttactgtcagaaaaagaagatgtaccagaagtatactgtcatgtaatatatgaaaa

SEQ ID NO: 392010 - DNA, 589 bp, Homo sapiens
ggaaaaaacctacacatggggtaaaatggcaggaaaaaaagtcaaaatgtgagttaagcctttataaattcagaaagatccacaaaaatacagcttctgctggtgagaggatcagctgtgtcccttcgacaagaactgtgttcctttgttgaattaaccaacaagagacctggggaacctggaacaggaagaagtccttctaagcccagattggttgagagaaattgaggaggcatatcttcacaaagaaacaaatagtggagctctgtttgaagaaaacaggtggtactggttgcagcagaggagagagtgtttgagagaaaaatcctggaagactacaatacacttgcttctcaattactccttcccagacctttgcaggaaacacaaaaggaatatttaacatattcaaccgaatattataagatgatctgacacagccttgataaaagaaactattagatggtaaaaagaaatytgaagaaaaaaaaaggaaactataagaaaggaaggtgaaaacagagaaacataacttactgtcagaaaaagaagatgtaccagaagtatactgtcatgtaatatatgaaaa

SEQ ID NO: 392011 - DNA, 564 bp, Homo sapiens
attttttctgatataagaagacttaaatttacattttgaaagagaatatcatgtggcagggagaagtaactcagatcagtcaacatagagctttttccaaaaaagttactagactttaaacaaattatcatttttgggcagtcaggaaaaagttcaagtcataataaaatgaaaaaacctgttagcytcagattactccacggcaacattcaatggcagaagatgatgaaaaaatctattatttaaggaaataagctacaacctaaggaatttctatcaagccaacctgaattccaagtataaaagagacagattaacagctgatcccaggagcctttctgagagaaaacaaaaaaagcaactggaagacaaactttagccaataaatagataactagggcaatgtaaaatgagtggcaataaaagaagctacttgattgtaaaacaaagacatttttgaaaatattaggagtagatggcaagatagaatataaataacataaatgctgatgatctagaaaaaaatacaattaatataaatgagaggaggaaggtggaaatgaa

SEQ ID NO: 392012 - DNA, 564 bp, Homo sapiens
attttttctgatataagaagacttaaatttacattttgaaagagaatatcatgtggcagggagaagtaactcagatcagtcaacatagagctttttccaaaaaagttactagactttaaacaaattatcatttttgggcagtcaggaaaaagttcaagtcataataaaatgaaaaaacctgttagcctcagattactccacggcaacattcaatggcagaagatgatgaaaaaatctattatttaaggaaataagctacaacctaaggaatttctatcaagccaacctgaattccaagtataaaagagacagattaacagctgatcccaggagcctttctgagagaaaacaaaaaaagcaactggaagacaaactttagccaataaatagataactagggcaatgtaaaatgagtggcaataaaagaagctayttgattgtaaaacaaagacatttttgaaaatattaggagtagatggcaagatagaatataaataacataaatgctgatgatctagaaaaaaatacaattaatataaatgagaggaggaaggtggaaatgaa

SEQ ID NO: 392013 - DNA, 572 bp, Homo sapiens
tgtaaaatgagtggcaataaaagaagctacttgattgtaaaacaaagacatttttgaaaatattaggagtagatggcaagatagaatataaataacataaatgctgatgatctagaaaaaaatacaattaatataaatgagaggaggaaggtggaaatgaagctagaagttagaataaagctggaagatggccagtagtaactgggaccaaaagataatatctaagggtcaagtaaagtaatagaataggcatattttacactacaaagataaatattaagraagtaaattgtgttgactgaaattgggtgagaggagaaaccacacaaactttagcagatactttgtggggacttagagaactattaaaatttaagaactattaagaattggatcaaatcacactaaaatagaagagtttcatttacttcttgaaatccaaaagagatcaatattgaaaatctaaataacataatcaaaaaggcatctgattgatatatcttaaattatgtgccttgatgataaagaataaatacttagttatccttagtttttcaggtcagattcaagaa

SEQ ID NO: 392014 - DNA, 572 bp, Homo sapiens
tgtaaaatgagtggcaataaaagaagctacttgattgtaaaacaaagacatttttgaaaatattaggagtagatggcaagatagaatataaataacataaatgctgatgatctagaaaaaaatacaattaatataaatgagaggaggaaggtggaaatgaagctagaagttagaataaagctggaagatggccagtagtaactgggaccaaaagataatatctaagggtcaagtaaagtaatagaataggcatattttacactacaaagataaatattaaggaagtaaattgtgttgactgaaattgggtgagaggagaaaccacacaaactttagcagatactttgtggggacttagagaactattaaaatttaagaactattaagaattggatcaaatcacactaaaatagaagagtttcayttacttcttgaaatccaaaagagatcaatattgaaaatctaaataacataatcaaaaaggcatctgattgatatatcttaaattatgtgccttgatgataaagaataaatacttagttatccttagtttttcaggtcagattcaagaa

SEQ ID NO: 392015 - DNA, 562 bp, Homo sapiens
gatatatcttaaattatgtgccttgatgataaagaataaatacttagttatccttagtttttcaggtcagattcaagaaaactcatgagacaaacaaaaaatgtcaacaaattctccaaamtgaaaacaatactgaagatattttctaatatcagtataataatactggaaaataacaagaaacaaaataattcttctttaaagcatcagctgatatggtttggtaaccaaacctcatctcgagttgtaatccccataatacttcatgggagggacacagtgggaggtaattgaatcatgggggtggtttccttcatgctgttctcatgatagtgagttctcaagagatctgatggttttatgtgtgtggcatttcccccgctggcactcattctctctcctgctgccctgtgaagaggtgccttcttccatgactgtaagtttcctgaggcctccccagacatgacgaactgtgagtcagttaaacctcttatctttataaattacccagtctcaggtatttcttcatagctgcatgagaatggactaatacaccagtgat

SEQ ID NO: 392016 - DNA, 562 bp, Homo sapiens
gatatatcttaaattatgtgccttgatgataaagaataaatacttagttatccttagtttttcaggtcagattcaagaaaactcatgagacaaacaaaaaatgtcaacaaattctccaaactgaaaacaatactgaagatattttctaatatcagtataataatactggaaaataacaagaaacaaaataattcttctttaaagcatcagctgatatggtttggtaaccaaacctcatctygagttgtaatccccataatacttcatgggagggacacagtgggaggtaattgaatcatgggggtggtttccttcatgctgttctcatgatagtgagttctcaagagatctgatggttttatgtgtgtggcatttcccccgctggcactcattctctctcctgctgccctgtgaagaggtgccttcttccatgactgtaagtttcctgaggcctccccagacatgacgaactgtgagtcagttaaacctcttatctttataaattacccagtctcaggtatttcttcatagctgcatgagaatggactaatacaccagtgat

SEQ ID NO: 392017 - DNA, 562 bp, Homo sapiens
gatatatcttaaattatgtgccttgatgataaagaataaatacttagttatccttagtttttcaggtcagattcaagaaaactcatgagacaaacaaaaaatgtcaacaaattctccaaactgaaaacaatactgaagatattttctaatatcagtataataatactggaaaataacaagaaacaaaataattcttctttaaagcatcagctgatatggtttggtaaccaaacctcatctcgagttgtaatccccataatacttcatgggagggacacagtgggaggtaattgaatcatgggggtggtttccttcatgctgttctcatgatagtgagttctcaagagatctgatggttttatgtgtgtggcatttcccccgctggcactcattctctctcctgctgccctgtgaagaggtgccttcttccatgactgtaagtttcctgaggcctccccagacatgasgaactgtgagtcagttaaacctcttatctttataaattacccagtctcaggtatttcttcatagctgcatgagaatggactaatacaccagtgat

SEQ ID NO: 392018 - DNA, 546 bp, Homo sapiens
acactgctgaatgtctcaaaagaagaagtgaacaaattaaaagacgtcccttcttattgaatagaaaaaaatcaacactagaaggatgtaaatttccatcaagtttttaataatgtaaggcaatattaaaaaaataactaacatgcctttgtttttgaatttttgtgatgatggtttcttattttgttgtttgtatatttttgtttgtgcaatgaaactagaaaactaattttgaagttcataaataaaactaaaccagcaaggctaggcagaaaaatctcttaaaaagaaaagcaataaagtaaagagcctctttgctgacagatattaaaacatattacagatgctcctcaacttacaatagggttatgtcctgataaatccatcaaaagtcaaaatatcattagtataaaatgtgtttaatacctcaataagcccactggaaaataaaagaaatcatacgttgaamcatatttaagtcaggaaacatctgcatatagcttctatatttaaagcatcttgatattggtgcatgaagagacagac

SEQ ID NO: 392019 - DNA, 546 bp, Homo sapiens
acactgctgaatgtctcaaaagaagaagtgaacaaattaaaagacgtcccttcttattgaatagaaaaaaatcaacactagaaggatgtaaatttccatcaagtttttaataatgtaaggcaatattaaaaaaataactaacatgcctttgtttttgaatttttgtgatgatggtttcttattttgttgtttgtatatttttgtttgtgcaatgaaactagaaaactaattttgaagttcataaataaaactaaaccagcaaggctaggcagaaaaatctcttaaaaagaaaagcaataaagtaaagagcctctttgctgacagatattaaaacatattacagatgctcctcaacttacaatagggttatgtcctgataaatccatcaaaagtcaaaatatcattagtataaaatgtgtttaatacctcaataagcccactggaaaataaaagaaatcatacgttgaaacatatttaagtcagsaaacatctgcatatagcttctatatttaaagcatcttgatattggtgcatgaagagacagac

SEQ ID NO: 392020 - DNA, 502 bp, Homo sapiens
acctcagtatttatcacaggccaggtcaattgcaagaatacctttttactgcttttttcctcaccctctttcaaattctttagggaattcttaaaccttggagaatgtttccaatttaattcagtctaatgtttagaaaaaaaaataagaaaaccagaattatgataacttaatttttggtttctcctgtaatgccagagctgcaggagtataagggaacactgcctacttcagtgytgaatggacaagtaaatcacctgtaggtctgggaggagggcctgggttctgcatttctattaatcgcctaagtgatacccttgtcactgctctagggaagacaataaggggcaaaatcagctgaaccctcttattttatagacaaattacttgagagatgtggggacatctacatctacctgtatggcaaagtacatgaccataaacctttacacacacacacacacacacacacacacacacacacacacacacccctacctac

SEQ ID NO: 392021 - DNA, 349 bp, Homo sapiens
agaaaaccaggagaaggcagtgtcctggcagccataggaataggagagaaggcagagaatctgaacatagttgttggtaggagggttkttgtgaaagttccctcatgattacctaacttattgatgaaaaggaaaattattaactaagagcgatggtggagaaagataaggtggaaaatggctactgacgcattgatttaaaaagacaaagtgaaacgaacatggaaacacttcaatatgtgtgtgtgtttatgatataatttatgttaaaaacataatatcctatatattcgttatatgtgatattttatatataatatatatatcatagaaaagaatataacaaata

SEQ ID NO: 392022 - DNA, 349 bp, Homo sapiens
agaaaaccaggagaaggcagtgtcctggcagccataggaataggagagaaggcagagaatctgaacatagttgttggtaggagggtttttgtgaaagttccctcatgattacctaacttattgatgaaaaggaaaattattaactaagagcgatggtggagaaagataaggtggaaaatggctactgacgcattgatttaaaaagacaaagtgaaacgaacatggaaacacttcaatatgtgtgtgtgtttatgatataatttatgttaaaaacataatatcctatatattygttatatgtgatattttatatataatatatatatcatagaaaagaatataacaaata

SEQ ID NO: 392023 - DNA, 558 bp, Homo sapiens
gctggccaagttcacctagaagccttctgtttcactataattaatttctcaagcctaagagttgctatatacagggcttttttgcctatcctagagaagtactaggacaagtttctagagatctcagaattgagggtctctgaatatggccagattacaatctakaattgcaggtttagggctaattcttgatagcattaacctcacccagagttgatctgtgaatccttgtgccaacctttagatcttcacagtcatgtataaactcaataggaatactggctaatgactgctggcctttcttctaagctgaggccatgtgacagcccctacttactccagaaaagctaaagaaatctttgagatctctatcttggattccagtgcttccagtggcagttagggctatggtcttcctgggattttttttcccatgagaagataaggtaaaagatttctgggggcaatcagggcacaaccaatcagctctagggggcagcctggacaccgtcactgacctggaagtagctcaggtgctgattctgccttcagggtgca

SEQ ID NO: 392024 - DNA, 558 bp, Homo sapiens
gctggccaagttcacctagaagccttctgtttcactataattaatttctcaagcctaagagttgctatatacagggcttttttgcctatcctagagaagtactaggacaagtttctagagatctcagaattgagggtctctgaatatggccagattacaatctataattgcaggtttagggctaattcttgatagcattaacctcacccagagttgatctgtgaatccttgtgccaacctttagatcttcacagtcatgtataaactcaataggaatactggctaatgactgctggcctttcttctaagctgaggccatgtgacagcccctacttactccagaaaagctaaagaaatctttgrgatctctatcttggattccagtgcttccagtggcagttagggctatggtcttcctgggattttttttcccatgagaagataaggtaaaagatttctgggggcaatcagggcacaaccaatcagctctagggggcagcctggacaccgtcactgacctggaagtagctcaggtgctgattctgccttcagggtgca

SEQ ID NO: 392025 - DNA, 569 bp, Homo sapiens
tgagggtgggtcttcctctcccagtccaccaacacaaatgtcagtctcctctggcaaygccttcacagacacacccggaaacactttaccagccagttacgtatccttcaagttgacacctaatgttaatcagcacagatgcatacacgtttaggattgtcatgtcttggtggagggatcattttaccatggacaggtactggtccttggcctgtcaggaatcaggctgcacagcaggaggtgagcagctggccagtgagcattaccgcctgaactccgcctcctgtcggatcagcagcagcattagagtctcataggagcgaacaccttactgtgaactgtgcacgtgaaacatctaggctgctggctccttaggagaatctaatgcctgctgatctgaggtggaacggtttcatcccaaaaccatctcctccctgcccgcctacccttgtccatggaaaaattgttttctacaaaaccagtacctggtgccaaaaaagttgaggaccactggttttgaaaactttgtagttttcttagtctgatatacatgagagaacaagaaaacc

SEQ ID NO: 392026 - DNA, 534 bp, Homo sapiens
ttcaatgcagcacactactcacaatagcaaagacatggaatcaacctatatgcccatcaatgggaaacaggataaagaaaatgtagtacgtatacaccatggaatactatgcagccgtgaaaaatgagatcatgtcctttgcaggaaaatggatagagctggaggccattatccttagcaaactaattctggaacagaaaaacacagactgcacgttcccactcataagtggaagctacacattgagyacacatggacacacagaaggggacaacagacactggggcccacttgggtgtggagggtgggagagggcgaggatcaaaaaactacctattaggtactatgcttattacctgagtgacaaagtaatttgtacactgaacccgtgtgacatgcaatttacctatatagcacacctgcacatgtacccctgaacctaaaataaaagttcaaaaaaataaaataatattttaatgagccctctacatattgtttctttttaaaagaatagtatttaaagagaattataat

SEQ ID NO: 392027 - DNA, 525 bp, Homo sapiens
gggatgatcaatgcaggaacagaaaaccaaataacacatgttctcactgctaagtgagagctaaatgatgagaacacatggrcccatagaagggaacaatacacactggggcctatcagagggtggaaggcaagaggaaggagagaataagggaaaataacttattggcactaggcttaatatctcagtgatgaaataatctgtacacctaacctccacaacacaagtttgcctgtgtatcaaacctgcccctgtacccttgatcttaaaataagagttaaaaaaataaatttgagatgatctctgaaagttcttcttcactccaaggatgaatagcaaaaagatcctgaagaatctttgctacttggaaatcttaattagaatattttaaatatatttttaaagacatttttgacatttgatcacttctctaactctagtaggtagggtatggtgcaaacagtaggagagggatctactctaagacttgaagagcctaaacaaggatcagagtggaaggctgga

SEQ ID NO: 392028 - DNA, 595 bp, Homo sapiens
acacattttggaatatgttgacctagatccaagtggtcattgccattctaaaaaggttttcctcctaaaagcatctatccatatctttcttttctaatttagctatttctctatcatcagaacacctagggttaattttcattttctgcttttgtaatttattggtatgctgctgstggttgtaaagtaacttgggaaatagcaattcaatagtatgtaaagccactttctgaaaatcacaatgttcccttaaatacatgtaaagcaactgtctagtcccaaaataaaatacttatgtctaataaaatacttacgtctaacagtggtttgaacgcaaaagtcaaatatttttcaagtcaaaacatttaatttgactcttatctaactttacttccaaacaatgatttataaaatgtggaggagagtgggtgtctatgtcaagcagccttatgataaggctccgtcatatattgtgcttattcaacaatactggtgttaatgaggcctggcctccaaaggacaaagatacagaaacagaaaggttttcccaggccagaagtattagtttacatcacaacattaaagcataatacac

SEQ ID NO: 392029 - DNA, 609 bp, Homo sapiens
tattccacatattactcatttattatagaagttttacatgcacacacacacacacacacaccactttgataacaaaatgaatacagaaagttgtcaaagtcataaagcttgaaattcacatcttgtctgaacttaaagctcatgtttgtaaaatattagtcaatttgaaaatcatttcttggttttgttggattttacaagggataaatacatgtataaagatctaaaaactgtcgtgtctttattcaactggaccaaaaaagaatttttacattttcttaacttaaattagtttattttatattgaaacattaatatccttactkccagttaatcagcaatcacttagaattctcagaatcgttctgtttaaccaaaatatatttttgtcattcacattacagaaaaaaaatatgtcatgcacatctgtgctttcattctctagcttacatagttggtggatcagagacctcaacgcaggcattctgactctagagtcaattctcaatgactgctttatactgcctgtttatagtattggcctaagtctagtgacattcattttagctctcaactcttttcataataatagttatcatttattgaagt

SEQ ID NO: 392030 - DNA, 627 bp, Homo sapiens
aaaaaactactaaatatacttgttcattatgctaaagcatactgatgctgtaaattttttttctaccttttgcaaagaagaatggataaaatcttaattcagctatgcaataagtagatgaaatgaaaaaaatagttactgattggataacagctttgatgaaaataaatatcttacaaacaaattctttccccatcatctaaattattttttcaatcaagtaaaaacagttgtagacatagagaatatttgtggcatgctactgtaaggacagtaggaagaagaataaacaactcagcataacttatctcaaggaataatataagtcattcaaaaatgcttaagtcacaaaggctcatatcagctmagaatttgaagcatgaaaagatgagtgtcttttaagctcttcttcttaataaaatgaaataattcgggataaatgatcgacaaaggttatcatgaagaaaatatttttgaaatttcagaattgagtctaggcagagcttaatatttatactgtgttgctaatgtgttagtttttactgtattttattatatctatacaaaattccccagtcactacattaataatattttacttaactcaatttttcatttgttatataa

SEQ ID NO: 392031 - DNA, 572 bp, Homo sapiens
cacttttgaaaccagttattgttaaggaaataggataacacaaatagggatttaccctagagctagcgagaggatggatcttccctcagtctcgtggaggagacacagaaagaccagatcaaacctgaggccctgccagtgagaacaaagagaattcctggcagacagacaaccagaagtgtctacttctctacttttttggcaatattcattttcctattgccatgcttgcttcctacgtgttgttgtcataggtacactatagggttaggagagaatcagaagtattataattttcatggtttctaagatcctcctctctcctatagattaaaataggaattcatgccaatttgctaaattgtctaataaaaagagcagtaaggcayggcaaaaaatgtcctttgcttcaaataaaacaacaaaatcttctctctcataatttaagctgtgatactgacacttctgcccttgggaaagccaccaagtttaaaaaccaatatgcagagaatggatatatcctgaatctaataaagttcaagctttaaaaaccttcgctgagacaggcttcg

SEQ ID NO: 392032 - DNA, 407 bp, Homo sapiens
gtttgaatcccagttctgccactttttagcaaagtgatctggagcaggttacactacctccctccatcttatgattattattatccacatttggtatgaaatgtggataataataatagtagctacctcamatggtactcataaagattaaataaagtaatttaggtacagtgagataaggcttgccttccagcagatattcaatatgtgttggccattattattatttctctaatcattagagaaaagaataacaaataataagaaatatctgcctacagttaaagagacatttcctttagtcacctctggctaaaaaaaaaattaaataaaaaagactaatgaaagcctgaaattcaataccagaaccgcatgcagtactgttggttcatatccacatgcacaca

SEQ ID NO: 392033 - DNA, 522 bp, Homo sapiens
tcaggtacccatcacaggtgtaacagaggagcagcaccctttatagctgtaccttagctagccatcttccagcctgcttctgagacatgattacccaaatgcaagaccragtatgtcccaagaggatatttaattaatcaaaaataatgagagaacattctttagccacttttcaataagcagagggtttttttcttgtatgtgtcggggatgggtgtggtactgatgacaacagtaattaagtaatttttggtataatgaaatgcttgattctacaccaaaatggaacagttttcagttttttctaaagaccactattatgacaaattataaccatagcttagaaatatggtaataaaataaccctgaaaatcagatatttattttcaaatcatggaatatctgggatgatattacaaaataaaacaaaaggtgacctgtttgtatatataatgactgttctttatgatatgaggaaacagggaacagcaatgtaatatgctatcaggtattagatatttt

SEQ ID NO: 392034 - DNA, 562 bp, Homo sapiens
tctcccagtgtcctgtagaagtacacttcacctattactgatgaggggcacccatgcccaaacaactgctatagtccttgctatccttttttgggggacctttgatcttcttgcccagaagacctagagttaggactgctatcttgagcaccctaacttcctattgtatttatctccactcatccaaagtgatgttgttgtccctcactccaccaatccacaggaacacagagayagcaaggaggtactagggatagaggaagagagaatttcttgaagtggaattacctcagagccatccatttctaattaactcagacactaaattctgggcaacacaaggaggcaattaagcataagtgtatgccatttgctttgtaggtgaatataaattgcataggctagaggtttaagacattgtgctcaagccaaaactagggcatactgtgcttctcccaacaaatcacatacataagtacagaggagccacaggattaagtctggaatttatattttcaaaggaagctttgagaaaaacactgcttcaaacattccagccact

SEQ ID NO: 392035 - DNA, 624 bp, Homo sapiens
cacagttctttaaaaccttgctattcaagctatgttccttggatagcaaaacaggcatcacctgatcraaaagcaaaatctgagcagcaactcggaggctcaggtaggagagcagcgcttgagtccaggagtttgagaccagcctgagcaacatagcaagaccctgactctacaaaaaaattaaaaaattagtcagatgtagtggcacatgcctgtaatcccagctacatgaaaggatgaagcaggaggattgcttgagcccaggatttctaggctgcagtgtgttatgattgtgccaatgcactccagcctgaatgacagagcaagactctgtctttaaaaagaaaaaaagaaagaaaaaaatgtagactctcaagagccaccccagaactactaaactagaacctgcattttaaaaagatcttcaaaaaaaatgtatgcctgttcaaatttgagaagcactggtctaagtattctcactgtcctacctaacaggtggtacacatgcttttagagaaataaatgtgtatgtatacatttttttaacttttcgttttgaaataacttcagacttatgaaaaagttgcaagataataacaagtttggccccaaatatgtacatct

SEQ ID NO: 392036 - DNA, 624 bp, Homo sapiens
cacagttctttaaaaccttgctattcaagctatgttccttggatagcaaaacaggcatcacctgatcaaaaagcaaaatctgagcagcaactcggaggctmaggtaggagagcagcgcttgagtccaggagtttgagaccagcctgagcaacatagcaagaccctgactctacaaaaaaattaaaaaattagtcagatgtagtggcacatgcctgtaatcccagctacatgaaaggatgaagcaggaggattgcttgagcccaggatttctaggctgcagtgtgttatgattgtgccaatgcactccagcctgaatgacagagcaagactctgtctttaaaaagaaaaaaagaaagaaaaaaatgtagactctcaagagccaccccagaactactaaactagaacctgcattttaaaaagatcttcaaaaaaaatgtatgcctgttcaaatttgagaagcactggtctaagtattctcactgtcctacctaacaggtggtacacatgcttttagagaaataaatgtgtatgtatacatttttttaacttttcgttttgaaataacttcagacttatgaaaaagttgcaagataataacaagtttggccccaaatatgtacatct

SEQ ID NO: 392037 - DNA, 624 bp, Homo sapiens
cacagttctttaaaaccttgctattcaagctatgttccttggatagcaaaacaggcatcacctgatcaaaaagcaaaatctgagcagcaactcggaggctcaggtaggagagcagcgcttgagtccaggagtttgagaccagcctgagcaacatagcaagaccctgactctacaaaaaaattaaaaaattagtcagatgtagtggcacatgcctgtaatcccagctacatgaaaggatgaagcaggaggattgcttgagcccaggatttctaggctgcagtgygttatgattgtgccaatgcactccagcctgaatgacagagcaagactctgtctttaaaaagaaaaaaagaaagaaaaaaatgtagactctcaagagccaccccagaactactaaactagaacctgcattttaaaaagatcttcaaaaaaaatgtatgcctgttcaaatttgagaagcactggtctaagtattctcactgtcctacctaacaggtggtacacatgcttttagagaaataaatgtgtatgtatacatttttttaacttttcgttttgaaataacttcagacttatgaaaaagttgcaagataataacaagtttggccccaaatatgtacatct

SEQ ID NO: 392038 - DNA, 633 bp, Homo sapiens
cagaaagtactctggagctttggtaatgaccattgtcatttttggtttgttaataccacagctttttgaaaagatcaaaaattattatacattcagttttttattactaatcaagttttactcatttttattcagcatcaatttttaataatattttatttctattaattgtatcttcaaataatttatagcagaataatgtatgtttaatgactttttataaattaatattttcatttcatttagtaataggtttaaatatgtttgcatttgaaatgtattaaacattaagtttctatttttaatyaaatgagttgttacaacacatattacttgtttgatgctcacagcacccctatgaggtgggtatcagtattatctccacttacagatggggaggttgaagctcagagaggttaagcaacttgcccaaggtcacatagtagtaaatgatagagctgagaatcaaagtgaggcagtctggttccagagctcatgctcttaaccattatgccgtgctagcactttttgaaaaataaaatagtggtgttaaaacttgaaacaaatactgaaatattagcgttgtcattttgctctagtattgcagttactacatttgaacttaaaactgtc

SEQ ID NO: 392039 - DNA, 548 bp, Homo sapiens
ctttttgccttttggcgtcagaatgtaacagacatataaccatcagaatataaccatctccatcgactgatttgactcgggttcaaaatgtaatagccagaaaacagtgaagaaacactattttttaggacaatggtagtcatatgtatttaaggatgcagatatgccagtgatttctgtcacagagaggccctagttttgctggatatcaatcaaaacagccttcaaagaatgaaatatacatgtcaggcttgccaaaaaaatgtttagggtctccctactaagttacttagaaaagagagtttaaatgaaatagtgcattttctggatccctgggaaacaaaacataatcaaaactagtttattcatttggatgtctacaactgctataaagtgaactactattatctccrttttcagatgaggagactaaagtgcaagaagccaaataacttgcacaacattttgccagaatctaagctatggcaaccatataacaactcgttccctatctccttttcctggtctcctccctactggaacaactg

SEQ ID NO: 392040 - DNA, 640 bp, Homo sapiens
caggctcagcatctggaggggaagagcaagaggcaggacaggcagagggagaagctgggcttcagtgtgkttccaataaggcctcagcttatctgatagagagccctagagctgtcatgacccttaagagatgttctgagttgggatgaggggactggaattttacgctctcatgtcagccagttggatgaagtctgaagcaattgtagcacctggggggaagtaagttcttcagtcctgaatagagatcagagcaacatatcacagagtctgctatagtcaaccagcctggaagtaacaaagctagcatatgaatacagctttgacttcaaagctcatgcacttttccactcacttgagtcaataggcaatcagccagttaagtacccatacattttaccattttagaaaagggcaaataattaataataataataatttgcatcctggttttggaaatatggccttggtgtcttgacatcatgaaaattctccaaattttatatagataattcaaccttggatctattatcatcttttatgataaacaccttttttaaaattattcacaaaaatttccttacttcttaaactaggttcaactaaaacaatatgctgaagacttaaaacatactgaatc

SEQ ID NO: 392041 - DNA, 366 bp, Homo sapiens
gcccctttccccctattcttttcaaagataaaaggttaaagcaaggagtattggtttaattgatttttaaatttttgaaatgccataaaagtagtgatttttagatgttaatgcagttgtaggtgcttaacgtaaggcacatcactttttgagccaagtcgtaagtgtccctttgtgtgtagtatggatttgctgagaagtgtctggatattgtgttatggaaaataaagttttrgggtttaattttgcatatttgatattaaatagaagacctatatgtttgctgccaccttctttttttcattgtatgaacatactggtaatttttaaaaaaataataaaatattactgctttaagggatggta

SEQ ID NO: 392042 - DNA, 515 bp, Homo sapiens
tagatttagcatcattctttagggacctagaattttcagaatgataaatcatcattggcttcaacttaaagtcaacagctgtactggttccaaacaagaaagtcagcctgtggctttttatccacattgaaaatctattatttagtatagccaccttcatcaatgatcttagctaggtcttctggattacttgctgccacttctccatcactccttgctgcttcaccttgtacttttatgttatggagattgcttctttccttaaacctcaagaaccaacctctgctatattcaaacttttcttctgcagctaaccctcctctctcaaccttcacagaattcaagagagttagagacytactctgaattagactttggcctaaaggaatggtatgcctggtttggtcttgtatccagaccgctcaaacttcctgcacattagcaaaaatactgtttagctttcttatcatttgtgtgttcactggagtagcacttttaatttccttcaagaattt

SEQ ID NO: 392043 - DNA, 515 bp, Homo sapiens
tagatttagcatcattctttagggacctagaattttcagaatgataaatcatcattggcttcaacttaaagtcaacagctgtactggttccaaacaagaaagtcagcctgtggctttttatccacattgaaaatctattatttagtatagccaccttcatcaatgatcttagctaggtcttctggattacttgctgccacttctccatcactccttgctgcttcaccttgtacttttatgttatggagattgcttctttccttaaacctcaagaaccaacctctgctatattcaaacttttcttctgcagctaaccctcctctctcaaccttcacagaattcaagagagttagagacttactctgaattagactttggcctaaaggaatggtatgcctggtttggtcttgtatccagaccgctcaaacttcctgcacatyagcaaaaatactgtttagctttcttatcatttgtgtgttcactggagtagcacttttaatttccttcaagaattt

SEQ ID NO: 392044 - DNA, 511 bp, Homo sapiens
caccaatcaaatgtagatttggtctgttcacatagtcccatatttcttgaagtctttgttcattacttttcattcttttttctctaatcttgtcttcacacttgatttcattaagttgatcttcaatcactgatatactttcttccacttgattgatttgactattgatacttgtgtatgcttccttcatgaagttcttgtgctgtttttcagctccatcacatcatttgtgttcttatctaaaccggttattctagttagcaactcctctaatttttatcaaggttcctaacttctttgcattgggttagaacaygctcctttagctcggaggagttcattattatccaccttctgaagcatacttctgtcaatttgtcaaactcattctccatccagttttgttctcttgctggcgaggagttgtgatcctttggagaagtggcattctggtttttggaattttcagcctttttgcgctggtttttcctcatcttcgtggatttaccta

SEQ ID NO: 392045 - DNA, 570 bp, Homo sapiens
ccataatcaaatcctaccaattttgacttcctaaagaattttcccagccatctactttatagccagcttctttaagttaccgccatttctcacctgccattctgataaagctttttgactggtctttttccattcttgatgccctcactccataagcagtttgagggatctttttagaaccaaattttaagcatgtcactccataaattaaggtactccaatggttttccattgtgatcaggatcctgaactgtggcgtctcaaagccgtacatgttctgtcccttattttctcctctayccttatatgctaccctttgctttctgtgcaccaagtatactggctttatagttctttcgatgtgacacaattattcctactttaagaactttgctgcctttgtcactgtttaggatagtctaatgcctcttcatcctttgcaccttaattccaacccacttcttcagaacacccagaagtggccctatgttatatgttgtcttagcatttcatacctcttagtccttatcttaggtaaaattttctgtcccttttccccattataagaga

SEQ ID NO: 392046 - DNA, 585 bp, Homo sapiens
aaatagttgatcttttaaaatgaaagtgccctgtgaaagtttcatagctaaacatttttgttctttagtttaaggcttaagccatataggtttttttgtttgttttttttttgatttgttttaactagtcaagtgcatttcagtgagaagggagaaagagtagaaaggtgttggatctgtaactgactgtgaacaatcagttgagataactcaactgccttcagaccagccaagccctatagttttacaagaaaaaacccattcaggttagtaactcatgttgaattacttttggctactttgtgttcaataatatcattctggggtgtctttgtcttttttggggggcaaggaaatggggtcttggtattttgccyagcttgggcttgaactcttgatcttctgctttagcctcctaagtagagggtgtctttgattatatcttaataaaaggattggaagttgaagcaaggaattaaaaacataaatgtgaattactgatagatgttaggcaagtagttgtgtaggtgggactaacttgcttgactaagattttgattgcccatcccgttcacgttctacctc

SEQ ID NO: 392047 - DNA, 562 bp, Homo sapiens
cccctttgacaacagtgacaagagtctgtcatctttgagataggtgagatgctgcttaagctctgtctgcaggtggagatgatgacctgacagtctctgatgataaatgcagcttgtttcatgataagctagatgatttttacaatttgaatatacagcaacattgcatggcgtgtgaactagtctgctgagactcagatggtggctgtcccctgtggtcatatagcagttgcctgtttctttcctaggcaggcctaatcaactccagrtgcagtcataataatttttacccagagctggttttctcaatccttcatctttccccaaggaatatactgttttctctattttaaaaagttaaaaaggccgggcatggtggttcacgcctgtaatcccagcactttgggaggctgaagcgggcggttcacaaggtcaggagatcgagaccatcctggctaacataatgaaaccccgtctctactaaaaaatacaaaaaattagccaggcatggtggcaggcgccggtagtcacagctactcaggaagctgaggcaggagaatgg

SEQ ID NO: 392048 - DNA, 604 bp, Homo sapiens
ctatttagtttttcaaggatattaagatcctagccattcttgcattgctaacaatatcatggagtttcaaagtacatcttttcttttcatacttttcataacttccctgtcctgaacagttgtggcaggctcacacaggcagaagtaaaaggtatcaattaccctgtgtatggtccttgtctctgtgactttaaaaagaagacagagtttaaagacagccaagcccaaagccaaagtgggattctattaggttcccctcaatgtcagcattccagcccattttggcttttatcagtcctgaaaagactgataatttactgtgttcagcagtttttgtaaatatcttgcttggcattccataacatsactccttttgttctgtgtatgactttgacctaacccctcattaaatccattatgtagaggacagaaaatatcacttatctgttgaaatgtttacttgtgggattctgaagtgttggctgctgcttgacacctgctaagttgtcatttcaaactgtaagtcacactgtattttgaagaaccttccccagaaaggctgacttcgggcacaggttcagcagtgctgaatggagttgctgtt

SEQ ID NO: 392049 - DNA, 588 bp, Homo sapiens
gcctttgggagctaatgaacagagctcaggagtttctgaatttttctatgaacttgttcctgccatgttacagttggcactttcaagaattcacattttcgtgcattcatatacatcttgtggcagagacttctaggtgcctatccaatatctattctcaccttgctccttagtaacaggatgagaataaaaaacatactgactcaactactgggcattgttttcacttggcccrtcttcccttctgtttccaagagcacaacatgacagccggagcaacagtagctatcttatgaatgtgagaatgtggatcatactagattgatgaactgcaattgccctatcagcccagcactgcctacttctggaattctcgttgtgtgtgagaaaaataaattcctatttatttaaaccactgcttctcagatttgtattactcatagtcgaatgcaattctggtattctaaatattcattcaatgtaatcccccatttgatttgttcaacattttacaattgacttggaacagaagtctatacaacagaaatgcatacaactcactcaggctccctgacctgggtcatgaaa

SEQ ID NO: 392050 - DNA, 599 bp, Homo sapiens
agtagtgaactacacagttaaagcctcatgctcatggaagaagcagacaaaacacaatacatgagctaatttcaaacagtcataaccttgtgaagaaaaatacagcgagtcaggagagagaggttgaaaggcctgtttgagataaagtggtctgggacggcctctttgagagggaaacatttcagaaggggtctgaatgaagttcagtgaagctcratgaaggggagtgaatgagccattggggcatctaggggaagaatgttccaggcagaggctgcaagggcctgagactggagtatctggtgtgtttgagggggtgggataggagagggagctgggacctgcatgtgtagccttgtgtcagacaatgttaccacacggagggaacctaattccagccccaaaggatgatgtggaatgttgtgtgacttcgttatggttagtttccattctgcttttttataacattcaaatagctcaaagccccattaccaccttcaaagcccctagggacctgagaagccctaactggcactctagttctctttaaatctagtttgcttgttttttaattctaaaagctctatttactttttgtg

SEQ ID NO: 392051 - DNA, 474 bp, Homo sapiens
cacagagaaagaatttcccctaagatacacttcaaaaagaagttgttttaaaatgttttattttctattttgtcttaattgaatttaatttttgcaaaagcagttttttttgaactgatgtcaaatcgaatactaactcaagggtggttgagggagcacaatgataaaagcccaatcatttcaagtacagggatttctgaaattcacatccatttagtgcatttgggtcccagctcaaatgagataggctcattcttctttgggaaatgaaataaggatttgaactgctctcaatcagatcaaatcaacaaacatttcttggacaccttatgtgtaaggtgcccaggataaagagaggtggctgagccagccacgtttccagctttgttaatttgacaataccttctagttttctgtttcttgccttgtgatccccagattttayacctgtgagaaattttacttgttgggcgt

SEQ ID NO: 392052 - DNA, 577 bp, Homo sapiens
ggttttttttttttttttaattgcttttggattatattctgttgagcaaaactttccccgtggttgttatggcaactttcaaattgcaagagttagatgtcagcccagaggtttgacaaacagatgacttccagacagaggggctgatttaggagttttggatggggacacagggcttttactgtactctgaattagtttacataatttgcaaattgttttggttcaagtaagctaacctctgaaccaaccatacagtgttcggttacattccaagtccctacaaggaactactcaattcattcattaatattctgtaagtttcaactagcagctaactagttagcccatagatgtgggggcagtggacggtgtctgcatcttgccgttgttagcaagctgggtgcggttgtgcttttgcttcacatgtctcctaactcgtcctcaagttttactggcttccaaaaacacgaatccatcccattactaaacctctgtccagaagcctgactcttacacastatctgggactacctgggactgttaggctgaatgtgattgcaaatcataattttctc

SEQ ID NO: 392053 - DNA, 497 bp, Homo sapiens
cacaatccaaatttagaacatttctaacaccccaaatagaaacccagtgccattttaatcactttccagtcccaccccagccccaggcaaccaataaagaaggatgatttatccttagtctacttggcttcactactaaatcctcaaagtcccttttgggattcatgaatgaccatcattccaggaaaaaaataaaggaaacaaaacctttattacttttttcctggttataaaagtaagacatgcttattgtgaaacaaattcaaaatttaaagaaaaatacttttaaaatatgtgatttgtagcagaaaaaaaaccattgttatattttggcatgaaatatttcaggtttttaaatcatattagaaacaataaatatttatagtggaaaattgggaaaaatacttagaagcacaaataatttwaaaaatcacttaatttcactatccagagataatctctatgtattagttagctttttcagtgtaacaaatggc

SEQ ID NO: 392054 - DNA, 567 bp, Homo sapiens
ctgtttcatgctacaggccaattttaggtttgtttcacagatgtcactttatttcttaaactcagtaattacttggaacatgtctattcagaggattagtggaaatgtgatatttcttaaggcctgccatcagacctgccatactccatggcccaaaacaaggcacatggagaagtccaacttgaatgggcggggaagcatactcctctcatggtgatactgggggaagggagccagtatttgctaaacagtatatcagtaccctgtaaagattttgatgtctagtcttttcttttttccccatataatatttgtataaaaacttttttctgttatgaaaatgggttctttctaataagcacatgaaaagatgctcaacatcactaatattagggaagtacaaatcaaaaccacaatgaaataccacttcacacccattaggatggctattytcaaaaaaacagaaaacaacaagtgttggtgaggatgtggagagactggaactcttgtgcactattgatgagaatgaaaaagggtgcagttgctacagaaaacagtatggcagtt

SEQ ID NO: 392055 - DNA, 644 bp, Homo sapiens
  misc_feature (1)...(644): n = A,T,C or G
actttctgagatattggggattaggctcatgcctgtaawcccaacactttggtagcctgaggcaggcagatcacctgaggtcaggagatcaagaccagcctggccaacatggcgaaaccccgtctctactaaaaatataaaaattagccaggtgtggtggtgggtgcctataattccagctactcaggaggctgagacaggagaattgcttgaacctgggaggtggaagttgcagtgagctgagatctcgccactgcattccagcctggaggacaagagcaaaattctgtctcaaaagaaaaaaaaaaagaaagaaagaaaaagaatctgggggtgatataatttagctcctacagtaggtattgattaagaattattccttttgcctggattagagcctttatcaataataatatccacacattttaaaaatagacaaagcttattccatgactaaaatttctagaaaactttcagagctatgtggacaacttcattcttggagaagtagttccctagcccactaattcagaggccattcaggtctctctgcactgtatctntgaaagaccagcattggtattaaattccaacttggtcaataaccttaatggggctactatattttttttaagtccagatac

SEQ ID NO: 392056 - DNA, 644 bp, Homo sapiens
  misc_feature (1)...(644): n = A,T,C or G
actttctgagatattggggattaggctcatgcctgtaaacccaacactttggtagcctgaggcaggcagatcacctgaggtcaggagatcaagaccagcctggccaacatggcgaaacccmgtctctactaaaaatataaaaattagccaggtgtggtggtgggtgcctataattccagctactcaggaggctgagacaggagaattgcttgaacctgggaggtggaagttgcagtgagctgagatctcgccactgcattccagcctggaggacaagagcaaaattctgtctcaaaagaaaaaaaaaaagaaagaaagaaaaagaatctgggggtgatataatttagctcctacagtaggtattgattaagaattattccttttgcctggattagagcctttatcaataataatatccacacattttaaaaatagacaaagcttattccatgactaaaatttctagaaaactttcagagctatgtggacaacttcattcttggagaagtagttccctagcccactaattcagaggccattcaggtctctctgcactgtatctntgaaagaccagcattggtattaaattccaacttggtcaataaccttaatggggctactatattttttttaagtccagatac

SEQ ID NO: 392057 - DNA, 644 bp, Homo sapiens
  misc_feature (1)...(644): n = A,T,C or G
actttctgagatattggggattaggctcatgcctgtaaacccaacactttggtagcctgaggcaggcagatcacctgaggtcaggagatcaagaccagcctggccaacatggcgaaaccccgtctctactaaaaatataaaaattagccaggtgtggtggtgggtgcctataattccagctactcaggaggctgagacaggagaattgcttgaacctgggaggtggaagttgcagtgagctgagatctcgccactgcattccagcctggaggacaagagcaaaattctgtctcaaaagaaaaaaaaaaagaaagaaagaaaaagaatctgggggtgatataatttagcycctacagtaggtattgattaagaattattccttttgcctggattagagcctttatcaataataatatccacacattttaaaaatagacaaagcttattccatgactaaaatttctagaaaactttcagagctatgtggacaacttcattcttggagaagtagttccctagcccactaattcagaggccattcaggtctctctgcactgtatctntgaaagaccagcattggtattaaattccaacttggtcaataaccttaatggggctactatattttttttaagtccagatac

SEQ ID NO: 392058 - DNA, 670 bp, Homo sapiens
ccagcagcatgggtagcacctgatggcttgctggagaagaaagttctaagttccctttagagctacagaaatacaaactctggagtgaggcccaacagcctgcgtcttaagtcctacagataattctgaagcacattcaaattttagaattactgcgctagagtttcttttgttgaagtactgggaaaactgatcagtacaacatactacaaacaacatttgcatgtttaagtcttggacctgcttacagtgaaattaatattaactcatttaagaatatttatccaattcagctaaatgttttaccaaaaatacctaagctaatgctttgatcccctaggtttaaaatcacaatagcaaacacttttcaaacattgaccatcaccagagactgttctaagagttttacattgattaactcatttagtcttcatgaaaaccaatgagatatgtactatttttaccctctttttacaaataaaacactgaggctgagacasattaagtaacctgcccaggtcccagagtgggtaaatgacagttgagatttcaaccctggccacatgagtctagagtccctgttcctaactgctagactatcttgggggcaaaactttgtaaaataaatcgatttaagggatatttctaggagaggaaggaagggagggag

SEQ ID NO: 392059 - DNA, 547 bp, Homo sapiens
atgagatggttttggtatgcaaggaatggcctcctgggatggaactaaaacgatgttttgtggctgacaatgctgcgagggcatctgagaatcttagagtttgcagcagaaggaacctttgaggacatctcacccaacagcctcccttcacaaaacaagcctcgcctaccrtgtgccaggcccttctgtaagtgctgggggtgcagccacaagcaaagcccttgccctcatggagcctacattctagatgggggacacaggtagacaacaaagaaacaaaagtatgtcatattaggtagtggtaagggctggaaagaaaggtagaacagggtgaggggagagagtgacagcggagttctgcctgggttatgctatatttggggtgtttatgcaaattcacgtttctcaactcttttttcactatgtacccccatatcctggagccttttttgacatttttttcctattcccatccctcctcatgagattttaataccacagataaactgtgcatctgttgatgtcctatatgtaatctgtgctttac

SEQ ID NO: 392060 - DNA, 590 bp, Homo sapiens
tttttactgtgtatcctttgtactttcctagtttttgtaacctgtgactatgttacctatcattttattcattgttttaaaaagaggtatccatcctgatactggcctaaattaccaagagaactggcatccacattcaattgctaagactacagttttgggttaaataaatttttcaagttgattttttccacactgttgtcaagacaaccttccctttctccacaatattgagagaattaggtgtcaacctggcatctagacagaaatagctgcttaattccaaacatggatgggttaggaaggccagaaagttattgttcttatagattcatgtaacaccttgtaaatactttttgcccagtgggggttcaataaatgttgctgactcatcggtcacagggaagcaatattaactcagaaggactaactgaagtcatttaatcagaaaatcaatttcattttccttgtcatggggaaaatatttctgctaagtcaagaaaaatgtagagttaattattttgtgtcaaggagtcaaatggaaagccaggagttaaagtgktgagaacaaaacagttgcaaatcaattt

SEQ ID NO: 392061 - DNA, 582 bp, Homo sapiens
caatggaaagagagcaaagggaagtactctgtgtgataccacacagaccaggtaatagagcaagaaacagaaaacaggccaagctgttctagtgcctttaacccacactgcttcaagatgcaggtaaattagagcatytgacttttacttgtggttacaaattatgaagattttatgtatcatttgaaattcttgggattgagaaggagcaggttaactcttaacaactgtgatacacacacaaaagctgtttcaataaatgaaagagaaagaaaaatgatggagcttcaatcctcaaagatgtgaatgctatgcctacaggcaatcggacaatgtaggacaatacacacacacacacacacacacacacacacacacacacacacatgcacacatgcatgcacacacacacacggcaaacatttattgggcaatactatgccagagcatgttacatatatcttagctcatttaatatggtttggtgatactattttccccattccacaggtgaagaaactaaagcccagagaaaataagtaacttgcctatggcctttcagctagtaattagcaaagcaag

SEQ ID NO: 392062 - DNA, 582 bp, Homo sapiens
caatggaaagagagcaaagggaagtactctgtgtgataccacacagaccaggtaatagagcaagaaacagaaaacaggccaagctgttctagtgcctttaacccacactgcttcaagatgcaggtaaattagagcatttgacttttacttgtggttacaaattatgaagattttatgtatcatttgaaattcttgggattgagaaggagcaggttaactcttaacaactgtgatacacacacaaaagctgtttcaataaatgaaagagaaagaaaaatgatggagcttcaatcctcaaagatgtgaatgctatgcctacaggcaatcggacaatgtaggacaatacacacacacacacacacacacacacacacacacacacayacatgcacacatgcatgcacacacacacacggcaaacatttattgggcaatactatgccagagcatgttacatatatcttagctcatttaatatggtttggtgatactattttccccattccacaggtgaagaaactaaagcccagagaaaataagtaacttgcctatggcctttcagctagtaattagcaaagcaag

SEQ ID NO: 392063 - DNA, 552 bp, Homo sapiens
tttccccattccacaggtgaagaaactaaagcccagagaaaataagtaacttgcctatggcctttcagctagtaattagcaaagcaaggacttcaatccagatctaatgactctagaatctacactcttaatcactgccctgtacaaagacaatgtctttgctatggacaggacccacagcacagacccatttcatgggcctacaacttatgcagtctcacagggccctgggctcagagggagccacacttggataaatgctctgctgttgctgtctctaaaattcttgataattggaamaagggacactgcatttttattttttactacacctagaatttatgtaatcagtcctgggtagggaatactgaattgcaaaatcattaggttagctgtgtctttattttaaaagaaaaaggaggaggaggagatcaaagtaaagtagaaagaaactaaatatttaaaccagaaaatctgagacataattactattataaaaattagcggaatctggggctaacagttaagaagatacatgaataatgaaagatt

SEQ ID NO: 392064 - DNA, 471 bp, Homo sapiens
tcttctggagtccagattggattaaataacttctgaggatttccttcctgttctgtgattctgtctcctcacacaatcaaatgcctgtaacataattctctttaatttggaaagcaatcctctctctcgcttctctctgaaagtaaatttccgaaattaagtccgtaggctgagggaccccctttgccatctgggcaaatgtaattagcaacccgtctggtgttcagggaaccargcagccgcgctcttctcaaaccagcctggaaatgcaaaacgcagtagcattaaacacgcactcccccagaggaaggaggaaggccacaagggggcagagaatctgcaacccaaaggaaaagcaggtttcgccccaaatagaacatactcttttgtaaattgcccaattatctaaatgtctttcagaaaccaaattaagaatgctataaagacttcaatttgttcacataaaatggt

SEQ ID NO: 392065 - DNA, 631 bp, Homo sapiens
ggaaaggagatcttcagactgatccctaagactcagcaaggttcagagatgcaagcaacacagaagattaaaaagaagccatcaagaaaacctgaaaaccagggtagtagggtcctggaagccaagtgaagatatagtcaatgaataaatggtcagctggggttggtaggttgaataagatgtacaccaagaaatgagctttgagactggaagcacaaagattatttgggccttgaagggacaggttttggagaaatgatgaggctgaaggcctgagtgaaatgcggcccaggcttcctgggatgctcatctccatgaagtataatagcacaaagaatttagcacctgaaggaacctgtggatgctattgacttgggtggacccagtgaaacaaatctcttgagagagatrttatacacctaagagacaggacaagagcaactcaaattagagagaaaaataactagaacatcatgagtcttcaggtactaactcacaccgaaaagataccagctatagggctttagaaacacccaagattatttgtgttactgttagatgacttttttctcagattaaatttaattctctggcgttacctcttaaaactcttggtttttcaaatttactc

SEQ ID NO: 392066 - DNA, 568 bp, Homo sapiens
atttggggtcaatatcaaagtgtttcagtttgttggagtagcattgattcattgaaagagaatrggtagacagtcttagagtcaatcttggttctgtctcttaataaaccttgctgagcctcaacttcttccaccagagagttgtaacaagaccctacctgtaggcttgtcaggaagatgaaagaagaaaggcatgtgacacatccaaaggagtggctgacacatagcacagaatgcttcttcctgctcatgcggggtctgtctagggagctcaggtcagaaacgagttaatttgagacatcttgatcatttcacagcatccacaagaaacattagacaattctgatttagaggaatctgagccagattataaactacacgagggcagggactgtcttgtttaatgctatatccctattgtgtagaaacagcagcattcaaggaacgttggccgaattagtggataaaagcatcttaagttctgtgacttcaatgcctcagaatcaatatttccctgcatgtaacagagactaagtatagaccagtgttccttgtaaagtgaccaatc

SEQ ID NO: 392067 - DNA, 568 bp, Homo sapiens
atttggggtcaatatcaaagtgtttcagtttgttggagtagcattgattcattgaaagagaataggtagacagtcttagagtcaatcttggttctgtctcttaataaaccttgctgagcctcaacttcttccaccagagagttgtaacaagaccctacctgtaggyttgtcaggaagatgaaagaagaaaggcatgtgacacatccaaaggagtggctgacacatagcacagaatgcttcttcctgctcatgcggggtctgtctagggagctcaggtcagaaacgagttaatttgagacatcttgatcatttcacagcatccacaagaaacattagacaattctgatttagaggaatctgagccagattataaactacacgagggcagggactgtcttgtttaatgctatatccctattgtgtagaaacagcagcattcaaggaacgttggccgaattagtggataaaagcatcttaagttctgtgacttcaatgcctcagaatcaatatttccctgcatgtaacagagactaagtatagaccagtgttccttgtaaagtgaccaatc

SEQ ID NO: 392068 - DNA, 557 bp, Homo sapiens
ttgtgatggcacctgagacatgctggccagaaatgctttgccgtcttcactatttgtgctggggtggccgcacttcctcaatgtttggtgtgtctaataggcactgcccagcctgcctcagatcttccaccttacagccccctttgtgcctgtagtcagaagcaataattgctccccaaagggcactacaggtgccagctgatctgaacaaactgccaaggtgcaggactttggacatctgcttgcaaatggccacactcacctgatccgctcctgyccactgccaactcaacagccacttcacatgggcccaaatttgatgggcagacgtagagcctgtgcaggtaggcagacaacctcccctctcagtccatttcagcaggaaagtggtgtgctgtttttattcaaactcaggcttaagaaagtgtgatgaaactgtcctgtccctccgtaatccagcccttcagacacacccaacaggtgtgcatgtacaaggtagacacacagacacatatgtcttcagaacattcacaaaacagcaatctgcaagagtgtgg

SEQ ID NO: 392069 - DNA, 481 bp, Homo sapiens
tcaaggcccagcatgaagacatcgccaacaacagcagggctgaggctgagttctggtactaaaccaaagtgagacatcaaggtcaagttcattaaacaagcacaaaaaaccgagatttcaaaggcaaacaagataagagccatgtcctctcagatgtcccagtctgatagggtcaagggatctgagttcagcttgggctcaccctatgttacctgggggaagcatgtcaggacctggggaacagccagataaaggcaggaggtggtcagtccctctgccaagaggaagatggacacacctccaatgccctgtatcagagagaaaagggacagctggacagttccagccatcagtgccaacaggaggaacaragagggagggtggggacaagaggaaagtttaaccccttgtggaggaggctggaggatccagagaagaaaggcggaactggctggggcccaggggctggagggtaaagtct

SEQ ID NO: 392070 - DNA, 481 bp, Homo sapiens
tcaaggcccagcatgaagacatcgccaacaacagcagggctgaggctgagttctggtactaaaccaaagtgagacatcaaggtcaagttcattaaacaagcacaaaaaaccgagatttcaaaggcaaacaagataagagccatgtcctctcagatgtcccagtctgatagggtcaagggatctgagttcagcttgggctcaccctatgttacctgggggaagcatgtcaggacctggggaacagccagataaaggcaggaggtggtcagtccctctgccaagaggaagatggacacacctccaatgccctgtatcagagagaaaagggacagctggacagttccagccatcagtgccaacaggaggaacagaragggagggtggggacaagaggaaagtttaaccccttgtggaggaggctggaggatccagagaagaaaggcggaactggctggggcccaggggctggagggtaaagtct

SEQ ID NO: 392071 - DNA, 578 bp, Homo sapiens
tcctcctgccctggggaagggatgttctttcaggtctaaactgtcatgacttctcctgctttcatggtctcagagctgttgaatgaatgaatgaatgaatttgattccctcacttggtcrccagctgggagtcactgcattgctccctcccgtcatggctattattgaaaaagaatatattgaaaatatatgaaaaagggacaatcagctccctgttagaaaccactaatggagaataatggagactcaggggtctgaaagcaacagctaatagagatgggagcaattatcaggtgcaatgtcatcagaaacccatgtacgcatgcatagacatgaggctgcaggctcacaaagctgatgtctatggaagatgcaaaacatttaacagctggtacaagcaggcactaaccaatcagagatgtcagccatggacaaccaggacagccatgttcataatggctggacacctgttctgctcccagccattcacatacagatgtgcacacacatcttctgatatgccttggaacatgtctgtcagctggtaagacatgcagtgctcacagttcatgcattaa

SEQ ID NO: 392072 - DNA, 594 bp, Homo sapiens
ctccctgttagaaaccactaatggagaataatggagactcaggggtctgaaagcaacagctaatagagatgggagcaattatcaggtgcaatgtcatcagaaacccatgtacgcatgcatagacatgaggctgcaggctcacaaagctgatgtctatggaagatgcaaaacatttaacagctggtacaagcaggcactaaccaatcagagatgtcagccatggacaaccaggacagccatgttcataatggctggacacctgttctgctcccagccattcacatacagatgtgcacacacatcttctgatatgccttggaacatgtctgtcagctggtaagacatgcagtkctcacagttcatgcattaagccctggagcctttggtcattttggggtggagggatgcgcccagaacctgagcagcaggagaaagctgcagcctgaccctgacagggaaggggtggaaaccaggggaattcggaagggcttaggggaggcttcttggagtagctatgtcctgcctggtaggcaggaggctgggagaatagcccagagcatgacatcaggaaaaaggaagctgcccgtaagaaac

SEQ ID NO: 392073 - DNA, 583 bp, Homo sapiens
ttgctttggggagaaaatcgagaaagaatcttccctctaccctcccttgtcccagccatccctaaagcagtccagtgttatgattcatccaccttttatttgcttcaaggattttccatggcatctcagaggcccctctcttcccatttggctggattccaagaccattaaagatctattcaaacaaacaaacaaaaaaatctggatcgagtgagggcagctggttcccatttggctcagctgtgatcctgaagtttctgtgttatggtgtagccttcatttctgsatcatcagtggatttctctaccgctttcactagcaccagctgtggactgcaattgtactctagtcaagtatggagggaataagaaatagttatggcagaaacctgggcttgaaaatgcatctctccttgagctggcactttgagaaggccacaactgaatgaagggacattagagagtgagcctcaggtcaggctgcaggcctgggaaggccaagggtagagccagctgggaagagacagtcctcattgctggccatggagggagtgagctgttgggagcaagggcccgtgtggctg

SEQ ID NO: 392074 - DNA, 481 bp, Homo sapiens
atcaactcagtataccaccggaggctgtatgagtaaacagcaaactagtctcatgaatgcaggttgttggcaaactgacaaactgcatctgccacccagaaggaatgctgagggcagtcacgcyggcagtgtttctcgtgattaggcataattgacacctgttaacagtaatgtgaacctgtgatcaattaagcagctgaccaatcattacctcctcctccctgctctttctacacaataaatacgaagggctgtggaagctcagcgggctgcctttgctcactagaaacatggagctctcttctcccctggactccttctttaaaacagtttctctgtcttaagttttcatttctacgttcgtcccccttggttcagtcccatggtaaccgtggcaaactgccacagtggatatatgttattacacatttttaaaagacccatagaatgtacaaaaccaaagtgactctaatgtaagcta

SEQ ID NO: 392075 - DNA, 542 bp, Homo sapiens
ggagccttgcagcagtgaggaagtagaaaccagagttcaaagtggagatgggataagaagggagatgggaactggggaaggcagtggagagaaaaggaaaccagtccattggaaactcttcttgcagtttttaccggtctctctggaaggctggcagggctcccttcaaccctgttcttatcaaggacctcagccaygtgacagaaggagagcctggtccttcacctgcacactatctcctgctcacagaggagggttcctgccttgtcctgttgtgcagcctgtccctttctcgccttctcatctttccgaaagcacttctctgcacttccaacctcccttcttgcctcccatcatcaaaatgcctcattcataagatacacactgctcttcctcctctaactagtgtccccacacggatcaggaaagccaaaggttgtccccttcttccaaatatgcccgtcagtgcccagcccagttgtgcgctttccagtgatgtaaacatccaagtgcacctacttacccagtaccagcatgcacag

SEQ ID NO: 392076 - DNA, 461 bp, Homo sapiens
aggcagtggagagaaaaggaaaccagtccattggaaactcttcttgcagtttttaccggtctctctggaaggctggcagggctcccttcaaccctgttcttatcaaggacctcagccacgtgacagaaggagagcctggtccttcacctgcacactatctcctgctcacagaggagggttcctgccttgtcctgttgtgcagcytgtccctttctcgccttctcatctttccgaaagcacttctctgcacttccaacctcccttcttgcctcccatcatcaaaatgcctcattcataagatacacactgctcttcctcctctaactagtgtccccacacggatcaggaaagccaaaggttgtccccttcttccaaatatgcccgtcagtgcccagcccagttgtgcgctttccagtgatgtaaacatccaagtgcacctacttacccagtaccagcatgca

SEQ ID NO: 392077 - DNA, 610 bp, Homo sapiens
tgacctctggactccacaactgacctgagatagagccccatcccgctggaaaatggagttgtgagacttcctgcagctgtagagaaagccactcatggatcatgttcagataggcaatgctgtcaatgttctctgcaaaawaaaaataaaaaaaaataaacggactgtgtgtgtgaaaattgagaaacagaagggaagctccagagctaggtgcatactgagtattcataaacaacatgattactaagtaaaacaattttgagggattcaagactctctaaaccactaggtctaccatagaaggctgcacatctcacactagccttcgtgcttctgtctatgttgcttacacgtgtggctgccagtatttctctttcagtgggtgctccctagggacaggcctggctcgctgggattccctctgagcagcatcatcctgcattgtggcttgcaagattaggcactgaatcttaaagcttttgatgatgatgacaatagcctctccctcattctcatctgccaactccaccctgggaggcagaacgcctaggcaaatcctctttgaggcagactttccatgagctcaggcttcaggagctccctcctgtcc

SEQ ID NO: 392078 - DNA, 610 bp, Homo sapiens
tgacctctggactccacaactgacctgagatagagccccatcccgctggaaaatggagttgtgagacttcctgcagctgtagagaaagccactcatggatcatgttcagataggcaatgctgtcaatgttctctgcaaaaaaaaaataaaaaaaaataaacggactgtgtgtgtgaaaattgagaaacagaagggaagctccagagctaggtgcatactgagtattcataaacaacatgattactaagtaaaacaattttgagggattcaagactctctaaaccactaggtctaccatagaaggctgcacatctcacactagccttcgtgcttctgtctatgttgcttacacgtgtggctgccagtatttctctttcagtgggtgctccctagggacaggcctggctcgctgggattccctctgagcagcatcatcctgcattgtggcttgcargattaggcactgaatcttaaagcttttgatgatgatgacaatagcctctccctcattctcatctgccaactccaccctgggaggcagaacgcctaggcaaatcctctttgaggcagactttccatgagctcaggcttcaggagctccctcctgtcc

SEQ ID NO: 392079 - DNA, 615 bp, Homo sapiens
gtggggccacctctctgccgtcccccaaatagaagcagggctctcaggcaggacagtgcttgggctgttcagagtttcgggggcgccctgtggcccgaggctggaggtaggaatgcaatggggatggcttcaaagcctcagggaggaggggctatattctcaagagtagaagaacaggaccagacccaggctcaggaatctctcaccagggcctgcggttggccacaaggaagccaaggcagtgggaaaatgactccctggtgctgaggatcagctgaaacagtgacttctcaccagagggctgcgatgagcaagcagctgacaggtcaatctcggcagacagaccaatggccggagccggtcttacaggtcttgagcaaaatggtttgggtggcctccctggctggagcatttctgagaccctcagagatgaattgtgctgagctcaccattttcacatttggttgctttytggagaacagatgtgagtgtcctggaggcctgagacataccaggggaccctcggctcctgatagaacagaacagatccaagcctgaagcaagtgtctgaggactcgtagtgggatgctcccgctccactcaaagatcgatatc

SEQ ID NO: 392080 - DNA, 585 bp, Homo sapiens
tgttgtgaacccccacccaggcagtatccatgaaagcacaagtgactagtcctatgatgtacaaagcctgtatctctgtgatgatttctgtgctcttcrctgtttgcaattgctaaataaagcagatttataatacaatatattcttttactttgccttgctttggggccaaagttttgggcttaaacttttttatctgataagtgaatagttgtttttaaaagataatctattctttatacacataactcccctcctttagagaggttcatcaaacttcagcttggtatcatgacattcagagtgtatttctagatcaaattccatatgaacttttggcaaatggagtgggaggcatctggtccaccagcattgtccactccgttttaactgaccataccaggaactagcatcccattccctctgccttggtttccaggaccacttttccccttacgccagggctcagcctaattgtccagttaagaaacatattctcggccaactagagcaagttatttgacaaaagaatcagatatgtgattaatcattataattgccctcataagcaagaaacttgcctga

SEQ ID NO: 392081 - DNA, 585 bp, Homo sapiens
tgttgtgaacccccacccaggcagtatccatgaaagcacaagtgactagtcctatgatgtacaaagcctgtatctctgtgatgatttctgtgctcttcgctstttgcaattgctaaataaagcagatttataatacaatatattcttttactttgccttgctttggggccaaagttttgggcttaaacttttttatctgataagtgaatagttgtttttaaaagataatctattctttatacacataactcccctcctttagagaggttcatcaaacttcagcttggtatcatgacattcagagtgtatttctagatcaaattccatatgaacttttggcaaatggagtgggaggcatctggtccaccagcattgtccactccgttttaactgaccataccaggaactagcatcccattccctctgccttggtttccaggaccacttttccccttacgccagggctcagcctaattgtccagttaagaaacatattctcggccaactagagcaagttatttgacaaaagaatcagatatgtgattaatcattataattgccctcataagcaagaaacttgcctga

SEQ ID NO: 392082 - DNA, 585 bp, Homo sapiens
tgttgtgaacccccacccaggcagtatccatgaaagcacaagtgactagtcctatgatgtacaaagcctgtatctctgtgatgatttctgtgctcttcgctgtttgcaattgctaaataaagcagatttataatacaatatattcttttactttgccttgctttggggccaaagttttgggcttaaacttttttatctgataagtgaatagttgtttttaaaagataatctattctttatacacataactcccctcctttagagaggttcatcaaacttcagcttggtatcatgacattcagagtgtatttctagatcaaattccatatgaacttttggcaaatggagtgggaggcatctggtccaccagcattgtccactccgttttaactgwccataccaggaactagcatcccattccctctgccttggtttccaggaccacttttccccttacgccagggctcagcctaattgtccagttaagaaacatattctcggccaactagagcaagttatttgacaaaagaatcagatatgtgattaatcattataattgccctcataagcaagaaacttgcctga

SEQ ID NO: 392083 - DNA, 414 bp, Homo sapiens
cctaaatgtttggcaagtggagcgggaggcacctggtccaccatgattgtccactctggttttactgtatgcaggaactggcagcccagtccctcagacttggtctctaagactactcctccttatacaccggtgcttggcctaaatgcccagtggagaaacatttttggccaaatagagtaaaagtcatttgggaagaaaataagatactttatttatacttagaattgcctcatgactaagaaaattatttgacaaggtgtatcaacagcaaycaatatgtgcctacttagaattggacttacacctctggaaatgtatcctgaggagaccgtgcaaatgcagaaagctgtacacacatggatatgcaccacagtaatcttcacaacggggaaatgggacattaaagctgat

SEQ ID NO: 392084 - DNA, 614 bp, Homo sapiens
agcatttggtatggtcagtgttctggatttagccattctaataggcatgtagtgatatcttattgtgctaatttgcattgctctgatctatgctcatctattttttatatctgcactggtgatgtgtctgttaaagactttggcccattttataatcaagttattacttactgttaattttaagagttctttgtrcagtttggataatagtccttattgaatatgtcttttaccaatattttcttccagtctgtggcttgaattctcactctcttggtagtgtgttttgcagagcagaagttttattaataattttaatgaagtccatgttatcaattatatctttcatggttcctgactttggcattgtatctaaaatgtcattgtcatacctaaggttatcaaggctttctcctatgttatcttctaggagctttacagttttgcattttacatttagagttatgatccattctaagttaatttttgtggtgaatataagacccgtatctaaatttgtttttctacatgtagatacctagttattccagcaccaattgttgaaaacgctgactttgtattgcctttgcttccttgacaaagatcagttgatt

SEQ ID NO: 392085 - DNA, 567 bp, Homo sapiens
agacaactgtcacatggaagaattccaaacaatttatataagtgctcccccagaatgaggtagagtgtaactgctccccgcttaagtgtgggctgtgattaatgacttctttccaaagagtagagcatgaaaaggaggttcagtagtccccccttatccatggggatagttctaagacccccagtggatgccccaaacctcagatagtatcaaaccatacatatactgggttatctcctatacaaacatacctacgataaagcttaatttataaattaggcacagagagaaaccaacaataaccaataattaagttattattagtattttaagtaaaataggggttcctgaacacaagtactgtgataccctgacagttgatctgaaaatcaagccagctgcaaacagtctcacggaccacagcacaamttatgaatcaagactaagaaattaactcaaaaccagacaattacatgggatttgaataacctgctcctgaatgacttttgggtaaataataaaattatgcaaaaatcaagaagttctttgaaactaatcagaacaaag

SEQ ID NO: 392086 - DNA, 535 bp, Homo sapiens
atgcacagacatgtcacccatggcccaggaaaagcacaggaaaatatccaagtaaagatacaaggatacacaaggaactgctaacattacttcctccatagataggaattgggtaactggggaatggccttgagctatattattttgttgtttagcatgttttacaaaaaattttttaaaacatgtatcatgtattcaatttgtaaacatgtaaataattgtgcaaatagtactattcaaaatttaaatgggcaatctactacatttacttctagaatgtttaaatatagacagaatcttaataagyttctaattttaatatgaaatatgaaggttagagtctcatattaaaggaaacaataggggtatgcaattagaaaaatcccaagaatgaaaaagtacaatgaacagttaacctgttttatttaacaaataaaagtaagaaatgaagggagatttttaaatttcaatgatttaaaggatatatcactcaaatacaacgtttatagagcttattttgactctgattgggaca

SEQ ID NO: 392087 - DNA, 560 bp, Homo sapiens
ttctctattatatcttgaggtgaagttttggccgtgtaaaaaattatggttaatgctgtgtatgttatgttttatttgccttcattctgggaccacaaaaacggatctaactatagataggggcaggagagcatttgtgtttcttcattagaagctgtgcatgttagtctaatgtataagaattaggaaaacaatactaaatctcttgatgcaggccatgtcataaatccatttatacttatataatattttcctttttcttattctttcaaccttcatgcttcttttttcatttaaaaaactttggggtcagcccttatattaccagatgatttctagtagttgaagcccttgggaaattcatttgtccatccatgctgcctagtttagtacaacactccaaagggaacttccttctaccaaaggcaatgactgattgsacttaaaaaataacttctataaatatgacataatatctggaggccacatttatagctggtcaaatgcactgttagccctacaaaaggctggctcataattatgaggcaataacatgtaaa

SEQ ID NO: 392088 - DNA, 542 bp, Homo sapiens
aagtaatgacatgatttgttaatggatacacagtataaaaagacgtaaattgtgacaccaataacatgaagtgtgtatataggagaagtaaaagagtagagattttgtatgtgatcaaatttaagttgctatcagcttaaaatagatgattataagttgttttatggaagcctcatggtaaatacaagaaaaacacctgtagtagatatataaaacataaagagaaaggaatcaaagcatattgctacaaaagataatcaaatcacaaaaaaagacagcaacagagggacaaaggaactacaaaacaaccagacaataatttaaaaatggcagtaataagttctcacctattaataattaagtgtaaatggattagcttccccaatcaaaagatacaaactggctgaagagattaagargaagactatccatatgctgttaaaacagcaacaacaacaacaacaaaaaacaacaacaacaacacactttagctttagggacaaacatagactcaaagtaaaaggtgggaaaaatatattcca

SEQ ID NO: 392089 - DNA, 236 bp, Homo sapiens
aaaagtgtatttattgattatctgcttcatgccaagcattcctaggarctaaaatacttaaagagtgttcattgtatttagggttgagtagatatagatgccagttcacacagtatcaccatgtgataactacaataatgcagaaatgcattggttgctataggaaccagctataatgtgtcctagggtgtggcttggtggacagggaagatgtctgtgtgtctgggtgatatgtg

SEQ ID NO: 392090 - DNA, 599 bp, Homo sapiens
gctatttcacacatcagcacagtgaaattaaaatatgcagtgcctctctaagaggcatcacatatgacagagcttttaaaaatagtcccctttgccactcaggtatagaaagagctatagaaacaaaagcaaatgtttgaaaaactgagataatttagcttagggaagaaagaagctgaggtggttctaatggtttttgactataagaaaagttgtacaaagaggataatgatcagcatttttgtcctagggcaaaatgacattaaaccgtccagtgcakaatttaagacttaaagatgaacattctaaatatgcaagtggtaaataatcaaatagattgctaagagcagttctgaaatttctttcttcctgactctcttaaaataggaaaaatcttcatctattttggataaaataaatgcagctctgcctccagtcaggagaatgaattcaataacttttctagtcttgtttaactctgtatgattctataaaattctataaaatgttcaccctaaaaattatacagaatcacaatacagttgagtaaaatacattctacagtttaaaaagaaataagcaatacagatagttgataa

SEQ ID NO: 392091 - DNA, 565 bp, Homo sapiens
catgagaactaaagatatagcagtcagagggtaaagaaacacagaagcaaataatcttatagaataaggaccaaatggttaattgagaagyttggaaaccataaaataacattcaaatatgtagcattatttttatacttccacaccctcatcaatagaaacaaatttgaattgtagttcaagataacaaccctgaatcatttagaaaagtttgaattatggtaagtatattcttttttttgagatggagtcttactctgtgaggctaggtaaataagctgcctttattaatgaagaaattcatatttttctgaatattagagaaatattaatttttcccaattaagatatgttcatgatatacaatttagaaaatataggagagtaataaaaaatcttaaaaatcctaaaaaaggtgggattataccatatgtattactatgtatgctgccttttaacttaatatatagtataaatagttcatactattataggttcttcataaacatttactggctcaaaattctatctaatagatatgtcgtactatacttaacacagcact

SEQ ID NO: 392092 - DNA, 565 bp, Homo sapiens
catgagaactaaagatatagcagtcagagggtaaagaaacacagaagcaaataatcttatagaataaggaccaaatggttaattgagaagcttggaaaccataaaataacattcaaatatgtagcattatttttatacttccacaccctcatcaatagaaacaaatttgaattgtagttcaagataacaaccctgaatcatttagaaaagtttgaattatggtaagtatattcttttttttgagatggagtcttactctgtgaggctaggtaaataagctgyctttattaatgaagaaattcatatttttctgaatattagagaaatattaatttttcccaattaagatatgttcatgatatacaatttagaaaatataggagagtaataaaaaatcttaaaaatcctaaaaaaggtgggattataccatatgtattactatgtatgctgccttttaacttaatatatagtataaatagttcatactattataggttcttcataaacatttactggctcaaaattctatctaatagatatgtcgtactatacttaacacagcact

SEQ ID NO: 392093 - DNA, 577 bp, Homo sapiens
gacctccctctggctttagacttccccagtcttggctcctggaaggcagccaacagcctgggttggttcagcctcctcgcaggtatctgaatgtgctcatcttctgtgcatgatttcttttttcctctttatctttcctgtctctttctatctcttgctaggtctcatactcctgtgaggggattgaaaaaggaaaaataattatttttctggtttgaggcagatctcaagtatctatgccctggattttatttctatacattgcaggcaagtatcttctagagctattctggggcctacttaattaatgctctgaagatggaaaagtagtagaaaattattgttatgattgtaagtgttgtgatctgacacttaccagcyttttatttttgtgatataatttattgccagactggagccatttataactttaaatacgtgtttgtcaggattacctaaaggaaactgctttctaaatgagcaaaaccaatcatctgcaaacatcttcctcttcaaagacaacttcttgagacaagcagaagggacttcagggaaggccatgtttaagagagaaaac

SEQ ID NO: 392094 - DNA, 585 bp, Homo sapiens
  misc_feature (1)...(585): n = A,T,C or G
catggtactcagcaggaatgccagcaagggaaaaaagggaactgaaatataagttcagcacatgtggcaggagtggatggaaacaaaataaaatcactttcaagaagtgaagaaccctatgggaatcttctaaaaaggaagaaaaaaaaagtagttttaaagcaacagtaaaattttcatttgcttctttttatgagacaaagagttagaaatgttctttttggcaagaagcttattctacttgtctatagttaaaaaaattacagtctgacacatggtggaaaaatatcagarcaatgactcttaatgcttcaataaaggttaaaaatgcaatcctctcatcttatcagtggngaaaataaatctcagggggagaacaggatttgctgaaggtcctcaggtaaagggataaaaacacgtgtctcctggtactccaccccatgctcttccccagtactgctctgcttcttagtgttgttttctccttgcctacgtaaaagtanaatgtgtttattgtgaaatatttggaaaatacataaaagttcagaagacagcattanaatctcctgcaatcttactacccag

SEQ ID NO: 392095 - DNA, 595 bp, Homo sapiens
cttacttagagaaaatgacgcatgagcacaagagggccaactggcccatgttccttcttagtcatagccctgtttatgattctaccctgggcactttcagagagtgctagaaccccagcttcagaagctttgtaatctggttttcctctttacttcgagctggggcattttggaaaacacatgcactcaaggtagcctctccaaacctgcctctaggctacttccaaaatatatgttagcaatcacaatcaaacagaataataaagattgctctatttgaatcacatctgatgccactctaaaaatgtcctacatatatagtcacatatatgatatcacatatatatatataaatttcatggtataggatgctaatcacaaatataaatacaaattggaggtgtcactaaatcataatgagttaaacgttacaaactaaatcagtttctatgctttgcagtttcactttctagtacctgacttggcaaagccattccacaaccagaattayagccactgccctgtcctgtctttgaaatacgtacccattgatacagaaaaacacaaataaagatgtgagccaggcaaccaaaca

SEQ ID NO: 392096 - DNA, 595 bp, Homo sapiens
cttacttagagaaaatgacgcatgagcacaagagggccaactggcccatgttccttcttagtcatagccctgtttatgattctaccctgggcactttcagagagtgctagaaccccagcttcagaagctttgtaatctggttttcctctttacttcgagctggggcattttggaaaacacatgcactcaaggtagcctctccaaacctgcctctaggctacttccaaaatatatgttagcaatcacaatcaaacagaataataaagattgctctatttgaatcacatctgatgccactctaaaaatgtcctacatatatagtcacatatatgatatcacatatatatatataaatttcatggtataggatgctaatcacaaatataaatacaaattggaggtgtcactaaatcataatgagttaaacgttacaaactaaatcagtttctatgctttgcagtttcactttctagtacctgacttggcaaagccattccacaaccagaattatagccactgccctgtcctgtctttgaaatacgtacccattgatacagaaaaacacaaataaaratgtgagccaggcaaccaaaca

SEQ ID NO: 392097 - DNA, 594 bp, Homo sapiens
  misc_feature (1)...(594): n = A,T,C or G
nnnnnnnnnnnnnnnnnnnnnnnnnnncaggctccaagcgctcaagaaaaggagtacagtaaaagcagcactgggccacacaaagaaccccacgtatgatttccagcttaactcttacttgctgcatgatcttaggtaaaacccaatcttgctggctttcaatgtactaatctgtcaagtggaagaacaactctagattatccttaccagcactttcacctttaaaccttggaaatacagaagattcagttatgtgttctaagcagacttttaaatgccattactgcaggggagggccaccattgcaaatcctggtctttgttcccaactcttgggcaggcctgcagcagaaaaggcagctcccagaagccagaattagaacctgagctagggagaagcaaaaacatacggtccacagactatcaggagggaggggaagaagggagacaggatgctgtaagttctccgctgacttccagcaactagtctctgggtgcttgggccttggttcagctgycctctacttatcagtactcttcctggggagacagagcgaggactcatctgctcttcatggcccttgaaaaatttact

SEQ ID NO: 392098 - DNA, 493 bp, Homo sapiens
ttgtcttttatggttctcatattttataaatcaaatttatggtatttttaaggagacaggactataagaaaggattaagaagaagccttgccacacatcacatggcctgggcgttttcatagctaagtgaatgctgcaagctatgccagcactgagcttgtcagacatgtgagattttgggctctagctcttgggcagtttccaaggtcctttgggtcaccaatgaggactcccatctaagagaggagacactccagtctaagtatcatgcaaggccaaaggaatgccccaaatgagaacaatataattgccccgaagtataattcctcttgtacacaaactccaatcaatgtgattttatttctctctgtgttatcatgaaactgtgagcttaagtttcagtatgcttaagttcartaaaatttgctgaacagatgcatgactatgttaagtcaagtctttaagctattcatgatggggataaatcagagaa

SEQ ID NO: 392099 - DNA, 493 bp, Homo sapiens
ttgtcttttatggttctcatattttataaatcaaatttatggtatttttaaggagacaggactataagaaaggattaagaagaagccttgccacacatcacatggcctgggcgttttcatagctaagtgaatgctgcaagctatgccagcactgagcttgtcagacatgtgagattttgggctctagctcttgggcagtttccaaggtcctttgggtcaccaatgaggactcccatctaagagaggagacactccagtctaagtatcatgcaaggccaaaggaatgccccaaatgagaacaatataattgccccgaagtataattcctcttgtacacaaactccaatcaatgtgattttatttctctctgtgttatcatgaaactgtgagcttaagtttcagtatgcttaagttcaataaaatttgctgaacagatgcakgactatgttaagtcaagtctttaagctattcatgatggggataaatcagagaa

SEQ ID NO: 392100 - DNA, 491 bp, Homo sapiens
ggcaaatttgtggggagggggagaacaaaataaagcaggctccttttctatcagtaagagggactagagcttctcacttgtactgaggtgaagtgtttaaagatttcttgctcttgtgagtgttcattaaacccaaattgcaaacttggcatttaaccttttgcagcaaggaaagcttctaaggaatattwggggtctgcctcactgttttgccaggaaacaattgctaaacagaaaggatttgaaaaagttgcaggaaacgaatttatgcctgtaccagcaagtcttttcatttgtcctcaaacaaaaaatagtttgagtaacagaaacacctggtgctttacagctcctcttttgcattaaaaatgcgtagcatacctattcaagttgagtaaatcttttattctacagacctaaaatattttatgtatacacaagggaggtgcataattgcagaataattcgcagtcagctgataaactcacctgtcc

SEQ ID NO: 392101 - DNA, 615 bp, Homo sapiens
gggaattctttgagccttctacagaaggaaaaagtaatcgtagctccagaagaaaaagwatcagggaggtgctgagttcatcagggcctcatgggcagtcccttttgggtactgctgatatgatttgactgtgtccccacccaagtctcatcttgaattgtaactcccataattcccaagtattgtggagggacctagtgggaggtattttcatcatggaggcagtttcccccatactgttctcatggtagtgaataagtctcactagatctgatggttttataaggggtttcccttttcgcttggctacgatttttctctcttgcctgctgccatgtaagataatgccttttgccttccgtcatgattgtgaggccaccccagccaggtgaaactgtaggtccattaaacctctttcctttataattatccagtctcggatatgtctttattagcagcatgaaaacagactaatacactgccatctgaataactcagctgccaccatgcccattcttaagtcattccactcaagattaaaattccacaggagaaaagtaaaaggactatcttagaccgggtgttgacccacttggttagaagaaaaggcatatg

SEQ ID NO: 392102 - DNA, 615 bp, Homo sapiens
gggaattctttgagccttctacagaaggaaaaagtaatcgtagctccagaagaaaaagtatcagggaggtgctgagttcatcagggcctcatgggcagtcccttttgggtactgctgatatgatttgactgtgtccccacccaagtctcatcttgaattgtaactcccataattcccaagtattgtggagggacctagtgggaggtattttcatcatggaggcagtttcccccatactgttctcatggtagtgaataagtctcactagatctgatggttttataaggggtttcccttttcgcttggctacgatttttctctcttgcctgctgccatgtaagataaygccttttgccttccgtcatgattgtgaggccaccccagccaggtgaaactgtaggtccattaaacctctttcctttataattatccagtctcggatatgtctttattagcagcatgaaaacagactaatacactgccatctgaataactcagctgccaccatgcccattcttaagtcattccactcaagattaaaattccacaggagaaaagtaaaaggactatcttagaccgggtgttgacccacttggttagaagaaaaggcatatg

SEQ ID NO: 392103 - DNA, 541 bp, Homo sapiens
  misc_feature (1)...(541): n = A,T,C or G
acagccaaccttctgaggatactaaagagaaaagctaacaaaattttaaacttaactgagctgaarataagctgtctgattggaagtaataacctcctagatttttttaaaagatattttcagatgttcaagttccccaaatttttattttgcacacaccgttttccaaagatcttctgtaggatgtttgtcaccaaaatgatgtattaaggaagaaatgtaaccaggaaccagatggtccaacataagagaggcaaagggaatccccagaatgatggtggaggtttcacaaggcaaaggctcacagcaggcctggagagcacacagtctagattgcatcagttcaaaaagctcctagagaatttttgcccaatgagctataagtgaaagaacaactaatgtgtttgaacatattgacaggaaatttacgcagcttagggagagttctgggttggactgataaaaaaaacctcacaaaaagctaagcaataaaatcaacaaaacanacattaaattcaggaaaaacaaaatgtggcaagaa

SEQ ID NO: 392104 - DNA, 610 bp, Homo sapiens
aaagaaaagtcctgtactaggttcacaaaagatcaaagctccctacttcagaaaataattaaatcacaaaagaagacagcaagcaaaggaagaacaataaaatcagaaaacaacaaaatggcatcctaagtccttagctatgaatgatcacactaaytgtaaatgtattaaattttccaatcaaaagacatagcatggttgaatggatacagaaagaagatctgactacatgctgtgtacaagaggctcacttcagctttcacatatctactaaaaggtaagagatggaaaataataatccataaaaatagaaaccaaaaaaggcaaaggtacctattcttataccagaaaaaaatagacattgagtcaaaaagtgtaaaacaaaacaaagaaagttatcatataatgataaaagggtcaattcatcaagaggatataacaaatgtaaatatatatgcacccaacattgaagcacctaaatatataaagcaaatattgacagaactaaaagaaggaatagacaaaaatacaataatggcagggagctttaatatcccatattcaacaatggatagatcatccagacagaaaatcaataaggaaacagcaa

SEQ ID NO: 392105 - DNA, 516 bp, Homo sapiens
  misc_feature (1)...(516): n = A,T,C or G
nnntacactcaatttaaagttctatactgcagtcaaccactgtaacatgacaagtcatgaaattaaggcaataaaagattccaaatttgaggaaagatcatagaatttttaaagttaaaagagtttagtgggaatacataggtcctgacagactactrccaggaaaattctaaatacttggccacttaaagttttcagaaaatttgtaaggaagatgtttaattttcagtgacatgtaattcagttaagggaaaaaaaattaaaagtttcatcaaataggaaacgaacttaaaactctgctattcttgaacacatcttagaattattttatcagttctaaaagtggaactgcctaaatctgcaggatgtattatgaaaaacaaagagttctcatgtcttcaaacaccactgccaaaggacaaaggtcctgaaaagtctttaggggagcaatattaaaaatgtacagactcaactttggggtgttgaaaaaagtggtaagtctatttgcttttaaca

SEQ ID NO: 392106 - DNA, 544 bp, Homo sapiens
gtaatggcaagctgaactgactaaggtactatagccaaagtgaatgtgatttttgacgcttgtgttcttgatctgttggctgcggcaggagtgtggacagaggctcatctttaatgcctctgaagcaggcttggcttctctcttccatgttgtcccatggcactttgtacatagagtgatgtcactcatatgtacacactcatttttctcagaacgcagaaatatatggaggtctgaggttgaatctcatatgacttcctaaagaaggtctgtcctttatagttgctttactcattactgctaaggaactttttacatttcttgmtatcccctgtcatttttgttttgttttggcgttgggggaaagcagatgtaggattgaacagggaaggcggaagcaagaagatgaggatggccactctcatttgcttcagttgactgttttcaattcctattgttagagaagtgagtgtgaaagaactggctattcaagagagtgttggagattctggcaagcagagattcttcggagcccaggtggaaa

SEQ ID NO: 392107 - DNA, 613 bp, Homo sapiens
taagcaactgagcttcttcaattttttgaggagtccttggccactccaggctcttgcttctccatgacaaggggcagagcagagatagcttctgacttagaacctcagatggatcagtcagccatggactattcccatctttgctatgagaagtggctttctggtggggattgtgttgagggttgggttgttctgattacaagaagagcagagactctgcagaggggtggagaatgttttagccaatattgtccaaatccattccatttcgaggtaaatggggaagaaacaaaaagacccacatagtaatctccacagagaaccacactgaacctttgtaggcaggtaggaagagagttatctcccctttcctttactcctcccctctcctctccaccctccctttttctcttccattctctcctctccttttttttcttcttcacctcttctctcctttctttttttactttctctcacagtttatgtttctaagaagcaaatgttaaaagtaacagaaaacagtgaactataatccttgtcagctttgattgaaactatattagtcagtttccaaggaggaacrcaggaaactccctgagtatgtaaaata

SEQ ID NO: 392108 - DNA, 511 bp, Homo sapiens
atatgactggcttcccatttttgaggattttaaacagtctggtaggggagagaggaagagaaatagataatttcccttcactgaggtagattctatgggcaagataagtatggggctgtataggagatctaatggagtctactcattggagggagctttgaggtggttactgagaatgccaggtgtaagacagagaatatctttaagtaacacacagaaaagaaaagcttggttcatctctgtgctttttggggatgaaaagacaatgatatgctttatatattttggttgaatatcgggagggtctggctgcctgttggccaggaaactaactcttcytgccaggtgagtcagtcaaggtgggagggttatttgaacagatgtgtttcaacattgctttgaaatataaagggtcagaatatactcttttgtaaataccactgcacactaagagttttgcctgactgactgagcaaaagttgcacctaatgctgaatgcacttgagaactg

SEQ ID NO: 392109 - DNA, 570 bp, Homo sapiens
ggatcttgagctcagcagcaacatacacactgaggtcttataatcctttggatggaataagggaattctcctttatacgaaaaaaaatattytgagatattcaggcacaaacagagactgtacatttggcaggaaactcatctggaattttaaagccaaaattataagttcgaaatgagagaaaagagaaccacagtcagggttgtcataaatagaataattttattcttcatgttttcaccaaaataacaatcatacatttcaacagtgggtttttttttccattggtaccaaatggattattcagaacatctcattttgatttattgagagcaaacataacaattgttcaaattagagtacagagtttaaattaggtaaacactgggaaggaatcaaacaaaaacctattttgtgctaagctgggaatctcttgtgtgttgagtagtggtgtcgcatgcagtcccagggcccttggctccaagtccacacagccaggcactccctgggctgtgcccaaggccttgagggcaatggcgtctggagtctcccagttttattgttggtttg

SEQ ID NO: 392110 - DNA, 560 bp, Homo sapiens
ctggtggcctagtggctaagagaaaccaaataaaaacaaaactatagctgacacctggcattgtggcctaccagcaggcaaagaaaggaattgtctattgggaaggctaattttgacccttttcaccactgaagtggtaaaattactgccatatgaaaaggcagggaggaatacgtttggcacttagatgatccactgggccagtgggatatctcttgataaagtgacacccaatctcaattgtaaactggcaaatgaaacaataaagkcttgctaacaaggggctttgactactcaaggatgaaggcctgtgtcttcccaatagctaagtcacctaaattatcagaagtgttatcagaaggggaggaaatctagaaaggatggaagaagaggaagatgtatattagttaaggtcttgaaacctatttcagcagggaggcagaagctcatccccagtaactctcctcctgtaaattttactggaaattgcaaccaaccagaaccctgaagaagcagtgaccagatggagtatatttaaagtgagaagcaagtggactaag

SEQ ID NO: 392111 - DNA, 589 bp, Homo sapiens
attgtacctttagtccctttcagatatactgtgtctactcttttctactgttaagtcctccacttgtgcactggatcttgttttctgttgtctaacctagatttttctcttgcccatttctttccaacatgaattccttcagttctactggatcttcctatcagcatgtaaacatgctgtaatgtcttgcacttaaaaaaaaaaaaagcccatraaaccctcctttgatctccttgttattttccagctgtttctccatttctttactccctttatatgaggcaaaatttctgcaaagattgcctgttattgtctccctttttttttctttcatttcctcttgaactcactcagtgaggtttgtcctcatcatgccatgaaaactgaataccagtgctctaggtgttcccaaattctgtggtcaattctcagtctttatcttgaccttttgggagcaactaaaagtgtttatcactcctttttaaaatgcactttcacacttggcttctagcacaccacaatttttggtgtttctttttttcaggcttcttcatctgtattattttgtgttaatcaaaaatcctttgtt

SEQ ID NO: 392112 - DNA, 616 bp, Homo sapiens
aggtacagtctgtcacagcttcccttggctagaaagggaaatcccctgaccccttgtgtttcctgggtgaggcaacgccccacatactatgggaatttttaagaacaaacaggtaaacaaacgtaaacatagaaaattggtgcttcccaatttgttgcaggatccarattcataaataattcactataatacaagtcaaacagtgaccccaaaaggctgatggggttttccaaaagacaaatgttacatgttagtaatatagctgagggagaaacaccatcctgacttaaactctaagcattttagacatgatgagtcaggtaaaatatatatgtatctatatgtactaatggagtttttaagatgctgacagattgcatcccaaacatatatatataatatatatatatgtttttatatgtgctattttatgtttaccttttaactttcctgaactatgggctcttatgagcagatttatttggtataaaggaacagttatcaaatggagtctcttgtttaggtgaaggatccatggctagcgtgttctagcatgtcagcttatgcttatgaattctatgcactccctctgcaagaagaaagcatagccaatggg

SEQ ID NO: 392113 - DNA, 648 bp, Homo sapiens
attgtgaagtggtagatggatggttatctgaaatcagatggaacattggaatactagatgtggataggtacggctcattaygcagtgaactgaggtaactggagatattagtggtgtctgttttgtgttttgccaggcagcttggttcagacggatgcagtttcctgccatcctctagtatttcttacagaaaaaataatgcagaagcaaaagcaaaatccacactatgttcaatgtgttccctaatatatcagcttcactctagcaaattcacattttaaaagtcaagtgttacagcactattgactatatatgtgtcattatatgccaatgctttcattcctatgagttagatttccaggataggggctaatggatttttttaagatgctaacagattgcatcccaaacagctttaataattttaagatattttccattttcacaacctcagagaagacaatccagtcccacaccctgaacctaatttttttttctttttctgagatggagtctcactctgtcatccaggatggagtgcagtggtgcaatcgaggctcacatcaacctctgccccccaggttcaagctattctcctgcctcagcctccctagtagctggaactacaggcatgtgacaccacacaca

SEQ ID NO: 392114 - DNA, 648 bp, Homo sapiens
attgtgaagtggtagatggatggttatctgaaatcagatggaacattggaatactagatgtggataggtacggctcattatgcagtgaactgaggtaactggagatattagtggtgtctgttttgtgttttgccaggcagcttggttcagacggatgcagtttcctgccatcctctagtatttcttacagaaaaaataatgcagaagcaaaagcaaaatccacactatgttcaatgtgttccctaatatatcagcttcactctagcaaattcacattttaaaagtcaagtgttacagcactattgactatatatgtgtcattatatgccaatgctttcattcctatgagttagatttccaggatagggrctaatggatttttttaagatgctaacagattgcatcccaaacagctttaataattttaagatattttccattttcacaacctcagagaagacaatccagtcccacaccctgaacctaatttttttttctttttctgagatggagtctcactctgtcatccaggatggagtgcagtggtgcaatcgaggctcacatcaacctctgccccccaggttcaagctattctcctgcctcagcctccctagtagctggaactacaggcatgtgacaccacacaca

SEQ ID NO: 392115 - DNA, 589 bp, Homo sapiens
attgtacctttagtccctttcagatatactgtgtctactcttttctactgttaagtcctccacttgtgcactggatcttgttttctgttgtctaacctagatttttctcttgcccatttctttccaacatgaattccttcagttctactggatcttcctatcagcatgtaaacatgctgtaatgtcttgcacttaaaaaaaaaaaaagcccataaaaccctcctttgatctccttgttattttccagctgtttctccatttctttactccctttatatgaggcaaaatttctgcaaagattgcctgttattgtctccctttttttttctttcatttcctcttgaactcactyagtgaggtttgtcctcatcatgccatgaaaactgaataccagtgctctaggtgttcccaaattctgtggtcaattctcagtctttatcttgaccttttgggagcaactaaaagtgtttatcactcctttttaaaatgcactttcacacttggcttctagcacaccacaatttttggtgtttctttttttcaggcttcttcatctgtattattttgtgttaatcaaaaatcctttgtt

SEQ ID NO: 392116 - DNA, 668 bp, Homo sapiens
  misc_feature (1)...(668): n = A,T,C or G
ccagacagctaaactactgctaaattttactttatccagaggacatttactgaacatagtagccttcagattcaatttcctcacagagttatgaracaagaaacagagatcatgggacactgggacaaaaacactctcccttcaacggagagagtgaacaacagggagggtgaactataaattccacaccctccactaagaaagataaatatttggaaaatatgaaagagcttaaaagtcacacaggagaggatgagatatctaatgtaagtataatttgagtttcaacaaaaaaaataaagagtatgggaaaaggtaatatccaaagagatgatggctgaggatttcccaaaattattgaaagacataaatcctcagatacataaattccaataaatccagagcagacgttaaaaatgaaatccttaccaaaatacatgagnntagctacaaacaccannagacaagaaaatatctttaaagcagtcagaaagataaactgatcacctacagaggaatggntgacagctggtctctcgcaggcacaatgaaaaccagaccagagaaatagtatattccatatgggtagagacaataattgctgattaggagggttactgagtgaaactatcttaaatcaagggcaaatgacacttttcaggcaaacc

SEQ ID NO: 392117 - DNA, 454 bp, Homo sapiens
ttaatggcctgcagcttcacccatgttgctgcaaaggacatgatcttgtgctttttttatggctgcatagtatttcatgctgtatatgtaccacattttctttatcagtgaaccattgatgaacatctaggttgattccatgcctttcctaattatgaatagtgcttytatgaacatatgtgttcatgtgtttttattttcctttggcatatacccagtaatggggattgctgggtccaatggtagtttcgttttattaataagttctttgaaaaatctccaaaccgctttccacagaggctgaacgaatttacatttccacaaaaagtgtataagcattcccttttctccacaacctcaccaacatctgttattttttgtccttttagtaatagctattctgactggtgtgagatgatagctcattgtggttttgatttgcatttctttaatc

SEQ ID NO: 392118 - DNA, 557 bp, Homo sapiens
accatagtgttttgattactgtggccttgtagtatagtttgaagtcaggcaatgtgatgcctcagactttgttctttttgcttagaattgctttggctctgttttcattcccaactaattttagaataggtttttctaatttgtgaaaaatgatattggtatttttatagggatagtgttgaatctgaaaattgcactgggcaatatggccattttaattttattaattcttccagtccatgagcatggaatatttttccattttatttgtgtcatctctgatttctttcagtagtgttttgtagttctcattgtagagatctttcacccctttgttagagaaattcttagatatttaattttccttttttcttctcttgttgcttaggctggagtgmaatggcacgatcttggctcactgcaacttcactggctatagacaggcaaaactcaatagctttgttgactatgctaacagtaatgatctaagtttttaccctagatgcaactaaaagccactaaaaggatataaggtaggggataggaaaataaaataa

SEQ ID NO: 392119 - DNA, 600 bp, Homo sapiens
  misc_feature (1)...(600): n = A,T,C or G
attctgccatgttggccagattggtatcaaactcctgacctcaggtgatctgcatgcctctgcctcccaaagtactgggattacaggcataagccaccacacctggccatggctaggacttctattacattgttgaatagaagtggtgagagtggacatctttgtcttgttccagttctcaaggggaggattccagcttttgctcattcagcatgatgttggctgtgggtttgccatagatggctcttaatattttgaggtatgttcctttgatgctagtctgttgagggttttttgtcatgagggatattggattttattgaaggctttttctgcacctactctaatgattgtatggtttttggttttaattctttcatgtggtaaatcacatttattgatttgcatatgttgaaccgatcttgcatcccagaaataaagccttcttcrttaagatgaattaactttttgacgtgctgctgaattttgtttgctagtattttgttaaggatgtttatgtccatgttcatcaaggatattggcctgaagttntcttggttcattgtgtctcttccagattttgatatcaggctgatgctg

SEQ ID NO: 392120 - DNA, 553 bp, Homo sapiens
gctggcattacaggttcctgccactccacctgcctaattttttatttatagagatgggatcttgctatgttgctcaggcaggtctcaaacttctgacctcaagcaattctcccacttcagtctcccaaagtgctgggattacagacatgagccaccatgcccaggctgattaatctcttttgtatagcatcccctcatcattctctatcctttgaccttcatttattctccttgcagcatttacccacctgacatgatactatctatttgttgatctaaattttgttcatctcttccacaagaatgtaaactaattgaggtagaacttttatctgtcttgttgcttgttctttgtccagaactcagaatatagcttgccatatggtggacaatgaattgatgaatgaaaaaaaaatcaatgtcataatggggaaaaagcttactaaacttggaatcaagagggatcaagacaactgggttctaatcctggttccctcattgrctaattatgaatcatttgactttcttggatctcagtttctgtacaatgaga

SEQ ID NO: 392121 - DNA, 478 bp, Homo sapiens
tgtttatacagaaaaaagttctgtggtcaaataagctttagaaacactcaatgaaacaatattaaacatttttattcactgtatggcttcacagaaatttttatatgctatatatattttcatccttcaaagatgttacaatcgagtgttccttaaacatttgatgacatatctaccctgcctgagcgcatctcctgggactgatattctacggaacagcttaagaatagtttaagaatcacttcctgcagcattatttcaagatcagtcagaacatggtattttcagtcttgctagttgttaagtaatacatactgaatgtcactmtaagatatgtagagagatttctaaaacccaggggaaacaggaacaaaagaagcagataacatgcctttgttctatggctcaattctttattacaataatagcaagaatgccagaaatattattcaagtctctctctctctctctctctctc

SEQ ID NO: 392122 - DNA, 552 bp, Homo sapiens
aagccttcatcaatattataacaagcactgatccttccctattctcaactaacaagcagttactctaaatgtcagtaatatgtcacctatrcactgtattgaataagtcaggactgtctaatagaactttctgcaatgatggaatcattctgccttctacagctgagctctccaatatgatagccactagccatgtatggctactaaggactttatttttatttttaattttttttttgagacagagtctcactctgtagcccaagctggagtgcagcggcatgatcttggctcactgtgaccttcacctcccgggttcaagttattctcctgcctcagcctcccgagtagctgggactacaggtgcacgccaccacacccagctaattcttgtattttaatagagacagggtttcaccatgttgcctaagatagtctcgaactcctgagctaaggtgctctccccaccttcggcctcccaaagtgctaggactactaagcactttaaatgtggctaacacaaatgaggtactggattttttacattttatt

SEQ ID NO: 392123 - DNA, 613 bp, Homo sapiens
gtcaatttggctgaaatgtttacctaatgattaatgccagctagygggccaaggggtcatcttggagcactgaactattcaagactcaggagacatagctggagaaacaagactgagacttgatctgttaggaagagctgagagtcaaatatcagtgtcttctccattacatcttcagtgcctaccatggtgcttggaacacaaaatagtgttcaataaatatgtgtggaaaatatgagtgatggacacaatgacagtggtactaagtctgatggggacaggcaggatggaaattggggtgtagtgttgagtcagcgagagcatcaagggtgaagagataaaacctcatggtgccaggttctggattaaaaatgacatagtggttggaaacaggaaaaggagaaaaccaagaatgtgtagagtatatgactcaagctgtccttattaaaggagaagcagattggtagtaaatttcacatatacaccctcatggttgtatgtcatacgtattgtatactggcaaattcttgttaaccttttaatagtatagaatcagttcttcttgactagtctttataaaaatctgaatatgcaaaacttttaaggagttggc

SEQ ID NO: 392124 - DNA, 531 bp, Homo sapiens
gtagtaaatttcacatatacaccctcatggttgtatgtcatacgtattgtatactggcaaattcttgttaaccttttaatagtatagaatcagttcttcttgactagtctttataaaaatctgaatatgcaaaacttttaaggagttggcaaagaagtaggaagacccatggggatttcaaatctggtttcatctccyatctggagaaactaggtaagccccacactcatacacaaatacacagtaaacaggatgtattgggtagcaaagagggtcagcacatgttgtaagtttaactagagacaatctacattatcaggataatcaacgtggagatgtggaataacccatatttcaagtgacagtctgaatggattttttctggtccttgtttatcattgtttgtcaaatccctagagtaagcttcaacaagcaagaggtttaagacttgtgtcgttcttattaactttcacattgcattagcagtggttaaagctctggtttctatttatgccatggttctgtttttag

SEQ ID NO: 392125 - DNA, 531 bp, Homo sapiens
gtagtaaatttcacatatacaccctcatggttgtatgtcatacgtattgtatactggcaaattcttgttaaccttttaatagtatagaatcagttcttcttgactagtctttataaaaatctgaatatgcaaaacttttaaggagttggcaaagaagtaggaagacccatggggatttcaaatctggtttcatctcctatctggagaaactaggtaagccccacactcatacacaaatacacagtaaacaggatgtattgggtagcaaagagggtcagcacatgttgtaagtttaactagagacaatctacattakcaggataatcaacgtggagatgtggaataacccatatttcaagtgacagtctgaatggattttttctggtccttgtttatcattgtttgtcaaatccctagagtaagcttcaacaagcaagaggtttaagacttgtgtcgttcttattaactttcacattgcattagcagtggttaaagctctggtttctatttatgccatggttctgtttttag

SEQ ID NO: 392126 - DNA, 605 bp, Homo sapiens
ccttctggcctgggatgtgtctagaaatgttgtctggagctagggcctcatgaatctgattggtgccctatcctgctgtggctgagctagtaaccaagaggcaagacaaagtcctccccactcttccctctcctttcctcaagaggaaggaaggggccttttttggagtcwtgagctgtacagcctggggttggggagggatgatgccagcacttccttagccagcctggctggtgtcgcagtgggtcatgtcctccctggcccccctacaacccaccagccaggtccactgactctgggcccagttcagcactaggttttgcctaggacttgcagtccttgtggcctagactgcctttcaagtttaggactccagggcactgtagcccatggtggcaaagcttgcaggaactcaagttccaaccactgggatctggattcctttctagctagggctggtttaaatgctcctcctgtgggcagttgccggctgaatttggtctggttttgtgttctgctataataaggtggcactgagttcaatgcctcacagttgctgtgatctccctctctgtgccaaaccaccactgccaggtgcgggaaca

SEQ ID NO: 392127 - DNA, 492 bp, Homo sapiens
gtctagtttccctatgtctagtttttggtttcctgcaaaacatctggccgatgatccttttctaagtgtataattcatacaattattttacatttctctagcttatatctatttgacagtgtattcccttcatctatgtaaaataaattaaattctgaaaraagtgccactttcagaactcagttaagaaattccatccttcgctcttccatgttttttttagtatctagccttgtacctctcctagctgcttcattgactgttaaagtttctaaaaatcctttccccttttctgccttctgtatccagactgttgttcagtcctgtttatttgattgacatctcactcatcaattcattcattcagcttgcacttattgaggcaaaggaatagtcagtctcagggcaccatgggcactgctgtctataatattccattccccattactggcagagttcaggccagtgaatcacttctcatttagaccactg

SEQ ID NO: 392128 - DNA, 588 bp, Homo sapiens
ttgtcattaaaaaggaagcccaacgcattattcttgggctgagaaaaaataatttagctgtcattgttatttaaggagtaacaccggaagatgggagacattaaaataagcagctttacctcaagaagtrtaatatcttcttttccctctaagatgcagaggtagttaataaacatttgatgattgatttaaacatattagagagagattcacttgttagtatttatcatctagctaaattgtatttttttaatgtatacaactgagatgaagccaatagaactttaccacagtggttgtaaagagataagaaattattatttctcattataccatcagcagactgaggtctgtaacttgatacttatgcaaaagattactaaattggtagctattcttataaaatattcactttaggaaagaaggtgagaatgaggccactgacgtcatcttggcttggtttacttaagcctgggcaaagagggaaaagggcactggagatttgcataggtaagtatttagaaggcactattgtttttaaaggctacagaaatgttcaatgtgcttatcttcaactcctcccaaata

SEQ ID NO: 392129 - DNA, 588 bp, Homo sapiens
ttgtcattaaaaaggaagcccaacgcattattcttgggctgagaaaaaataatttagctgtcattgttatttaaggagtaacaccggaagatgggagacattaaaataagcagctttacctcaagaagtgtaatatcttcttttccctctaagatgcagaggtagttaataaacatttgatgattgatttaaacatattagagagagattcacttgttagtatttatcatctagctaaattgtatttttttaatgtatacaactgagaygaagccaatagaactttaccacagtggttgtaaagagataagaaattattatttctcattataccatcagcagactgaggtctgtaacttgatacttatgcaaaagattactaaattggtagctattcttataaaatattcactttaggaaagaaggtgagaatgaggccactgacgtcatcttggcttggtttacttaagcctgggcaaagagggaaaagggcactggagatttgcataggtaagtatttagaaggcactattgtttttaaaggctacagaaatgttcaatgtgcttatcttcaactcctcccaaata

SEQ ID NO: 392130 - DNA, 588 bp, Homo sapiens
ttgtcattaaaaaggaagcccaacgcattattcttgggctgagaaaaaataatttagctgtcattgttatttaaggagtaacaccggaagatgggagacattaaaataagcagctttacctcaagaagtgtaatatcttcttttccctctaagatgcagaggtagttaataaacatttgatgattgatttaaacatattagagagagattcacttgttagtatttatcatctagctaaattgtatttttttaatgtatacaactgagatgaagccaatagaactttaccacagtggttgtaaagagataagaaattattatttctcattataccatcagcagactgaggtctgtaacttgatacttatkcaaaagattactaaattggtagctattcttataaaatattcactttaggaaagaaggtgagaatgaggccactgacgtcatcttggcttggtttacttaagcctgggcaaagagggaaaagggcactggagatttgcataggtaagtatttagaaggcactattgtttttaaaggctacagaaatgttcaatgtgcttatcttcaactcctcccaaata

SEQ ID NO: 392131 - DNA, 588 bp, Homo sapiens
gaatgaggccactgacgtcatcttggcttggtttacttaagcctgggcaaagagggaaaagggcactggagatttgcataggtaagtatttagaaggcactattgtttttaaaggctacagaaatgttcaatgtgcttatcttcaactcctcccaaatagttcctccaaatgccccatccctcaggggttattgtgaatcacagtccaaaatagtttggctgtctcttttttcatttgcttctaatgtggtgttctctctcttcttggtatgagaggaaaacaatggacatctctcaaagatgttttcaaatgggtttcttaatctaacatactatctcataaatataccttttctttgtctatcatcattgccttaaccttgcattgcacttctttttccatttttgggggtgaggaaagagatggcacattaagcttaggccattaaggagagattaatgcaggactatttttgagggtgtgagcagccttagtggaaaccacccagggaaggtagagtacattaatctcataggtctctcattctcttatctcctactggtgyttcccattgaccacacccaatt

SEQ ID NO: 392132 - DNA, 629 bp, Homo sapiens
ggtactagcaaatgttttaaacctttacaattttagttgttgcttttttctaaccaagcattacttagactatcttaactggtacacttaccttaatatatyatttcaatccagtagtagtgcccaatggaataggtcaatggaaacgtttttgaatctataaaatgttagtgcagactgctcttaattaagaattctctttaagaatattgatggagtttaggacacactaccccaaaatgtggcaccatggcattttgagaaaacagctgaagctggaatgtctctctcacatactcctacccttttcccctaaagaaggacataaaagagttcttcaaccttcctctaaaatagaggaagttttcatgcaccttatttgaaaggtgcccagccaatacttggaagataggaatgttcttatctttgaagacacaggatcacaaagaagattatgaacaggacttgctaagttccctgaccccagtttattaccattaggtgataacccctctgttcaatcagacttccccatgactatccactgttcatcaaacctaagcataaaaatacacaggtttctaggtttcactgggtcttcatttgtgaaggttccatgtcacataaaa

SEQ ID NO: 392133 - DNA, 540 bp, Homo sapiens
ttaccattaggtgataacccctctgttcaatcagacttccccatgactatccactgttcatcaaacctaagcataaaaatacacaggtttctaggtttcactgggtcttcatttgtgaaggttccatgtcacataaaacttacattaaatacatttgtatacttttgtcttgttaatttgtatttttttcagccattaaccttgtgatgtgtgaaaaaaagatgttgctttttcttccttacactgttgtctaaaacattcaaaggcccattggcagcttattgttaataagctttttgaacaggtgttttcgtctatgacactgaaaaataaaccagtggaagaaacaatttcatggatagccatctgtgtaaggggatccaagaagactaggaatggctgtgtttatgagaagytaatttttttctcctcccccagcctcaattgcctccaaagatcatagtttcaggaccaattctttttattcagacaaaactgacaatccttcctttagagacttcagacaggtactaatcttag

SEQ ID NO: 392134 - DNA, 523 bp, Homo sapiens
gtgatgtgatcatggcttgaactcctgggctgaagtgatcctcatgtcttagcctcttgagtagctgggattacagacaccatgcttggctaatattttttttctttttttttgtagagacaggttctcactatgttgcacaggctgatcttgaattcctggcatcaagtaatcctgccaccccagcctcccaaagtgttgggattacacatatgagccactatgcctggcctgcttctttgtttatactgctaggctttcttattacttcaaggraacacacattcgaagtccaagtgaggtaccagctccttaattgcaagctattcaaggaaagaacactaaactgtgagcctgagatctggggcctagctctggccctgtcacatcagactgtgcctgtgagaccttgaacaagtagctacaaaccttagcctcctcatccagtttatctagttcagttaagatgatcctaagtccacaaaatgtagtattgagcatcagttattaatcaaatgtggtg

SEQ ID NO: 392135 - DNA, 421 bp, Homo sapiens
aaactactctgggaaaagcaatatgtattgtttttcctgcccacatcacatatattctggttcatagggaatttaaggtgcagtacgctgacttcaaatggccagcaatagaacagagtctcgggaggaaggtaaaggataaccgtaagctataaataatagcagataaacagaaatcgagtgtttattctggactcattttragcatggcagattatggacatgatcataaaggacaaaaagatataccaaacccaggagaaaaaatgagactgcttggaacacaagatcaaaacaaggaatactaatttcaggtgaacctctttttttgccatagaactttctagatgcttttgtgagccagccatatctacttatttttctttgtcaataatacaaaattagggctttaaaaccacag

SEQ ID NO: 392136 - DNA, 587 bp, Homo sapiens
tttattatgtataataatatcttstgggtgcctcctatatgccaagcagtactctatgtattttacatttattactcaatgtaggactcacggtaagccccattaaatcagcggggtagatatcagtgtcatctttctctcacaggtgagggaaatggggtatgtcacatgtctagggtcccagaactacaaaatagcagagctgggacttgaacccatgttgcctagttccagaactcagattcttagctatcagatcatattgcctctcatgcttaccaaagcataaaaagtcaaacagaaaaatgaaaatccagtttggaggcagaaatttctcttaaagtactggtaattgctcttacaggaatctagaaatatccaatatctctttctggggtccatggtgggtgcacaggactccacaaaaggtacaaaaggcatctttcagttccttctggttcatagactcagtattgctgtgccacatcaggcagcaacagggcttgctgcacttcctacacttgtgtgagaaagaagttaatgtgcctttggagcaatcattccctgttgataataagctatgtcag

SEQ ID NO: 392137 - DNA, 587 bp, Homo sapiens
tttattatgtataataatatcttgtgggtgcctcctatatgccaagcagtactctatgtattttacatttattactcaatgtaggactcacggtaagccccattaaatcagcggggtagatatcagtgtcatctttctctcacaggtgagggaaatggggtatgtcacatgtctagggtcccagaactacaaaatagcagagctgggacttgaacccatgttgcctagttccagaactcagattcttagctatcagatcatattgcctctcatgcttaccaaagcataaaaagtcaaacagaaaaatgaaaatccagtttggaggcagaaatttctcttaaagtactggtaattgctcttacaggaatctagaaatatccaatatctctttctggggtccatggtgggtgcacaggactccacaaaaggtacaaaaggcatctttcagttccttctggttcatagactcagtattgctgtgccacatcaggcagcaacagkgcttgctgcacttcctacacttgtgtgagaaagaagttaatgtgcctttggagcaatcattccctgttgataataagctatgtcag

SEQ ID NO: 392138 - DNA, 549 bp, Homo sapiens
cacgcaataatcctctgcagttcaggatactctccagggcaactgtccctgccatggaaactccacaaaactcaggctttcagaggctgccctgacctctactyctaccccccaccacccccccaacacattgcacgatccgaaacacacggcccctttggcaggtgtggcagtgggagacagcaggaaatcccatacgagtgatgggaactaatggggactacaaaagatatgtcattcctgcttgcattttgctggccatctctagtcacttctaggcaatgcctgatctcaaggaacagaggaatcatagtccctgtatatctggaagtggaggagaactagatatttacagcccttatcttctgaactcctaaaattaagttctagttctaagtagcctcagctttccagctttccaagagctaaggaagccaggtgattgattaaaggacttggatatagcacagaaataacaaaagcattgaaaagggtagaaaggagagttttgctttatccgtgtcacccctcccacagatcagagagaga

SEQ ID NO: 392139 - DNA, 506 bp, Homo sapiens
ctatgagctcaagcacagtaggcttctggaggggctttgagagaaagatgggaatacagaggagaatgaaaggacagaaggaattattgaaaggaagaacagaaggaatgaaggctcagagacagggacatcctcagtttgcttaggtctttggaaatgggtgatcagtcaggatacttggaaggaatcaactcttatctgacagtacttgacaagtagatattctgttgagttaagtattttcataatagagggtcctatatataagatgtgactataaagttatctgactttattccttctgaccaacacatcataacctagtcarccacatgagtgtttgcccctttgagacagtcaccttgggaagccaccttcttacctgaatgtgttggcattgctgcagctgctttggtcaatcttctttagagcctggagcatggcctttaccagtggggccaagactatgtattcaaatggacaccctgtctttggaatagaaagct

SEQ ID NO: 392140 - DNA, 551 bp, Homo sapiens
gtactgctgctatggctggcacttgcaaataagcagaaatctcaccgccatcgtgtaatgaactgttttgcctcagactatctaccagtgttatgaccagtggcctaggagcacagtagtccctgcagtacagcagattcctatccttgaaagacaagaggaaaaagctggggcccaatatcagccctccagaattacagtatgcagtccaagaatcctggaataaaccttgacccgctagaatattctggaagttaagtcagtgaactaaccataccatatgccaaaatcaaatccctagagacaccaaaaaatataaaagaaaaaagttcaaaaaacaagctacttcaaagattgtaggaactacaatccataaagttgataaagatctagtgcattatctctggcaagtataaagccacaggygacttactttcctacaaacacactgattctccaaaaatggttcttaaccaggctgaaatggctgaaataccagaaataaatttcagaatgtagatagaaaggaatattatcaagatttattcagc

SEQ ID NO: 392141 - DNA, 472 bp, Homo sapiens
taaaacaaacatatataaccaagtaactgttaagaacaggtttttcaatttgtagcatgtctaaatgcaataagtataacattactgccacaaaaatgaggaaaagggaaataaagatgtacaagagtgacatttctataagaagaatatagaaataagatgcaatattttagtacctgtatacattgtgtaataatcacattaatataattagcgtgtaccattatcacatatcaatcacaaacaaaacaatactttaaaataatactgaaaatccwttgtataaattaaaagtcataagaaaaactttcacttaatggaaataaaaaacagtaaaggtgaaataaagaataaaaaaagaactagaaaacaaaaagtaagtgtgcccatgtgttacaatctctccagtacaccacaacataacagtctcttattgtgaaatatcgcccatagtttttttggtcaaaggtgt

SEQ ID NO: 392142 - DNA, 609 bp, Homo sapiens
tatccaacagctgtataatggrcattcttctattctgtatacagattattatcaagaatagaccatatgtcaggccacaaaaaaagtcttaaaaaactcaaaacattgaaattatatcaagtatgttctctaactgcagtgaaataaaaccagaaataaataacaagaggaactgtgtaaagtataggaacatgaaaattaatatgcttttaaatgagtggattaataaaaatgttaagataaagtacaaaatttttttgaagcaaatgaaatggaaactagtatacaaaaacctatagaatacagtgaatgcagtatgctataaaataaaaaagatagtaataagcacctatatttaaaaagtagaaaagtttcaaagaacctaatgatgcattttttcttttattttagattcagagggtaaatgtataaatttcttatatggatatactgtgtgatgctgaggtttggggttcaaataataatgtgactcaggtagtaattacagtacccagtgggtagttttccagccctttcccctctccctgactcctttctttaatggcctccagcgtctaattattcttctctttatgatcctatgtactc

SEQ ID NO: 392143 - DNA, 606 bp, Homo sapiens
aataattatacatatatatgtgtatatacacatgtggatatatacacatacatatatgcaaatattagagcatctaaagatacaagagaaacattcatcaaactcaagaaagaaatagaaagaagaaatataagtagatagcaacacaataatagtaggaaatttcaatagctcactttcaataatggatagaacatctaaaaagaaaattgataagaaaacagaatgtgaacaacactatacaccaaatggacctaacaggcatatasagaacattccacgcaacagcagcagaatacacattcctctcaagaatgtactgaatattatccacaatagatcacattttagatcacaaaacatgtctgaatgaatttaagaaaattgaaaattataacaaatatctttcctgatcacaatggaataaaaatagaaatcaacagcagaaggaaaacttgaaaattcaaaaatgtagaaatgaaacaacacacttttgaataaccaataggacaaagaaaaaaattaaaaagaaaattaaaaaatatcttgagacaaacaaaaacaaaatatggtatatcataccaaatcttatgggatgtagcaaag

SEQ ID NO: 392144 - DNA, 523 bp, Homo sapiens
gttacttaattaagacaagggaataaagaagcaaaaaattcaccacatggtacatgtttggagccagcattttttggttaccatgaaagtcaaaggagacaaaagccatgcccaggataatgagctgccacaggcyctataatgccaatagatttagtccttgaggttttctcttctagtgatagccctctaccatcaattaagaaattgggaaacatctatttgggaagaaaaagaacaaaattggctttagaaacttcaattctgggaggaaaaaaggttaaattatttacttagggttttgtttgtttgtttgtttgtttaatccacagggacttattcttgtttttctgtcatggctaaaagttcctaatactcactacatgcatactggactcataaatctcaactataatctgtttgtcaagaatttgcactggataaaaatattttttattttggtcagttacactgtccggaaaatctgtgatttaaaataaataaataatacagacttaataat

SEQ ID NO: 392145 - DNA, 523 bp, Homo sapiens
gttacttaattaagacaagggaataaagaagcaaaaaattcaccacatggtacatgtttggagccagcattttttggttaccatgaaagtcaaaggagacaaaagccatgcccaggataatgagctgccacaggctctataatgccaatagatttagtccttgaggttttctcttctagtgatagccctctaccatcaattaagaaattgggaaacatctatttgggaagraaaagaacaaaattggctttagaaacttcaattctgggaggaaaaaaggttaaattatttacttagggttttgtttgtttgtttgtttgtttaatccacagggacttattcttgtttttctgtcatggctaaaagttcctaatactcactacatgcatactggactcataaatctcaactataatctgtttgtcaagaatttgcactggataaaaatattttttattttggtcagttacactgtccggaaaatctgtgatttaaaataaataaataatacagacttaataat

SEQ ID NO: 392146 - DNA, 600 bp, Homo sapiens
tgagcttcaaacttagtaaagtcaaattgctcaagtgggatggaatcaggcctctgtggaaaggagagtctaatcaaagactgaggtgtacctttacacaagcagttctcagaagagatggcatccaacgcagcagagatctgtgactactagaaggcacctggaagctggcttactttgttttgtcagagaagtggctagtggagtgcagcctaagctctcagagtatctgtgaaactctggagtttctatgtatttgaagttcagcagctgacatgtgcggtctcataatgtgtgatgtcacattctcaagacagcaggaaaaccctccaagttctcctcacagcaaaacatgtcactcacatagaaaaccacaaaagtggaatcatttcaaggctccataatactggcacagtatctggcacagagagggcatttgagaggcactgggtttgcaacaaatattttaagggatctaggtttcsgcctttggttttttctcttctctagctgttatccaaacctaattagtgtccccttatgacacggattggtaagcaattcttcctcatattctggcataaactatacacgtgaaca

SEQ ID NO: 392147 - DNA, 600 bp, Homo sapiens
tgagcttcaaacttagtaaagtcaaattgctcaagtgggatggaatcaggcctctgtggaaaggagagtctaatcaaagactgaggtgtacctttacacaagcagttctcagaagagatggcatccaacgcagcagagatctgtgactactagaaggcacctggaagctggcttactttgttttgtcagagaagtggctagtggagtgcagcctaagctctcagagtatctgtgaaactctggagtttctatgtatttgaagttcagcagctgacatgtgcggtctcataatgtgtgatgtcacattctcaagacagcaggaaaaccctccaagttctcctcacagcaaaacatgtcactcacatagaaaaccacaaaagtggaatcatttcaaggctccataatactggcacagtatctggcacagagagggcatttgagaggcactgggtttgcaacaaatattttaagggatctaggtttccgcctttggttttttctcttctctagctgttatccaaacctaattagtgtccccttatgacayggattggtaagcaattcttcctcatattctggcataaactatacacgtgaaca

SEQ ID NO: 392148 - DNA, 598 bp, Homo sapiens
ttactaattatggatttgtctatttctcatttcagctacattggttttgcttcattgttattgaatgtctattgctttgtgtaaacacatttagaattgctatggcttcttggtggactgatccttttatcattatgtaatgttcacttttgtccttttgtccttagtaaaaggttttactctgaagtctacttttgttgatattaatatagccactcctgcttttcaaaaattaatgtcagtataacatacacatttttccatccttttactttcagcttacccatgttgtatttgaagtgagttctttgaagatagcatatagttggcttatggtttttaattcactctgccagtctctgcctttyaattggtatatttagacaataattatgttaataactgttaggggtcataccattttccgcctgcgtttgttttctgtatgtgctctatgtttctaatttgtttctttcttcttgccttactgtgggttacttgaatattgtttagagcttaattttgatttatttataagattttttactatgtctcttggtatagttttctttgttggtgctttaggtattaccatata

SEQ ID NO: 392149 - DNA, 577 bp, Homo sapiens
gcagtgagctgagatcgtgccactgcactccagcctggcgacagagcgagactccatcttaaacagaacaaaacaaaccaaagcaagaaacaggagactcagatatcctgtatccattgagaaaattatcattactgtkaatcttttttctctagtggcgattggacttttctgtaacttggtattctgcagtttgttttatttgcttgctcaggacttaaggtgcttctttaatatgaagaaatatatttctttaattttgtaaaaatttcagttattatacatttgaatactgccacttcccacccaccttgttctttacttctggaacttcgatttatgtgtgttgagcctctaattccatagagtatttgcgaagtcagaaatgtaacatatactcatttaacatgatctcgggttcatcgaggaataatttatacacagtaaagtgttctctttaggtgctctgttcgatgagttttgacaaatgtatgcgctcatgtgagtgctaaaaagatgtagaatattcctatactcagataatttcgctaatgcacctttgtatttaatccccttc

SEQ ID NO: 392150 - DNA, 600 bp, Homo sapiens
ggtactgtttggttacttgagatgggataattgtgatgtcatgaatgtttgttcygtactgatggcttcacaaataaggctgaatactttgctaaaattgctgcaaagatcaatcaatcataaaacatccatccaatcccaggatcctgactgattccagctcagatattaactaaatctgggaaggacagtggagagccaaaactaagttaggaagaaatataaatatgtccagaaactaggcaatcttgtatgagcaatgtcagtgtattcaaaaaagtcactaaaagcaataaataagtgacaaaccttatcatctaaactatagaagttttgatagtgaaaaagagttctattaataactatcaggacaacataaactgagctgttccagaaaataatttgtaagatcactcttgttaggtagagagagggtgggctacagagaaatacacatcaaaataagtgtgtataactgagaaacagttatgaatgaggaaacaatggtgtgacaagaaagttaagatgaaatgctagtacagtcacaaggtcacagaagtccacaggtgaagagagtcaattgagctgctcagagacaga

SEQ ID NO: 392151 - DNA, 600 bp, Homo sapiens
ggtactgtttggttacttgagatgggataattgtgatgtcatgaatgtttgttctgtactgatggcttcacaaataaggctgaatactttgctaaaattgctgcaaagatcaatcaatcataaaacatccatccaatcccaggatcctgactgattccagctcagatattaactaaatctgggaaggacagtggagagccaaaactaagttaggaagaaatataaatatgtccagaaactaggcaatctygtatgagcaatgtcagtgtattcaaaaaagtcactaaaagcaataaataagtgacaaaccttatcatctaaactatagaagttttgatagtgaaaaagagttctattaataactatcaggacaacataaactgagctgttccagaaaataatttgtaagatcactcttgttaggtagagagagggtgggctacagagaaatacacatcaaaataagtgtgtataactgagaaacagttatgaatgaggaaacaatggtgtgacaagaaagttaagatgaaatgctagtacagtcacaaggtcacagaagtccacaggtgaagagagtcaattgagctgctcagagacaga

SEQ ID NO: 392152 - DNA, 365 bp, Homo sapiens
agagtaaaccctaatgtaaactatgaactttgggtgataatgaagtgccagtgtgggttcgttaattgtaacaaatgtacygctgtggaacaggatgtccacagtgggggaggctgtgggtgggtagaggtagtagatatactgggaactttgtactttctgctcaattttgctgtgaacctaaaactactccaaaaaataaagtccaacaaaataaaaagacagttaaggctaggttatgaagttttgtattctatctgatcaaggaaatggaacctgaagattaaagcaccaatttggggccaaagcagaacatgccaaatcatgagtttgattctgttggggtcatttccttgtaatttttc

SEQ ID NO: 392153 - DNA, 365 bp, Homo sapiens
agagtaaaccctaatgtaaactatgaactttgggtgataatgaagtgccagtgtgggttcgttaattgtaacaaatgtaccgctgtggaacaggatgtccacagtgggggaggctgtgggtgggtagaggtagtagatatactgggaactttgtactttctgctcaattttgctgtgaacctaaaactactccaaaaaataaagtccaacaaaataaaaagacagttaaggctaggttatgaagttttgtattctatctgatcaaggaaatggaacctgaagattaaagcaccaatttggggccaaagcagaacatgccaaatsatgagtttgattctgttggggtcatttccttgtaatttttc

SEQ ID NO: 392154 - DNA, 500 bp, Homo sapiens
tttttgcttataccccaaatcctttgcctttttgttttccttttggcaacaatctaaaaaggaatccaaatgtggcactatgtactttttaatgcccagactcaagcagccaatcactgctggagaaagccttgtgcgaattgttttcactaccatttcataccatacccaaatggatgttcaacacagaccaaaaatccaaatgtgttaacttagtgaatccatttcccttctatccatagcagctgtttcaaaccttcctcaatcttcttttctgaagcttccttcctctctctagctgaagatsgttttgtttcctattttagagaaatagaagacagcacctccctcatcatatgcactcatcttattttccctcccacctgttacaataaaaaaaaactgttctttttttttcaatatcggggtagtcctacttgtgttgtgagtatcattgtccccattttcttagaaaccttggtttattattttatcttcca

SEQ ID NO: 392155 - DNA, 479 bp, Homo sapiens
ctcagttgctcccctcaccttactgaagtgactarggtttttaattaagcgtcattctatgtgaattatttaaactcatggctcatgttctttcttttcaggagtttgggaaaaaacagtcaacacagaagaaaatgtttatgctacacttggctctgatgtcaacctgacctgccaaacacagacagtaggcttcttcgtgcagatgcaatggtccaaggtcaccaataagatagacctgattgctgtctatcatccccaatacggcttctactgtgcctatgggagaccctgtgagtcacttgtgactttcacagaaactcctgagaatgggtcaaaatggactctgcacttaaggaatatgtcttgttcagtcagtggaaggtacgagtgtatgcttgttctgtatccagagggcattcagactaaaatctacaaccttctcattcagacacacggtaagcataactggtagaggg

SEQ ID NO: 392156 - DNA, 604 bp, Homo sapiens
  misc_feature (1)...(604): n = A,T,C or G
agtagggcttttcatcacagaccgaagaaaggatacrggatagaagaaccaagtacctcaaatatactttgtatctccaaaattcagattaacattttcaggctactcttcatgcatcctctttgaagctaacacaaacacagaagaaagggaataaggttaggaccagaacaaggctgtgaaatgaggcaaggagctgccccagggcacaaaatttaaggaggtactcactgctgggtgtcaacatttcacttgcaagactttgagaatgccactttacctgatcctagtccaggctcggngaggagctgacacagagtcattttctaaaggaacttacggatagctgcactcatccagtttaaatgaagattttatgaaatcttcacactgatacagtcttctcatcttagcagtaagatgtcagactttcttaaataaaaattaaaatcggccattagtcctgcccattccaaaccccaaatcgtgctgcagatatacagttcatagaagattatgaaggagaagctctagtcagaagaacagaatgcttccatttgttaggagagggtaacaatagtttttaactgaaagtcaagtgtat

SEQ ID NO: 392157 - DNA, 593 bp, Homo sapiens
tggatgtgagagctaggtggggcgttacctgccaaagtgcatatccaagacaaaagcagcaggagaacagtgaccaaactgtggcacagtgtgcagcaacactgcttatttcttaggagttttgttttgttttaaaaaatcccttcttagaacctgacctggagattctgtaactatataagaacatgtctgactgtctcttgatatcatgcagagaattaaaaaattttatttgcattcctcatagccatgtttttgaaagattcatattgatcatatatttccagatgtgagaaagcttgctttgtaccttttgttttaaggctaagtttatatttcacaacatagcaaaatctcttcaatattcaatagtgtgttctaaatcatgagatactatgtaggcaagtaagatgacaaactctgtgatagggagttgatggctttgtttgctgattgtttattccttcttcaatgtraatgtttattattatcaaatcttgcaagtatccagagttacactataatgacccatgtctccaggaaataagatgaaatttagaggtaaacactacttcacacaaaatgttttgttt

SEQ ID NO: 392158 - DNA, 539 bp, Homo sapiens
agtttctggacaaatgtgtaattgctctccatcaattcacctgcagcacaaagagcctttaaacacagtagtgacattaactggacaatataggccttcaactacatctaaacacatttgaatcagcttcatcatttgaatsagcttcatcatttgaatcagcttcatcaatctgtgtggtcaggataacgtgggcactgaccttcagcccagcataaaggagacatgaggtgtgaaacctaaacctaaatctaaaccctgcataaaatttttctcatgtgggaggcagattgtttggggcatgtgctgactaaatggggaataataatgtgtattgctggattactggtccagaaagggtttcaggactcccttggggaagatgacagtaagcaggacagagctcatcacgcatcatgtggtgagcttgtagatactcaataattatgaaataaactgaaaaataggtcaactgatagcttttaccctgaggaatctcaccccaaggggagtaactgaatagatgaatacccaaagta

SEQ ID NO: 392159 - DNA, 611 bp, Homo sapiens
agagatttggagaccaccccaaaagagcacaaaataaattgtgtaacaagaagttttggttggctctactttgaggatagtatgaaccgtgagttggccctaaaacaaatccattttcctacaggatttgaggttgtgggaaaccaaggaccaagctgaatctaccaaggctgactcaatcatgaaaaaaaaaaaatcatacaagaccaaaaytgtctcttaaatgagaatcgtttatttttgttttgttttgctttttcccccctctgagtggccatggtgaaaaataaaaagacactatgactgtggtggttccattagtaggtttcactcttaaaaaggctcatcatttctctagccatctctcctcctgcaaatcacaaaagccacaaggaattccagaatcacacatgtctataaacagaaagatcatggattggttaagagtatgaatacaacagccagactatctggatttaaatactgattctgccctttacaagcagtgtgactttggacaaattacttaacctctctgtgcctcagtgtccttctctgtaacacaggtaatctatgcaccacctcatttcttagtgtgagaaataaattaa

SEQ ID NO: 392160 - DNA, 611 bp, Homo sapiens
agagatttggagaccaccccaaaagagcacaaaataaattgtgtaacaagaagttttggttggctctactttgaggatagtatgaaccgtgagttggccctaaaacaaatccattttcctacaggatttgaggttgtgggaaaccaaggaccaagctgaatctaccaaggctgactcaatcatgaaaaaaaaaaaatcatacaagaccaaaactgtctcttaaatgagaatcgtttatttttgttttgttttgctttttcccccctctgagtggccatggtgaaaaataaaaagacrctatgactgtggtggttccattagtaggtttcactcttaaaaaggctcatcatttctctagccatctctcctcctgcaaatcacaaaagccacaaggaattccagaatcacacatgtctataaacagaaagatcatggattggttaagagtatgaatacaacagccagactatctggatttaaatactgattctgccctttacaagcagtgtgactttggacaaattacttaacctctctgtgcctcagtgtccttctctgtaacacaggtaatctatgcaccacctcatttcttagtgtgagaaataaattaa

SEQ ID NO: 392161 - DNA, 554 bp, Homo sapiens
acatgcacagatacttagctatgacgttagcctcagcctcaacctccactgggcccaaatctcaatacatgctatcgttcaccagtcataaatatcttgcaaaacatgcccactgacacttcagacccttggagcgtgctgcttgcacctgcaagctcctctctcagacatgtttctgaagctgaggagttggtttcyaacacgtgatctgacctgacctccactagattgacaggtagcttctacatctctctcctgcctctaggaacttaggagcacaggcacactaaaggtaatgctagtgaaatgctttagcgtcctgcaactttgcctctgggaaaatcgcaaaccactttgccaatgctgactaaccccaattagagtttcaaaccaggcctgcagaggagggattatttgtagacattgtaataggtgggtgtgtttgtgtgtgtgaaaagaatttgaacacgcatcaagaaccaaatttaggtggaggagatctgtgactaaatttattttagtatttacatttgtggttaagcaggagtccttcc

SEQ ID NO: 392162 - DNA, 640 bp, Homo sapiens
taatatcttcacagaaacgtatcagttttccataattctccacaacattcttgagaggtagccacagacttacccaaagtcacacaagggtttatgtctacaatggcctccactcttgcatctagttaactgcctcagacactaaatattcagccacaaaccctgcctgaggggagtcacttcagttccacaactgattgacaaaaataatgtcaaacattaccttgtcctacatgacccaactccttccctaaagggagttcagaaaaataggacttcagcattactaggcttctaactaatgactataggagccaggaaccactgcacaggcccgaaagttgtatgtggtgaccatatgacaacatttctgcaattagaggagttatattcagacttaaggaagagtgaatcatattagataaaaattacatatttctagartgtgtagacttgaaggggaaaatttccatgttttccttggtgattactttataactttattcttcctcaagaatcactcaataacttgtttcatagttatcatctccttcttccccatagacctccagtgatgagggaagctccctccaaagccacaagctttgtacatagagtggcattggtatcatcaggtttg

SEQ ID NO: 392163 - DNA, 640 bp, Homo sapiens
taatatcttcacagaaacgtatcagttttccataattctccacaacattcttgagaggtagccacagacttacccaaagtcacacaagggtttatgtctacaatggcctccactcttgcatctagttaactgcctcagacactaaatattcagccacaaaccctgcctgaggggagtcacttcagttccacaactgattgacaaaaataatgtcaaacattaccttgtcctacatgacccaactccttccctaaagggagttcagaaaaataggacttcagcattactaggcttctaactaatgactataggagccaggaaccactgcacaggcccgaaagttgtatgtggtgaccatatgacaacatttctgcaattagaggagttatattcagacttaaggaagagtgaatcatattagataaaaattacatatttctagagtgtrtagacttgaaggggaaaatttccatgttttccttggtgattactttataactttattcttcctcaagaatcactcaataacttgtttcatagttatcatctccttcttccccatagacctccagtgatgagggaagctccctccaaagccacaagctttgtacatagagtggcattggtatcatcaggtttg

SEQ ID NO: 392164 - DNA, 554 bp, Homo sapiens
gctccactgctctgtgcagccttggtacatggtgccctgcatcccagccactccagctccaactgtgcctgaaaggggctcagttacagctcaggctgttgcttcagagggtgcaagcccaagccttggaagcttccatgtggttttggacctgcaggtgcgtagaaggtaagagttaaggtttgagaacctctccctagatttcaaagaatgtacgaaaatgcctgaatgtccaggtagaagtctgctgcaggggcagagccctcaggaagaacctctactagggtaaggcaaaggggaaatgtgagcttggaacccccatacatagtccccactggggcactgcctagtggagctgtgagaagagggctactgttctccaggccccagaatggtagatccactgacaacctcaccatgcacctagaaaaactgcaggcactcaatgayggcctgtgaaagcagccaagaggactgtactcagcagaatcacaggggcggagctttccaaggccttgggagcccaccctttgcatcagtgtgacctggatgtg

SEQ ID NO: 392165 - DNA, 573 bp, Homo sapiens
aaaataccctgcaccactgatccttgccttattctctaagagaattgctgcttgggaattggtagggatagcagtttrttttatgataaggtcagcaaacagcttaggacctcatcccactgtaatttctgctgctaaaatcatctttgctgctactacctggtattacctatgcatcttcactcacctctctctatggcttctttatctctgtctaaaatatatttaagtggtacccctttgtcttaaaacaaaacaaagtacttttccttacatgccttactccacacacgattgtcttctctttcctccttgctatcaaattcttgaaagtgtaggccagtcctgccgcctttgtctgctatgacatacttctttccatctgagtccactttctctccttctgttgctactctaattcaaatggccatattcttcttggtttctatgtgggtttgccaagtcagtttgtttgtggaaccttccattcccttgtgctcagtgtatatttctgcacatttctgggtgttcccatccttcctttaccttctgtctgcttttttgactcgtctt

SEQ ID NO: 392166 - DNA, 620 bp, Homo sapiens
actatacagataatatacaaaaatatatctgtattttatgtgtgtaaatgtatttatacatacaaatataaaagtttaataaataaatgtatagtaactaacaaaacaacaatgataaaacatatacatccagctgaatatatatatgcatatatacataaaacttatgcatagtaaatcacatttccagctaaatatatatgtgcatgtatatgggtaaataataataaygaataagatgatagtaaagcaatgtttaaaactccaaatttagacatagaatgctatacgtcatgttcacactacctctgcacccttatttgatcaccccgccataggtcaaagctatctgggctttgctgtataactagaggtgtttgctagttcgccggcctcttcctaagtgggaggttgactggctttgcttggctttgagctttacggaaatggaaccccactgtacatgctctgcttccttttttttttcattttggcttccactcctgagcttgtattactgtgctgcaaacttggatggactgctgagtattgtatccaagcaatcgtatgaaaatgttttaaaatctattgtgatttttgttttgttttggggtaagtaa

SEQ ID NO: 392167 - DNA, 571 bp, Homo sapiens
acaccacttcttggattgcatgctgcttatatacgcatatgcatgtttctgcgaagaactcaagaactcaatgaggagatcttttatcttaattgtatcttggtctctgctccgacatgtagcagaggctcaataaattttattaaaacttagctcagggtcttctagtcctgagcatgaaaaattcgctgatattaaatgyagactctgttgaaactatagtaaaacctggatagaggatataaacagccatgtagaagcaacagatgccaatgagtgcagggttgtaattcttgacagaaggcatcacgtggctgctgggagccaggtctccatgatttcctgtcttgctgcgtgtctagacaataggggcgtggattggcatttgtttcagacaatcattcaaagattgttacacagcagaaagtgctcagagatagtctcctccagagcaaaggtcaggcaggtttatagcacaacgttatgtaaaaaacacaatcagtttccctagcattgaagggttcctcagctgtgagtcagttactccacctacctggatctgtgtaaatca

SEQ ID NO: 392168 - DNA, 510 bp, Homo sapiens
cgtttgcaatgggaaacagacactaacatgacctactagtggggcttttaggccaattcaaccaccgcttttgtttctgcatctgcagtggtgcatactgtgtgtcaccttgatggtctaagggatacccagacagctgatcacacttcatttctgggtgtgtctgtgtgggtgtttccaggagagatcagaatttgaatccaaggcctcctacacacaagcttaaattcacatccatgtctaccgccttcacaycctggtccccacatctcaggagggagttttggtccctacatgaaactgtttccaggaaggtgtcatctcctctcagccgcttcctgagtagcaatcaggacaagagggggctctagagacctatttttaaatttgtggatttcactctgaccattcctgcattttcattttccacctggcagcaaccgttagccagcctggctgatgccccggctgggagcaggccagaccacagggggtgcgcgatttgaggcc

SEQ ID NO: 392169 - DNA, 531 bp, Homo sapiens
gtttcattgatttctttcttcaacaaatacaaatttagctctttatatgtagtaagcaatatagatgttccatctcttgaaaaagtgttctgaatacccatcaatttgcaaaactctgctaactgtaaaatgtcaaaacttggggacaaacaactttagtgaaccagatcctttccttgggattaatgtggatgccagaagaaaasaattattttggaggaactataaactccttgtacattttttccatatatggataatacattacctggaggaatctggaaatgccaaactactctaaaatactatttgaaatggtagcattaactacaaataataagaaataagttatgatcccctgaaataaaattagataggttaaataaatatcagtacataatacagatatttcacttaattctggttaaaacagaaaaactgtcatgatattattttttcaaaactcatgaaatagcctctttaaatatttgctttcttatattcacttttgaaatacacagtagagaaaat

SEQ ID NO: 392170 - DNA, 531 bp, Homo sapiens
gtttcattgatttctttcttcaacaaatacaaatttagctctttatatgtagtaagcaatatagatgttccatctcttgaaaaagtgttctgaatacccatcaatttgcaaaactctgctaactgtaaaatgtcaaaacttggggacaaacaactttagtgaaccagatcctttccttgggattaatgtggatgccagaagaaaacaattattttggaggaactataaactccttgtacattttttccatatatggataatacattasctggaggaatctggaaatgccaaactactctaaaatactatttgaaatggtagcattaactacaaataataagaaataagttatgatcccctgaaataaaattagataggttaaataaatatcagtacataatacagatatttcacttaattctggttaaaacagaaaaactgtcatgatattattttttcaaaactcatgaaatagcctctttaaatatttgctttcttatattcacttttgaaatacacagtagagaaaat

SEQ ID NO: 392171 - DNA, 590 bp, Homo sapiens
ggcgggttgtcttttccctaaatattcataataccccttccacagtgaattgacgaaaaagacatctgaaggaactgtgggaaggggggaaacagaccaatgtcagcacacacacaaacaataaattcagacattaktaaacacagaaggcatcatactgcttagcgagcgatcacagatgagggcagtgatgaagacaagaggagcctagtgcatcgctgttcacagcacgtgcaaaactcaaaagaagcaggtgcgaagattattatggtatgcaagtagacacttgtgcttatgggtttcttttattattattagaagccaaagcatacctactttaacagcccttccaagctcatgggctatggtgaactggtacttctaatgctagtttagtttttattgtgcttagcaagaaatatgtttacctgacccatgaaatcactactgatatttcaatgatatccaagtctactctttgaaagacttggaaggctccaaagaactgatatatataatacgagagcaatgccctgtctcgaaaaagcttacatatcccagcaccaagtggacttatgaagacaaagccc

SEQ ID NO: 392172 - DNA, 577 bp, Homo sapiens
caacttaaattaatataatttgggatacattttgttatttaaaaataatttaaatttaaaacacagaacatgcyagatgattttgtatagtaaaaactttccttgggaaataggactgcatctttgcgatttgctatataatgcttttagcaaaaggcgccacatacaacaaaaaactataattaacattttagaaggcaaagcatgcctagatgaatggagacacttggaaaaaaattgggctccatgtctgaactgtttacattaacaacttatgctgtgaaaatgcctcattgatatgagcttcctcatttggaggaaaaaagtcgcaaccctctttataaggctctccattataccacatggaacgaccaatgttttcatttctgcctaccaaatgccgaaggcaagtttgaatgaaacagggtgtgataacaccaaaggttttctttttaagggaagtaatgttatttcattaacaaaccattgttgtgaaataaacagaattccatgtaagcttggtgttttaaataattgaaacattaacttggtcgtggactaacggattcagaaattt

SEQ ID NO: 392173 - DNA, 588 bp, Homo sapiens
ttgctgcgtgacaatcttccatgctcacaactcagcgttcccgaagaattttcacrtatagtggagagccttctccttaagggaatgttaacaaaaacctcattcctgaactaaactcattagtagcaaggcgttgacctcatcttgggaaagaaagcaaaggtagagctctgctgtccttgaacggtgtttctgcttccagcttctgaaattctagaaagtctgttttcctgcctctggttttatcaactgtattctggtgtttctgacacggagcggggtccagtcacaacccccacacatcatttatcatcacatgtctaggtgtctcgggccacaaatttgttttctaaattgtcagctgcctgctgcttgcgggctgggcacgagctgttctatcacactttgctatttgtcccttgaatgtcatcgtgtacacgtggcattttccagagtcactggattccagctgaaatcattgttgacttttaaaaaaatgattttattaatatctgtagctcaggttgtgacactttggccggggagtcccttttacacagctttttcatttggtccctctaacatctc

SEQ ID NO: 392174 - DNA, 588 bp, Homo sapiens
ttgctgcgtgacaatcttccatgctcacaactcagcgttcccgaagaattttcacatayagtggagagccttctccttaagggaatgttaacaaaaacctcattcctgaactaaactcattagtagcaaggcgttgacctcatcttgggaaagaaagcaaaggtagagctctgctgtccttgaacggtgtttctgcttccagcttctgaaattctagaaagtctgttttcctgcctctggttttatcaactgtattctggtgtttctgacacggagcggggtccagtcacaacccccacacatcatttatcatcacatgtctaggtgtctcgggccacaaatttgttttctaaattgtcagctgcctgctgcttgcgggctgggcacgagctgttctatcacactttgctatttgtcccttgaatgtcatcgtgtacacgtggcattttccagagtcactggattccagctgaaatcattgttgacttttaaaaaaatgattttattaatatctgtagctcaggttgtgacactttggccggggagtcccttttacacagctttttcatttggtccctctaacatctc

SEQ ID NO: 392175 - DNA, 600 bp, Homo sapiens
ggttgtgacactttggccggggagtcccttttacacagctttttcatttggtccctctaacatctctgaaatggtccttgttttctcataaaaacaggatgttgtatggttatctggaatttttcttacccaaacacattgttctccaaaaagccctggtatcgtctggtggagaatggtatcagagaaccaattccacaccagggaatgcagtgtgctggggaaagctgacatggagtatattgttacttttgtgaccaaactgaaattttctgctttgtcttttttttccccccaaaaggcctgatrttgatattgtcaatttattcttatatctactatatatattttaaacatttaaaaaaaatttttaaattgtactaatacagggcttgtcaatctttttttctctttttggaacataggtttgccgtcttagatgtcgtagtgtgtgactttttgtttaaattgggatgctggctaaaatttacaagccttaatggccgctttctcctctttttatctcttgcctcaatgttttggaaatgacatcagagtacagaagtctagaaacccctttaccaaggtcattcagcagac

SEQ ID NO: 392176 - DNA, 519 bp, Homo sapiens
tgttttctcataaaaacaggatgttgtatggttatctggaatttttcttacccaaacacattgttctccaaaaagccctggtatcgtctggtggagaatggtatcagagaaccaattccacaccagggaatgcagtgtgctggggaaagctgacatggagtatattgttacttttgtgaccaaactgaaattttctgctttgtcttttttttccccccaaaaggcctgatattgatattgtcaatttattcttatatctactatatatattttaaacatttaaaaaaawtttttaaattgtactaatacagggcttgtcaatctttttttctctttttggaacataggtttgccgtcttagatgtcgtagtgtgtgactttttgtttaaattgggatgctggctaaaatttacaagccttaatggccgctttctcctctttttatctcttgcctcaatgttttggaaatgacatcagagtacagaagtctagaaacccctttaccaaggtcattcagca

SEQ ID NO: 392177 - DNA, 600 bp, Homo sapiens
ggttgtgacactttggccggggagtcccttttacacagctttttcatttggtccctctaacatctctgaaatggtccttgttttctcataaaaacaggatgttgtatggttatctggaatttttcttacccaaacacattgttctccaaaaagccctggtatcgtctggtggagaatggtatcagagaaccaattccacaccagggaatgcagtgtgctggggaaagctgacatggagtatattgttacttttgtgaccaaactgaaattttctgctttgtcttttttttccccccaaaaggcctgatattgatattgtcaatttattcttatatctactatatatattttaaacatttaaaaaaaatttttaaattgtactaatacagggcttgtcaatctttttttctctttttggarcataggtttgccgtcttagatgtcgtagtgtgtgactttttgtttaaattgggatgctggctaaaatttacaagccttaatggccgctttctcctctttttatctcttgcctcaatgttttggaaatgacatcagagtacagaagtctagaaacccctttaccaaggtcattcagcagac

SEQ ID NO: 392178 - DNA, 531 bp, Homo sapiens
acatactcctacctcaggtggatagtaatacagtatactgctggcatattttattattatgattgtacttctcattttatacaagtggaaatcaaggcatagagaggttagatgaattgcccaagaccacactacagacaagtgtcagaggccaatttgaaactgaattctgacccaaggtagttactttttataccgtaccaactagaatggcatttctttcatttactcatccaactttgttgaaatttgcctggagaacaatttcctttctaataaccaagaataaaatttatgttgttaacccactgcccattatgcttccttccygttcagtcttccagtcaatggcttcaacacgaaccttgaaattcaaataatctctatgtgagagaagtcactattcaaaaaagttacagataacccatacatggacaaaagcttgaatcaaaaaatcccctttcaattctggaactagaatagtttaattatagtttatttattgtttactaagtcccatactttttgtac

SEQ ID NO: 392179 - DNA, 627 bp, Homo sapiens
gtctagcatcctgtttttttaaaaacagtagtcctaatgatctgtcagaaaagaatatttttgagataaaggagtttctaaataatgaattattgtttagtaccagcttttggaatccttacattttaaggaacttgaataatttaattattagataatgtaactcctcataaaaacagtgtctagacaagggccaatattgcattgagattggatgaacattttattttgcatataattgttgtctayaaaacaaaatactaataataatggctaccagttagacaatttagaacatgtcttactatttacctttgtggtaaaacattgcatgttttaatttttttctaataaaatattatacaataacaaaactggacaatattgtgaaaaacaaccatttcagggctcttgaaattcaccaaaggcatacaacaaattgagaagcaattattcacaaaaaaatgctgaatgtaagttagtaggagcagtgggagtctatggtattcttatctggggcttctcctatccatgtcttctgtaccccattcccaaggtggatctgttgagaagtttatgagagcactgctgaatatgaaaaccagcagcttccctgccaaaggggga

SEQ ID NO: 392180 - DNA, 578 bp, Homo sapiens
caatctacaatagtggtgttatttgcaggagtaattggggaagttgcttgtcttataacctctggaataacagctgacaatcctttatgtctgcaccttagcaggactcagctgcctctcttccctgcagcctggtggcctcccattagcttttaaaagtagttgaattttgggcatttacactgtagcctaaatatcttccaaagttagctcagcccaacagcccacaattaatttagggaaacacaagatcgggggttagcttagctttctgttgtaatttttctcactgatataatttttgcaaaggtggtttcagtgaagtctgggtgatattgtacccaacaggtaatttttcatccctcacttccccctcaccctctcatcttttgtagtctccagcgtctgctctttcactctgtatgtccacgtgtacccatggtttggctcccacctataagcatgaacctgyggtatttgactttccttttctgcgttatttcacttagtataatggcctccagctccatctgctttaatacatctatgattattcaaactcatagtcctcaatgcct

SEQ ID NO: 392181 - DNA, 578 bp, Homo sapiens
caatctacaatagtggtgttatttgcaggagtaattggggaagttgcttgtcttataacctctggaataacagctgacaatcctttatgtctgcaccttagcaggactcagctgcctctcttccctgcagcctggtggcctcccattagcttttaaaagtagttgaattttgggcatttacactgtagcctaaatatcttccaaagttagctcagcccaacagcccacaattaatttagggaaacacaagatcgggggttagcttagctttctgttgtaatttttctcactgatataatttttgcaaaggtggtttcagtgaagtctgggtgatattgtacccaacaggtaatttttcatccctcacttccccctcaccctctcatcttttgtagtctccagcgtctgctctttcactctgtatgtccacgtgtacccatggtttggctcccacctataagcatgaacctgcggtatttgactttccwtttctgcgttatttcacttagtataatggcctccagctccatctgctttaatacatctatgattattcaaactcatagtcctcaatgcct

SEQ ID NO: 392182 - DNA, 580 bp, Homo sapiens
tcaggagtttgataccagcctgaccaaacatggagaaaccccgtttctactaaaaataccaaattagtcgagcgtggtggcacatgcccgtaatccaagctactagggaggctaaggcaggagaattgcttgaatctgggaggcggaggttgcagtgaaccgagatcacrcccttgcactccagcctggacaaaagagtgaaactccatctcaaaaaaacaaaaataaataaaaaataaaaaaagtgaatatacatttgttacaaagaatatagatgcatattcttccttgatacctaagaattcttttttaggagaaatgcagttccttcctcagggaaatcagagctattttcttacgtacattcttcctaaaagctgtaggatacaagttttgagctgctgttgattattggattattgcgtattaatttgatcatatattacttatatttacctagaattgcaaacattatttcatactgcttcccctgaaaatcacaacagtttcaatgattagaacttgaccacaggactagccatgcaaaagttgcaaagattgttggcaaatttcttcagct

SEQ ID NO: 392183 - DNA, 565 bp, Homo sapiens
tctttacttaaatacaccgccctccrcttggttgctcaattcaaaaatttaagagtcatgtttaatcctctttttccttcactcctcacatccaatctattagcatgcctcattggccataactctgaaaggtgtacccagtcaacccacttccatcatcaccactgctctcatcccctctcacttggagttatcctaatcagcttccttgcttcccctcctgctcacctcccacccacttcctaacacttagaatggtctttgaaagcatgcatcatcaggtcatgtcactacccacttcaagccctccaaaggcttcttggtgtgcttagaatcaatccaaatgctgaatcgtggcctataaggccccattgattcagctcctgactacctggttgacatcactgcctatcactctacctctcactgtctccacttcaaacaaatagatctcttttctgcaccttgaacatgccaacctaattccagaccatggtctttgctcttgctattctcttagctccaatgacctttctccagatctccttatgtacattccctccac

SEQ ID NO: 392184 - DNA, 565 bp, Homo sapiens
tctttacttaaatacaccgccctccgcttggttgytcaattcaaaaatttaagagtcatgtttaatcctctttttccttcactcctcacatccaatctattagcatgcctcattggccataactctgaaaggtgtacccagtcaacccacttccatcatcaccactgctctcatcccctctcacttggagttatcctaatcagcttccttgcttcccctcctgctcacctcccacccacttcctaacacttagaatggtctttgaaagcatgcatcatcaggtcatgtcactacccacttcaagccctccaaaggcttcttggtgtgcttagaatcaatccaaatgctgaatcgtggcctataaggccccattgattcagctcctgactacctggttgacatcactgcctatcactctacctctcactgtctccacttcaaacaaatagatctcttttctgcaccttgaacatgccaacctaattccagaccatggtctttgctcttgctattctcttagctccaatgacctttctccagatctccttatgtacattccctccac

SEQ ID NO: 392185 - DNA, 565 bp, Homo sapiens
tctttacttaaatacaccgccctccgcttggttgctcaattcaaaaatttaagagtcatgtttaatcctctttttccttcactcctcacatccaatctattagcatgcctcattggccataactctgaaaggtgtacccagtcaacccacttccatcatcaccactgctctcatcccctctcacttggagttatcctaatcagcttccttgcttcccctcctgctcacctcccacccacttcctaacactyagaatggtctttgaaagcatgcatcatcaggtcatgtcactacccacttcaagccctccaaaggcttcttggtgtgcttagaatcaatccaaatgctgaatcgtggcctataaggccccattgattcagctcctgactacctggttgacatcactgcctatcactctacctctcactgtctccacttcaaacaaatagatctcttttctgcaccttgaacatgccaacctaattccagaccatggtctttgctcttgctattctcttagctccaatgacctttctccagatctccttatgtacattccctccac

SEQ ID NO: 392186 - DNA, 583 bp, Homo sapiens
attctcctgtctcagcctcccaagtagctgggattacaggcgcctgccaccacgccgggctgatttttgtatttttagtagagacggggtttcaccatgttggccaggctggtctcgaactgctgacttcaggtgatccacccaagttggcctcccaaaatgctggrattacaggcataaaccactgcgcccggccagtatcatcactttggaagacagttcggcagtttcttaaaaagttaaatgtacacttaatatatgattcagttattccactccagtatttacacaagagaaaagaaagcatacatccccacaaagacttgtgctgaaatattcatagcaactttatttttaatagccaaaagctggaaacaatgcaaatgttcaccagtagataaatgtacaaacacactttgccatattcatacaatggaatactactcatcaataaaaaagaaatgagccagacacatgaaacaacatggatgaatctcaaaataattacgcttggtgaaataaatcagacgttaaaaagagtacacactgtatgattccatttatataaacctctttaaaatgt

SEQ ID NO: 392187 - DNA, 593 bp, Homo sapiens
aatgaatattcagtctgattagatcttccacttgacaatgactgtcattacctggctaacaaaataatatacatctgtgtatgtgaaaccacaatggctgatgtttcaaattcttaatacattataatctggttggattgagtggctaacaatgccacaatcccatgaggtaaacaaaacattcatctctggatttcctcacctcagatctaagcatctcctgtccatgcagtactgaagattttgcaccatcacttctgtttttctcataaattctttatgaggctattagtctctagggtgctcttctgaaaccagaaggaaatttggctcacacacacacacamaaaaagttgccatataaaggcaactgcaaaatatagtgggaagttggtggaggatggagtttcactgagaatgggacagcaacatgatggaaagaacatgaacttgaatttcagttctaccacttactagaaagatgcctttgaacaagtctcaatttctgaatcttcatttgttgctctgtaaaatggggtcatattatctcacaaagttgtcacaataattaaaatgagatcttgttttctaag

SEQ ID NO: 392188 - DNA, 553 bp, Homo sapiens
cctcctcctcctcctcctcttttatttgtttcattatttggaactccaagattcttccctggtagaaaataaaactctcctccaaggatcttaaaatgcttcagcaatatcttcagagaaatgtcatgcactcatttactgggaattttctctaagttactcactcgctcagtaaaaggggtagtaatagaatacacatctattctacctttttcaaaacttctattcattgttatctaatgtggtctagaaactttgaaagatgagtaaaaatgagctgagtttctaatcctaatagaataatacatctaatgctaaccatwatcatgttatgctgcttgataattttacctaaatgatttctaatatacatgaatgatgattacttgtatacaaacaagaaactttttctatctttgtcctcattttgttggtttttcaacgtctagaattagcagaaaaacccatggaattattattttagcatcaccatgtacacacccacatatacagcaagaaaaatatgaagtagattaattacccaggccttctc

SEQ ID NO: 392189 - DNA, 583 bp, Homo sapiens
attctcctgtctcagcctcccaagtagctgggattacaggcgcctgccaccacgccgggctgatttttgtatttttagtagagacggggtttcaccatgttggccaggctggtctcgaactgctgacttcaggtgatccacccaagttggcctcccaaaatgctggaattacaggcataaaccactgcgcccggccagtatcatcactttggaagacagttcggcagtttcttaaaaagttaaatgtacacttaatatatgattcagttattccactccagtatttacacaagagaaaagaaagcatacatccccacaaagacttgtgctgaaatattcatagcaactttatttttaatagccaaaagctggaaacaatgcaaatgttcaccagtagataaatgtacaaacacactttgccatattcatacaatggaatactactcatcaataaaaaagaaatgagccagacacatgaaacaacatggatgaatctcaaaataattacgyttggtgaaataaatcagacgttaaaaagagtacacactgtatgattccatttatataaacctctttaaaatgt

SEQ ID NO: 392190 - DNA, 614 bp, Homo sapiens
tgcgctatttgagggttgctcagcctgatttctcagcggcttcttcttgacatgaggataaattttacaacacattttaaaggcttcaaaggatctgacttggcctcccgctcagcagcacttctgtgttcagactaatctctgtaatctatcctctaacatactgaacttattttagtgccttattctctattttttattatttttatttttaaaaaatttttgtagagatgggggtctcactgtattgcccaggttagtctcawacttctgggctcaaacaatcctcctccctcagccttccaaaatgctgggattacaggtgtgaggcagcacacccagtcctcttagtgctttgactaggccatgctctctccctgctaggccttcttagctgagtctggggaaagggactgtattgtcaagtaagtttaagaaatttgtgtaccatcactgacccttacagtttcacagtacaacaaaagcaaataaaaaactatatgaaatccttgacttaattttgtctaaccccaaattccacaagcttatttttcctgtgtgccttttttcctgatacatattctatcctgaagaattggagttctatgatactt

SEQ ID NO: 392191 - DNA, 614 bp, Homo sapiens
tgcgctatttgagggttgctcagcctgatttctcagcggcttcttcttgacatgaggataaattttacaacacattttaaaggcttcaaaggatctgacttggcctcccgctcagcagcacttctgtgttcagactaatctctgtaatctatcctctaacatactgaacttattttagtgccttattctctattttttattatttttatttttaaaaaatttttgtagagatgggggtctcactgtattgcccaggttagtctcatacttctgggctcaaacartcctcctccctcagccttccaaaatgctgggattacaggtgtgaggcagcacacccagtcctcttagtgctttgactaggccatgctctctccctgctaggccttcttagctgagtctggggaaagggactgtattgtcaagtaagtttaagaaatttgtgtaccatcactgacccttacagtttcacagtacaacaaaagcaaataaaaaactatatgaaatccttgacttaattttgtctaaccccaaattccacaagcttatttttcctgtgtgccttttttcctgatacatattctatcctgaagaattggagttctatgatactt

SEQ ID NO: 392192 - DNA, 614 bp, Homo sapiens
tgcgctatttgagggttgctcagcctgatttctcagcggcttcttcttgacatgaggataaattttacaacacattttaaaggcttcaaaggatctgacttggcctcccgctcagcagcacttctgtgttcagactaatctctgtaatctatcctctaacatactgaacttattttagtgccttattctctattttttattatttttatttttaaaaaatttttgtagagatgggggtctcactgtattgcccaggttagtctcatacttctgggctcaaacaatcctcctccctcagccttccaaaatgctgggattacaggtgtgaggcagcacacccagtcctcttagtgctttgactaggccatgctctctccctgctaggccttcttagctgagtctggggaaagggactgtattgtcaagtaagtttaagaaatttgtgtaccatcactgacccttacagtttcacagtacaacaaaagcaaataaaaaactatawgaaatccttgacttaattttgtctaaccccaaattccacaagcttatttttcctgtgtgccttttttcctgatacatattctatcctgaagaattggagttctatgatactt

SEQ ID NO: 392193 - DNA, 519 bp, Homo sapiens
atggaactccaagagatataactgaaaaaccctctgccctcgcccctgttgccctcaggttgaggtggaaacaaagaggctgaatgctttcacacatctccaacaaggacaccgctgcccagatatgaagaactgggcagactgcacaccccacaactccctgcctttgcttgccacttctggtacccagtgcaagcaccctgcctccacatgagcatttcagctgcagtctagagtcctgaaatccctacccccacaggtcttccctcaggttcttaccacccaagcattctgcctgcccctgcctgagagttcatccagtgacccaggggccagcctgcccctctctatcgcagtcagcacctgaatcctgggctagcctgatctggctccagacccttcaggactcatacatgcagtccagcrgaccatctaggggcctggaaactgaggaactacctatcccattcaaattctgctggcacctgaccacttctcacacaagcccaaaggcatagc

SEQ ID NO: 392194 - DNA, 519 bp, Homo sapiens
atggaactccaagagatataactgaaaaaccctctgccctcgcccctgttgccctcaggttgaggtggaaacaaagaggctgaatgctttcacacatctccaacaaggacaccgctgcccagatatgaagaactgggcagactgcacaccccacaactccctgcctttgcttgccacttctggtacccagtgcaagcaccctgcctccacatgagcatttcagctgcagtctagagtcctgaaatccctacccccacaggtcttccctcaggttcttaccacccaagcattctgcctgcccctgcctgagagttcatccagtgacccaggggccagcctgcccctctctatcgcagtcagcacctgaatcctgggctagcctgatctggctccagacccttcaggactcatacatgcagtccagcggaccatctaggggcctggaaactgaggaactacctaycccattcaaattctgctggcacctgaccacttctcacacaagcccaaaggcatagc

SEQ ID NO: 392195 - DNA, 608 bp, Homo sapiens
tgtcacttgaaggtcccaaggcaagaagcaataggggtgggaacagccaagttagagaatttttcctttaggacattgacattccagttctatccctagcttccaaggaggcagagatagcaattatctggcaaaggagagccagaaagccataatatgtttacacaaatcctaagtgttccattgaaactggacatattgctgccaggaattatactgtggtcctattagcaaggactaaaggaaggtaatgcataatgtctgcagcattcactaattgtttcatgatatttaaatctcctatattctgattcttagcaggtagttggctaaaagacacttttaaatgagaaaacataaattttttataatcatatataaaggaggagagctacgaaaactctagccaaatcaaagctgtagtaatccaatggcaacttgcctgtgattctcttattctcattcaggaaaagtggtgttatctcagtccattatcttcactgagaagaacaagtatgggattcacaatgactgaactgmaaaacttgtttttactgagaaaaaaatgaattgtttctagtattcttataaagggatgagaaacctgt

SEQ ID NO: 392196 - DNA, 554 bp, Homo sapiens
agcatgacatgattggtataaagacctccttgggtggggtttgggaatctagcttaatgcccaaggagcaagtttctttccatagtaagagcagtgatcttaatatcttaaacccctaaaaccttataattgaggagcttaggttcagctagttgtggcagagctggatctggaattctggctactcaatctccagcccagcattctcttttagaatgagttgtcagaggtttcttctcatgtccaggatgatgccaatgtggtaatagtctagtgccaggaaggttgctggttatgatgacaccagacattgaatcattaaaaaaggaataggcctttgtgataggctgtgtttaggctgcgttttccaaagacggccacaccatccttcatcccatgtgtaacccacatatttctccaatgagtggtggggtctacgtcccttccacttaaagcttggcagaattctgtrgcttcctcaatcaatagagcagaagtgatgctatgtgaattttgagcctagattagcaaattcccttcatattcaccatgtt

SEQ ID NO: 392197 - DNA, 545 bp, Homo sapiens
actttttttttttttttttgagacagagtttcgttcttgttgcctaggctggagtccaatggtgcaatctctgctcactgcaacctctgcctcccaggttcaagtgactcttctgcctcaacttcccgagtagctgggattataggcrcccgccaccacacccagctaatttttgtatttttagtagagacggggtttcgccatgttggccaggctggtctcgaactcctggcctcaagtgatccacctgcctcagcctcccaaagtgctgggattacaagtgtgagccaccgcaaccgtccctgtatactttttacccacacagcatagccacattgcctacaacacagtgggtgttcaataaatgcctaaatgtttgttggctgaatttaaaataattaaagacctgcagtttatatgcataaaatcataaactctaatgggatcactaccacattgccaaatccaccagaatataagtcccccatgatgattttatctttccacagaattcttcttgaaggccatttaaacacattttcctc

SEQ ID NO: 392198 - DNA, 634 bp, Homo sapiens
acctcctgctcaagagttttcagtctgccaacccgctctacaaattttgtactttccagcccccacaatcctgtmagccatacatggtataaatactggttcattttctctaggaggctgagctgagaaaacactatttttcaaaggatggagataaaacttggggtttaaatacattaattgattgcaaatatatgcctatgtagtaatgtctgtcattatgtattttcacagtcaattaataaatactaaagtaaaactaataccaagagaagtctgcaaatttttttgacatcaatcaatggttattataatgggaaaatttagaaagtataagatggacaatgagtttggagattaaatttcaccaactctttagagttgttgaatcggccctatgcatgactcctaagagaaagaaaaaagtgagaccatgaagttcagagttaaaagtcacaggttgcttccaggcaactgccagactgggaattatatgagctgccttcagatccaaagcccttttgccctcccacggcccttatcataatatttcaattgtcccctcagaggctctgtgagttcacagactacaatctccactaataacagtaataataataactaccctatctta

SEQ ID NO: 392199 - DNA, 615 bp, Homo sapiens
aggtatgtgaagatacacaaactcattaattataagaaaatacaagttaaaattatagggtgatagttcatttttactctcaaatagggaataataaaaaatttgatccatacatttcgctgatgtagctctggagaagtaagcattgttttcatatattgcttgtgaagtccaaaattgaataatatttatatagggcaaagtgacaatatctattaaatgattatatggatgtattctgtagttaatcctgtacatgttcaacatgatrtattgtaagattattcattattagtttttaaaaagcaaaagattcaaaaacaatgcatgtacataaataggaaactgattaaataaactctgaaacatgtccatgatgaaatactatacagctgtggaaaaaaatgaggaagctctctaaatattgatacggaaagatctctaacactgctaaatctttaaaaggcgaggtaccacatagtgtagacaatatgctatcatttgtttaaggagggaggacaataagaatacattgcttctgtttctattttcatataccctgggaatgatgtgaaaataaatgaaaataaatgagaatgaaaataagtgagatca

SEQ ID NO: 392200 - DNA, 315 bp, Homo sapiens
atggttacatctggtgtgcaggttgtagcttagcattgatatcttattcattttatagctagcakcaggttttcaggcaatatctgtctgaaatagtggattcagtagaaacagcaatgtagctatgatatcctctgttctatcaagtggaaaactttaaaggaaaacctacgtgatttgaatatccttgtaaatcgtgtttaatgcacctttaacttaaaggagaagagtcaatcacagaaatagcacttaatacaaatctcttcccggtgtgatgccaagtaagcctcatatgatgtcatgagaatgaagcca

SEQ ID NO: 392201 - DNA, 315 bp, Homo sapiens
atggttacatctggtgtgcaggttgtagcttagcattgatatcttattcattttatagctagcatcaggttttcaggcaatatctgtctgaaatagtggattcagtagaaacagcaatgtagctatgatatcctctgttctatcaagtggaaaactttaaaggaaaacctacgtgatttgaatatccttgtaaatcgtgtttaatgcacctttaamttaaaggagaagagtcaatcacagaaatagcacttaatacaaatctcttcccggtgtgatgccaagtaagcctcatatgatgtcatgagaatgaagcca

SEQ ID NO: 392202 - DNA, 546 bp, Homo sapiens
cccagccaccatggctgtgagaagcccaagcaatgtccagaggccacagatgagtactttagtcaagagctccagctgagctcttagccaaaaggcagcatccattgccagcctatgaggaagcctctcagatgctcagcacacacaagccttcggttggttcctgttccagtcaacatctgactgacacttcatgaaagacctgaggcaagaatcactcagccgagcccttcccaattcccaaaccacgaaattgtgagcaaatttaaatgactgttttaagctactgaattttggtgtaatgttttatgcagcaatagataatcagaacatggaatatgttttgcacattttgaggctcaaaatccaggcttttgcaactccaaagtctcagcattttcatttatctgatactygatgagttgggaatttgcaaactgattcatctctttctccatatataacacatttcctttccagagtggacattgcttagaatcaattttaacaatctgtacaatatcagttattaactgggagaattaa

SEQ ID NO: 392203 - DNA, 577 bp, Homo sapiens
tgtattatactctggggatgaatcgatgccatgtgttttttttttttttttttacaacttctcaaggggattttgatgcaaacaatgaaaatcattgtttattctacagaaagatacctttgttctagagaaattcagcaacttagccaagttcacagagatgattcggacaaatgagaactaaaatagagaacttcagactctcatatcaatgagctttctttctgaaacatcaagaaagataagttaaaatacaatttttcttcattgtgaatgtactaaatgccattgaatttaatactttaaaggggkgagtttacattaggcaaattttacccaattaaaaactaatttaaaaacatataaaaacaccacttttattttactattatgtaggcaagttaattttctaaataacacgtagaatggcaaccacatgttatatctggctagtgcaacagccaacagagaaatcattgatatagatcattcaagctactaaatcagctctctggtctgtaaaattagggaatgagaataataatgctttgttgttgaataaatgtgaatctatgaa

SEQ ID NO: 392204 - DNA, 672 bp, Homo sapiens
tttatgaagtgtgatgaaaaatgcatacgtttgtgatttcagtttctcctacaatttttcatgtcaggaactctgaggtaacttaggctatctgatccggcgagtctccaagaatcagagaggcagagctcaatctccaattccaacaagggctttaccagggtaagccctgagaggaggtgggcagaccgcgggagggtggcaggttggagggagaggtagggttgtgggaaataggaggcaggccagcctgctggyattcacagttctaggtctggacatgaaactatatggggtacatccagatttctcagactagatactatctgaagaattttctgctacgttttgattgagtttcgccggatcacaccaaagaggtttcgctcctgaacttttaaaaatcttcaattttatcttttgcttaaaggctaattgtgtgaggagctgtgttaggtacagcaggggctccaaagacaagcaaagcacagccatttcagcaaaattgtaaatcttagagcataaatattaaacttttgaaaatttactctgactcataacacaaggaaatttcaggcacaggaggtggctattggctacggtcatgtgctacataatatttcagtcaaccatggactgcttatacaatgagattataatactatattttta

SEQ ID NO: 392205 - DNA, 533 bp, Homo sapiens
atgtcattaatacattcactggtatcactgaactttattttatatcaggtgagataactactataccatccagggagataatgtgtgtgaaagcccatagcccaatgctggacaaatagttttcaaggaatgttagcttctatytaagcaggtcccattggaaaaaaaaaagttgtatttttatatagttctagttagtttctcatctgtgatctatgctatttttaattgaaaaaaaaaaagtgtttccatacattgtcaggaggagccgttcccctgtcccagcctctcacaaagcacaccctcactccctcatttttccagtagtcccagggctagaccacctgtagagacaggaagcctgcctaaagagcagaagcatctgctcagaaagatctagttgtttgctggagcctcagcttgaagaaggctccaagtttattgtaaagtcccagccacacagtttgcttgagactttataaagagagaatgagatgtagaggctgggcccaaacccactaccaggctgtggg

SEQ ID NO: 392206 - DNA, 565 bp, Homo sapiens
tcggtataaatatcctaaattatattcacgttccatcttttctttgaacctactccttgacttgcctctttgccttgcctttgcgaacattcatttttgcttaattayatttttctcatttatatctgctttccttgaatttccttttggttgttttgctattgctatttgaacttgttttgtcttggctctttctcactttggccatgccttgacacagacgcgcggggtcgagaggctgcgggctcggcgggcggagggcgcatgggagcctcttggccctggacctgcccctgcaatccttccgcgggatctcttggaccctctgcagggtcctggctctgagacgttgctagaggacaaatccgcgggatttagagcgcggccaatgggacagcggtgcctggctgagtgtcaggcaaaactagccaataaacatgtagtttgggcaaggtgggtccgtcccctaactcggaccttataaagcgcgcccgctgctcccacaaagccgggctgtcccaggctgaggcggttgctcccctgccgggtgtgttagaagcaagtt

SEQ ID NO: 392207 - DNA, 565 bp, Homo sapiens
tcggtataaatatcctaaattatattcacgttccatcttttctttgaacctactccttgacttgcctctttgccttgcctttgcgaacattcatttttgcttaattatatttttctcatttatatctgctttccttgaatttccttttggttgttttgctattgctatttgaacttgttttgtcttggctctttctcactttggccatgccttgacacagacgcgcggggtcgagaggctgcgggctcggcgggcggagggcgcatgggrgcctcttggccctggacctgcccctgcaatccttccgcgggatctcttggaccctctgcagggtcctggctctgagacgttgctagaggacaaatccgcgggatttagagcgcggccaatgggacagcggtgcctggctgagtgtcaggcaaaactagccaataaacatgtagtttgggcaaggtgggtccgtcccctaactcggaccttataaagcgcgcccgctgctcccacaaagccgggctgtcccaggctgaggcggttgctcccctgccgggtgtgttagaagcaagtt

SEQ ID NO: 392208 - DNA, 565 bp, Homo sapiens
tcggtataaatatcctaaattatattcacgttccatcttttctttgaacctactccttgacttgcctctttgccttgcctttgcgaacattcatttttgcttaattatatttttctcatttatatctgctttccttgaatttccttttggttgttttgctattgctatttgaacttgttttgtcttggctctttctcactttggccatgccttgacacagacgcgcggggtcgagaggctgcgggctcggcgggcggagggcgcatgggagcctcttggccctggacctgcccctgcaatccttccgcgggatctcttggaccctctscagggtcctggctctgagacgttgctagaggacaaatccgcgggatttagagcgcggccaatgggacagcggtgcctggctgagtgtcaggcaaaactagccaataaacatgtagtttgggcaaggtgggtccgtcccctaactcggaccttataaagcgcgcccgctgctcccacaaagccgggctgtcccaggctgaggcggttgctcccctgccgggtgtgttagaagcaagtt

SEQ ID NO: 392209 - DNA, 577 bp, Homo sapiens
atggtatttctatttactacacattatttcattattttgccatctagtgtgacagacaatgcaggtatagacctaattttacagattagcaaataggttcagagaggttaaattacctatttaaaattacatggttaataagaatttggactgtaactccagttttctgactccatgcaccactcattcatttattcatccatccatccaaatattcatcaagcatctcccagaaaacattgcccattctgcatcgttgctgtgaagattaaataaaagaacatgggaatgcttacaaagtgtgaagcctatacaaatgctagccatttgcaaagccatcatcattagattccccattttaaagatattagaccttcttacatttgggggaagccaaatataatatggaaattttaaaaaatgtatgaaatttggttgagacatattgggaaatgcrtatttaaaaggagaggagaggagtggactaagatgaagctggatagggaaaggatggagcatggaagacctcatttgccctgctaatgagcttgactttagcttggggtgacagaggacc

SEQ ID NO: 392210 - DNA, 533 bp, Homo sapiens
tctataataatgcaagttttcgtaagttgtacatagrtggaatcagagaaatggaagtaaggtgaagagcctcactgactggctggctgctcaggcagggcctcacgggatggttacaccctgtggatcctgagcctgctcctcattttcaaatgttcagaaactcagtttgtctcagttcttctgggggcaccctggcttttgagagacagattcataaaaatcagagtcacaagggacttactgatttttttaaggcccacttcagattcttgatttttttctcctttcagatttcaaacaatgtcaaaggacattattcttgtcctttgaaaatatgatcttatggcaggccaacattttagcatcgtttctatggctcactacaatgacagccatcttgcaggcacacgtctaaagaggttaccttccatttctgtgaagtcaaaaatctccataagtgcttttgcactttttgaggaaattgaaaagtaaccaaaagctttcattatgaaagtctcaatgtcacattt

SEQ ID NO: 392211 - DNA, 599 bp, Homo sapiens
gtggcaaaaaaaaataagcatacaaaaattaagaacaaagtagatcaaagatctcctcaaaatgatatgactttttttaagcatttaaattacatacataaactgacaagcattatacacaaagatgttcactacatcatttataacaagagaactttggaaacaacctgaagattccgttataagtaaatgtagaacataaacatgatgtaataattcatagcaactaaaatgatttctgcaaatcaacattaataattttagggaaagcttaatgaataattggagagagtgaggaaaacacatayagctgagagttcagaaaaaaagtttttatattttatttacacacacattcacacacacaaaagaagacaataaggaagtaaatatactgaaacattaacagtagttattgagtgataatttttctcttgttcatcattttccaagaagtttaaaattttacatactcaagaactaatcagaaaacaagctattaaaaatttaaagacaaatggaaaaaaacacacacaccaggataatctgtcagtatgcactaaataacaagaaaaatttgagtatatgtactttaattt

SEQ ID NO: 392212 - DNA, 383 bp, Homo sapiens
tctcaaacagttatgtgattggcttgaggtcttgctcattatgaacaagtaaagctgagacttaagcctagatctgcttgatttcaaagtacaagtaattytaaggtcttatttagttaaaattttttctatattaatcaaaggtattttaggatctttcccttccatcataatttctcctaactccagatgtagaggctactgtactgtgtctggggtgggagatataaataaatacacatagcactggataaagaaataaattaaggagggatactccaggggagatggtgaggggtattttagggcgattcatactgctgagacattggagagcagaatttaaactatgcaaaataagtaggactaatgcttctctcact

SEQ ID NO: 392213 - DNA, 585 bp, Homo sapiens
attataacaatgtccttaattatctttgaataatttgtaataaaaacagtataatggccagtctgtagactttgaaatcaaacagacttaggttcagatttcttttgccactcattaattgtttgactttgggaaagctatttaaactaaattctggtttgcccattgtttaagtgggacttctatctacttggcaggttgttttgtaaattagagataatatgtactaaaatgctcagcacaggaagtggtacaaaccagcattcttgtggtgatgtaatttaacgtcacccttaaattaaaaacataaaaaccctaaactccaaaccaaaatcaaacaacacaacttccggaaattgtgctatcattaagaaatgaaatttttgtgatagaatttatgtaaattcctttttgaagggattcaaatattagaatgatagtcattattactatatgaaagatatgacaacttgataaaaagaacactgcctgaactgactaattttctttttcagaaaatgtagaattaattctgagttgttcccagaaaaacayactttgggcacatgaataattcaacctata

SEQ ID NO: 392214 - DNA, 522 bp, Homo sapiens
gaggacaaagacagggcaagacagaaacacaaaagggaccaaatatgccctgycataaggacattaattccacccatgagggcagagccctcacagtctaatcacctctcacaggcctcccctcttaatactgtcacaattaaatttcaaccatgcattctggggggagacaaacattcaaaccatagcactggcttaaataataaaggagatttattgggtcctataagtgaaaagtccagactggacacattgacactatggtttctctgtgtgtctctcagctctgtccttctcctggtgctggcttcatcctgaggcttgagctgtggtggcttcaggattcataggttctcacaacaaccccggtaagagagactcttgagaatttggagcaggtgccccgaagcatccaccaaacctacccttgtatctcatgggcccgaattgggacatatatctgttgtgctctctgaagacactcccagtaaatgggacttctaaattttgatatataaaaca

SEQ ID NO: 392215 - DNA, 522 bp, Homo sapiens
gaggacaaagacagggcaagacagaaacacaaaagggaccaaatatgccctgccataaggacattaattccacccatgagggcagagccctcacagtctaatcacctctcamaggcctcccctcttaatactgtcacaattaaatttcaaccatgcattctggggggagacaaacattcaaaccatagcactggcttaaataataaaggagatttattgggtcctataagtgaaaagtccagactggacacattgacactatggtttctctgtgtgtctctcagctctgtccttctcctggtgctggcttcatcctgaggcttgagctgtggtggcttcaggattcataggttctcacaacaaccccggtaagagagactcttgagaatttggagcaggtgccccgaagcatccaccaaacctacccttgtatctcatgggcccgaattgggacatatatctgttgtgctctctgaagacactcccagtaaatgggacttctaaattttgatatataaaaca

SEQ ID NO: 392216 - DNA, 541 bp, Homo sapiens
tgagaagcggtttcattcgccagtgccagaacctgctcctgtgcctttctacccccccagcacccacccacctgcaccccatgcaatcatccactgagtcgtctagatctgatccctgggatacagtttccacatccccagcctcgcccccattcattccatggtttcagctgaatccaccaccacatttcatatggattgcacagtggtcctcaaatgaagcgtctgccagactcagctgcagggcttgctaaacacaaacttctgggcccctcctcagagttcctggttcagtaggcttggggtggggcctagaaatctggattccgcatgcgttcccagagaccacactttgagaacaaactggccaaccacaatgctcattggcctcttgcctttaagctcacccttaaagatgagtttaaatcttcagatgattcactctgaatcatcccctaagcctctgttctctaaactcaaatctgaccrcaatgtctccgttgcagatatatcaaaatctccccctgtcctgacatataag

SEQ ID NO: 392217 - DNA, 544 bp, Homo sapiens
ttgcagtgatctctgatggcatcgctgcactccagtgcagcatcctatgagacttcactggtggtgcacccatggagccaaccctggccccaaacttacatagtgatataaggatgaggaagattcccccctccccaggacggccttcctgattctgccatggtgtgagccctcctggcaccctagtttcgtgttgctttccatgatgtgactctctgcacagtgacagcaattgtttccctcctcctggctcctcttcctggcttttctgaaaacctgtctttgtctcctctgggtgggggtgagacaggctgtggggagattccaggggacaggggrcccccactccccagaatggccccaggagctttctgtgctagctggggtggtgatggcagggaggagagcctgtctcctttccaactcttctccccctctgaaagcaagaggaaatgttgtttcccaaacatttatggaaattgttgcctgctctgaccttccccactgcttgctccagcctgatccaagaaagtgccaccaaaat

SEQ ID NO: 392218 - DNA, 552 bp, Homo sapiens
cattgctaatggccagtgatttaaccaagcatgcctatgtaatgaagcctccatcaaaacccagaatgatagggttcagagagcctctgggattgctgaacacatracagtgctaggagggtgggatgcccagaaagggcatggaagctctgtgcccctcccatataccttgccctaggcacgtcttctttctggctgttcctgagttgtattcttttctaataaagcagtaagctactaagcatatggttttcctgaattctgtaagctgttcaagcaaattattaaacccgaggaaggggttgtgggaacctctgatttactgccactcagtcaaaagcataggtggcaacctggacttgtgactggcatctaaagtgggagcagtcttgtggggctgagctcttaacttatgggatctcatgctattgccaggtagacagtataaaaattgagttaaattgtagaacacccagttggtgtctggaagttggagaattggctagtgtgggaacccactgcccccaacatttgatgtcagaagagttgtgt

SEQ ID NO: 392219 - DNA, 544 bp, Homo sapiens
ttgcagtgatctctgatggcatcgctgcactccagtgcagcatcctatgagacttcactggtggtgcacccatggagccaaccctggccccaaacttacatagtgatataaggatgaggaagattcccccctccccaggacggccttcctgattctgccatggtgtgagccctcctggcaccctagtttcgtgttgctttccatgatgtgactctctgcacagtgacagcaattgtttccctcctcctggctcctcttcctggcttttctgaaaacctgtctttgtctcctctgggtgggggtgagacaggctgtggggagattccaggggacaggggacccccactccccagaatggccccaggagctttctgtgctagctggggtggtgatggcagggaggagagcctgtctcctttccaactcttctccccctctgaaagcaagaggaaatgttgtttcccaaacatttatggaaattgttgcctgctctgaccttmcccactgcttgctccagcctgatccaagaaagtgccaccaaaat

SEQ ID NO: 392220 - DNA, 603 bp, Homo sapiens
gtattccattgtgtacatataccacattgtctttattcatccattgttggatacttaggttgattccatatcttcactattttgaataatgctgcaataaccctaagagtgcagatatcttttgatatactgatttcctttggatatatatacagtaatgggattggtggatcatgtggtagctctatttttaattttttgaggaacttccatactgttttccataatggctgtactagtttacaatcctaccaacagtgtgcaagtgttttcttttctccacatcctcaccrgcacttgttttcttttgtctcttttaaaataatagtcactttaactggatgagatggtatctcattgtggttttgatttgtatttccctcatggttagtaatgagcattttttcatgtatctgttggccatttgtttatcttgagaaatgtctgtgaaggtcttttgctcatttaaaaatcaggttagttttttttttgctattaagttccttatatagtctggatattaaccccttgtcagatgtataatttgcaaatattttctcccattctttaggccatctcttcactctgctatttcctttgctg

SEQ ID NO: 392221 - DNA, 564 bp, Homo sapiens
tagcatgtattagagggactgcccgcctccactccgcttcactctatctcccagtgcactcaacactaaatgccctatactaagacttctccccaaggtttcctgagaaaccaaagacaaaaagttcaatccatttgtaatttaccttgatatactgtgtgtgatgaagctctaacttattttttccaagtaattaattctccyaataccatttactgacttatcctttgcccagattttgaactgctacctttattatatttaaattttaaaaatataataaaactgttataaacaaactgtttcagggctatctagttaccctaatctgttctcttatatttgtaatacaatattttgattaatattacttaatgacatgttttgatttttggtaaagcaaatctggcccccccctcattactcttgtttttcaaaaatatctttactacttgtttctgtttatacttttagataaactttggactcattttccataggttaattaagaattccattattagaattttgatttggatttcaataaggctatttattataact

SEQ ID NO: 392222 - DNA, 591 bp, Homo sapiens
tgtgcatgtgtgtgtgtttaaggtttcaagtttggctttggaaactcggttacatgagctgtataatacaaaccaagaagctttaaatattttcagtgacataggcctctttatatatcatctgaaatgcttgttcattaaacttttctttttaaaagcctacttgtaaatagtaaaaaacttctttttgggaataattctttgacaacctaaaaacttaaaaataccatccatgcttataattctgacttcctatataattttggttgatttttttcctaggagattttgaattttgttgaaaattttacactaaatatgtaatacaaagtatagtacaaagtgtagcaattgctttaaagtttcctcatctgtaatatacttttctcataccaaatttttttgttttgccttactaaattcacattttcccttactagamtgaaaggtgcacattttattattttgttcccaatcaactactggataattcataagtgtgattgtttttctaatttctaattatattccattttctcttcatatcttctttaaattcattttgttatcttttgatttttttttgggctg

SEQ ID NO: 392223 - DNA, 591 bp, Homo sapiens
tgtgcatgtgtgtgtgtttaaggtttcaagtttggctttggaaactcggttacatgagctgtataatacaaaccaagaagctttaaatattttcagtgacataggcctctttatatatcatctgaaatgcttgttcattaaacttttctttttaaaagcctacttgtaaatagtaaaaaacttctttttgggaataattctttgacaacctaaaaacttaaaaataccatccatgcttataattctgacttcctatataattttggttgatttttttcctaggagattttgaattttgttgaaaattttacactaaatatgtaatacaaagtatagtacaaagtgtagcaattgctttaaagtttcctcatctgtaatatacttttctcataccaaatttttttgttttgccttactaaattcacattttcccttactagactgaaaggtgcayattttattattttgttcccaatcaactactggataattcataagtgtgattgtttttctaatttctaattatattccattttctcttcatatcttctttaaattcattttgttatcttttgatttttttttgggctg

SEQ ID NO: 392224 - DNA, 517 bp, Homo sapiens
agggtttggtaaatgcataccatcagatatccacaaccctagtaagagtttatacaccctaacatttcactgtacagcccatttttagtcaccctgaccctcctcccccaatcactgacaagcactgatctattttctgtccatatagtttccttttctttttggctctggcttctttcagttaacaaaatctacttaagatttattcatgtctttgcacaaatmagcaaccttgttctcttttattgcttaatagtgttccactgcatgattgtaccacagtttgtttactcattcacctgctgaaggacatcttggttcttaacagtttggagatattaagaataaagctactgtaagctattaaacattcacatgcaagtttttgtagaacatatattttcaatttacttggataaacaccaaacagtgagattgctaggttgaataatatctatatactcagctttataagaaacgtctacagtgtctctaaagtgattgtatcatcatttct

SEQ ID NO: 392225 - DNA, 517 bp, Homo sapiens
agggtttggtaaatgcataccatcagatatccacaaccctagtaagagtttatacaccctaacatttcactgtacagcccatttttagtcaccctgaccctcctcccccaatcactgacaagcactgatctattttctgtccatatagtttccttttctttttggctctggcttctttcagttaacaaaatctacttaagatttattcatgtctttgcacaaatcagcaaccttgttctcttttattgcttaatagtgttccactgcatgattgtaccacagtttgtttactcattcacctgctgaaggacatcttggttcktaacagtttggagatattaagaataaagctactgtaagctattaaacattcacatgcaagtttttgtagaacatatattttcaatttacttggataaacaccaaacagtgagattgctaggttgaataatatctatatactcagctttataagaaacgtctacagtgtctctaaagtgattgtatcatcatttct

SEQ ID NO: 392226 - DNA, 564 bp, Homo sapiens
cctgtaccgactaactttatcattttcattgaatttcatcccatattcctaatattcaaagaccagcacaaaaacactcaatgttgggtagaatcatggtttaagctttacattatcactcttccttgttgccatttcmtgtcttgatttgcatatagagtgggtgcaactcaggaagccctccacaaacacacccacccaactcccatggagacaggaaactcagctccctgcccttcctctgcctctgatgtaatggatgaccctaagaatttcactgcatctctaagcctcagtgctcccacctgtaaaatggctgaggaaggaaggatgcagggcaaatgggggagtctataaattcacaaatctgtgatcttgccactatcattgtctaaagctcaaactggctcttaaatctagtgaatccatgatcttgccatttttgttgtctgaagcttggaattgtgatgccgtgcatctcactgctcattttcttgttaaaacccaaactgtgacacatcagtgtaaccacatgagtgcatgcgtgcgcgtgcacgggtgtgc

SEQ ID NO: 392227 - DNA, 553 bp, Homo sapiens
gggcaagcagaccagcaggccaggaatttgatattcatggaacaaatgtcatcattgtgagaatggtctccattccatattccaaagcaacaaccaagttcyacaacggaacaaaggaaagaagacactcacggagcagttgaaactaggtattttgttgctgagatgcttgcaaaaagattggcagttacacactacttactataactgaaggcagcagggatgtatgataaactggttagataagtctaaaggagttctttcaataaggatagaataaagattgtaaatggaagaaaccattgtgacatagtttaattgctagcttttttctttctaactggcacaaaaaaatagtgtatttcttcttacatttgatgaaatatgggacctaaaaaagaagaactaggaagtcctacccacagcaatcagtcaagagaaagaaatatagggcatccaaattggaaaacaggaaatcaaactgtcagtgttctccaatgatatgatcatatatatagaacaccctaaagacttatccaaaaggctcctagat

SEQ ID NO: 392228 - DNA, 543 bp, Homo sapiens
caatgctgaactacactgggtagctaggctgtacattacatagccccttacagtttaccaattgtctccatgtatagtcacgtgccacataaggacattttggtcagtgaaggactgatatatgatggtggtaacataagattataatattggattttcatcgtaccttttctatgtttagatatgtttagacatacaaatatttaccattgtgttataattgcctatagtattcagtacagtaacatgccgtamaggtttgtagcctaggagcaataggctattccatagagcgtaggtgtgtagtatactgtaccatttaggtctgtgtaaatacactctacaatgttcacataatggtgttagcatgatgaaatcacctacacacatttctcagaacatatcctgttgtgaagcaatgcagcactgtactttatctcacttgattaatccaccaactatatggaacaccagtgtccccattttacaaataaagcaataggcttggaatggactgctttaaaatcaccagctactaagtgg

SEQ ID NO: 392229 - DNA, 554 bp, Homo sapiens
cagtggcgcgatctcgacttcactgcaaactccgcctcctgggttcacgccattctcctgcctcagcctcccgagtagctgggtgtacaggcaccctgccaccacgcccggctttttttttttttttttggatttttagtagagacagggtttcactgtgttagccaggatggtctcgatctcctgaccttgtgatccacccgcctcagcctcccaaagtgctgggattacaggcatgagccaccrcgcccggccaccttgggcattctttaaacaactgtcactactcgcctgaccagccatgtcacatgggtcagccaatatgcaatccattgactgtttaatttccggttcttgctcacaccactcactgactgactgactttagtgcacttaatcaggagaacatatcagaattacctgtggagatttaaaaactatacagtaaaccttcatttaatgtcatccacaggttcttcgaagctgagacttcaagcaaaacaacttacaacaaaaccaattttattttctcttctacactatgacgaaacaac

SEQ ID NO: 392230 - DNA, 535 bp, Homo sapiens
tgttgtttttttaagagatgggttcttactacgtttctcagactggtcttgaactcttagcctcaagcgatcctcctgccttgatctcccaaagggctggtattacaggtatgcatcatcacacttggtctgttatttacttcttgaaagtagaatatctaaaaattttcacttctacttccctgatactccataattcacctctgagctggamaatgattatttcctttgcaggatgaaagaatgtctattccataaacagacaaaataactgctctgaaaaaggctcaagttaaaggaaaaaaacaattatttctgaactggatgtgccttttgcagtagctctcctatcccttgtcctctcaccgcagctgtgtggtctggaaaaagacagcatggcagactgacttctccaccctgcccaaatgctgcctgcaagttttgattacatagttttgggattatctgtgtccttctctctcttccattgctaattttgggctacttcactgtttagaagtctgtccttcctggg

SEQ ID NO: 392231 - DNA, 535 bp, Homo sapiens
ctttcagctactatatgccagtaagtctcaggagtgggcaggtgagaagaggtaagtaagagtatgaggagcrcgatcactgatgcacagccaggaagagtgacgatgtctgctttcttttcagaaatgcatttttaaaagggtctaagttattactgctgtagaaaaaccaaaaccaatccagaaattaaagggctgctttgttgattgcagacatcaactaacttgatgtccacagaggtctcaatccaaaggtgtgacttcatggtggactgtttgtgaaaattcccataaggaataagagtgtgagcatctgaggtagaaatttatctttttatattcagaacacttatctatgcctagcagatattacatatttgatgaatgaataaatgaatgaaacaggtaccacttccagagatggccctagttttttgtccttgtgatttctcactgtccgtgtgttctaaccacaacaggatctacatatgatgctgttgttgccatcagcactgaggtcacaaaaagctcatta

SEQ ID NO: 392232 - DNA, 628 bp, Homo sapiens
tatttaaaaagctacccatcaggacagtctgagactgaaggataaaccaagggaaaaatgaaaggattattgcatatgggcctgcaaatactaaaacaaaagcaattattttcaaatcattctctcaatcttacatttcacttttctatatcttgtcagtgaattttaagccacttggaggcagagatcagtgaattgttgcctacataacaattctaagaataaacyttttctcttggataacgttcttcaggccatgaggtatgctcacctggttccctctccaactctctctctgtctgaatgaagagttccttttgcttcatgcaaagttttggggatgaccactgagtcagagtggatacagtctgaagaggatgaagaatagcagtatgaggcagtggtgatgccaaacagctctgaatgctgactggttctagggaatgcacctctctgccctctgagctgcagggacagggagatgagctggcagcagctgcctcagagataaggatgtgagacacaaacacctaaggaattcctttggacttccatcacccccctccatccaactttatcaaaagcgaggtggtgtgggcagctggctcctttcagcctgggcccacca

SEQ ID NO: 392233 - DNA, 628 bp, Homo sapiens
tatttaaaaagctacccatcaggacagtctgagactgaaggataaaccaagggaaaaatgaaaggattattgcatatgggcctgcaaatactaaaacaaaagcaattattttcaaatcattctctcaatcttacatttcacttttctatatcttgtcagtgaattttaagccacttggaggcagagatcagtgaattgttgcctacataacaattctaagaataaactttttctcttggataacgttcttcaggccatgaggtatgctcacctggttccctctccaactctctctctgtctgaatgaagagttccttttgcttcatgcaaagttttggggatgaccactgagtcagagtggatacagtcygaagaggatgaagaatagcagtatgaggcagtggtgatgccaaacagctctgaatgctgactggttctagggaatgcacctctctgccctctgagctgcagggacagggagatgagctggcagcagctgcctcagagataaggatgtgagacacaaacacctaaggaattcctttggacttccatcacccccctccatccaactttatcaaaagcgaggtggtgtgggcagctggctcctttcagcctgggcccacca

SEQ ID NO: 392234 - DNA, 581 bp, Homo sapiens
ataggcagtgtaaacagacagtatttgcaaactgtgcatccaacacaggactagtatccagaatctacaaggaacttaaatcagcaagacaaaaccaatcccatcaaaaagtgggcaatggacataaaaagacatttctcaaaagaagatatacaaatggccattaaaaatgaaaaaaatgttcaacattactaatcatcagggaaatgctaattaaaaccgcagtgagatgccaccttactcctgtaagaatggccataatttaaaagtcaaaaatcaatagtckttggcgtggatgtggtgaaagaacactgttacactgttggcggaaatgtaaattagtaaaaccactatggaaaacagtatggagattccttaaagaactaaaagtagatctatcattctatccagcaatccctctactgggtatctaccaaagaataagaagtcattatatgaaaaagatacgagcacatgcatgtttatagcagcacaattcacaattacagagatatgaaaccaacctaagtgcccaccaaccaacgaatggataaagaaaatgtggtatacatacactatgg

SEQ ID NO: 392235 - DNA, 581 bp, Homo sapiens
ataggcagtgtaaacagacagtatttgcaaactgtgcatccaacacaggactagtatccagaatctacaaggaacttaaatcagcaagacaaaaccaatcccatcaaaaagtgggcaatggacataaaaagacatttctcaaaagaagatatacaaatggccattaaaaatgaaaaaaatgttcaacattactaatcatcagggaaatgctaattaaaaccgcagtgagatgccaccttactcctgtaagaatggccataatttaaaagtcaaaaatcaatagtcgttggcgtggatgtggtgaaagaacactgttacactgttggyggaaatgtaaattagtaaaaccactatggaaaacagtatggagattccttaaagaactaaaagtagatctatcattctatccagcaatccctctactgggtatctaccaaagaataagaagtcattatatgaaaaagatacgagcacatgcatgtttatagcagcacaattcacaattacagagatatgaaaccaacctaagtgcccaccaaccaacgaatggataaagaaaatgtggtatacatacactatgg

SEQ ID NO: 392236 - DNA, 581 bp, Homo sapiens
ataggcagtgtaaacagacagtatttgcaaactgtgcatccaacacaggactagtatccagaatctacaaggaacttaaatcagcaagacaaaaccaatcccatcaaaaagtgggcaatggacataaaaagacatttctcaaaagaagatatacaaatggccattaaaaatgaaaaaaatgttcaacattactaatcatcagggaaatgctaattaaaaccgcagtgagatgccaccttactcctgtaagaatggccataatttaaaagtcaaaaatcaatagtcgttggcgtggatgtggtgaaagaacactgttacactgttggcggaaatgtaaattagtaaaaccactatggaaaacagtatggagattccttaaagaactaaaagtagatctatcattctatccagcaatccctctactgggtatctaccaaagaataagaagtcattatatgaaaaagatacgarcacatgcatgtttatagcagcacaattcacaattacagagatatgaaaccaacctaagtgcccaccaaccaacgaatggataaagaaaatgtggtatacatacactatgg

SEQ ID NO: 392237 - DNA, 379 bp, Homo sapiens
attttaaaaagaaaagaaatgtctcttaaaagggaacaatgaaggagtaagggatattcaataattttaaaatggggtcaagcagccctacagttgattgcagaaggttactgtcaccctctaggcatccattctctggaactcccagagaaatacaaatgagcagcccgtaactgcatttgttctttgtccaagccagctgagggatctggtctgaaaactagttctgcagaagcaaagctgcttcacctgattgaaggttcccacwcaccatgagtgaggctggtgacctttctcccactttttgtgcgctgtctctgatgatagtccctctgttttctggaaccttgccaattccaagtgtagccccaaagtcatt

SEQ ID NO: 392238 - DNA, 631 bp, Homo sapiens
tctagagtcatatgtaatctagcagacatttctaggcattgcgacagacccactagggattgtagcacatgcattagagtgtggccaagccaggtaaggtgtgactcaaagagcctgcactaagagcaagacagtcctggactgtggctcagctctgctacattccagctgtgaagttttaggcaaattacttaatccatttgtatgtttcctcatctgtaagataactatgatcataatacctagtttaaaaggttatcatgtgggtttaatgaggtagcggaggagttccatttactaatgctgagcaataaaaccaccccaaaaattagcatcttaaaataatgacaccattcattttgtttgaaagtgtgcaatctggaaaatacttagtggggacagcttgtctcggcttccgttggcatcagctgggctgaaatcacctgaagatttgcccactcacatgtctggcagttgctgctgggaagattcacatagctggaggcttggasagctgggactcctaagcatctctctccatctcgtgtggtctctcaagcatggcagcttcagggtagccagatttattacaagttatctttcatgacctgggcttggaactcatggaata

SEQ ID NO: 392239 - DNA, 587 bp, Homo sapiens
attttgtgtgtttcagatagatttgattgttgtctaatatagactttggacatttctgaagtttagaggtgattcatcttacgctatcataaataagattttctcatctcttttatctttttgtttatatataaatagcattgtttgttatttgttttgagatggcccttgctttgttgcccaggctggtcttgaactcctgggctcaagcaatccccctgcttcaccctcttgaatacctgggactacaggtttgtaccaccatgcccagcagcatttatttatttatttttcttttagagacagggtcttgctctgtcacccaggctggagtgcagttgtagaatcatggctcactgcagcctcaacctcccaggctcaagtgatccttctgccttggcctcayaatgtacttggattacaggcatttgcccacatgcccagcctcagcattgctttttgatgttattttataacgtgctacttcactaaatcatcttattttttgtcgtatagtttttacattgttccttctgggatttccagaaagaccaaatttttccctctttctttccaattcttatacc

SEQ ID NO: 392240 - DNA, 563 bp, Homo sapiens
gtggctactgttataattctcattttactwgtgaggaaacaggcacaaagagcttaaataacttgtcccaggccactgagctagaaattgggagagagaagtttgaaccttggcagtctggcctcagggtcagccactttaccacaagcctttcctgctcaactacaactccctgaacagtaggaaggaaacattatttctttgtgtgtcccatagcataggcaatgcttagctcagacaggacagccagtaagtgtgtgctggatgaattaaatgagtgagaagaaggtgaagcactgacaagggatttgtcaaacatgttcttccaacaggattaagtgcctccaaccatcactgtatatgactgagaggaaatattttaaaattaaatttgaaatcgcctagtcataatgagcttccaggataatggaaggatgtgagaaaatacataatgacaagaataaaaggcttatataccatctattagagtggcagtcatgattagagtgaccagaacctggaaggagtacatgaaggaagcctacctgaaaggggtaaatcct

SEQ ID NO: 392241 - DNA, 587 bp, Homo sapiens
attttgtgtgtttcagatagatttgattgttgtctaatatagactttggacatttctgaagtttagaggtgattcatcttacgctatcataaataagattttctcatctcttttatctttttgtttatatataaatagcattgtttgttatttgttttgagatggcccttgctttgttgcccaggctggtcttgaactcctgggctcaagcaatccccctgcttcaccctcttgaatacctgggactacaggtttgtaccaccatgcccagcagcatttatttatttatttttcttttagagacagggtcttgctctgtcacccaggctggagtgcagttgtagaatcatggctcactgcagcctcaacctcccaggctcaagtgatccttctgccttggcctcacaatgtacttggattacaggcatttgcccacatgcccagcctcagcattgctttttgatgttattttataacgtgctacttcactaaatcatcttattktttgtcgtatagtttttacattgttccttctgggatttccagaaagaccaaatttttccctctttctttccaattcttatacc

SEQ ID NO: 392242 - DNA, 570 bp, Homo sapiens
gccactaatgatcctttgaatttctgcagtatcagctgtaatctcctttttcatctctgattttatttgggtcttctttttttcttagctagtctggctaaaggtttgtcaattttattttttcaaaaaaaaacaactttttgtttcattaatcttttgtattgtttccttcatttcatttcatttatttctgttctgagctttcttattttcttctactgattttggatttgttttcctcttgctyttctagttctttaagatgtaatattaggtcgtttatttgacatttttcttcttttttgatataggcacttatagctataaattttcttcttagtactgctttcactgtatcatacaggtttggtatattgtgttttcattatcatttgtttcaagaaaattttcaatttccttctgatttcttcattgacccactggtcattcaggaggcataatgtttatttctatgcatttgtatagtttcctaaattcctcttgttattgatttctagctttattccattgtggtcagagaatatacttggtattatttcaattttttgg

SEQ ID NO: 392243 - DNA, 570 bp, Homo sapiens
gccactaatgatcctttgaatttctgcagtatcagctgtaatctcctttttcatctctgattttatttgggtcttctttttttcttagctagtctggctaaaggtttgtcaattttattttttcaaaaaaaaacaactttttgtttcattaatcttttgtattgtttccttcatttcatttcatttatttctgttctgagctttcttattttcttctactgattttggatttgttttcctcttgctcttctagttctttaagatgtaatattaggtcgtttatttgacatttttcttcttttttgatataggcacttatagctataaaytttcttcttagtactgctttcactgtatcatacaggtttggtatattgtgttttcattatcatttgtttcaagaaaattttcaatttccttctgatttcttcattgacccactggtcattcaggaggcataatgtttatttctatgcatttgtatagtttcctaaattcctcttgttattgatttctagctttattccattgtggtcagagaatatacttggtattatttcaattttttgg

SEQ ID NO: 392244 - DNA, 609 bp, Homo sapiens
aaataaccaagcaaaaataagactattaaaaattgtatgccttaatttcatcctcctgattttaagctttttgttgtttctatttatatcttatcgtgctgtcaatgtcttsaaaagttgttgtggttattatttttgattggttcatcttttagtctttcaatttaagatatgagcagtttacacaccacagttatagtgttacagtattctgtttttctgtgtacttactaatactagtgagttttgtaccttcagatgatgtcttattgttcattaatgtcattttctttctgattgaagaactgtatttagcatttcttgtaggacagatctaatgttgatgaaatcccttaacttttgtttgtctgggaaagtctatttctgcttcaggtttggagtatattttcactggatacactattctaggataaaagttttttccttcagtactttaaatatgtcatgccactctctcttggcctgtaaggtttccactaagaagtctgctgccagatgtactgtaccttcattttatgttgttcttttctcttgctgcttttagcatcctttctttatccttgacgtttgggagtttaattattaaat

SEQ ID NO: 392245 - DNA, 636 bp, Homo sapiens
ctttgaggtagatattattcttgtcactttcttatagatgggaaaatttgcccaagttcacacaatttcagagaatctgcattcagccactgtactcaaggttatgaaacagcaccaaagtgccctagggtactacagtgaactgactgtggatggaagcacagcagtactcgacatcagtcagacaccacgtgaactaccatactagctcaaattcacagtttccacattagatctcactaccttccttttgatgatgtcatttctttggcaagctgggttttcagcacttgtcattgagggcaagcaccatgtgaaaatcaatgtggaacaggaactgtgggtaatggtgtgcaatccgactgtgaggtttgaaaagtmgtgtagtgccctttaggtatacatatcccattaggaagtaagggcagatttaagaatgaaatcatttttctctcactttatatgtaatttttttcaaacggctactaagttgttaggctataaatttttaagttttttggacctaaccaagggccactcgaatcaaaaacatttgggaatccctgcattacgttatgccacctaagatgtggaagctaaaacatggaccatccaagtatttgttccctaagctgg

SEQ ID NO: 392246 - DNA, 556 bp, Homo sapiens
ccgtctcaaaaaaaaaaaagaaaagaaacaactgaatgaaggaataagtaaatctcagaccccaaggcactgaaatagttttaaaattgagatgaaatgttcaaatggcacattccacattgaacaaacactttactgtggaggttgaatcatagatagacaaaaattatttggaggtggaggggaaggttatctagttttccactcctcttcccacagctgttctctcaggaatggcctgagaaaggagacaagaggacakgtagtgaaagaggaagccaaggagccagggagaaggtacacaggatgtactaccactttcccgctgtcctggggctcaatgcatctcttatcacactgtgagagtgataaggtccatttatgggtcagtcatccttctagagagtggacttctcaggggcagggactgggcattagtcattactgaattttcagcacatatcctggaagtcagggtttcatagatatttgtgaacatgaactaggcaaaaagatgtgctaaacgaagtgtttctcatacgacagaattttatct

SEQ ID NO: 392247 - DNA, 556 bp, Homo sapiens
ccgtctcaaaaaaaaaaaagaaaagaaacaactgaatgaaggaataagtaaatctcagaccccaaggcactgaaatagttttaaaattgagatgaaatgttcaaatggcacattccacattgaacaaacactttactgtggaggttgaatcatagatagacaaaaattatttggaggtggaggggaaggttatctagttttccactcctcttcccacagctgttctctcaggaatggcctgagaaaggagacaagaggacaggtagtgaaagaggaagccaaggagccagggagaaggtacacaggatgtactaccactttcccgctgtcctggggctcaatgcatctcttatcacactgtgagagtgayaaggtccatttatgggtcagtcatccttctagagagtggacttctcaggggcagggactgggcattagtcattactgaattttcagcacatatcctggaagtcagggtttcatagatatttgtgaacatgaactaggcaaaaagatgtgctaaacgaagtgtttctcatacgacagaattttatct

SEQ ID NO: 392248 - DNA, 556 bp, Homo sapiens
ccgtctcaaaaaaaaaaaagaaaagaaacaactgaatgaaggaataagtaaatctcagaccccaaggcactgaaatagttttaaaattgagatgaaatgttcaaatggcacattccacattgaacaaacactttactgtggaggttgaatcatagatagacaaaaattatttggaggtggaggggaaggttatctagttttccactcctcttcccacagctgttctctcaggaatggcctgagaaaggagacaagaggacaggtagtgaaagaggaagccaaggagccagggagaaggtacacaggatgtactaccactttcccgctgtcctggggctcaatgcatctcttatcacactgtgagagtgataaggtccatttatgggtcagtcatccttctagagagtggacttctcaggggcagggastgggcattagtcattactgaattttcagcacatatcctggaagtcagggtttcatagatatttgtgaacatgaactaggcaaaaagatgtgctaaacgaagtgtttctcatacgacagaattttatct

SEQ ID NO: 392249 - DNA, 564 bp, Homo sapiens
agaattgtttagcttgagacttggggtaagatttgctttttcccctcaagagggaggagacagtaaggtagaggaagacagtggaagagggtaagagggtaagtgatgaaataagaaaaggcttcttccacctcacttcgtacttttttttttttttttttttttagagaaagggtctggctctgtcccctgagcttgagtatagtggcataatcatagctcactgtagcctagaattcctgagctcaggtcatcttcccacctaagcctgcttagtagctgagactacagccatgagctatgagctaccatgcctaacactatcctcattcttaatcagattaccaaagtcacaaaacacttgagaaaaatggaatttttaaaatgaaaatttatgaaaaggctgggcatgttgtctggaatgacaaatgggtagtacgggacaaaaaggaagttgyagaggtagaaacccacaaaaagtatggttctgggagcttttatcaattggcagaggttggggatggctctcgactcctccagatcattacatggtttaggtcaagc

SEQ ID NO: 392250 - DNA, 599 bp, Homo sapiens
ccatttctcaaacagcaattattaggtaaagtgtcattctggtgagttattgttgagatctgtcttatgaaggattattgtgaggaaaacacatcattcattatccatcaacgtagaggatgaagaggaccaagagagagatggttcatctctttcattttacagatgaggaaatgyggtcaaaagagaggatgttatttttccaaggctgtaaaattggttagtggcagaaccagaattaaaactcagcacccttggcagaatattcaatatcctgtccattgcatgtgccctacctccctcaaataaaaattatagtatgagggataattaaactatcaaaggcagttgtggtaggaaagttactagcattttctgagaacacaagggactggcatttgcatggagggctggacgaattgacctctcaaggagaccccccacccgcatgccttccttcaggactggagttaaaattcacagtggctcattcaacattgcctctgtgtcctttccttcttaatcatagaattaatattggccactctttggctataccttgatttaattcttatctaattcttaaaatctgtttaact

SEQ ID NO: 392251 - DNA, 524 bp, Homo sapiens
ttgaatccattgcattgaacaggtaatgcaaaagcatcatttcaattccagcttcatactttcctgccattcaaccctatcaacagatccattaatgaaaatagttgagttggttttctccttttgtattttgttctctattctaatgaactataatttaactactactcaaaagacaagcagccccagataaaagataagaaaacagagaagcacagatcatctacatagaaacttggataagaaaagttggttatattcacaatgagatagtgtttgayatttactgtaaacacaaggagacatgcttttattttacttatcatccatagtggcccttttagaaattggcatgaaagatatcttaggtatcatgacattctaaaacttttataaaaacttttagacatttttctcccttgaatgtcatcacaccagtgaaacatttggaaatgatcactctcaaattcttcccaaggttatggcaacttaaatactatgagtgcctaaaccattacatagtg

SEQ ID NO: 392252 - DNA, 573 bp, Homo sapiens
atcagcaatttttaaaggtccataaataatttgcattataggcaagattgagcaccaatggtgtccacaagattccaataaacagctaatgttgccaaccaytgaattacatccactgcagatgacaagtgtccctggattcagtctataattctgctgatacccaaacgtctttagtttctcaactttatgctagaaagaatctcatatgtcagattctgtagggaaaacatgcaaagagaggcattcaccttacttaaataaattgtactaatactaacccaatagatcataggccagaaactaaataaaatagaaaatatcagtgcaaatccatccgcagaatgactccatcattccacactatttaaagtcagcaataatctccctcattccttttttcttatcctcaacaaatcaccttgtcctaggttttatcttatacatacatatgacaaccccaaagtcattatttagacaaactaaggcactttggtctttaactgtcatcagtcagtccttctgtgtctgtaaagttatgttggtgcatcacacaacaaagcatgaaaacaa

SEQ ID NO: 392253 - DNA, 609 bp, Homo sapiens
tctgtgtcttcacagacagcccaagttgtttttttgtttgtttgtttgttcgctttttctcgctgttaattccctatcttccctattctttggagattgctctattttgaagttcttacgtgtattatagctcttcttcaaaggaacaaatttgaattaccctcagaaatcctcttataggattcagaaaagatgcatttaaaacttcagtctcaggtcaggcacagtggcttatstctgtaataccaacattttggtaggctgaggtgagaggatcacttgaagccaagagtttgagactaacctgggcaatatagcaagaccccatttctactaaaaataattttttaaaattagccaggtgtggtggtggacacctgtactgctagccacttgggagcctgaggtgagaggatcacttgagcccaggaatttgaggttgcagtgagcttctgtgattgcatcactgcactccatcctgggtgacagtaagacctgactctaaaaacaaaacaaaacaaaaaaaaacaaaacaaaacaacttcagtctcagagacaggtactatttgagagaagaataatgcctcagaggattatcactttaaataa

SEQ ID NO: 392254 - DNA, 417 bp, Homo sapiens
ctttgtccatttagcaagaaatatatgactgaaatatttaatttgtgtatttactggtagaaccctaagagtctggacaggctaccagggtttctatttctacatcttcccaacaggcttatgaggaaaaacagtgactagacacattgaagagckctgagattgtttaacaaagacctcctgtcaatgacctgggtgtcactccatccagaaaaggccctcagaaaagtgtagaatagatctaaatccaggataccagtggattttaggaggcagcaactcctaaaggaggtgtatgatgccttgtgttgtcactggtattatcttcccttcaaggagacttggttcaagcttctagcatgagggcctgtgaatagtggaaagagtaaaccacataaaagaatcgtgacattagga

SEQ ID NO: 392255 - DNA, 529 bp, Homo sapiens
ctaagagtctggacaggctaccagggtttctatttctacatcttcccaacaggcttatgaggaaaaacagtgactagacacattgaagagctctgagattgtttaacaaagacctcctgtcaatgacctgggtgtcactccatccagaaaaggccctcagaaaagtgtagaatagatctaaatccaggataccagtggattttaggaggcagcaactcctaaaggaggtgtatgatgccttgtgwtgtcactggtattatcttcccttcaaggagacttggttcaagcttctagcatgagggcctgtgaatagtggaaagagtaaaccacataaaagaatcgtgacattaggattgttatgagaagcaaagggatcaaggcttccttcctgtttgggaactcataagcattagtggaaaaactctcttcttcctgggaactgaaaatatcatgcttccctctctgtgataagcaatgctggaaccaagcatttctttctgtgctaaacttactgggaacaaccagaagt

SEQ ID NO: 392256 - DNA, 627 bp, Homo sapiens
tgttaggccagcattttcatatttgtagagaggaatataagggatttaaggaaagatttagctgccatcagcaaggrcatacctgttttattttaataaatgtacaaattaatgtttgtttttaaaatgataaaacaatatgtgattattaatgaagttttatttattatttatttatttgagatagagttttgctctgtcacccaggctggaatgcagtggtgtgatctcagctcacttcacactctgcctcctgggttcaagcgattctcctgcctcagcctcccaagtagttgggaccacaggtgtgtgccaccatgcccggctaatttttgtatttttagtacagacaggcttttgccatgttggtcaggctggtctcgaactcctgatctcaagagatccgcctgccttggtctcccagagtgctgggattacaagcgtgagccactgctcctggccaaggaagatttaaataagacttaaatgaaaaaaaaaatcacctgtgatctaattatgcacatatagccactatagaattttgatatcttttgtatcatctattttttaaaaatcccctatccaaagcatcttgtttgggtcttgatttttaataactgtgaaatc

SEQ ID NO: 392257 - DNA, 627 bp, Homo sapiens
tgttaggccagcattttcatatttgtagagaggaatataagggatttaaggaaagatttagctgccatcagcaaggacatacctgttttattttaataaatgtacaaattaatgtttgtttttaaaatgataaaacaatatgtgattattaatgaagttttatttattatttatttatttgagatagagttttgctctgtcacccaggctggaatgcagtggtgtgatctcagctcacttcacactctgcctcctgggttcaagcgattctcctgcctcagcctcccaagtagttgggaccacaggtgtgtgccaccatgcccggctaatttttgtatttttagtacagacaggcttttgccatgttggtcaggctggtctcgaactcctratctcaagagatccgcctgccttggtctcccagagtgctgggattacaagcgtgagccactgctcctggccaaggaagatttaaataagacttaaatgaaaaaaaaaatcacctgtgatctaattatgcacatatagccactatagaattttgatatcttttgtatcatctattttttaaaaatcccctatccaaagcatcttgtttgggtcttgatttttaataactgtgaaatc

SEQ ID NO: 392258 - DNA, 627 bp, Homo sapiens
tgttaggccagcattttcatatttgtagagaggaatataagggatttaaggaaagatttagctgccatcagcaaggacatacctgttttattttaataaatgtacaaattaatgtttgtttttaaaatgataaaacaatatgtgattattaatgaagttttatttattatttatttatttgagatagagttttgctctgtcacccaggctggaatgcagtggtgtgatctcagctcacttcacactctgcctcctgggttcaagcgattctcctgcctcagcctcccaagtagttgggaccacaggtgtgtgccaccatgcccggctaatttttgtatttttagtacagacaggcttttgccatgttggtcaggctggtctcgaactcctgatctcaagagatccgcctgccttggtctcccagagtgctggrattacaagcgtgagccactgctcctggccaaggaagatttaaataagacttaaatgaaaaaaaaaatcacctgtgatctaattatgcacatatagccactatagaattttgatatcttttgtatcatctattttttaaaaatcccctatccaaagcatcttgtttgggtcttgatttttaataactgtgaaatc

SEQ ID NO: 392259 - DNA, 518 bp, Homo sapiens
aagcattttcttataagttagaaaggagcttagatgtgagttatgtccagaaaaaaatgattacctgacacttcaagccgcagtgatgataacctgtataggaggcgaggataaaatgctaccttcaacaagtggtgatggaacaactaaaaggacaagcaatactgtgtgtatgttcagaaaacctctttcttcattcctatttgcttactttctcctgcctatccttcctggaagaacagttttgctggtcttaaaatttacattgcaactgttagtggaaggaaagagcttcttccctcctttattttgggttgaactatgagtgattttttgtctatcccacctttgaaatagcccgctataagtcaaataataggagctgtattatgagaagaacataacttattttctcttatctacatttttttggctaatgggayaaaattaaagcttcaatttattctcagaattaaactactcttgttctgggccccaaaacactcaagatgagtttg

SEQ ID NO: 392260 - DNA, 590 bp, Homo sapiens
ttatctactcattcctgttagaatggctactaccaaaaaatcaagagaaaatgagtgtttgtgaggatgtggaggaaaggaaacccttatacactgctggtgagaatgtaagttaatacagccattatgggaaatagtttagaggtttcttaaaaattaaaaatagaactacaatataaccccacaatcctattgctgggcatataaccaaagggaataaaatcagtatatcaaagagatatctgcactcctatctctattgccatactattcacagtagccaagatatggaataaacctaaatgtccatcaacagatgaatggataaagaaaatatgctatatatacacaatggaatactattaagccataaaaagaatgaatttctgtcatttgtgacaacatggatggaactggaaracactatgttatgtgaaataagtctggcacagaaagacagataccaccttatctcactcatatgtgaaatctaataagttgttctcatggaggtagagagtagaattgtagctaccagaggatggggagaagaggggagagaaggccttggagagagattgttcagcaag

SEQ ID NO: 392261 - DNA, 481 bp, Homo sapiens
ctttctttcttataagggcaccagccctatcagattagggtcccacccttatgacctcctttaacatttataacctcctcagaggccttatcttcaaataccatcactttgggggttaggacttcaacatatgtatttgggagggggaacacattcagtctataacacccacaaatagccaattatgggacataggacctcaggtgctctatcattgaacctgtgccgtaattatgaaatgaacactcttcaraggcctcactcacaagtatctgccaattaagatgtatgtgtggagatgcaggcaatgctcattcagtcaccaccaggggcctactctgtttcatgacctgtacaagacaatgggaagctaaataggatattgtttctacccttaagtatatcacaccataagagagttaggggacatataaaatcagatcattacaaacacaaaaaatggtctaagtctgatgttaaa

SEQ ID NO: 392262 - DNA, 582 bp, Homo sapiens
ccactaatttactgactggatgccccgcaaagggcagagcttgtgtgaggtgttctgcaaccaaggcagaccctgatggatctggcggctgaaggctctctgatgatcacccttcctaaagctgggcatcaacttttcttgaaggaggatctgggtggtgcatctctgagtaacacatgagagtaactggccatgcaatttcatcactcttgtgatagaaactttaggcaattaccaagatgtctgccttctctcttacttccatcttgtgtaagagttaatttggtagcttgactttcccctacttggtgataagttcctggaaggcagaatctggaaactatgaatctgaagaccgtacaggacatatcacagtgccctttatcttataaaggtggtgcagatgtttgttcaataaaacactaggagagaattgtctaagaaccacaggaaaaaggactgtccaatatatcatttttgartaattattgagagaaaaagattaattagcacttgtatcatacatgcttcaaaatgaatggcgaatgtaccaaatttttaaatataaaaattaaaacccta

SEQ ID NO: 392263 - DNA, 562 bp, Homo sapiens
taatctttaccaaaaaaaatttccataactcaaagtgttaaagatttttgtttggattgagttttcattacaattttaagtacaacattgatcaaaacaataaattatagtctacattttgatgattactggatttaaaattataattcagcatgcagctttaatgagatgaatggctactcctcccacaattacttaatgtatccatgaataaatatgaccaaccactaggataaatgagattcagcctcaagtacattcctatttttcattttaataaatgcttacaactgagaaattttttcttataaataaattgacatgaatgagttttgtaatagccttgtcactcttttttttgcactttttccaagttgtatatcaaaaccacagtgattcatcagcaaaaattatttttagtyatccaacaactgacaagtcaatgaggtctaccttcaattttgtggaaagaaaagaactggaaaacctgactttcagaaagatttgattactgaatcaggatagttatccattttctcaacacctaaactaatatttcaaa

SEQ ID NO: 392264 - DNA, 553 bp, Homo sapiens
ttatatttatatagctattaaagtggttagttaaaattatttgaataattcaaaaaattaagcaggaaagcatgaaatatctgcaaactgagaaagatacaatcacttatttatggaacaccaattttaattttatattttgaaaagatggcaataaatatttatatgtttctcatttttttaaacacaaaagccagggaggaaaatgcagactacagtgaaagcttgtggtttaaattccctttttagattttataataacctttatcttcctgaattttcttcctttattagtattatggaacagccagacttaattatctccttttaatttgtgtttcttatttcttttgtttggctcatrcacttgtttattcctttagatgtggattggtgagggaggggtagaagagtgaacacaaggagattctatgtcaccttttataagagaagttagactttattttcttatttaaatttcaatagatgatttgttaggcttaaagctgtgggtggtgaagaaattcttctttgaagaaaaagcgtattcatt

SEQ ID NO: 392265 - DNA, 619 bp, Homo sapiens
tcaacagtaagaaaacaagccatccaatttaaaaagcgggtaaaatacttaaaaatacacttcaccaaagatacacagatggcaaataggcatatgaaaagatgttcaatatcactagatattaggaatatgcaaattaaagccacaatgagatactactacacatctattagcattgctaaaataatggcaatattggcaatacctactgctgatgagatagcagaacaacttgatctctcatgtaytgttggtgggaatgtaaaatggtaccaccagtttgggaagcagtgtgatagtttcttataaactgacaaatatgactgagcaaccccattcctgagtgtttacactagaaaaatgaaaatgtacatttacataaaaacctgtacataaatgttcatcacctcaaactggaaacagtacaaatgtcctgtaccagttgaataaattgttggatgtctatatcatgagatattacacagcaataaaaagggacaaactattgatacccaaaaaggatggctctgaagacattattctgaggtgaaaaagccaatcccaaatagttacacagtgtgtgatttcactttatataagattctcaaatgacaaaatt

SEQ ID NO: 392266 - DNA, 566 bp, Homo sapiens
gagctccactaatgaccaactggatccatttccaagaccacttagcacagtggatatagacatctacttcagaggtggccagcagggatccagatgactgcatgagaactggactctcttcctctgtgttgtgtagttatacaagtacccactctgaacccagataacatactggaaagaggacaggaaggggaaattccttgagaggggagaatcacttagataagaagtttgcattttgaattgactatttaaatcctcagttgactatttacaccaacatgattgtgttaacctggacaagactgcagtgaattggaagtgacagttacctccaacaggcaagctaagktttccatcaccaccaatcagaaatgagggctcagaagcaagttatattctgttgtaaaaaaaaaaaaaaaaaaagaaaaagccatatctcttcacatctgaagtgctgaattgtaaataaaaaaaattaagccacctatgtacatttaaaagtaacatgaaacacttgattccaccagacatataactgaaaagtgttccacgataggaaaaat

SEQ ID NO: 392267 - DNA, 614 bp, Homo sapiens
tcaactgggaggctgtcaaaaatgaaaaaccttagactctatgcctaacctgttgaatcagaatctatattttagcaagatctctatcttgcatattaaagtttgagaaacaagaagcacaatgtttttgtttaaaacctgattgaatctttgtgctaactccatgyagtagataataacatccccattttaggaagttgttgagattgaatcctgacatgacctgccataaattaagtaagtggtaaaaccaggattcaggctgggtgtggtggctcatgcctgtaatcccagcactttgggaggctgaggcaggcagatcacgaggtcaagggtttaagaccagcctggccgacatggtgaaaccccatctctactaaaaatacaaaaattagccaggtgtactggtgggcacctgtaaactcagctacttgggaggctgaggcagaagaatcacttgaacccaggagatggaggttgcagtgagcgaagattgtgccactgtacttcagcctgggtgacagagcaagactccatctcaaaacaaaaaaacacaaacaaaccaggcttcagactcaggagggtatgtgattccaaaagatatacgattccaa

SEQ ID NO: 392268 - DNA, 614 bp, Homo sapiens
tcaactgggaggctgtcaaaaatgaaaaaccttagactctatgcctaacctgttgaatcagaatctatattttagcaagatctctatcttgcatattaaagtttgagaaacaagaagcacaatgtttttgtttaaaacctgattgaatctttgtgctaactccatgtagtagataataacatccccattttakgaagttgttgagattgaatcctgacatgacctgccataaattaagtaagtggtaaaaccaggattcaggctgggtgtggtggctcatgcctgtaatcccagcactttgggaggctgaggcaggcagatcacgaggtcaagggtttaagaccagcctggccgacatggtgaaaccccatctctactaaaaatacaaaaattagccaggtgtactggtgggcacctgtaaactcagctacttgggaggctgaggcagaagaatcacttgaacccaggagatggaggttgcagtgagcgaagattgtgccactgtacttcagcctgggtgacagagcaagactccatctcaaaacaaaaaaacacaaacaaaccaggcttcagactcaggagggtatgtgattccaaaagatatacgattccaa

SEQ ID NO: 392269 - DNA, 614 bp, Homo sapiens
tcaactgggaggctgtcaaaaatgaaaaaccttagactctatgcctaacctgttgaatcagaatctatattttagcaagatctctatcttgcatattaaagtttgagaaacaagaagcacaatgtttttgtttaaaacctgattgaatctttgtgctaactccatgtagtagataataacatccccattttaggaagttgttgagattgaatcctgacatgacctgccataaattaagtaagtrgtaaaaccaggattcaggctgggtgtggtggctcatgcctgtaatcccagcactttgggaggctgaggcaggcagatcacgaggtcaagggtttaagaccagcctggccgacatggtgaaaccccatctctactaaaaatacaaaaattagccaggtgtactggtgggcacctgtaaactcagctacttgggaggctgaggcagaagaatcacttgaacccaggagatggaggttgcagtgagcgaagattgtgccactgtacttcagcctgggtgacagagcaagactccatctcaaaacaaaaaaacacaaacaaaccaggcttcagactcaggagggtatgtgattccaaaagatatacgattccaa

SEQ ID NO: 392270 - DNA, 420 bp, Homo sapiens
gtcatgtctgttgacttagtaatcacatttcaggtaacacttaggggaaatcatttttaaaaattaaaaactacaaataaaatcactcaatgtggtggtataacgatgaatcagaaaactcaatttctagcaaggaaaatagtttaaaaattgtgaactataygatcaattacatagttactaaagatgataaaaaaatacaacatggcaatgctgatagtgtaatattatataaaaagctaagtatattttatctacattatgattatagccatttaaaaaatacaaatacttttggacaagaactagagggaagaccaaaatgtgccaaaagtaagatgtgctggaacaataaagttgtgggtaaattcttgctttaattttgaactttaataatgctatattggtagttgtcaaaaa

SEQ ID NO: 392271 - DNA, 555 bp, Homo sapiens
tgtcttacagttcttggatattctgttctgtgtttcttttttccagtaatttttaaatctctttttctttcatttttggaagtttccttgtcacatcctcaagctcagagattcttccctcagcccagtccagtctactaaggagctcatcaatggcattctttatttctgttagtgttcttgatctctagcctttctttctgactttttcttagaatttccatctctctgcttatatttttccatctgttcttaaatgttgtctattttttacattagagcccttaacatattaatcatatttgttttaattcccagtctgataatcccataatctatgccatatctgaaactggttctgatkcttaagtttcttcaaactgttgttttttgccttttagtgtgctttgtatagtactattttgttggaatctggacataataactaagtgaaagaaatcccagtaaataggccttcagtgataaggtctgggtaaagtggtaaggtttggggggatgaaaagcattctatagtccagtgatttgattccagtg

SEQ ID NO: 392272 - DNA, 583 bp, Homo sapiens
tatatataactaattaattttaacagacaaatgataattgtgcatattcatggggtacatagtgatgtttcagtacatacratgtatagcgatcagatcagtgtaattagcatggccatcttctcaaacatttataatttctttgtgttaggaacttttaccatcctccttctagctatttgaaactctgtaatgtatgattgttaattatagtcatcctccagtgctgtagaacactagaacttgttcctcctatctagctgtgattttgtttcatttaacaaatctctccctatccctcccttcctccaactttgttttacctcttctcttctttattcacctccactctcatgaccatctttgaaatcaaccaaatatggaacttaaatacagcattttagatattcatatttgtagaaaataattttatacttgcagctcttaattttaaaagcatataagtttgcatatctctttcttaaaagagaattcaaggccaacaacttaaattttacttctgacaggattttttattgttttctataggtcagtgagcctgaatagacaaaatatttcctag

SEQ ID NO: 392273 - DNA, 583 bp, Homo sapiens
tatatataactaattaattttaacagacaaatgataattgtgcatattcatggggtacatagtgatgtttcagtacatacgatgtatagcgatcagatcagtgtaattagcatggccatcttctcaaacatttataatttctttgtgttaggaacttttaccatcctccttctagctatttgaaactctgtaatgtatgattgttaattatagtcatcctccagtgctgtagaacactagaacttgttcctcctatctagctgtgattttgtttcatttaacaaatctctccctatccctcccttcctccaactttgttttacctcttctcttctttattcacctccactctcatgaccatctttgaaatcaaccaaatatggaacttaaatacagcattttagatattcatatttgtagaaaataattttatacttgcagctcttrattttaaaagcatataagtttgcatatctctttcttaaaagagaattcaaggccaacaacttaaattttacttctgacaggattttttattgttttctataggtcagtgagcctgaatagacaaaatatttcctag

SEQ ID NO: 392274 - DNA, 588 bp, Homo sapiens
accttcaaagtcttttgtacattgtagactctcaataaatatttgttaaatgagtagatttcagttatccaagagacaggcagtgttcttttggctgatgcttatatgcattcacttgaaaagagtattgtaacaaaatttgttcaagttggattttgtttgcatwttaagatactactgctgatacccatgcatatggaatgggtctttgatacaagtgagaaattgccaacactcatttacagcctattaataaatgggctttatcctatagattagtatctatgtccctgtcaacatggcagtggtaaagttcacatcaaagtaaaaattgaaaaacaaaattaatgttaatttggatttaaaagctcatacctgagttctgctttcaaggcagtgaggaactgtggggaactgtctggaactgttgatgctgcaggtgaagctagaacatgagaatgctataggctggtttgtagcacaatgaaaatggaagaataagaggtaaggccagttgcccggagactccaaataagaaacatggttatgaggaagtggtttagaattagggctttgaaaaataatagc

SEQ ID NO: 392275 - DNA, 523 bp, Homo sapiens
taacagcattcatgagcacagtaacttggaagaatctacatttygtacattttttttaaagtgcaaactttacggccaaagtccaaatgagaaatcaaaacaggcttccagacagtgaattatctttcagggcatgctcactcttgcttcaaacagtaaaacaaagtaactttcatgtatgatgaaagtcagtcagactaatgtgtccagtcatttaaaaagggaacttacttatcgtgactattgccctatttttccctgaaaagtttcaggtctaagctccattggcttgagtgatccaatgagctttgtaccctggggtaaaagagcgcaaagaaaaaggagggtattacaggtgacttccaggttagaaaaaagttacgaggagttagctctactaattgtatctacgttagcgaatggacgaatactatgtcgtgtaagagaagctaaagctagttcctcaaaaggtaactggcataattaaaacatccaaactcaagcatcatcaaacatcattttg

SEQ ID NO: 392276 - DNA, 310 bp, Homo sapiens
gattaaaatataaaacacctaatccataaatataactgatgaaaacataatcattttagctcactgagcttgcttgaaagataaaaaacataaaaatgaagataatgattttgatcacctaagattgtaaagcttttaacartgttaaaaaacaaggaaaaatactcataacctataacaatttattttcctaatatacaaaaagttcatttgttgagtgtttgttatgtgtgaagcactacatacaatatcccatttaattctcacaacaatcctgacaggaaagtactaattaacatcgtaattttac

SEQ ID NO: 392277 - DNA, 565 bp, Homo sapiens
cttttctttgcattaaaatcttccagtaactcccccatcgctaccctaarggatgaaattaagaactctcaacctggcatacatggttcttcatgatctggcctcattttagaagtttctaagtatgtaaataatcagtgaccattgtagaggtttatgtgtaattgtgaaatgaaatacatggaccaatttagaagaagatggggaattagaactaagaataggcattactgacctactttatcttatatacttaagttttctctgtgtcagtttcttcagtctatttaagaaatatcttacctgaagttccacatgtgccaactcacatggccacctaaacctgttgagccttgtctcttcccattcctctaaattcccctacctacctactacttgttgagcctcatctcttctgattcctttaaatgcactccagacagtatcacactacttgacatacttggatgtcatgctgtttcacataccaataagcagttactgatttccttttgttactcatatatccttctgttctctaattattattgtgattgactaattg

SEQ ID NO: 392278 - DNA, 536 bp, Homo sapiens
gaataggctgggctggagtcgaacagagaccagagcgacacatctggccagcatggcttgggtgtgcagggagcactarggtagtgatgtttctggggttctgggatgacaagattggcaaactcacccagcctgccctcacacttccccaggcctgggctgacacacacagaaagtcagacagaaaaaagtttcttttatttcttcttcttcttcttttttttcaatgtataccttggttaaagcctcacagacaccagcactgagcttcacacagggagcacaccataagcgagacaccaggtatcaggaggcatctaaaaggtgacagaaaagaggaggtgtggaaaactccagagtttagaagggacaggagtggaccctccaaacaagggggaatgctttcagcagtttctctccctgcactgtcaatgaccaggataacttcgaatataggggcgcaaaatttcaaagacctaaaagtgaggaaggaggggagacttggagcttgaagtgcctggcaaatgaggcagcag

SEQ ID NO: 392279 - DNA, 586 bp, Homo sapiens
caaacagcaagacttacagcagtaggagcgttgaatacatggttgctccaggctcaccctggccttggtctttgtaactaatcttaagaccacgtgtgaatggggttgatgttccatgctgaaggcccatgtctgggctatctccagggctgggttgagcctgggcctgagaagaaacagccatgggaagccaggggacaatgatgtgggaaccaggacagggaggccactgccttttccatacagatccctcccctgagtctgagtttaggagcttaaggaagccgaggacctacatcttctgaagccagaaactggaaagagacagaagtgaattatttcttgtgatagaagcagggaatcaacgccagctcacattgtcccacaccatgattagaagacctcattagccaggcatccagtgtcaggcactgtcytgagtaacgtgcattaatcacacttccctatgcctcataatgagcctgcaagggagatgtaattatccctagtttataggtggggataccgaggcctagagaagctgtatgacttccccagcggttcccaaggtgcaatggggccaggc

SEQ ID NO: 392280 - DNA, 586 bp, Homo sapiens
caaacagcaagacttacagcagtaggagcgttgaatacatggttgctccaggctcaccctggccttggtctttgtaactaatcttaagaccacgtgtgaatggggttgatgttccatgctgaaggcccatgtctgggctatctccagggctgggttgagcctgggcctgagaagaaacagccatgggaagccaggggacaatgatgtgggaaccaggacagggaggccactgccttttccatacagatccctcccctgagtctgagtttaggagcttaaggaagccgaggacctacatcttctgaagccagaaactggaaagagacagaagtgaattatttcttgtgatagaagcagggaatcaacgccagctcacattgtcccacaccatgattagaagacctcattagccaggcatccagtgtcaggcactgtcctgagtaaygtgcattaatcacacttccctatgcctcataatgagcctgcaagggagatgtaattatccctagtttataggtggggataccgaggcctagagaagctgtatgacttccccagcggttcccaaggtgcaatggggccaggc

SEQ ID NO: 392281 - DNA, 536 bp, Homo sapiens
gcgattctagctagaaggattgctgtggcagggccctccagctagtccagctggtgccttcctgacatgtgtacaccccttccatccacactccctcccaagtagtggctgtgtccctagcactctgggagtcgttcagcaccacagaggaagggaacctctctctgttattatcatgtatccccagctccctgttgtgggtggatgtacatggcagggggtccaggtcgcccasaaggttctcaggattattttttgaatggaagaatggtcagaactgcctcttggttcttgtctcccagcaatccgcaggtatacctggcctgaagccagaaagccaaaggggtccaactgtatccaaaagcccacttttctaagtaaatgtgcatcaggtgtcttaaccatcaagcatggatccagaaacgcttatcactgtctgtagcatatgcaaagcactgtgggagataacataatgtgaggtgtctggtctctgcccttgagatgctgacaatgtagttgctggaaaaacaccagtg

SEQ ID NO: 392282 - DNA, 594 bp, Homo sapiens
tactattttgaaaaggatccttttttttttgttctgggcagtagttttcaacagtgggtttaaaatattcatgttgtaaaccatgctgtaaacagatttgttgtcatccaggccttgttgtttcatttattgagcaggctgagcagattttgcataattctttagggccctaggattttcagaatgacccatgagcataggcttcaacttaaattcgccagctgcattcacccctaacaagagagtcagcctgtcctttgaagttttgaagccaggcattgacttgtcctgtctagctatgaagagttctagatggcgtcttcttcctrtataaagttgtttcatctacactgaaaatccattgtttagtgtggccacctccatcaataatcttagctagattctctaacttgctgcagcttctgtatcagcacttgctgcttcatcttgtactttattacagaaatggcttctttgcttaaacctcatgaaccaatctctgttagcttcaagtttctcttttgcaagtttcttacctctctcagccttcatagaattgaagagagttagggccttgttcgggattaggctttg

SEQ ID NO: 392283 - DNA, 590 bp, Homo sapiens
acaacccagccaatgcgtctttatagaagctttgcacacaaaataagcacccctcagaagaatgcataaatgacatgactaaatgtgacacagccaatttatgcagctacaaccaagcattcaataacacttcaaaccaatagacagcacacataatggatagcgaaatgctaacagaaacagacatatcaatcaaaatagatcattgcataagaagcaataaatcagaccaaagagcaatcataataccacagatagaaccatatattgcaggatctaacatgacatgcttgaatataatacacttctacaagtaagtcatttgttaatacttgatatgaattctgaaggaaatgaagaaacccaggcttgaaggaaatgaagattatgattatgaagtaggtycaaaggatgatactacaccaaatattgctaccacatgaaccactccatattacatatacccacatttcaaacctccacaggaaaaagtatgttactgggatacacatgagactatgacagaataacaaggatatgataaacagctaattttaccaaatttatctccactagataaatatcatcta

SEQ ID NO: 392284 - DNA, 497 bp, Homo sapiens
ctctggtaattaaaagctgaataatttttgggtccctcaagtctgactgtatgtcctcagaggatcatacagagagtcttttcctggcttccaactctgttgggtaccaaggatcctcaacactgggtactgcatttgggtgacaagccctccagcatgcttgcttaagtttctttcctaggacccacattatgcaatattggtagctattttatatagtttctcaatgatatatatttcaatttcccactttaaccagacataagcagtgcaggcctatgtaataattgactttctttgggccaaattaaatatttgttttgctaaccatcatctcataaattggagaccctgcttggtatgagccctttctggctccaccaacttcctagcttggcatcagtcaagaccwtgtcagccgtcattatcttcatgacctaggtaaggtcccctgtcacccaaggttttcctcagggagacagactttcaaggtgaag

SEQ ID NO: 392285 - DNA, 647 bp, Homo sapiens
ctcccccaaggagaacaggtcctcaacccaccaagcacctgacatgcccctaggccagtggagcagttacgtgcagatgtccagggtctgaaaaacagggcttcaacactaccccctccaagaacataaccctggcttgcacaaagtccccacacccacaatcagggcttcagaaacttgggaggctaaccgagaagctgtgtgcctatgtcctgggtctgaaagaaagctttatgtgtcacctgtgataaacacacaccaaggtcagcaaagaagctgtgctctcatgttccaaggctgagaagccaggctcttccttggtgctcaaagcccctgagggatagttgtctttctgcagaatatttgagggatatttgagggacaaatatttgaaggatatttgtctttctgcagaataagacattttgagtagtagtctcagagttgctttggtaagagaagagaaggcttcccaggccccgcagatgggtttttgaaggtagctctgggcccagggccacrtgagacgcccttggggaagaacagccatcactgtgggagcttgtgataatgatgtaggaatctacggcactgacctgaaaaactgcacagcctttataaaggccacagagaacggaatgagcacc

SEQ ID NO: 392286 - DNA, 612 bp, Homo sapiens
tctggcaataattctactgaagtcttaattaggattctctggtttcaggatacctgaaaaatacttggtgaaattgtgataaccattgcggactgtttgaactgcattctgagaaatctgttttcagatgtgtgtagtggggtcaagtaatctggkagtaaagctcccagagttactttttaaattttttcttaattaaggcattttacaaagtagcttcactgagatataattcacccatataaaatttacaattcactggcttttagtattttcacagagttgtgcaaccatcaccacagtcaatttgataacattttatcactccttcaagaaaacctgtacccattagcagtcactacacattttcctctccatcatctcttgacaaccactaattttgtctccttagatttgcctaaactggacatttcatataaatggaattgtgcaatcttttgtgactggcttctttcagttagcataatgttttcaaggttcagccatattgtatcatgcagcgtgtattgatacttcattccttttgatttgacaaaatattcttttgtatgaatatactatatttaatttatctattcataagttgatgga

SEQ ID NO: 392287 - DNA, 601 bp, Homo sapiens
aggctatgcaattgtcaaaagcttttaagttttttgaaaaagaacataatattgccacaatgtattaaaaycaagcagaaactatatacgtgaggtaaaaataataattgagttgaatatataatgaggacagattttacaggtaaaataaaaggaaggttagtgtcatccattaaattgtgtattctgttagtgatgaagaacgcatttgtttcttaaattactgaaaagcaactgataaaaataaatagccaagtggatggttttccatgaagcagaacaaaatagcagacagaatgttggaacttgcacaactgagatcagtgagaataaatcatcagtttgaagaaaataaaaaggtgggagaaaggactccaggtgatgtggtggtgagaatagtgagaaaggacgcaagcgaacttcctgaggtgacacaggaagagcggtgaggacacagcaaggagaagagagttcttgctgaaggaaagaaatagaaagttaagctctaaaacacttgtgttgtctgaagtccacagaggaagaaagaaaaggtgtaggaggaatagtaatagaagacaagaccaagcaaaataggaacagg

SEQ ID NO: 392288 - DNA, 636 bp, Homo sapiens
aattaccttgcaccattatcacatatcaattgacaatttatgtgtggttttatttctsactgtcaattctgttccactgatatttattacacccattcttatgctaattccacatcttgattactgtaacttggaaataaagtataacttcaatcgttttttcttatttttaaaattgttttggctcttctaggtctatcagttttgagaaaacatagaggaatactctctgttctacctttttgctcttcccactcctcatctattaccacctattttttcttctggtctcatatgtatttgagtactgaaggtgtttctcacagtattataagatagaaattgatactcaagctgcaactttggaaggaggggtgcttgaagtttgatccagtaaattagatataatcttgataaataaaatagaaaccagaagtctagtttagtttttaagatgtaaattcataataatataaataatgtccataataagattcagatgcaacaatccacatatctacacaaattcttaactgaaatggtgtcattgttaaattttgtgttatcaaactatggcctctggaaagtttaatttatttccataagtcacctttatcctaccaagaacagtttact

SEQ ID NO: 392289 - DNA, 606 bp, Homo sapiens
gtctataatttagtaggtctgtgacctggggagaatcagttgagtttcattagttttaactatactgattgtaaaataagaaaaataatagtagcatgagctccataaagtcctcagcagtctagtacactgtaggcaataacatgtttctaaacacatgatgaatgaatcttttatatagcatagtgtttttactcaygtttaaagccatatttaaattaaaacatgattcacaatattggtatctttaattctttgtgctcaacatttaaaacctctgaattgaggacattataaatatagatatagtcattgtagtcatataaaattatataaattgtatttaaaatttatagaattttaaatataattcaaaggaaactagaattttacttatgatattaatcacattcattcatgaaggaatgctatatatttcagagaactctacaatttcatctcataaaaccaatgttactttacaacaaactcttaccacaaatttttcataaccatcagtgtttaaaatgataagttaaacacacagatatgtggattctttaatggtaaacatattttttcacttatttttctgacattagtttg

SEQ ID NO: 392290 - DNA, 597 bp, Homo sapiens
caaatttgttgttgttgttgtttgagacaaagtttgcctcttgtcacccaggctggagtgcagtggcatgatctcggctcactgtaacctctgtctcccgggttcaagcaattctcctgtctcagcctcctgaatagctgggattaccagagcacaccacaatgcctggctaattttgtatttttagtagagacaaggttcgccatttttatatcccttgaggcatctactgcctatgccatccaaattattaccaaaggcccaaattactgttcctttatgggtctgtagagaatgttatataggttttagtagactgcccaaaatgacttttccataagccctattatttctagtgtgtgaattggcagaaagcaagctcttttgcatatttcatgttgtggcagaatactcttattgctaaaaggaattctgtggctaatgaggagtaaattaataatttaagtatagataaaataaagtgattcaataaatttaatgaaataataattgtactttcatagcagaactatgtgttaatataatcaactcaaaagacagtttgtaatsaaataaattgttttatttaatgagtta

SEQ ID NO: 392291 - DNA, 634 bp, Homo sapiens
cactgcttgttgcctctaaaacaataaaagaagtcaaaataaatcagagcatcagattaattatgctgaattagacagtcaagaaacacactcacttggtccaaggcaagcccctgtcacgggattctgaccatcaggagattctgaaaaagtgaaagtaacatttcacagttagcttaccctctaactgggagcgtctgttgggccactgaaaagatgtagatttgtaaaggtttgcatttcaaaagataattcttgaattacagggcaattccaaacctctgacagtacaaaataagtcaagttactgttatttccttatcaaaggcargaactatagttcttcatcaaaataaatccgaactttattcagtcagaatatttgttcgctgttactcatttttagctgtaaatacagccttcactaattattcagtgatagttctaaaatatagaatcccctacataatgcttcactgaaaataaaaaaaaaagaaaaaccacactttctcacagtgatcaaaatggatttctttttattttatttcatttttttcacctgagagcagcatatgctttgaatttgtagaaacctgttttatttcatacctgagaaagtaacttttggtgatgc

SEQ ID NO: 392292 - DNA, 634 bp, Homo sapiens
cactgcttgttgcctctaaaacaataaaagaagtcaaaataaatcagagcatcagattaattatgctgaattagacagtcaagaaacacactcacttggtccaaggcaagcccctgtcacgggattctgaccatcaggagattctgaaaaagtgaaagtaacatttcacagttagcttaccctctaactgggagcgtctgttgggccactgaaaagatgtagatttgtaaaggtttgcatttcaaaagataattcttgaattacagggcaattccaaacctctgacagtacaaaataagtcaagttactgttatttccttatcaaaggcaagaactatagttcttcatcaaaataaatccgawctttattcagtcagaatatttgttcgctgttactcatttttagctgtaaatacagccttcactaattattcagtgatagttctaaaatatagaatcccctacataatgcttcactgaaaataaaaaaaaaagaaaaaccacactttctcacagtgatcaaaatggatttctttttattttatttcatttttttcacctgagagcagcatatgctttgaatttgtagaaacctgttttatttcatacctgagaaagtaacttttggtgatgc

SEQ ID NO: 392293 - DNA, 634 bp, Homo sapiens
cactgcttgttgcctctaaaacaataaaagaagtcaaaataaatcagagcatcagattaattatgctgaattagacagtcaagaaacacactcacttggtccaaggcaagcccctgtcacgggattctgaccatcaggagattctgaaaaagtgaaagtaacatttcacagttagcttaccctctaactgggagcgtctgttgggccactgaaaagatgtagatttgtaaaggtttgcatttcaaaagataattcttgaattacagggcaattccaaacctctgacagtacaaaataagtcaagttactgttatttccttatcaaaggcaagaactatagttcttcatcaaaataaatccgaactttattcagtcagaatatttgttcgctgttactcatttttagctgtaaatacagccttcactaattattcagtgatagttctaaaatatagaatcccctacataatgcttcactgaaaataaaaaaaaaagaaaaaccacactttctcacagtgatcaaaatggatttctttytattttatttcatttttttcacctgagagcagcatatgctttgaatttgtagaaacctgttttatttcatacctgagaaagtaacttttggtgatgc

SEQ ID NO: 392294 - DNA, 575 bp, Homo sapiens
tttggtgatgcatactttatgaagcctacaaatcacccactttggatttccataagacctgtaaaaatgtaactttgttccagatatttttgtagctggcaacatgtcctttttttctctctctctttcttcagagtcagactctggggatacattaactcagtggccygttttatatgaggtgagattttggattcagtcttatttatgactttgatcttgcagattttgcattcttccttttaaaatagtccagttaatttggaatttgaatatttcagactcaggatttctaaaaataactttaattttaatttcagattgtatttgctttttgtgacataaggcaggatttttaaacttaagtttctcccttaaagaaaacattttaaaaaattgtgggtttttttttattttttcttggtgacattgagtcagtattttacacccaaagtgcttaaaactgatagactaacatttaaaatagaaaaaaatatgaattgtcagtgttgtatcaaataatttatctcctatatattgaataatattgaatttgatatttaaagttgaaatgc

SEQ ID NO: 392295 - DNA, 575 bp, Homo sapiens
tttggtgatgcatactttatgaagcctacaaatcacccactttggatttccataagacctgtaaaaatgtaactttgttccagatatttttgtagctggcaacatgtcctttttttctctctctctttcttcagagtcagactctggggatacattaactcagtggcctgttttatatgaggtgagattttggattcagtcttatttatgactttgatcttgcagattttgcattcttccttttaaaatagtccagttaatttggaatttgaatatttcagactcaggatttctaaaaataactttaattttaatttcagattgtatttgctttttgtgacataaggcaggatttttaaacttaagtttctcccttaaagaaaacattttaaaaaattgtgggkttttttttattttttcttggtgacattgagtcagtattttacacccaaagtgcttaaaactgatagactaacatttaaaatagaaaaaaatatgaattgtcagtgttgtatcaaataatttatctcctatatattgaataatattgaatttgatatttaaagttgaaatgc

SEQ ID NO: 392296 - DNA, 616 bp, Homo sapiens
gctactgtagtattatttcctaggctaaacatatgttttctgtaagtaattgattcgcagttatgaattcagtgcctagatcccagtcgtgttcatcttgctgtaaattgctcaaaacggtgatatattcctgcacaaaaatgtcaacatttatggttaactccacaaacaaccctctggactggtctattcttctattctcctagcaacatattttaagtccaacacaaatacctggtttagcagttttgacaattacatcagtgagtgttctactagagaaacagaactagtagaagggagagagaaagatggagagagagagagagacttattgcaaggaactggcttatgcaagggtcacagctggctaggcaaatctgaagtctgtagcagtgtaaacctggaggaaggrcaggctgcaaactcgggcaggtgctaaaactactgccctcaggtagaatttcttcttagggaaactgcagttctgctttgcctttcaatggattgagtcagctctagatagattatgaaagatattctcttgtacataaagttgatggattgtatgtgttaatctcctctacaaaatatctttatagcaatgccaagatta

SEQ ID NO: 392297 - DNA, 616 bp, Homo sapiens
gctactgtagtattatttcctaggctaaacatatgttttctgtaagtaattgattcgcagttatgaattcagtgcctagatcccagtcgtgttcatcttgctgtaaattgctcaaaacggtgatatattcctgcacaaaaatgtcaacatttatggttaactccacaaacaaccctctggactggtctattcttctattctcctagcaacatattttaagtccaacacaaatacctggtttagcagttttgacaattacatcagtgagtgttctactagagaaacagaactagtagaagggagagagaaagatggagagagagagagagacttattgcaaggaactggcttatgcaagggtcacagctggctaggcaaatctgaagtctgtagcagtgtaaacctggaggaaggacaggctgcaractcgggcaggtgctaaaactactgccctcaggtagaatttcttcttagggaaactgcagttctgctttgcctttcaatggattgagtcagctctagatagattatgaaagatattctcttgtacataaagttgatggattgtatgtgttaatctcctctacaaaatatctttatagcaatgccaagatta

SEQ ID NO: 392298 - DNA, 588 bp, Homo sapiens
ggatatgattccaaaatagcctgtcttaatgccaatgccatggagctacatgaatttatattggatatttagatttactttataagaaggaatgtaaacagttcctggcacaatgcttggttcatataattgccattacaataaggtgtacaattcatagtacaaatgatcatttaaagaatacaaggtacctgtaccagaaggccccccaatggctattatcagttagggtttttcatgggaggtgaccgaaacacatcatgacagtactggctctggactctgtaacacaatcaggctgatctggtcagcccggcttccacgtcacctggctttatctaatgagaggcactggtgggagtgtggcaggcaagaagaagggagatgccacagtatttcttctctccctctctgtctccagcagcttctcctgctgcagctaagtctcttttattgctctagtttctgccagataggtctactgtggtttcaacttcttccaggcaactctggcctcctaattctgataacrccactttttccctttatccctccagcctaagggtgacagtagcttcctgctatggc

SEQ ID NO: 392299 - DNA, 442 bp, Homo sapiens
ctatgtacccacaaaaattaaaaaagaaatacctatgtcagggccccacaccagagactgattttattaatttaggagtgggcccagaaagctgttatttttaaatttttcccaggtcatgctcataggcagccttgtgaagaaccagagctttaaaggatgattctcaaagggcactgtgtggaaccctagaaatccccaaaaccttttcagagagtccatgaagtaaaaagtattttcgtaatagtagtaaaacatgatttaccctcttcactgtattgacatttgtgacatttgtacaatagtgtaaaaggcratggtgcataaaactgctggcatcctggcctaagtcaagacagtagcaacacaatgtactagttgccgtcatattctttagtcatacacattctattttttaaacaagtttctattaactatgtcc

SEQ ID NO: 392300 - DNA, 598 bp, Homo sapiens
tgagtcacctgatgtaggtggaaatgaaaaaataagactggcaagaggtcacaattctataaagcaatatttctcaaagattttgctaaaatctcccttatccgatggtaataatgtaatcactggcgggttaaggatagcccatatcaggaagaactcattgcaaactatataatgaaaaagcttactctatccttgttctatgtttgttttaatataaaaatatgatatcctctcccaaagacatgatgtctttggtttgagaaagagtggaaagtcttagagtaggacttaggccaccagaattctagctgtagtgttgccaacaaatacctgyctgacttttgacaagccaacctctgtgggattcaatttcttcaaggaatggtgaggtaggtaggctatatggcttccaaggcctacaagtatgttgatagtctaattttctgtgaaaatagcatcaattaaattaaaatgctagaagaaatacatgatatcttcagtcagaactcctttctgaaagtatctattatttatctaataggctaaataatagcttataggtaatctagtgagacagctggctcttagcaaaatt

SEQ ID NO: 392301 - DNA, 631 bp, Homo sapiens
tgactccattcaaccagagctgcttcccaaggcctccaccaaaaacaggggattttcagggtacaaagaatttctattgtaacaatagtagcagctctgagtttatgaatagttagaaacgaactattcacttggcaatagtagcaaatatgtttatgggtgctgggtgatatggttactccttttccttctattctgctcttgctacagaagtacggcttaaatacstcttattctatgaaatcatctctcaatagtagtgttttcctctctaccaaatacttctgactttttattgttttgtactattttcatatactgaatgtttttgagtgaatgtaaaaaaaacagattatttaagattgggtttctaatagtgaagttccaaattcaaccactttttcattttaataactggtaaatgggtaactagtaacttctactttacagaaaggtagattatttactgaggatcaaccaaataaataactatttattttgtgaatacattatttttcatctgccaattaattttactccacctttagtttaaatgttagatatggacacagattttttgaagtaaatatatgtagaaatgatttactacttggaattatgcaattatttt

SEQ ID NO: 392302 - DNA, 662 bp, Homo sapiens
cttacttgttaacaccaataaaaatatacagttgtacctcatagagtttttatgtgacttaaatgaaatactgtaggtgaaagtgttcagtacttgatagatttttttttttttacacaaagtgcatcagtgtcttggatgtaaaagaarttcagtgatattttgtggtctcgcttgagatattacctctctctttcttttaaatattgtttctttaaaataattttatttagcaaagtcccaaattttccatcataaattagagaacaaattattttcaacttaatttatcacatgcaccaaacaatccttttcatactcctgctttgataaaatcattactttcctatttctgcagtttactgaaattatttccctgagctgtaataaatcttcctgatctaaagtttgtaagttatcaagtctagtcattttcattttcatcaaaagcctgcttcatatgaagggccaatggattgaatatctgtagctataattaaaaacaaattagcctcaaagtaatacagttctttattaatctcttccaaatacactttctctacaattcatttgaagctgatttaagatttgaattcgactttttaagatgaggctaaaacttttaaagtgcataaatgacatagaggccaatggaaagatta

SEQ ID NO: 392303 - DNA, 662 bp, Homo sapiens
cttacttgttaacaccaataaaaatatacagttgtacctcatagagtttttatgtgacttaaatgaaatactgtaggtgaaagtgttcagtacttgatagatttttttttttttacacaaagtgcatcagtgtcttggatgtaaaagaaattcagtgatattttgtggtctcgcttgagatattacctctctctttcttttaaatattgtttctttaaaataattttatttagcaaagtcccaaattttccatcataaattagagaacaaattattttcaacttaatttatcacatgcamcaaacaatccttttcatactcctgctttgataaaatcattactttcctatttctgcagtttactgaaattatttccctgagctgtaataaatcttcctgatctaaagtttgtaagttatcaagtctagtcattttcattttcatcaaaagcctgcttcatatgaagggccaatggattgaatatctgtagctataattaaaaacaaattagcctcaaagtaatacagttctttattaatctcttccaaatacactttctctacaattcatttgaagctgatttaagatttgaattcgactttttaagatgaggctaaaacttttaaagtgcataaatgacatagaggccaatggaaagatta

SEQ ID NO: 392304 - DNA, 662 bp, Homo sapiens
cttacttgttaacaccaataaaaatatacagttgtacctcatagagtttttatgtgacttaaatgaaatactgtaggtgaaagtgttcagtacttgatagatttttttttttttacacaaagtgcatcagtgtcttggatgtaaaagaaattcagtgatattttgtggtctcgcttgagatattacctctctctttcttttaaatattgtttctttaaaataattttatttagcaaagtcccaaattttccatcataaattagagaacaaattattttcaacttaatttatcacatgcaccaaacaatccttttcatactcctgctttgataaaatcattactttcctatttctgcagtttactgaaattatttccctgagctgtaataaatcttcctgatctaaagtttgtaagttatcaagtctagtcattttcattttcatcaaaagcctgcttcatatgaagggccaatggattgaatatctgtagctataattaaaaacaaawtagcctcaaagtaatacagttctttattaatctcttccaaatacactttctctacaattcatttgaagctgatttaagatttgaattcgactttttaagatgaggctaaaacttttaaagtgcataaatgacatagaggccaatggaaagatta

SEQ ID NO: 392305 - DNA, 588 bp, Homo sapiens
caattcacttcttaaatgttcyataaatcagaaactcaatatttattaggttggctcaaaagtaatcatagttttcaccattacttttaatgggaaaactgcaattatgtctgtaccaactgaataactgatgtttataactatttaaaattatagtaacttttgcttgacagaggtatattcttaatatgttacaaagattgagcatattacatatgctatttacttctaattacctcaaacaatttgttcttttctactaaactgcatcgattttagtgccataaagcacaatattaactatactcattactcatataagaaaagacacattaagaaggcactttgatacagtggcactttgggaaaagagaaaaagatacacataaacagaaggcaagaaaagacgaccaagaatgtcagcaagaaaaataaattaacaactgcatagggacctacttcttgtgttttatcagaaaataatcaatggaaaaatataaagggaatttcattaataattgcattttatatctcctgtttactatgataggtttaaatttacaactcaacacaaatatccagtttacc

SEQ ID NO: 392306 - DNA, 588 bp, Homo sapiens
caattcacttcttaaatgttctataaatcagaaactcaatatttattaggttggctcaaaagtaatcatagttttcaccattacttttaatgggaaaactgcaattatgtctgtaccaactgaataactgatgtttataactatttaaaattatagtaacttttgcttgacagaggtatattyttaatatgttacaaagattgagcatattacatatgctatttacttctaattacctcaaacaatttgttcttttctactaaactgcatcgattttagtgccataaagcacaatattaactatactcattactcatataagaaaagacacattaagaaggcactttgatacagtggcactttgggaaaagagaaaaagatacacataaacagaaggcaagaaaagacgaccaagaatgtcagcaagaaaaataaattaacaactgcatagggacctacttcttgtgttttatcagaaaataatcaatggaaaaatataaagggaatttcattaataattgcattttatatctcctgtttactatgataggtttaaatttacaactcaacacaaatatccagtttacc

SEQ ID NO: 392307 - DNA, 588 bp, Homo sapiens
caattcacttcttaaatgttctataaatcagaaactcaatatttattaggttggctcaaaagtaatcatagttttcaccattacttttaatgggaaaactgcaattatgtctgtaccaactgaataactgatgtttataactatttaaaattatagtaacttttgcttgacagaggtatattcttaatatgttacaaagattgagcatattacatatgctatttacttctaattacctcaaacaatttgttyttttctactaaactgcatcgattttagtgccataaagcacaatattaactatactcattactcatataagaaaagacacattaagaaggcactttgatacagtggcactttgggaaaagagaaaaagatacacataaacagaaggcaagaaaagacgaccaagaatgtcagcaagaaaaataaattaacaactgcatagggacctacttcttgtgttttatcagaaaataatcaatggaaaaatataaagggaatttcattaataattgcattttatatctcctgtttactatgataggtttaaatttacaactcaacacaaatatccagtttacc

SEQ ID NO: 392308 - DNA, 588 bp, Homo sapiens
caattcacttcttaaatgttctataaatcagaaactcaatatttattaggttggctcaaaagtaatcatagttttcaccattacttttaatgggaaaactgcaattatgtctgtaccaactgaataactgatgtttataactatttaaaattatagtaacttttgcttgacagaggtatattcttaatatgttacaaagattgagcatattacatatgctatttacttctaattacctcaaacaatttgttcttttctactaaactgcatcgattttagtgccataaagcacaatattaactatactcattactcatataagaaaagacacattaagaaggcactttgatacagtggcactttgggaaaagagaaaaagatacacataaacagaaggcaagaaaagacgaccaagaatgtcagcaagaaaaataaattaacaactgcatagggacctacttcttgtgttttatcagaaaataatcaatggaaaaatataaagggaatttcattaataattgcattttatatctcctgtttactatgataggtttaaatttamaactcaacacaaatatccagtttacc

SEQ ID NO: 392309 - DNA, 674 bp, Homo sapiens
aaagctttataagaatctttaaaattcttataatgttcctgctgtgagctgaaacagtaataaaaattcattcttttcaagtttccctaataagaaatgcctcttctgagtatacaaaatgttaaatcaattattacattgcattgtttaaagctttcacaggtcctaatattatctcagattctttggcaaagatcttgattcctgagtctttttcaatatggtggtaattttgtcaagccagaggaagcctgccctagtgtgatggcgagagaataaatgtaactcatttgctttttacaaattagttattaaatttcatattgacgtttgacattgacactgacaaaatgactggagaggttttctttcttcttgctactctcttaaaaaaataaaaattcatagcttaaaaaatactatttctccaaacctccattgagaaacygattaaaatgattgttagggacagacagccaaaaggaatatgctacaatttgttaaataaattaatttttaaaatacaatgtgaaaccagcatgtttcagtacatattaatagaacaaaactttatattttgtgaatccagtttggtccatcaaaagaggtgattatagaagtctccacggataatttagagtttactatatgtatacatatatacagacacacac

SEQ ID NO: 392310 - DNA, 674 bp, Homo sapiens
aaagctttataagaatctttaaaattcttataatgttcctgctgtgagctgaaacagtaataaaaattcattcttttcaagtttccctaataagaaatgcctcttctgagtatacaaaatgttaaatcaattattacattgcattgtttaaagctttcacaggtcctaatattatctcagattctttggcaaagatcttgattcctgagtctttttcaatatggtggtaattttgtcaagccagaggaagcctgccctagtgtgatggcgagagaataaatgtaactcatttgctttttacaaattagttattaaatttcatattgacgtttgacattgacactgacaaaatgactggagaggttttctttcttcttgctactctcttaaaaaaataaaaattcatagcttaaaaaatactatttctccaaacctccattgagaaactgattaaaatgattgttagggacagacagccaaaaggaatatgctacaatttgttaaataaattaatttttaaaatacratgtgaaaccagcatgtttcagtacatattaatagaacaaaactttatattttgtgaatccagtttggtccatcaaaagaggtgattatagaagtctccacggataatttagagtttactatatgtatacatatatacagacacacac

SEQ ID NO: 392311 - DNA, 570 bp, Homo sapiens
gaataaatgtaactcatttgctttttacaaattagttattaaatttcatattgacgtttgacattgacactgacaaaatgactggagaggttttctttcttcttgctactctcttaaaaaaataaaaattcatagcttaaaaaatactatttctccaaacctccattgagaaactgattaaaatgattgttagggacagacagccaaaaggaatatgctacaatttgttaaataaattaatttttaaaatacaatgtgaaaccagcatgtttcagtacatattaatagaacaaaactttatattttgtgaatccagtttggtccatcaaaagaggtgattatagaagtctccacggataatttagagtttactatatgtatacatatatacagacacacacacatacatgcttatatatatagtgtatgtgtatatatatactcagcaaagtatagtgtgtgtgtgtgtgtgtgtgtgtgtgtgtgtrtacataaaatactctgcaaagataataaacttaaaagtaaaaggaaattaatgaatctcctggaaagtacagtgcattgtct

SEQ ID NO: 392312 - DNA, 594 bp, Homo sapiens
tctgttgattgtcttatttcttgtgccaaaactttttggtttgatgtaaacccaatctatttttgtttttgttgcctgtgttttgggaatcttacccattaaatacttgcccaatgtcttcaagtatttctcctgggttttcttttagtagttttatagttttgggccttacatttaagtctttaatcgatttgagttgatttgtgtgcatggtgagatgcaagggtctcgtttctttcttctgcatatagatattcagttttcccaactccatttattgaagtggtgattctttctctaatgttcttgggaactctatagaaaatcagttggctgtaaattgtagatttctgggttctctattctgttccattggattatgtstacatttttatgctagtatcatgatgttttggttattaaagctttgtagtatatttttaagtcaggtagtgtgatttctccaggtttgttgtctttgctttaactattatgtgtcttttgtgcttccatacaaattttcgaattgctttttctatttctatgaaaaatagcattggaattttgatagggattacattgaatctgaagatt

SEQ ID NO: 392313 - DNA, 450 bp, Homo sapiens
gtattgaagaattttcaccaagaactcccaaaaatatggagggaaacagagctcactagagggaaacctaagaatggcgtaactatactgggaagtaggcactgttttttcttgcacaaatgctttattgatttggtgtacctgtgcatgccaggcactgacaaaatagaggtaaaaagctcttgtactttcatgttctagtcttggaaacaactgataaatgtgtaaacatatacaaatgcctatattctgtttccaaatttaaagtgcaytgagtttttaatgtttaaataacctacaaattgtgtttctagataaagacttaaagaaaatattaccaataaaaggagaaaaagttaacactacgtatctactctgtatctacattaagtgtttcatttaatcttcccaccaataacaaaaatagtaatacctgctgataaaaaaaat

SEQ ID NO: 392314 - DNA, 521 bp, Homo sapiens
agtcttatcatattcattccttataaaaatgaagattagttttacctaggtagttcatctgccttaagattctggaaagcagtaagtcacttatcaaggtagtagtaccagaaaatataatcaccacgaagctgatgaagcttaaatttctgaacccttcaattttacaggctcctctgaaatgcgggagagtttaaaaatatgttcactgagtaccttttttcarttttcaagagttgtatattttatgttctctttttaaaaaaaaataaaacatacaaaattatgtaaggtgcatgtcccagaaaacatggttttattcttagataatattgacatcactggcatatctctacacaagtgggataggagaaacttccatggcagtgatcccttccacatagagaatatgggaagattttcattttttggtttgaagccacagctatcatttcaagaaaattcttatcctggtacctcagatggagcctcgtcgtccttgagataatcacaagccttgt

SEQ ID NO: 392315 - DNA, 486 bp, Homo sapiens
tatagatttggcagaccgattgaagaggtactttaggtcaactgcattgtagttctttcgtgcatcctgccaccaatagcctactatagctgctgtttgattaccctgttttcatgatgattttagagtcctcagataagtacctgtccctgcaggcattttcacaagacagttgatcctgaagccaagaattacattttacacaaacatgtgcagacatacacatacatagataattcactgtgttttccattgcctttctttgaattctttgtactatgwagaaaatatccatctacccaacatatttctattaccacttctgacactgacactacaatctttgagctgttaaattaaagacaaccatcatgaaacattctatgcatttgcaatgaaaagtatgagaagtcttagtccacaagctgttatgtattaaattgaagctacacctgttttcctcttgcctgtaccaggcattagaaa

SEQ ID NO: 392316 - DNA, 486 bp, Homo sapiens
tatagatttggcagaccgattgaagaggtactttaggtcaactgcattgtagttctttcgtgcatcctgccaccaatagcctactatagctgctgtttgattaccctgttttcatgatgattttagagtcctcagataagtacctgtccctgcaggcattttcacaagacagttgatcctgaagccaagaattacattttacacaaacatgtgcagacatacacatacatagataattcactgtgttttccattgcctttctttgaattctttgtactatgtagaaaatatccatcyacccaacatatttctattaccacttctgacactgacactacaatctttgagctgttaaattaaagacaaccatcatgaaacattctatgcatttgcaatgaaaagtatgagaagtcttagtccacaagctgttatgtattaaattgaagctacacctgttttcctcttgcctgtaccaggcattagaaa

SEQ ID NO: 392317 - DNA, 622 bp, Homo sapiens
gcttgcttccccttcactgtccatcatgattttatgtttcctgaggcctccccagccatgcctcctgtacagcctgcagaactgtcagtcaattaaacctcttttctttataaattccctagtctccaawagttatttatagcaatgtgtgaatggactaacacaataatttaatgcagtacatggcacagaagacacagctcttatttttataaaaaagtgtttgttttgttattaatattgcttttttattcattccaaactgttacgaatatgcttaaaaattttaatgtgttcgtaattttgcagtcctccttgaacatttctttcaaatctaagctcaaatcataatcactcaattaaaaatgtaatagttcaaaaattgcagacaaaatggaaaaaggaaacaaaatcagctaaccaattattctcttgctctttatgtcaccatgtaacctaagtgacacttttttttcatcaacttgtcatttttaagtttacatgactaaattgtatagttcttttggcagcttatgggccaaacttagatactgctgtgagtgtccaaatcacaaatctatataaaggtccacttgtgtctttaaccacatgcagtagattt

SEQ ID NO: 392318 - DNA, 603 bp, Homo sapiens
caattcgctctaagtgtgaatcatttcttgaaaaattttgattaaacaggaaataaatttttaggattaaaacagaactcctctgcacatttgactcccactttctccccaaggcaacagtcaacttaagaccttttctctgtgtcaagtccagctagaaatacagatagagaaatcagtaagtagccaggagctgtttgagcttcaaaactattctacatgcactgtgaaactgcccattcaacaagctaratagagtcattaagggaaaggactgtggcatattcttatgcccccttcagtgttagaacactagcctctaatttccttccctagttatgtgcaaatttcagatattcaggatatcttgtttctagttaatagaaaaattttgttaattagacataatctaagttaaaagcatttaaataactcttaagtaataaaaatatagctgacattttatctttactttttaccagatctataaaaaagaagaggaaacatacatggtttaaggtaggagaaacaagctaaagaggaaaaacaaaaatgaccataggaagccaggccagagtaagaagagtctgttgtttttaacag

SEQ ID NO: 392319 - DNA, 603 bp, Homo sapiens
caattcgctctaagtgtgaatcatttcttgaaaaattttgattaaacaggaaataaatttttaggattaaaacagaactcctctgcacatttgactcccactttctccccaaggcaacagtcaacttaagaccttttctctgtgtcaagtccagctagaaatacagatagagaaatcagtaagtagccaggagctgtttgagcttcaaaactattctacatgcactgtgaaactgcccattcaacaagctaaatagagtcattaagggaaaggactgtggcatattcttatgcccccttcagtgttagaacacyagcctctaatttccttccctagttatgtgcaaatttcagatattcaggatatcttgtttctagttaatagaaaaattttgttaattagacataatctaagttaaaagcatttaaataactcttaagtaataaaaatatagctgacattttatctttactttttaccagatctataaaaaagaagaggaaacatacatggtttaaggtaggagaaacaagctaaagaggaaaaacaaaaatgaccataggaagccaggccagagtaagaagagtctgttgtttttaacag

SEQ ID NO: 392320 - DNA, 603 bp, Homo sapiens
gtgttatataggtaaagactttttaaaaacaatattataaaaattcaaaataaaatctgagctaaaaaatatcttacattaattttgtatccaaaccacagtttttctagctattcaagcataaaataatacactgggcctaataccttcatctggattttggaaacaaatacatgtttttccatrgttgtttacaattcttcccttcagttgtcccacagaatagctctagatctgaaacgagtttgcattctaaaaccaaactgaatctgtctaacttcatcactgccacattaaaattattcttaatgatcattttttatttaacaatatatctaacttcattactcattttcttctaaaaatgtaatgtgacaagtatgtttctaaacataaatctgcaatgaattgcttatttaaaatactctgttcttccaagaagagacaagcctcattaattcagacattcaaaggggcaaagatcaaaatagtgacatatttacaaatacataaagaagttatcatttataagacatttactgagcacctattttgtgccagccattatgccaaacaccattaaaatgcaaatgtgaagctagc

SEQ ID NO: 392321 - DNA, 603 bp, Homo sapiens
gtgttatataggtaaagactttttaaaaacaatattataaaaattcaaaataaaatctgagctaaaaaatatcttacattaattttgtatccaaaccacagtttttctagctattcaagcataaaataatacactgggcctaataccttcatctggattttggaaacaaatacatgtttttccatggttgtttayaattcttcccttcagttgtcccacagaatagctctagatctgaaacgagtttgcattctaaaaccaaactgaatctgtctaacttcatcactgccacattaaaattattcttaatgatcattttttatttaacaatatatctaacttcattactcattttcttctaaaaatgtaatgtgacaagtatgtttctaaacataaatctgcaatgaattgcttatttaaaatactctgttcttccaagaagagacaagcctcattaattcagacattcaaaggggcaaagatcaaaatagtgacatatttacaaatacataaagaagttatcatttataagacatttactgagcacctattttgtgccagccattatgccaaacaccattaaaatgcaaatgtgaagctagc

SEQ ID NO: 392322 - DNA, 620 bp, Homo sapiens
aactccttaaccatatgtaactccttaaccttatgtagtttgataactggaggaccaagcagaagctgtgtcagttatgaagccttcccccatctaaaatctgtatgttgttctcattgaatgtaaccacgaaatttagctgggcaagagtttgagactaagaagataaataagaaatagatgtctaaataaagaatagaggaattttgagaattatgaagtattagaaaagagagatggggatgaaaagcaagatctagaggagtctgtttygattcttagataattctgagatgtgttcacagagccagtaaaacgacaaataataatatatgtgaaaggaggcttaaatgcattaaaattctttaagtgaaaactatttaaatcattaacgtatttcaaatgtgacctctggtgaattatgtattattttcctttcatttccctcgtcttttgaatcagaataacaataatgcttatgttgacaaattgttgtgaggacaagggttacaatattaaaaaagtcttctcagggtgcatcttcaacaactagtaacttttattatgccaattaatttttaaagtatccagatatcatttttgaaaaacttttaaaaaca

SEQ ID NO: 392323 - DNA, 573 bp, Homo sapiens
tgatattgttacttatctttctcttctaaaatgcttcatgacagcaaaatcaaaacttcttatcttttttattttctttccaatgtctagactctgtttggtagattctcaaaatgtattttctgaatggatgagtgaatgaatgaatgccaaatagtttttatgagcatcgggtttttagttttcgttgttaaacaattaaaaattgctctgtttttcaatgtgaatttattgtttcctaaagctacaggatacactttatatgtctctcattgggttgcacatctctaaggaataagattccttattccttaaggaatgagaggcaatttagagaaggtagaaattccaacaagctcaattaattgcatagtactttccctcaggacatttccaacactaatcctaggtcttagtcayaaaagaggctccccaagtgactgtaatagacagcattcatttaaaaactgtcacctctagacctgtggctttattgattttacattacttttacttttgaggcatcaaaatcaggaacacgatgaatatcatgctaaatgtgtgattggtagg

SEQ ID NO: 392324 - DNA, 412 bp, Homo sapiens
tgcaatatcagcttgagtaagcaatttgggatgccgaagagtaaawttttttttatcagctaaaaaattcttaagggaaagcaaacaaattattttgagacagtatgcaaggactagattgctagcgatttctcagagaaaataacaatatgctgttactttcagagataggtatgggaatgggtgtggggagtagtaatgtagcttttgataacaacattgcccatttattaaaagaagtctgagaagccactgagaaaagccaagtaagaattctggtggagtttggatatgggtaaaaatcatgttgtatagatgtgagtgccagccagtcacatctttctggtacaaagtaggtacttaatgtttgctgagtgaatttacagatcagattaatgaagacattaattat

SEQ ID NO: 392325 - DNA, 412 bp, Homo sapiens
tgcaatatcagcttgagtaagcaatttgggatgccgaagagtaaaattttttttatcagctaaaaaattcttaagggaaagcaaacaaattattttgagacagtatgcaaggactagattgctagcgatttctcagagaaaataacaatatgctgttactttcagagataggtatgggaatgggtgtggggagtagtaatgtagcttttgataacaacattgcccatttattaaaagaagtctgagaagcyactgagaaaagccaagtaagaattctggtggagtttggatatgggtaaaaatcatgttgtatagatgtgagtgccagccagtcacatctttctggtacaaagtaggtacttaatgtttgctgagtgaatttacagatcagattaatgaagacattaattat

SEQ ID NO: 392326 - DNA, 412 bp, Homo sapiens
tgcaatatcagcttgagtaagcaatttgggatgccgaagagtaaaattttttttatcagctaaaaaattcttaagggaaagcaaacaaattattttgagacagtatgcaaggactagattgctagcgatttctcagagaaaataacaatatgctgttactttcagagataggtatgggaatgggtgtggggagtagtaatgtagcttttgataacaacattgcccatttattaaaagaagtctgagaagccactgagaaaagccaagtaagaattctggtggagtttggatatgggtaaaaatcatgttgtatagatgtgagtgccagccagtcacatctttctggtacaaagtaggtacttaatgtttgctgagtgaatttacagatsagattaatgaagacattaattat

SEQ ID NO: 392327 - DNA, 576 bp, Homo sapiens
  misc_feature (1)...(576): n = A,T,C or G
gggtacgtaatttcagggcacagagtaaaataaaatgcctggtcccttgttgaaaagttgttaagaattttaagatgtctacagaagatcattaaaccaagtgcaaggcctatattattgccaaggttgcgtgcccatgaagctaatccggcaaagaattatctgattctctccatctgcatagaatatttttggaagggctttttgaataagtggcatatgagctccrttttaagagatactttaagtttcctaggcaaggttggaataggatgtaaataagtggaggtgggcattgaaagttttcttttctatggttaaaaagcaaatattgtagccaggaaatgataaccggttcaaaagctctcctttaaggatgaatggagcggcccaagatgagaatagaaaaatagataaggaaagttaagactgcccttttgtgcatgcttaagtaatatggtaaatatcacagcagtactatctttctgtttattttatgcagtnttaattcccaaaatgtacaaaccttaaatatgcatctgaattactgtttatatttgtatatgccctgttaat

SEQ ID NO: 392328 - DNA, 559 bp, Homo sapiens
cttgatcacaaacttctggtctccagaactgtgagataatatatttctgtttctaagccattcagtttatggtactttgtcatgcaagccctgtaaactcatccacaaggtagcatcagagaaacatacttcatcctctccccctaaaacccaagtactcttctctatgctccccctggagcttctcctttctccctgaggaatttctctccccagttttttttctgaagaaagttaagggcaaataaagtcctatttgattctaattaatataaaatggcagtctcaaatgcccagatggacattacaagccatctcttgcttctgtaaagagcactgtggttcctgaacccctccccactgggtgctrtcactggggatcatctcctacttttctttccacagaggccagtacatttccaccatctggttggttacagtgctaattcaggctaggtcgtctggcgcctcacctcccccatcttgcatctgaggtctccttgcccttctagctggccccttagggaggatctatggcaatactaggcctgctgtgttt

SEQ ID NO: 392329 - DNA, 566 bp, Homo sapiens
gcaaaaaccttaatagattccttttaactgccttactgcaaatacctctttctgaagaataaaggtagacatcactgatttacatggtcagaaaagagcctcatttgcctgtatttagaaaattcttgatttgcatgtttatgtaaaaaaagataaatcaaggaaagaaattaaatactaaacaaagatgtaaaatgcttaaaatattcagcaagatagctgcatcatcacttataccgtaaccaatttgggccataataaatgaatattctacaacctttgtgtatgtggcttcttgggttctttcaacttgtcactgttgtcagattatgacaagaatattgggtaaggggatgaaaagctcttaacaggaaattggctaacacagtcagacttcaaaatgaaacactttgaagctgttactagcctyagatagatgtacatgaaatcttcagtaactattaaatgaaagggccaagatgtagagcatagcacatatactctacaagacacaaacacacacataactatctatgctcatggataaaaagactttgggaggacat

SEQ ID NO: 392330 - DNA, 599 bp, Homo sapiens
tgcgatttcggcgtaaaaattattggcctgtaaagtataaatgacaagttgtagtcatatgcctctacaaaaggctcaaagctttcaatatttttacaatgcctcggacagaatacattttttccctttgctgtttcatagtcacaagaacaagcaacagatcatttcatgcatgagctatgtaacaaattcaatccaaaataactcatgcttcagtttattaaattactgtgatagcagattcacttctacactttaatcatttttgataagtaaatttatttttttctttagtattgcttaattttaggtatttgcatgctccatgtttctcacaaccaagtaaaattgaacttcctcagatktgattactaaagtatctacttaggtccttcctttctaaagtgaggtttttaacgacagcaatgaatctttggctgattttattttggctggttgactattagtctgtgctgtaatccagatagttccaatgtaatacaacatacacagaattcttagatgaacagagtgcggttcaagtgcagggcatatttagctcttccactccttgtcatataacaaaacattccacacca

SEQ ID NO: 392331 - DNA, 541 bp, Homo sapiens
ttatgatttatatttacttgtttggcatctattcattctagtaccataatttcttaatattcaaatataaggaccagtctgacatatagaactcttttctctytaagtgtttctttttttaatgccactgtgtataaatatcattgtgtctttcgcaagcaaacaccctaaaaatgtccatatggtgtcaatattcctgagaagttttcagagtacattgaaggcgagaaaggtctcaggtcataataaccattaagttttaattttgttactatctcttgagtcttttatgtacctattatttgttaagtatatatgggggaggggtcctcaacccctgggccacagattggtacttgtctgtggcctgttagaaacaggcctacacagcaggaggtgaatgttgggcaagtgagtggagcttcgtctgtatttacagctactccccattgcttacattgctgcctgagtgccacctcctgtcagatcaatagtggcattagatcctcaaaggagcatgaatcctattgcagaactgcgc

SEQ ID NO: 392332 - DNA, 619 bp, Homo sapiens
atgaataatttggggatttttctcctcgaaccaaaaatatagactcctggtcaagctattgattttagttttttataagccgttgaatatatattttgaatattacttccctattttttcctaatgttaaacattaccagctaaaaacacaattaaacatgtatgaaaatggtttcaattactgattgcttgggatctataaccactgaagttattcaaacttaaaatgaagaactaaaatataaaattaatcaatttctgttcgtttttggttatggcaaatttcaagcatccttgtattgcaagaaggaaagttatttcctacatttgattcaaatgtctcagaaagaatttcttctttatatcaaggatgttttgtcttaataaaataatatcaagytacatgtaactgggctgcacttttatttcagaaggcaagctacctttagttgaaagaggcagctttacctcataaaaagagaggctggctgagtcagggaactgctctctgactagtcaaaatggcttatttcccagcaacacgtgcttgcatggggcttcaaggattcctttgcaacatcccctataattacaggcctttgaaaaagagattcaggaa

SEQ ID NO: 392333 - DNA, 557 bp, Homo sapiens
ggccgcaaagaacaaaatttggagactattacaggttaatagaaatcactctattccttagagaggctagttctgtttacagcactctctgaccatgtcccacagggacaattcctaccataatctccttaagaattagtttcagttgaattctgtgtttgtttctttcatcagggaactaatgcagaaaattagccaatgagggtggyagtgttgagctatcgattctccaactgccagctggagaacatatcaggtagcatacccggtagaaattgggaaggaagcagggcagctgaaaggcttgattctgacagcagctgtctgaaggagcatcatgttattgaaaacacgtctgcaaaagcaggacacgctacgaaaggattgttgggacattctcatacatctaatgtggaaaatcatacatacactgtgaatgttgctctcacattatggtatactcagactattaataacatctaaagccacatgcctggctccttgctgttttccatgccttagtttatttatccctatagcaatcctatgcactggtc

SEQ ID NO: 392334 - DNA, 608 bp, Homo sapiens
atgtttcagataataatctagttgtcatatatgatattgaatcagagagagagagagagggagagagggagaaagacagagagagagaaatatcccctttataatgctgtctctgcmgtggacccagagagctttctatgataccacattgccagaatctgttgagaaatacttagaatattatttccttcactgagggtttatatagcagaaatacaaagtttccacattgtgatatggcacctgaatttaatcaagaaatgatcattagaaggcagttcttcataggtgcccagctgtttagctgtttatataatgtgtaattatcagtggtcatgtctctgaaattgccaaatttgaggaccaacctaatggcatatgtataataggaccaggatttggggaatcccagtgaaagttttaatgcatttcaagtcatgaaaataaagtctttcaatagttagatttgcttggacttatatataggcaaaatggagcttttcaacttgtgatatttttcttgagtctttatggtgagctgtttctaactaggaacaaatctggagatcaactgttctcatcctctgccaacatccctacaacatatg

SEQ ID NO: 392335 - DNA, 631 bp, Homo sapiens
gtttattctcaaacgtcagtgacttgtgggagataaaagatctaacatttgtgtcattggagaaagagtggaaggctaaaaagtactcaaagaaacaattgctgtaagttccaaaatatggcacaacacataaatgagattaagaaaacgcataattccatgcataattaacccaagaaatccacacccagatacgtcatagtcaaacttctgaaaagtaragataataaaacagatgttgaaagctacaacaaagaaatgacaccttacctctgggggaaaatgatttaaacagcagaggatttctcatccaaaatcttggtggtcagaaggaagtagcacatttttcaaatactgaataaaaagaactatcaacccagattcctacacccggagaaaatatgcttcagaaatgaagaggaaatcaagacagtttcagatgaagaaaaaccaagatactttatcaacagcagacttaccctaaaatactggctaaaggaagttctctaaacagaaagaaaataatttgttttttaaaaaagggaacttggaacatcagaaaagaagaaagaatgcaataagcaaaaaatgtggataaataaatagattttccttgtcttcttttatcttc

SEQ ID NO: 392336 - DNA, 653 bp, Homo sapiens
tttgtttttgtttttgtttcttagtccctttttcccattaccctaggggagatggtttatgttgccattgcccctcagattaaagcttttctttccatccaggcaatggggagaagagcacaggggagttcagtgactcttacacagcagctgttatcgccctttattatttcagcccaacaagggaagctttatcagcatcttccacggtcttccctgggcgcaactggtggagttcaaggtagaaaaggctgtgagattatgtgaaccatctcccatacgacatccctaggggttgaaaactctccaaggccttcactcaagacccaccgattcatcaactatttttacttcactcagcgtcgacgagaaagtgrggatatagtggtgctcagaagtgactgaatgcgggagttgagactggaattccaaaaaactgcactgtccgcttcccacctggactgaagatcagtagccatttctttcctttaggcatactttttttcccttagaattgaaattcacctttattaataataaaaaacacaaattcagaagtaggttagttcactcacatattatttcagtgagtattattgcacagtcacaccaaatagttcatttctctttgttacaaaaaattatttgtttgt

SEQ ID NO: 392337 - DNA, 653 bp, Homo sapiens
tttgtttttgtttttgtttcttagtccctttttcccattaccctaggggagatggtttatgttgccattgcccctcagattaaagcttttctttccatccaggcaatggggagaagagcacaggggagttcagtgactcttacacagcagctgttatcgccctttattatttcagcccaacaagggaagctttatcagcatcttccacggtcttccctgggcgcaactggtggagttcaaggtagaaaaggctgtgagattatgtgaaccatctcccatacgacatccctaggggttgaaaactctccaaggccttcactcaagacccaccgattcatcaactatttttacttcactcagcgtcgacgagaaagtggggatatagtggtgctcagaagtgactgaatgcgggagttgagactggaattccaaaaaactgcactgtccgcttcccacctggactgaagatcagtagccatttctttcctttaggcatactttttttcccttagaattgaaattcacctttattaataataaaaaacacaaattcagaagtaggttagttcactcacatattatttcagtgagtattaytgcacagtcacaccaaatagttcatttctctttgttacaaaaaattatttgtttgt

SEQ ID NO: 392338 - DNA, 617 bp, Homo sapiens
aagcaaaactcataagcagcattcagttttatccaatcaaatcatagttcagaaagaaaatggagctctaaaattcatagtactgtatgggttccttgaagcattgaagcactctgaaaacatgcctcagtagaattttgtaacatcaagacagaatgttgagcctcctatcttccttctctgtttaaccaaagcractctgcttttttgtgtgtgacgtacaaggctcccatgaggttttcactggaggaagggttccatggctttaaaaactttgaagtcaactggccaatatctcacaaagtatagaatagtgaaggacttgctagaagtcacaaatcaatcattgatagagatgaaactcatgtctcctgaccacaaaacgtgtgtgtgtgtgtgtctgtgtgtgtgtgtgtgcttgcttgttcattatttttcctcactctggccaatattttgtaaacttgacttaaattagaatcacttgaagacttcttataaattcctatacccagggtacaaaacggtcccatcattcaaaacttctgagaacaagaccaagaccccgcatgtttttgttttttgtttctttaaaagaacaggatttattcgcgggg

SEQ ID NO: 392339 - DNA, 601 bp, Homo sapiens
  misc_feature (1)...(601): n = A,T,C or G
catgtgtaactattanaatggctaaaatcccaacatttacaacatcaagtgccaacagtttgcagagcatgaggaattctcattcattgctggtggaaatgcaaaatggtccaaaatcccccagtttggaagacaatgtgggggtgccctatgaagcaaaatatggtcttaccatagaatcccagcaatcatgctccttggcatttagtcaagtttaagttgaaaacttatgcccacacaaaaacatgtacagaaacatttataagagctatattcataattgtcccaaattggaagcaatcagatgtactttaataggcaaacggatraaccacctttgatacatccatacaatcaaatattattcaatgataaaaagtcgcaaaaatacacaaaggaaatttaaatgcatattactaattggaagaagccagtctgaaaaagccacctattatatgattctaaccatatgatattctcgaaaaggcaaaactatagagagagtagacagattagtggttgccaggattcagagagaaaagggagatgaaaggctaagcactggagatacagggcagtgaagctgttctgtgtaatactg

SEQ ID NO: 392340 - DNA, 601 bp, Homo sapiens
  misc_feature (1)...(601): n = A,T,C or G
catgtgtaactattanaatggctaaaatcccaacatttacaacatcaagtgccaacagtttgcagagcatgaggaattctcattcattgctggtggaaatgcaaaatggtccaaaatcccccagtttggaagacaatgtgggggtgccctatgaagcaaaatatggtcttaccatagaatcccagcaatcatgctccttggcatttagtcaagtttaagttgaaaacttatgcccacacaaaaacatgtacagaaacatttataagagctatattcataattgtcccaaattggaagcaatcagatgtactttaataggcaaacggatgaaccacctttgatacatccatacaatcaaatattattcaatgataaaaagtcrcaaaaatacacaaaggaaatttaaatgcatattactaattggaagaagccagtctgaaaaagccacctattatatgattctaaccatatgatattctcgaaaaggcaaaactatagagagagtagacagattagtggttgccaggattcagagagaaaagggagatgaaaggctaagcactggagatacagggcagtgaagctgttctgtgtaatactg

SEQ ID NO: 392341 - DNA, 536 bp, Homo sapiens
gaaagcatagactgaaaaaagtgaatacagcaattatcttttactagtgtctggtatttgtgcaagaaattcatagcagcttagtgagggagggaggcaaggygagtcttcttccttgacaaatgatcaaattacgctttcaagaagaacagagaagcaattgtgaaccacctgcaatgcggtcctgtgtgtgcatgtgaattcatacttgtttatgcctatatgtacatgtatgtacatgtatgcacacacacttttcttgttagtgctacaagtctataaggaaggttttgttgttatcttttcaaaaacaatctgatgcttaattgatatctttccaatctcagttggtggggctgacactggaactcagattgcctgactcctagtctggtattcacttcattataccatgttccttcctttatcttgtcattttctgcagctattttctaagactgcttttatttcccttcctccaaagcagaaacagatctaatatttgagccaatctcccttgacatgtcctgggcaga

SEQ ID NO: 392342 - DNA, 611 bp, Homo sapiens
gcaatgtgaagctcttcaaaacagatcttctctcattcctctttccagtcttatactatatgctttaaattacagtcagatctgactcctggccatgggataacttaggcctgcattkccacctttaaaattctttgttgatacattaacaccaaatgatacgctttgcctgtgattttagttttcagtcttcaacagttttaatctatgttaaatgccatttcctccagcaagctttatccatccactcctaatacactatcttcagccccattaaaagttgctctgtctctatttagtttttccagaatgtatttattgaagttttatttacataactgaatagacctttatttgttcagtgatttggcacacatttatatttgcaagttgcctaataaatacacatcagataaaagggacttcgtttaatcatcttttttatcttttatttttctaaataacttcaacttttattttagattcagggggtacatgagcaggcttgttacctgggtatgttgtgtgatgctgaggtttggggtatgattgatcctgtcacccaggtagtgagcacggtacctaatagtttttctatccttgcccccttc

SEQ ID NO: 392343 - DNA, 611 bp, Homo sapiens
gcaatgtgaagctcttcaaaacagatcttctctcattcctctttccagtcttatactatatgctttaaattacagtcagatctgactcctggccatgggataacttaggcctgcatttccacctttaaaattctttgttgatacattaacaccaaatgatacgctttgcctgtgattttagttttcagtcttcaacagttttaatctatgttaaatgccatttcctccagcaagctttatccatccactcctaatacactaycttcagccccattaaaagttgctctgtctctatttagtttttccagaatgtatttattgaagttttatttacataactgaatagacctttatttgttcagtgatttggcacacatttatatttgcaagttgcctaataaatacacatcagataaaagggacttcgtttaatcatcttttttatcttttatttttctaaataacttcaacttttattttagattcagggggtacatgagcaggcttgttacctgggtatgttgtgtgatgctgaggtttggggtatgattgatcctgtcacccaggtagtgagcacggtacctaatagtttttctatccttgcccccttc

SEQ ID NO: 392344 - DNA, 537 bp, Homo sapiens
tgttacctgggtatgttgtgtgatgctgaggtttggggtatgattgatcctgtcacccaggtagtgagcacggtacctaatagtttttctatccttgcccccttccctcccagtatctgtcgttcctgtctttatgtctgtgagtgctcgatgtttaggaggtttagctcctacttctaagtgagaacatgtgacgtttggttttcttttcctgtgttaattcacttataatggcctccagctgcatccatgttgctgcgaagggtatgcttttgttcctttctatggctgaacaatgtgagcatttccttttctccacaacctcacaagcatgtgttgtttttttgactctttaacacaagccattctgactgctgtgagatggtatctygttgtgatttgatttgcatttttctggtgattagcaatgatgagcattttgtcatatgtttgttggccccttgtatgtcttcttttgataagtgtttgttcatgtctttggcccaatttttatggggttatttgtttttcacttgt

SEQ ID NO: 392345 - DNA, 532 bp, Homo sapiens
aggcaggtccctgagcattgagggaatgaacttgcagtgagttttcactccagggagaaatgacacaccttcattgtggatagaagatgcctttcttctgggctagctactaactcattttccctatattgaatccagtttcactatttaaatgcaaaaaccattaatataacaggcttgacatccagggtatgattaaagtgctatagcactagtctatttttttttctggaatgggaaggcaatttatgctgaatcagaagggtctctcactacatataaccagctagcttatgacattttcaattcaagacaatgttcattcagtgcacatatgcaygcttatagagggcagcaatgtcataggaaaacccaaattcatacaatatatagatatactcagaattttgaggtatttgatattttgctaactcataacacacacatccacacacacacacgcacaacggggtaaaatctgacctataaaagctgaaataaatagggtcttttccccaatcaaattcttgcc

SEQ ID NO: 392346 - DNA, 618 bp, Homo sapiens
gagactgaaggaatgggataggatacaggggatggtgataacataagctggtttttcattcataaaaatgttctggctatatgaaggatgtacttatagagagccaggaaggggttcrggaaacatgttagtagatgactgcattgatcctggcaagaaaagatagtctaaactgggatggtggcagtgagaatagaattttctgccatggggaatgggaacactttttgcccatcttctatatagtcgtcatatggttaggttttcttggttttgatttctgtttgttggttggttggttggttattctttttcagggttttataatattttttcttgttttctatattttttcattattttgcttttgcccctgaaaggagttcccacctccaaaattgcttgctcccaatatcaatgtcaggtactcagcagacactttttatttatttttattcaaactaaatttattttaagtgttgattatattttatttattaaaatatatatttagggagtgcaactgcagatttcttacatgcatatattacatagtggtgaagtttgggcttttgtatatccgtcatcagaacattggaatagttaacattgtaccca

SEQ ID NO: 392347 - DNA, 505 bp, Homo sapiens
ggcccatactcacggcagcaactgttaggcaaataaataaatgatttkctggtttatttgaagtgtaagtagaggataatctaacaatttgttcattattcttatctgctggtccctttacttctcaactccataatagaaaagctgaatgcaaactgaatatttttatattaaattacatttcaaatggcctgggtcagtttgtgcttaccttctagtttaaattctgtttatgtctacatttttattctgtgtttccataaagtagacactaagcgattaaaatacagtaactccccacttacccagaaggtccagcttgtcagaagtctctgataaaggcctcagagaagccagaaatatctacaccaaagccctgcagtaaggctcgtagaggttcaggcaaaacttattgactttttaaatatgcagttctttttaagcttagttatctggcttctcagcctctgatagattagtagaagcacatcaagaaaggtcagaa

SEQ ID NO: 392348 - DNA, 562 bp, Homo sapiens
  misc_feature (1)...(562): n = A,T,C or G
aaaaattagactatatatcaatacaatcaagaaaaatgccatgtcattttataggtcattcccttgctggaggaggggacattagcatgattttttggatggtataaatggtaaaggggttcaagggagaatataagaacacgtcatccgaaaatgaaatcagcatcttctttggggctcagcaagagaaatggggttttgtgataccatatatagccttctcaagagggaacattacaaaaacaccaaagggcttgacagttacgagggatagctcygctgttcagatagagccctccataaaaggtgtaactaactcataaacgtgaccctcctctgggagcttcatgtctataggagagctggacaaactcaagtgacaccacataccacatagagtctttccttggaatatcaggatatgtggctataattagagctaagcccaagcaaatnccaacnaatgcagtgtaattgcaacaattactgaagaaactatcattaaccgaaagtttttgtgaaggctatgtgttctagatagagttttgaatgaaaaggacca

SEQ ID NO: 392349 - DNA, 532 bp, Homo sapiens
  misc_feature (1)...(532): n = A,T,C or G
cttaatacctagtacttactgtatgagagaagagctttgctgttagattctttcatgttgagctattattgcagaattactatgttcagcaaaaggtacagaagtgcaaaataataaagaagtcaagtactttctccatgaacttagaaaccaataataacrgaaagaagaatatattaaaaaaaaaacaaaaaacttgtcctccttcttcctaactccttggacagagaaatctgggtccattgagagaatggctctcactggccatgttgctaacatgaatcattttttcttgccagttatagagacaaatgaatcctttaaatgtggcctatcatcagaaactgtgccaagccagtggcatctccctggcagcaagtatctcaccagctccattttcatctttcaatgtcaagttcactttaagaatcaatctttggcgagcctcctgtggccacttgccacctccactaaaggctgtctttgtaaagtgtttttaanaaaaaagaagaacatattaaacaaacaacca

SEQ ID NO: 392350 - DNA, 532 bp, Homo sapiens
  misc_feature (1)...(532): n = A,T,C or G
cttaatacctagtacttactgtatgagagaagagctttgctgttagattctttcatgttgagctattattgcagaattactatgttcagcaaaaggtacagaagtgcaaaataataaagaagtcaagtactttctccatgaacttagaaaccaataataacagaaagaagaatatattaaaaaaaaaacaaaaaacttgtcctccttcttcctaactccttggacagagaaatctgggtccattgagagaatggctctcactggccatgttgctaayatgaatcattttttcttgccagttatagagacaaatgaatcctttaaatgtggcctatcatcagaaactgtgccaagccagtggcatctccctggcagcaagtatctcaccagctccattttcatctttcaatgtcaagttcactttaagaatcaatctttggcgagcctcctgtggccacttgccacctccactaaaggctgtctttgtaaagtgtttttaanaaaaaagaagaacatattaaacaaacaacca

SEQ ID NO: 392351 - DNA, 584 bp, Homo sapiens
gagtataataaaactttggaaactgtaaaacaaaactgctagtagtaattgacatagacagctgggaacaccaaattcgaaactagaaagctaagagacatcaaattcactctgtagaaacaacttccctcttcaaggatttggtatttgtagcatctgggacaactgtaagtaaggtaaaagtagaactaaaatgagatttttttttttttgaaagtgtttaagaagtagacatctttccagttacctccccacttatgtttagaaaatgcctatccagccctatcctgccttttgccccacaaagcaatgggtagtttatcatctggagaggataaaacagaaggtctacattggggaaatgctgtactgtcataagtccttcctgtatttctatgagatgggaataggagcatgcataaggttatactatgygcattctttttaaatcatttcatgaggatgccagacatgaacatgtgttgtgctagctgcaggtatagtcaagtatgcttgcacagatgtgcaggtacaaagctactgcctgacaacagcgagtacatacagtcatgtattctgctgca

SEQ ID NO: 392352 - DNA, 546 bp, Homo sapiens
aaaagtattctgtcattaacttccttatttttcctagcattttttgtctgttgcttgtttggatgttacagttgttttattttaatatttggttgyctcttttaaagatgagaaagtggccttttgttagttctagacaagattctatttcttggccacttcttgacatgatttaagatgaaagtcttaagtctccttcaaaaacatagttgctttctacagagacttttggctaatggctacatccagatatttattagagaactgattgtgtgaggaattttccatagttacttaaaaacctttattttaaatgaggccttttttttttttttttttttgctaaaaaaggatatgccataacaggtgttctacaatgattttttcattactcctaaaaataggtaagcacctcttgcttgctattcacttgattctggtaatttctgtcctaatcattgctaaagtgatttttctaaagaaccaaagcatgagttgctttttgcctttgacttctgttttattttctttttaaaaaggttgcaa

SEQ ID NO: 392353 - DNA, 546 bp, Homo sapiens
aaaagtattctgtcattaacttccttatttttcctagcattttttgtctgttgcttgtttggatgttacagttgttttattttaatatttggttgtctcttttaaagatgagaaagtggccttttgttagttctagacaagattctatttcttggccacttcttgacatgatttaagatgaaagtcttaagtctccttcaaaaacatagttgctttctacagagacttttggctaatggctacatccagatatttattagagaactgattgtgtgaggaattttccatagttacttaaaaacctttattttaaatgaggccttttttttttttttttttttgctaaaaaaggatatgccataacargtgttctacaatgattttttcattactcctaaaaataggtaagcacctcttgcttgctattcacttgattctggtaatttctgtcctaatcattgctaaagtgatttttctaaagaaccaaagcatgagttgctttttgcctttgacttctgttttattttctttttaaaaaggttgcaa

SEQ ID NO: 392354 - DNA, 561 bp, Homo sapiens
aacaaaagcatatatacagacatacacacatatatatagtgtatgtataaaaacaaccaagccatatatagacatacacacatatatgtagtgtatgtataaaaataacaaagccatatatacatacacatatatatagtgtatgtataaaaataaccaagccatagacatacatacacatatatgtagtgtatgtagaaaaataaagccatatatacatacacacatacagtgtatgtataaaaataaaggcatatatacagacatactacatatagtgtatgtataaaaataaargcatacatacagacatacacacatatatatagtgtatgtggaaaaatacagtgctgtgtaccaggtcctgttctaagcagttcacatatgccttctgactcatttaatgttttcagcaaccctatgtggtaaacactacttactgtcacctttctacagatgaggcactgggaaatcatctgcccacggttacatggttacaaagtggcagaggcaggacctgaaaggagacagtgtggatctggattccatgctgtcaatcac

SEQ ID NO: 392355 - DNA, 561 bp, Homo sapiens
aacaaaagcatatatacagacatacacacatatatatagtgtatgtataaaaacaaccaagccatatatagacatacacacatatatgtagtgtatgtataaaaataacaaagccatatatacatacacatatatatagtgtatgtataaaaataaccaagccatagacatacatacacatatatgtagtgtatgtagaaaaataaagccatatatacatacacacatacagtgtatgtataaaaataaaggcatatatacagacatactacatatagtgtatgtataaaaataaaagcatacatacagacatacacacatatatatagtgtatgtggaaaaatacagtgctgtgtaccaggtcctgttctaagcagttcacatatgccttctgactcrtttaatgttttcagcaaccctatgtggtaaacactacttactgtcacctttctacagatgaggcactgggaaatcatctgcccacggttacatggttacaaagtggcagaggcaggacctgaaaggagacagtgtggatctggattccatgctgtcaatcac

SEQ ID NO: 392356 - DNA, 569 bp, Homo sapiens
attttaaatatacttttcatactcactattcttactcctttttctggttttgaagatgggtatgaggtccagagactctcccaaaatcatacagtgaataactaaagtcagtgaaaaagttatcactcaataaaactcaggtctgggcccacaacccagtttctgtagttttttttttttttttatatgaagagggagtcttgctgtgtcacccaggctggagtgcaatggcacgatctcagctcactgcaacctccgccctcccgggttcaagcgattctcctgcctcagcctcccaagtagctgagattacaggtgcccaccatcatgcccggctaatttttttatttttttatttwtttttattttttagtaggggtttcaccatgttggtcaggctggtctcaaactcctgacctcaggtgatccgcctgcctcggcctcccaaagtgctgggatgacaggcgtgagccagtttctctagtttttagcagtccagacaaatgaaggggcttcagggtgagagagtagtaaaatcaagcacattatgctaaggacatacatgatat

SEQ ID NO: 392357 - DNA, 604 bp, Homo sapiens
tttaacacctcacataggttagtttttaacattccatttttagatagtgttcaggaaaataaaaagatacttcactggttgtgaaaccatctaaaataatgctgcctcatcacattttcacagatgctaaattttacgaaagctttatgacacagaagtcataaagactaccatacgtaacaggcagccagaattttaaaaatattattacaaaacaatacaatgaattaaagaaatactatttttttatagtagtataataggcattttcacttttagtagagatactccatttatacagcctaagtaaccataacatgatcaaagagaaagaccaggaaaaaagaaaatgaattcctttaaggattataatgtgtcatttttaattttattgcaaaatagttagttgccccttgctccagcagcctcaacaagtagtttcatcagtcacctagtacactgccatctctgggctgtaggactttgacttatctaattttatccaactttaaatacaagtrtgtctctttaccaacaaaaaatacggtgttcaaaagtattcagataggaaaaaccaaggccctttttttaaaaaaaagaatga

SEQ ID NO: 392358 - DNA, 609 bp, Homo sapiens
tattgaaatgatgatattttggacatggtaacaaataaaatatatcatttttctaaaaaaaaaaagttaccctgaatttacatctgaatgtatatgatgttttagagaaaaaagtttaaattgttcaacctttgatatttattttcataattttgagacatacatatatatatatgtaggtttatatatataaaatctcttcaaacgcttgatttgaagtcaaaattttaaatgcattaaaagaacagaatatgcatacctcatttgaacattctgaaactttacaatatctgctgaartttggcctttgatgctaaaatactttttgttttattagaaagaatgtattttaattatatatttaaactaattatagttagggttgcccaagccacattaatgatgaccaaatttcctttttctattttcatgtaaattccaaatctgtatgcccatttaaaataatgagttctgcagtattaacaggaatttaatatactccttggcaaacattggaagtcactaaactgtttatattgtatgaataattttttacttagttttgtccttccaattattagattaaatatccttggcaaaattaacaat

SEQ ID NO: 392359 - DNA, 508 bp, Homo sapiens
aatagtaattaaaaatttattttcagatttattttataattgttatttgcaggaggtcaattcaataaaagccactttatcatttttaaaactagaacacctacactaattcttatttgcataaaaatttttattaacacttcaaacacacatttatggtgatatagcctggatgtgtgtccctgcccaaatctcatattgaaatgtaatccccaatgttggaggtggggcctgctgggaagtgattgcattatggggcagatttctcaggaatgtcttaacaccgtcccacttggtactgtctttgggayagggagtgaatcctcgtgtgatataattgtttaaaagtgtgcagcatctccctccttgctctctttctcctcctctggccatgtgacgtgcccactctcccttcacctttcaccatgattgtagtttctgaggcctctccagaagctgagcagatgccagcatcatgcgtcttgtacagcctgcagaaccatgagcc

SEQ ID NO: 392360 - DNA, 312 bp, Homo sapiens
agttgagggagcagacttgggtttttgaaatatttccagcttcattttaagaaattgacagttatttaatcctttagyttctgacaaatagtggaaaatactgaagattacatgataaaatgaggacataagatcaagttatcatactattaaaaaaacttctctactggaggaataagacttcaataaatataaaagaaataatgttttgtgttaaaaaattataaatcagttttataaaataatactaaattgaccatttattcaaacaagatagagaatatcttactgatcacaactttctttctctcc

SEQ ID NO: 392361 - DNA, 571 bp, Homo sapiens
taagcagtctcctggaggatcaaaagcatcacactctagcacatcatagccatcatacagagaggaatccaatctctctttccagtgagttccccacccttgactgtccaacaggcaggggtccctggcttgggaccacagagcagccaccccaccagtgatgagcatactcactggtagtgactctgtgtttccctagggagggactcccagaggcaaccaacagcccctctgccactgccacagccatggttttccccgttgcccctgttgtcctcagtctgggaaagaaacaaagagcccaagggcttcacccaagcttccagcataccacagttaccacagaaagaggagcccagtatctcatccctgtgtgcctttgatcccccactstctaacaaacagaggctgctgctcgggcaagcagagcagctgccccatcccctggctgaacattcccagtagcagtggctctgtgtttctctgaggtgcagctccgagaggcaactgaaagcccctctgccactgttcctgtagtggtactgccgttctgccctcaggccgaggaagg

SEQ ID NO: 392362 - DNA, 571 bp, Homo sapiens
taagcagtctcctggaggatcaaaagcatcacactctagcacatcatagccatcatacagagaggaatccaatctctctttccagtgagttccccacccttgactgtccaacaggcaggggtccctggcttgggaccacagagcagccaccccaccagtgatgagcatactcactggtagtgactctgtgtttccctagggagggactcccagaggcaaccaacagcccctctgccactgccacagccatggttttccccgttgcccctgttgtcctcagtctgggaaagaaacaaagagcccaagggcttcacccaagcttccagcataccacagttaccacagaaagaggagcccagtatctcatccctgtgtgcctttgatcccccactgtctaacaaacagaggctgctgytcgggcaagcagagcagctgccccatcccctggctgaacattcccagtagcagtggctctgtgtttctctgaggtgcagctccgagaggcaactgaaagcccctctgccactgttcctgtagtggtactgccgttctgccctcaggccgaggaagg

SEQ ID NO: 392363 - DNA, 495 bp, Homo sapiens
aaaattgaaaaacaggtaaaactagaatctaaaacagatgtactatagtttttaaaacattttttttctctctccagtttcccattttgactaaagacaaatcatggcaggactgatttgttttattttacattgcctgattatttgtatatggtgcagcaagaataattattttttttacataggcttttaaattggctttgatgaaaccttgttttatagaaggagcctcagataagattttttaaaagctgatcccagccatgaatttgtaccatcatatttgtacatttgtatcaacctgttagttgggcgaattcttctcctcttgaagttccaagataaatatggggctcctgggyctgtcagaaagtgacattccttatttaacacagtgcagaaaccctgtacagggatggtgtagacaaggtattaggccagttttctcaagggccttttgtttgctctgtaagttaagtctgatcctttaaagga

SEQ ID NO: 392364 - DNA, 651 bp, Homo sapiens
ttgttaatctgaaacaggagcccatatgctcatcttacatcagtgtgcctttgacattaatgattaacttatagagaagctgaacttattctctttttcartatctgcccttacaatctcacagcacacctcttccgtgataatccttggtccctgaggaattgaatagctttaattcctggtctcaggaatgcagtttatttttattggcatcttctaccaggcctgaagaagaggctttaattgctatcagtgtttaagaattagcaggacttggaatcctttttagacccagaagtcaaagccctgtaactcaatgtcacaagtactttaaaagcacataaagatacatggatgtaataaccttaattaattttctaaaaaatctcagtttttttcctaagcaaaccaaaagttaatactaatggtctagaaattgttctgataaaacataaaatctgttaaactagttactctatggcaaaataaatgaccttatgcactgcacagaatattatgctggaataattcaattccttcagacctttaaggaaacattgttagcatcaggccacaaccaatagaacttgaggaaaaaaaaaaacataattagctgaaaatcagttgaaggaaagcattactatttcaagc

SEQ ID NO: 392365 - DNA, 556 bp, Homo sapiens
ctagaaattgttctgataaaacataaaatctgttaaactagttactctatggcaaaataaatgaccttatgcactgcacagaatattatgctggaataattcaattccttcagacctttaaggaaacattgttagcatcaggccacaaccaatagaacttgaggaaaaaaaaaaacataattagctgaaaatcagttgaaggaaagcattactatttcaagccctttaaaaggggagagaaaaccaaaaacagcaagatgcaataaaagttaaacttcgggttaaaaaatcaaaatatcttataatttattaaaacaaaaattaatccctacaaaatttcattrttccaaacaaaaaactcaaactcgtcttccctgctggcagtgagctcaaactctataaaggagttgcctgccttccatcatcatcgaaacaggaaatcttgccttcatcgttggaagtaagcaaaattccaagaaaaaagaggagggcttgtaattctagaattttgggagaccaaggcgggtggatcacttgaggtcaggagttcaagacc

SEQ ID NO: 392366 - DNA, 553 bp, Homo sapiens
gcttccggagtagctgagattacaggcacccaccaccacacccagctaatttttgtatttttagtagagatgtggtttcatcatgttggccaggctggtctcgaactcctgacctcaggtgacccacccgcctcagcctcccaaagtgctgggattacaggcrtgagccgtagcacctggatcaaaatttttaatctgaaggtttcactgtttcttagaaactataacattgaaaatagacattacacttcaaatggtaaatttttctataccattattccaacttttagaaaacaagaattttaaagtaaagaaaataatacatgtttaccacaacactaaaatataaaaataacaccaaaatctgccacaattcagatattctatttaaatattaattcctgaatacgtttctcttccaatgcacaagactgaatactgctgtacattaattccgtttagtggaaacaaatacaattctactaggtaaatctctaatatgtctagactgtgaatttgctttcaatattggcatctaaagattatttgtaaa

SEQ ID NO: 392367 - DNA, 553 bp, Homo sapiens
gcttccggagtagctgagattacaggcacccaccaccacacccagctaatttttgtatttttagtagagatgtggtttcatcatgttggccaggctggtctcgaactcctgacctcaggtgacccacccgcctcagcctcccaaagtgctgggattacaggcatgagccgtagcacctggatcaaaatttttaatctgaagrtttcactgtttcttagaaactataacattgaaaatagacattacacttcaaatggtaaatttttctataccattattccaacttttagaaaacaagaattttaaagtaaagaaaataatacatgtttaccacaacactaaaatataaaaataacaccaaaatctgccacaattcagatattctatttaaatattaattcctgaatacgtttctcttccaatgcacaagactgaatactgctgtacattaattccgtttagtggaaacaaatacaattctactaggtaaatctctaatatgtctagactgtgaatttgctttcaatattggcatctaaagattatttgtaaa

SEQ ID NO: 392368 - DNA, 553 bp, Homo sapiens
gcttccggagtagctgagattacaggcacccaccaccacacccagctaatttttgtatttttagtagagatgtggtttcatcatgttggccaggctggtctcgaactcctgacctcaggtgacccacccgcctcagcctcccaaagtgctgggattacaggcatgagccgtagcacctggatcaaaatttttaatctgaaggtttcactgtttcttagaaactatawcattgaaaatagacattacacttcaaatggtaaatttttctataccattattccaacttttagaaaacaagaattttaaagtaaagaaaataatacatgtttaccacaacactaaaatataaaaataacaccaaaatctgccacaattcagatattctatttaaatattaattcctgaatacgtttctcttccaatgcacaagactgaatactgctgtacattaattccgtttagtggaaacaaatacaattctactaggtaaatctctaatatgtctagactgtgaatttgctttcaatattggcatctaaagattatttgtaaa

SEQ ID NO: 392369 - DNA, 553 bp, Homo sapiens
gcttccggagtagctgagattacaggcacccaccaccacacccagctaatttttgtatttttagtagagatgtggtttcatcatgttggccaggctggtctcgaactcctgacctcaggtgacccacccgcctcagcctcccaaagtgctgggattacaggcatgagccgtagcacctggatcaaaatttttaatctgaaggtttcactgtttcttagaaactataacattgaaaatagacattacacttcaaatggtaaatttttctataccattattccaacttttagaaaacmagaattttaaagtaaagaaaataatacatgtttaccacaacactaaaatataaaaataacaccaaaatctgccacaattcagatattctatttaaatattaattcctgaatacgtttctcttccaatgcacaagactgaatactgctgtacattaattccgtttagtggaaacaaatacaattctactaggtaaatctctaatatgtctagactgtgaatttgctttcaatattggcatctaaagattatttgtaaa

SEQ ID NO: 392370 - DNA, 614 bp, Homo sapiens
gatgagcagtgagattatgccaaaccaagatataaaacaaggagattttgcaaagtctgtcatttccacagttcaatatgggccgctgtacacctgactcactctcaaaccctaactttatcaaaacctggcactggtaaagtgaggtcactatcagatgcctcaaaccaaggatccagtgcttagtcacagccatgcccagggacaacagtcctaccttcttctaaaacacaatacacaaattcccagggctagtaggacccttgaaatatacagaacatctcttcctaaaggaaaacctcagggataataaaatccaaatagaaacccatttgaaaagtaactctgggccattatttataccatatacactataaaagctaaacctaygacaaattgggatttttctgaaatctttaagaaacagcctctgacctggccttctgagcagctgtggttcctggggacacaatggtcattgcaccagtggcagtcattggtgttggctgtgcagctgtaacaatctgtgtgctggtcacatctgtcatggtcaagagctgcaaagaaaacaaaatctcatgaactgggacaacttcaattgagcaaaatctgag

SEQ ID NO: 392371 - DNA, 589 bp, Homo sapiens
ctggaacacagtggtgcagtcatagcccactgcagcctcaaactcctgagctggtctcaagcagtcctcctcacctcaatctcccaagtaragctgggactgcaggcatgcaccatcatgcccagctaatattttcttttttgtagagttgggttctcactatattgcccaggctggtcttaaacttctggcctcaagcagtcctcccatctcagcctcccaaggtgctgggattaccagcgtgagccactgctcccagcctggtccaaaagaatttaaaatggagcctataaggaaaaggggaaaggtatccagataatcctaagcactctgaagaatggctcatataatatatggaaaaaagaacaaaagtcggggggaaattcgatgattcaaatgagaaaatcaatgtaaagtgagttagaaaaaatatttccagactccgggcacagaaaagtaaactctaggtcctgacacagtctgttgagactgtgtcctaatgagatgcttttccagcctcaggaaggagcctccttaaagagggaaataagagactctcctctgcttgcttttctgtagcttcttgtag

SEQ ID NO: 392372 - DNA, 579 bp, Homo sapiens
agcgcagccctgagggctgctggttgcccatttttatggttgtttctggatgatctgctaaacaggggtggattgttcatgtctcccctttttagaccatatatggtaacttcctgatactgccatggcatctgtaacctgtcatggtgctggtgggagtgtagcagtggggacgaccagaggtcactctcatcaccatcttggtttgggtgggttttagccagcttctatattgcaagctgatttttttgtttgttttgttttttgagacggagtctcgctccaggctggagtgcagtgacaygatctcagctcactgcaacctccacctcctgggttcaagcgattctcctgcctcagcctcccaagtagctgggattacaggcacacaccaccatgcctggctagtttttgtatttttagtagagatgaggtttcaccttgttggccaggctggtctcgaacttctgacctcaggtgatccgcccacctcagcctcccaaagtgctgggattacaggcgtgagctacttcgcctggcctactgcaaactattttatcagcaaggtctttatgacct

SEQ ID NO: 392373 - DNA, 579 bp, Homo sapiens
agcgcagccctgagggctgctggttgcccatttttatggttgtttctggatgatctgctaaacaggggtggattgttcatgtctcccctttttagaccatatatggtaacttcctgatactgccatggcatctgtaacctgtcatggtgctggtgggagtgtagcagtggggacgaccagaggtcactctcatcaccatcttggtttgggtgggttttagccagcttctatattgcaagctgatttttttgtttgttttgttttttgagacggagtctcgctccaggctggagtgcagtgacacgatctcagctcactgcaacctccacctcctgggttcaagcgattctcctgcctcarcctcccaagtagctgggattacaggcacacaccaccatgcctggctagtttttgtatttttagtagagatgaggtttcaccttgttggccaggctggtctcgaacttctgacctcaggtgatccgcccacctcagcctcccaaagtgctgggattacaggcgtgagctacttcgcctggcctactgcaaactattttatcagcaaggtctttatgacct

SEQ ID NO: 392374 - DNA, 579 bp, Homo sapiens
agcgcagccctgagggctgctggttgcccatttttatggttgtttctggatgatctgctaaacaggggtggattgttcatgtctcccctttttagaccatatatggtaacttcctgatactgccatggcatctgtaacctgtcatggtgctggtgggagtgtagcagtggggacgaccagaggtcactctcatcaccatcttggtttgggtgggttttagccagcttctatattgcaagctgatttttttgtttgttttgttttttgagacggagtctcgctccaggctggagtgcagtgacacgatctcagctcactgcaacctccacctcctgggttcaagcgattctcctgcctcagcctcccaagtagctgggattacaggcacacaccaccatgcctggctagtttttgtatttttagtagagatgaggtttcaccttgttggccaggctggtctcgaacttctgacctcaggtgatccgcccacctcagcctcccaaagtgctgggattacaggcgtgagctacytcgcctggcctactgcaaactattttatcagcaaggtctttatgacct

SEQ ID NO: 392375 - DNA, 579 bp, Homo sapiens
agcgcagccctgagggctgctggttgcccatttttatggttgtttctggatgatctgctaaacaggggtggattgttcatgtctcccctttttagaccatatatggtaacttcctgatactgccatggcatctgtaacctgtcatggtgctggtgggagtgtagcagtggggacgaccagaggtcactctcatcaccatcttggtttgggtgggttttagccagcttctatattgcaagctgatttttttgtttgttttgttttttgagacggagtctcgctccaggctggagtgcagtgacacgatctcagctcactgcaacctccacctcctgggttcaagcgattctcctgcctcagcctcccaagtagctgggattacaggcacacaccaccatgcctggctagtttttgtatttttagtagagatgaggtttcaccttgttggccaggctggtctcgaacttctgacctcaggtgatccgcccacctcagcctcccaaagtgctgggattacaggcgtgagctactkcgcctggcctactgcaaactattttatcagcaaggtctttatgacct

SEQ ID NO: 392376 - DNA, 567 bp, Homo sapiens
aaaaactaaaaattactacttttaaaacctcaaaatttcactgcttagaacatataaaagatacatttatatactaacatttcaaacataaatttttctagtggaatgaagtttaatgcaaaatgtagggaaaaaattggacaccctttatatgctgataaacttaattagaatttagttcattctaaactaaatctaacaaacttyttaggtaggcagtgttttattttcacatttttgaaagctttgaaatgggtaagatgacaaacagacaaaaagcagaatactagaatgatcagttaaggtgaacactacagtcataagttggtacaggcttcaattaagtggtgtgaaccacttacacactgagagcttaggcagcgtatgttaaaaagtttcctggttttttttttttttgctttaaaaaaaaaaaaaaaaacaaaaacgattctttattacgccacactactttgtgcctctccgaatttcttacctaaaatatttttgctaaatagaatttgaagcttttgaaaaaggaacattctttttgttattttaagaagcctt

SEQ ID NO: 392377 - DNA, 333 bp, Homo sapiens
ctacttatagtagttgtttgttcctgaagttcttgataactgtgtaaacrtctagaatgtactaagggacttggctttactattcttctctgtatcattaatacagttatttgaagcacaattcaagtgtgtattaagttagacaatgttgttattaatcaaagataccaactatgacatgactaataagccattacactaagggcctttgctttctacgccaggtgaaatgtacatccactaaatatctgttataaattttaagccaaataggaataaaaatccaggtgattaacttttgatttattaaaaaataaaagccaattgaaattg

SEQ ID NO: 392378 - DNA, 572 bp, Homo sapiens
gtcataattaagcaaagagagaatggaaaaaaaccctgtgctcctggagcggagtcaaagatatctgtataaaatatatatacacatgtagatacacacagagagagagatggatataggtgggtgtaaacatgggttagtatatatacatatatamgttttctagctttgtcttctgagcagcctataggcagtgtaccctagtagcagtgaacaaacttgatgcctcccaacatatctttatttttaaatagtattctcctgtacaaggaaccaggactctttaaagatgtgattgattctagggatatgcaagaaaaatataaattaaatgtgggtcattttatgttcctagaaggaagtttcaattaaaaagagtggggccttttgaaagacctaagaattaacctgaaagaggtcccaatctccaaagctggaacaatttgatcagcaaaaaaaatgataatgttgaattgtagcataataaaataattgctcataaaataaaataaatactcatatgccaaactgatataaagaaataataaagagaagggacaattccttcttac

SEQ ID NO: 392379 - DNA, 561 bp, Homo sapiens
gacttcccgcaaccgtgagaatataagtttttgtagttaatagtcatagaaataataaatcaatagaaagagcaatacctcttagatagatagacacctagatgcatagatacatagatgaaagaaagaaattttaataaactcaccccagtttttctgctgagaatgtactggagaactgcaagggtataatagggataccacttaagagactattgcagtactttagacacatggtagtggtttggaccagattattgatagcatgagtagcaataactagtcaaattttgaatatatttctaaaatagatgtaataagattttatttttgattggatatggtggcagatagtgaaatataaataacaccaaggttytggcctgagaaagttgtcaagggtgctgaagttttacagagtgtagagagagtctcactgacaagatgtcaataaatatattaagataataaggaagccagtatgcagatatttggataagagcatttctaggcagaaggaacagaagtgtaaaggtcctaaggttaatatatttgttatgt

SEQ ID NO: 392380 - DNA, 599 bp, Homo sapiens
gtcaatgaaacttttcttctgaacttaccacctcccacctttattacgctatcatttagaaaattgcttatgaagttcttctgcrcaaagtttatttctgaaaattgtgccctgcttgaaatccttgttttaagatctttacatgctgccttattcttgtcactcaataatcaattcagatgtcactcactcatggcgactcctcctcattatcctagctcaagctgccttttctaatcatcaatatatgatgctgttttttgaaatgtatttgttttcatgcttatcatctgtattttctctctagaatgtaagctcctttaagttggagatgttttcagccatggccacattacgtatgtagtttctaaaaagatacatagctcagaatggctgtagatttttctcttctttgaaatggatttttttttacctcattatttccttggactaattgataattttacataggcactgtctacataggcatgcaaaattttactacttaagtagtaagctagagttatattgtgtgcttgagcaattattagcatttagactatagatttttatgaagtaaatatttaaaatgttactac

SEQ ID NO: 392381 - DNA, 599 bp, Homo sapiens
gtcaatgaaacttttcttctgaacttaccacctcccacctttattacgctatcatttagaaaattgcttatgaagttcttctgcgcaaagtttatttctgaaaattgtgccctgcttgaaatccttgttttaagatctttacatgctgccttattcttgtcactcaakaatcaattcagatgtcactcactcatggcgactcctcctcattatcctagctcaagctgccttttctaatcatcaatatatgatgctgttttttgaaatgtatttgttttcatgcttatcatctgtattttctctctagaatgtaagctcctttaagttggagatgttttcagccatggccacattacgtatgtagtttctaaaaagatacatagctcagaatggctgtagatttttctcttctttgaaatggatttttttttacctcattatttccttggactaattgataattttacataggcactgtctacataggcatgcaaaattttactacttaagtagtaagctagagttatattgtgtgcttgagcaattattagcatttagactatagatttttatgaagtaaatatttaaaatgttactac

SEQ ID NO: 392382 - DNA, 532 bp, Homo sapiens
aacagtcagttggctcccaaataatatttctgcttaaaatcaaaattagcttcatgrtatttaattatactttaagtctatacattgttccttgttgctgttaaagtttatgacatttcttatccactctttgctcccaaagatagtaaattcttgtctcttaatggtatttaagatggtaaagtagcctttaagatatttaattgtcaaaacctttcttaatggaaatatcttaagcattaaaaaacaggagaataaggatatattctagtttggctgacaatgtgtgagtgaagtagctatgaagaataaagaaatattctaatttggcagtgtgtgtatatgtgtgtgtatgtgtgggtgtgtgtgtgtctgcgtgtgaagtggctgtcaagttgcaaccagaatgtaactctactaggacttttggtgatttttgtttcttttgtttactgctgtatttccaatgcatggaagggcacttcaaacaaagtagtcgaagttttccctcagccacaagagccctttatgt

SEQ ID NO: 392383 - DNA, 397 bp, Homo sapiens
aaaatgattcacattctatatatcagtcattaatttggtactgatgataatgtgcaatgtataatacatatctgtgtttactctgtttcttgattgcatatgtaatgtgctgaacaaaacctaacagaaaagacgtttttggtcaaatatatcaaattaaaagcacactattgatggtccgaagctgtttaaacagttaatagaattatctgttgatttcacctgatttcaattatactaatgtaattcatgtaaaaccttatatactcaaaaagtaargaatttcccatggttttaagaacatcttaactctagaaacacagaaaaggcagagaaaaaaaaagatttggagttgttatctagaaaaatttcagtggtaaattctgatatttttctt

SEQ ID NO: 392384 - DNA, 573 bp, Homo sapiens
cattgccagccaaattagctaaagttcaaacataaaaagaatcaaagatctttgggttccatattttccttattcccttccaagtctagctggatttcagagatacatttattactgtaaaacaaatgctcawtaatagaataacagaagacaacaaatcttccaacattttgtttgatttctaaaatttttgttaccgttgttggacataatattttacatttcctaccagcactgcctgctgcttaaaaaggttgtttgctcatcttctgctagagaactctaaaaggggtcaatttttctccgaaatcattctgccaagggcagtcgttgatattgctgtcagaagaaagaaaaagacaatcttatgtaggtggaggggttttaacctttttaggtcattggctgttttaaaaatcagaaaaaagctttggattctctggctcagctatatactcataatattttgcatgcagttgcagtattttcctgaagtcacaatagtattcccaataccacggttacaatagtatccctggctctctctctggtgagctaccacctcatttacct

SEQ ID NO: 392385 - DNA, 491 bp, Homo sapiens
ataatattttacatttcctaccagcactgcctgctgcttaaaaaggttgtttgctcatcttctgctagagaactctaaaaggggtcaatttttctccgaaatcattctgccaagggcagtcgttgatattgctgtcagaagaaagaaaaagacaatcttatgtaggtggaggggttttaacctttttaggtcattggctgttttaaaaatcagaaaaaagctttggattctctggctcagctatatactcataatattttgcatgcagttgcagtattttcctgaagtcacaatagtattcccaataccacggttrcaatagtatccctggctctctctctggtgagctaccacctcatttaccttcccactgcctcctacaccttgccatgactagatcttctgaaggttaatgtaattcctcaccccgaggaaggttgaaagtacagtctacataatcatgccccacaacggctatctttagcattaaa

SEQ ID NO: 392386 - DNA, 645 bp, Homo sapiens
ctttattgtgatattctgagtcaaaattaaagtgaaaaattgtgactagtctcataggaactcctaagggagcaaggctttgtcttcttttaaacacagtatgtttgagggaacttcaaaggttgtagaataaaaattaattttgaaatcacataaaattcttatctctaccctaagtaatctgaagagttttctacttctactcaaaagtcctataattgttggaaaattaaggctacaatgcaatttaaggtaatttggaaacaaatacgttcatataactgaggggaaaaatgatggtgctgaagtggttttcgtgattttctcgtttatcctcacacagtatatggtagcatgttgttatagtgagcaggtgggcaggtaaagaaatgataccagttaagtaatacattttccagttgtcattctgctgttgccaataattacttgattttttcttaaagaagcctatttaacattttgagtttggggattacaatcatgtacttaaagttaaaactcattttagtcaagtaacaggaaaraagcattatgattaaattatgcttaaccctggctttcataaactcatcaatattatttgttcaatttgagttaaattgtacatgtaaactcatatttcta

SEQ ID NO: 392387 - DNA, 556 bp, Homo sapiens
atcctggttcactgctcttaaattctgccttgcataaaatcctagggcctggacacaattcctccacattctttgctactttataacaaggatggcctttactccgttttgcaataacttgttcctcatttctgtcttagacctcattggaactgcctttgccatccatatttccaccaacattctgattatgaccacttaagtaatccctaagaagatttaggctcttgttacagctcttgttttcttcttagcccttgctggaattgcccttaatgttccatttayagcaatctgtgcttttgttagcctactccttcaaattcttcctgcctctatccattatctagttccaaagtcacttccacattttcaggtatttgttattgcaagaacagagatttatttcttatagttcttcaagttgggatgctcaagagcatggtggtggtatttggtgaggacttctgtactgcatcatcccacggcagaaggcagaagggcaagagcacatgagaggaagagagcaagaggagtctcaactcgtttttttttt

SEQ ID NO: 392388 - DNA, 623 bp, Homo sapiens
tatttgtacaattactttgggaaactctcagcgtcttctaaagctgaacatatgatacccaattacccagcatttcatacttaagtgtattctaccacagatatttgtacaaataygtactaacacatgagtacaaagatgtttatagcagcattgtgcataatagcaaacatttgaaaacaaaccaaatggataaaaataatggtcaaatattcttacaatggaatgctgcctatagcaatggaaatgaatgaactactgctatttgcaataccttggatcaaacataattataaagttgagcaaataaatcacacatagtaaaatatacagtgtgattccattaacaaagtacaaagccaggtaaatgcaatttatgggaggaggaaacatcatatttggggagaagagatcaaatagtgtctggaatggatggggcactgggtgcatttaatgggactgataactcctctgggggatggctattctggtgtgatcactttctgaaaattcacaaagctgtgcacttatagtttgttcattatttttattaaaaattttaaattgattcttctgaatagcatcatgtaagaaggaagcacatcctttgtgataaattataa

SEQ ID NO: 392389 - DNA, 623 bp, Homo sapiens
tatttgtacaattactttgggaaactctcagcgtcttctaaagctgaacatatgatacccaattacccagcatttcatacttaagtgtattctaccacagatatttgtacaaatacgtactaacacatgagtacaaagatgtttatagcagcattgtgcataatagcaaacatttgaaaacaaaccaaatggataaaaataatggtcaaatattcttacaatggaatgctgcctatagcaatggaaatgaatgaactactgctatttgcaataccttggatcaaacataattataaagttgagcaaataaatcacacatagtaaaatatacagtgtgattccattaacaaagtacaaagccaggtaaatgcaatttatgggaggaggaaacatcatatttggggagaagagatcaaatagtgtctggaatggatggggcactgggtgcatttaatgggactgataactcctctgggggatggctattctggtgtgawcactttctgaaaattcacaaagctgtgcacttatagtttgttcattatttttattaaaaattttaaattgattcttctgaatagcatcatgtaagaaggaagcacatcctttgtgataaattataa

SEQ ID NO: 392390 - DNA, 511 bp, Homo sapiens
aagctttatttttgtttctctcacacccttcttccttgattaattatataaagtttatagagactattttataatcatgaggatgcaaaacatttgtctcagacttgtaaataaaagcagtgttcttctatagaatggtaggtaggtgaccaattacagtgtttaagaagtgtgatgaagtaagtagagactactcttttgagaaatctggtagctacatgagggctggagcttgggtctcatttattggtacatcttcataggctataacaatgcctgcaattgggagatactcaatacttacgttgaattaaaagytggcaaatagaaaatgctaagacaggttttattttaatattaggagtggttgaaagttgggtgtatttattcatgaaagaaaggaacctatgtagagaaagaaattatacttgcaaatgacaaaatataattaacaagccaagtcggggtatagacaaaagcagctagaagcaaaagccaagtagactagtta

SEQ ID NO: 392391 - DNA, 599 bp, Homo sapiens
acatgagggaaagaagcatgagcaggtgaaatacagatataattctgaaggcagaaagatgaaagtttggagagttcatacagattggcttgtaacttcctggtaaagtagtgagctctcagcctgccaaaaagaagtgggcagggtgggggcacagggcttgaggaatatgggcaagatttggaatagacactaagagaaattaaaaaggttgttgattagtattaagtaaaaggattgccaaacagaattgaggggccagcagaggttaaaaattaaacttgtgttggagacgataagctcagttatgggattttcyttcatagcaattggcaaagtaagagcaaatgcagagaaaatggattttcaggttggagactggtgagacaggtgaggcggatagtcaacggggtgatgaatgagaaggtgctactaacagtatatttgagatgatggatgatggggtccagtgtgagtaacgaggggaggtctgccaggagggactgatgaagttagagaacaaagaggggttgagtgaccagaggttcagtgaggtgaaacagtaggtttattgggagtaaagaattaagagaggggaa

SEQ ID NO: 392392 - DNA, 531 bp, Homo sapiens
aactctgctgggttctaaattctgtgagaaacctagaggatgatatattcactgcacctagcaggttgtaggaatagttctccaaacactgggttagttacctcttacattatattcaataggcttcaaaggaattaattattgtactctaatacaatatagtagagcacaggtaaaaatggatcccatgtaatgaaaacaattaacraattctacataatcgggctatttctatctcctagatagcccacattaataggccacattaatattactttgatgatatgaatataattcctatttttagtaaaaattcatagagtattcaaaaaattcctacctgtgaagcatttgagccacttaacctctcaatgtgctcatgagcaaaagagggtcctaggctctggacaatctctaacagtctttccatgaatgagcctatgatcatgtaatttctaaaggaaagtgacttaaggatcaggccaaaatcaccagagaagaagaaaggaggaaggtggcaagcttcagagc

SEQ ID NO: 392393 - DNA, 577 bp, Homo sapiens
ttaacttatcatgaattttttaattgcatatgaaatttttatattctgattttattaactattccaatggaatgggaaaagagtacaaatgtttacatgaatattcgaacttttactgcaaaatattgttgattttctccctgatattgtatttaaagttcaggaaataggctgggcacggtggctcatgcctgtaatcccagaggccaaggcaggtggattacttgagttcaagtaccagaccarcctgggcaacacagtgaggctccatttccacagaaaaacacaaaaattggccaggcatggtggtgcttgcttgcagttccagctacttgtgggggctgaggtgggaagagcagttgagcctggcaggtcaaggctgcagtgagccgagactgcaccactgcactctagcctgggcaacagagcaagaccctgtcgcaaacaaaacaaaacaaaaaaagttcagaaaataaaatatgagtcaaattataccatgaatgaaatataatgttgtaaggcttgttagaaacaagagaataaaattttgatttctcagacttgtgtccctacacaa

SEQ ID NO: 392394 - DNA, 357 bp, Homo sapiens
tcattatgtgtgtgaccactctatctcagaagacatttttgaacacacctatatattcaaacagaaccaatgccatgtcatcaaaatacaaagcaacaaaaggcaatgttatatactgggcatcagttaaatttccagaatagttatatttacttataacatcaaattttggcagaagaaaatattttgtttaaagaggtcaatgattatcagaaaggttttgaacagctagaaggaaaraataaactaatagtaatataacaaaacatacaaagtaactgctggctctattttgatagaggaaaaactaaaccacctaatgaatagttaattatgacactgaaggaataaatatgt

SEQ ID NO: 392395 - DNA, 568 bp, Homo sapiens
tcaattttccccacagccaaatttcccctaaattatgtgtctacttctcaaattggttttwaaaaaattaattccaaggaaactaatgcactaaagctttttaaagtattttctagtacaaaaatagcaaacgcagcttagacacagtggcatatgccaatagtcccagctactcaggaggatggggcagcaggatcactacagtatgctatgattgtggcttgaaaagccactgcactccaacctgggcaacagagcaagaccctgtatcttaaaatatatatatatataacactcattaaagaaaaattgggatatataaaagaacaagaagggtaaaatattacactacctctttaggcattatgaagatagtaacctgtaagacttaatttccttaagatttttcttaaattacactgtataaacagtgtaatttaagtagcaatactgatttaagtaatgttcacttatttttaattggttttttttcaattattacaaagaatctggccacagatatgcactgataaacaaatacatcactgcaagaaataagtgtgcaaat

SEQ ID NO: 392396 - DNA, 516 bp, Homo sapiens
agtatagtctcttcaacaactggtattgagaaaactgcatatccacatgcaaaagaatgaaatttaactcctatcttacactatacataaaaaycaactcaaaatggattaaagacttacatgtaagatttgaaactgtaaaacttacggaagaacacttaatagagaaagcttcacgacattgatcttagcaataatttcatagatatgacaccaaaacacaggcaacaaaaagaaagtgggatcaaaccaaactaaaaagcttctgcacagcaaaggaaatgatcaacaaagtgaaaagccaacgtaaggaatgggagaaattatttgcaaaccatatattagataaggagttaatttccaaaatatatatggaacacctcaataacaacaacagaaaacaaagaataaccagattaaaaatgggctaaaggtttgaatagacatttctccaaagaagacatacaaatggccaacagatatatgaaaaaatgctcaatgtcagtagtcagcagg

SEQ ID NO: 392397 - DNA, 555 bp, Homo sapiens
cacgacattgatcttagcaataatttcatagatatgacaccaaaacacaggcaacaaaaagaaagtgggatcaaaccaaactaaaaagcttctgcacagcaaaggaaatgatcaacaaagtgaaaagccaacstaaggaatgggagaaattatttgcaaaccatatattagataaggagttaatttccaaaatatatatggaacacctcaataacaacaacagaaaacaaagaataaccagattaaaaatgggctaaaggtttgaatagacatttctccaaagaagacatacaaatggccaacagatatatgaaaaaatgctcaatgtcagtagtcagcagggaaatgcaaatcaaaaccacaatgagatatcatctcataccttctgggatggctattttcaaaaaaacaaaaaccagcatgtattagcaaggacaaaattggagccctcatacactgttggtggtaatgcaaagtggtgcagccattaaggaaaacagtatggagactctcaaaaaattaaaaacagaacatatgatccagcagtctcacttc

SEQ ID NO: 392398 - DNA, 547 bp, Homo sapiens
gctgtacaacattgtccttatagttaacaatactgtattgtacatttaaaaatttaagatggtagatttcatgttaaatgttttaccacaataaaatgaaaattattaaaacatgtatgatgtaaacaaacaaatttgcatgttcaactgcrcgcaacagccatgatagtgttatgaactaagggaggacaaagaaaggaagggaggaaaggggcaaacatttattgaccaccagcagatttcagttagtttaaatatataagccttgcaacagtcctctaatataggtatcatttgcacacatctatttgttaaataaggaaactgaggctcaaatgaattaaataaattattgaggtcattgaattagtccgttcttacactgctataaagaaatatctgagactgggtaatttataaaggaaagaggtttaattgacttacaattccacatggctggggaagcctcgggaaacttacaatcatggtggaaggtgagggggaagcaagcaccttcttcacaaggcagcaggagagagaacagcaa

SEQ ID NO: 392399 - DNA, 522 bp, Homo sapiens
tcatactacctggttttaagatttactgtaacgcagtaaaagaaaaacatagaattcaacaaaatatgaaacatttttgctttttggaagatactgttaatagaatgaaaaaacaaactataaactagaaaatatttgctaatggtatatctgacaaaggacttgtatccagaatatatacagtgtagaacacaatcataggctgggtacagtggctcatgcctgtaatcccaacactttgagaggttgagaagagcagayctcttgtaccaggacttcaagacaagcttgggcaataaagtgaaaccctgtctctacaaaaaattttaaaagtagctaggtgtggtggcacacacctgtggtcccagctataaaggagggtgaggcaggaggatcacttgagcccaggaggtagaggcagcagtgagttatggttgcaccactgcacttcagccttggtgacaaagcaagaccttgtctcaaaccgcacccccccacacacacacacatttggttcagaag

SEQ ID NO: 392400 - DNA, 408 bp, Homo sapiens
agccaaaacacacaaggttttcytgaattataccagtcctacaaagggaaaacaaaacacattatgtcagtttttaaagttatacaagtgccacctgatgtacaattcctgattctggtttttgcttatgttgcccacattttccatcacgaggccctcttccctgacgtcaaacacacagcctaccttggccctctcacctctttccccttctactcttcttggaaaactcagaacaatttgagcattaacgtgaatgaaacatagtttgaagagtcaaatcttctgcaaaagccaaatgtaaattatttgatgctttattatatcatcccactcaaaagcaaccatcattagacatcttacacattgtctaattatagacctcatttgttgattccagttccttaa

SEQ ID NO: 392401 - DNA, 408 bp, Homo sapiens
agccaaaacacacaaggttttcttgaattataccagtcctacaaagggaaaacaaaacacattatgtcagtttttaaagttatacaagtgccacctgatgtacaattcctgattctggtttttgcttatgttgcccacattttccatcacgaggccctcttccctgacgtcaaacacacagcctaccttggccctctcacctctttccccttctactcttcttggaaaactcagaacaatttgagcattaacrtgaatgaaacatagtttgaagagtcaaatcttctgcaaaagccaaatgtaaattatttgatgctttattatatcatcccactcaaaagcaaccatcattagacatcttacacattgtctaattatagacctcatttgttgattccagttccttaa

SEQ ID NO: 392402 - DNA, 604 bp, Homo sapiens
ccttgcctgctgcagagacagaggagatttgcaatagagaaagtaattcatgcacagccggctgttgttactcaaatcctattattactcaaatcggtctcctcgagcactgggggatcagagwttttaaggttcatttggtgggtcgggtggtgggggcagtaagtcgggagtgctgattggtcaggtcagagatgaaattatagaaattagacgctgtccgctttcgctgagtcagttcctgtgtgaccgccacaacattggatgagccagtttatcgatctgggtggtgccagctgatccatcaagtgcaaggtctgcaaaatatctcaagcactgatcttagtcttacaataaagatgttatccccaggagaaggtcagaatcttgtagcctcctgctgcatgactcctaaactgtaatttttaatcttttagctaatttgttagtcatacaaaggcagtctatccccaaggcaagaagagggtttgttttgggaaagggctgttattgtctttgttttaaactataaactaagttattcccaaagttagttcaacctatacccaggaataaacaaggatggcttggaggttacaagcaa

SEQ ID NO: 392403 - DNA, 604 bp, Homo sapiens
ccttgcctgctgcagagacagaggagatttgcaatagagaaagtaattcatgcacagccggctgttgttactcaaatcctattattactcaaatcggtctcctcgagcactgggggatcagagtttttaaggttcatttggtgggtcgggtggtgggggcagtaagtcgggagtgctgattggtcaggtcagagatgaaattatagaaattagacgctgtccrctttcgctgagtcagttcctgtgtgaccgccacaacattggatgagccagtttatcgatctgggtggtgccagctgatccatcaagtgcaaggtctgcaaaatatctcaagcactgatcttagtcttacaataaagatgttatccccaggagaaggtcagaatcttgtagcctcctgctgcatgactcctaaactgtaatttttaatcttttagctaatttgttagtcatacaaaggcagtctatccccaaggcaagaagagggtttgttttgggaaagggctgttattgtctttgttttaaactataaactaagttattcccaaagttagttcaacctatacccaggaataaacaaggatggcttggaggttacaagcaa

SEQ ID NO: 392404 - DNA, 604 bp, Homo sapiens
ccttgcctgctgcagagacagaggagatttgcaatagagaaagtaattcatgcacagccggctgttgttactcaaatcctattattactcaaatcggtctcctcgagcactgggggatcagagtttttaaggttcatttggtgggtcgggtggtgggggcagtaagtcgggagtgctgattggtcaggtcagagatgaaattatagaaattagacgctgtccgctttcgctgagtcasttcctgtgtgaccgccacaacattggatgagccagtttatcgatctgggtggtgccagctgatccatcaagtgcaaggtctgcaaaatatctcaagcactgatcttagtcttacaataaagatgttatccccaggagaaggtcagaatcttgtagcctcctgctgcatgactcctaaactgtaatttttaatcttttagctaatttgttagtcatacaaaggcagtctatccccaaggcaagaagagggtttgttttgggaaagggctgttattgtctttgttttaaactataaactaagttattcccaaagttagttcaacctatacccaggaataaacaaggatggcttggaggttacaagcaa

SEQ ID NO: 392405 - DNA, 612 bp, Homo sapiens
gccctgtacagcagcaactccatacaaaccatccaaaagagcaccatcggcaggctggtggatggcaaagtggggtctgagaccaatgacaccaaagttytgaggcgttgagccagcagaagcaggtaacttttgggaagcaggaggccaataaaaagttcagaggtcattggtctgaaaaaaaaaaaaaaaaaaagaaagaaagaaagaaaatgaaggtgaacatattctccaaggagagccatgtcttaaaagaaaaaaagcagctcttcattgtgatataagacttcaaaatatggttaatgattgtgaaagtcaaccaatgcaattgcccgtaatctgtccctacaacacactttcatatgttgaattttcttctttgttttgttcattttttcacttttttcttttaaatttttttacttttaaagtttttaaaattggaacataataattgtacatatttatagggtacatagtgatgctgtgatacatacactgtatagtaatcagatcagggtaattagcgtatctatcatctcaaacatttatcatttctttgtattgagaacattcagagttctccttccagctatttgaaactatataata

SEQ ID NO: 392406 - DNA, 505 bp, Homo sapiens
gcaagcaccatctctttcctttccccggtatcctatccagaaggccacaaaatattctgsacagtaggagatcaataaatatgcctagctctctgtgaatggatagacccactatcacagagcttaacaagaccaaaaccttcatgagatccaaacctccagaaacatgtcctggttttactttcaggtaccttctagtggctgttggtttagtttaagaaaaaactttattgccacattagttttcataggtctttgcatgattagatatcttggcctttaggtggaggatgcagaaacacagcaaagtcacatagccattactgattagaatccaggtagggctttaagcctcttttcattcactgagtcaacaaatcctactatgtgccaggcactattcttagtattggggttaatatagagatacacaaaataggcaaaaatccccatgattgtggagtttacataatagtgggaagagaatcttttttactacttggtt

SEQ ID NO: 392407 - DNA, 569 bp, Homo sapiens
tgtaaggtaaactattaaaatacttcaagataagaaagattaaaaatactaataataatgagtgctcatctatttcaagcttcaaggrggaaaaaactaaaactgggactgaatgactagaacacaagagtttgattatcttcactcagccacactgtttgtcaattcatgagctatgcccagtgaaggaacaatgaagaattaattctgacttttcagaggtttgattggggttgccaagaaattgaccagaaatgccagtgctcttcactatacatgaacaatgagtttcacagtagttatgtgctacaaattgtggaaaaacatatttttaccttcagaagaagaaagtatttttcacctagaataagcattacatttattttccatgcttttttgatgataatatagagaaagatagaaataatgccatatgtactaaaatctaccagaaaaaaaaaagttaggcatgaatgatgcagggctgtaaaatatatagtgaagtctagtcatcattgatttaataaataccaccaccttttgcagttttgagaatgttttcatccaat

SEQ ID NO: 392408 - DNA, 602 bp, Homo sapiens
tgatttgggcaaatattattaggagcccgtctctgtgtttgcattcaagctgtctttgccgctgctcctgtaggagttgtgagaaagagaaagtgcacattatagcgtggattgttttcaacaggcttgaagtttgcaaatctgytgaatccctctgtcagtgtttctttgctgtcaaacagaatgcccagctggcagtggcaatcccgatggggagggagggctatggatagattgtgttcaccctgcaacaagaatattaggaattcttcttcccaaactataagtagagagaaaagagctttctcagccatgccattataaaagttttcttcttcttttttttaacttttatagagaatgtttcattaaatcaaaacctttctgtacactttattcaggtagctttcataaagagagaaaccacataaacagcattaaaatgtataatgtaatctataattaagacaaaggctttggttagaaaaagaggcaagacttttgctcataggtgatcctgatcctcattgaggcaaacacacaagcttttttttttttttaatacaaagtgcgagatttcactaaaaaaggttaaaattgaa

SEQ ID NO: 392409 - DNA, 554 bp, Homo sapiens
gttaactctttatataccaacagttaacaaaggcagataactgcatgatggccaaaaaacttcaaagctggcttttccttgtcccctttccaatagttgttataaacagaaaagagctaaaagttagtcaaaagttttttaaagctagggaaggaggagtcctccctaatggttgtgatgttctgttgctattattattgacttctctactgtagccggtagtgacatttttctctctttctytctctctctctctcggttgttgatttactgttcgtttttgtttgttttattttattttgttttattttctttccaacatacagaggcggctggaggctcagaatcaagaaagaagaaaatccaaggtagggttcttaacattctaggtagacctgatatcatgggtataaattacatattttacatcagagttaaaggatttgccagcatttcagatgattgtgtccagatattgtggggcatctcggctgtactggtgctggctgtttttgatggggttatgtttatgcatgtcttactttatggcactg

SEQ ID NO: 392410 - DNA, 560 bp, Homo sapiens
tcctagtactttgcatgccataattaacattaagactacaaaatttagatatttcaatatacttaacaaataagataaggaatactcttaaacaatgaaataaattgtaatgaatgaaatgaaataatatgtaaatggtcagcatattccaaagaagagttaggtataagtttgtagcagcatacatttaagtaatcttttccatacatttaattaattctttaggtttttggaagtggaacatacataaaaccttttaaatttaacatttattttgcagggacaggatgatacttttgaaaatggagcaggaaattattgatttcattgctgacaacaagtatgttaaacttcaatgctggttaatttgatcatgtatcctagtttggtattggagttaaattgtccattctggaaagacttagggatagayaaaacattgtttaatatgttccttgatttgttaaatggagacattattggagttaggactatacgctgatgagaattgttgcttggaccatgtgtgcttctgcttgttaaattcctgacaaaatggc

SEQ ID NO: 392411 - DNA, 631 bp, Homo sapiens
tacaatacatagtgataaagtcagagtatttagggtgtccatcgcctgagtacagtatctttttgttaaatatagtcaccctactctgttatcaaacattgaatctattccttctatcttgctgtatgtttgtaccstttaatcaacttctcttcatcctttcttccctatgccactcacccttcccagcctctgttatctatctttttactctctgtctccatgtgatcaaaatttttagctcccagatacaagtgagaatatgcaatctttgttaattttttttacccttctggtagatttcacttggtgggcacaattctcccttcaaggtcttgttgcctcttgttgaactgtctctgctgcagagagctgcactacctcaagcacactctttcctagaataatccatatccaataattcaataaatgatcaagagggtactagaagccctgagatctcaaccctttgtgggactctctgaaggtcattccagtggcagagctttctgcaggatcagcagaggctgtcctcatcctctggcctgaactgcagctcaccttctctctctgcccagtcctgctcccctccctgtccctctgtggggttggtcccaagaactctccttag

SEQ ID NO: 392412 - DNA, 594 bp, Homo sapiens
attaatgcccataggataggattaagatctctaccctaggattaagacaccgatgctaggtaaggagaaaagaaggaaagaggaagcagagggaatagaagaggagaaaagagattgatataggtataatagagatttaattaaatacattagtagtgattttttagagtaatatattaaaactattcttcatattttggcataatgaaatattggcattccagaggcacatatccaagaaatgtatttatttttggtggtaagtcacttagatttttggtttccaggaccatcaagacctgttaacctaaagagaaggcaatacatatatatgtgaccaattattgtaatgtkggatataatccaacataatataagggacactcaagtgtaaatggataagattagggaggaagatagggaaaatcattggctagaagacgagagaataaggtttcccatgaatctgaattgtgaatgctcacttaatctttctggcaaagatagagtatttttggaatcctttagaaatcacctgcaagatgtcaatgcttatggattactgattttactgtaaatagggaatatttgtct

SEQ ID NO: 392413 - DNA, 590 bp, Homo sapiens
ggtcgtatgaggaagttaaaaaactggaactgttctgtagcctgatagtgatggtggttatataaatttatacaagtgttaaaattaataaaaccatacagcccctaaaaaagtcaaatttactgtataatagttttaaaattaaaaaaggcagaattacactaccatttagttacatcaagtaactgaatttgcagttgtatgaggtaaaagtatcaatttatataaataaaatatgctttatttcaaacaaaatagataagaagatatgatctctatgagaatcattcttcaaaaatggtactaattccattttttccaggcagagatcctaggcaaattttggaatttggaaaaatctgactgacatagtccttaactgtgttacccctggtacccttcccctattttctcattcgrtatttttcttagaatcctttcctgtaaactttgctgctttaaaaatgattttcatggacacgtttattcctctcatttagactaactgtgaaaaactgacagcctagaactttcatccagttacctcccacatatatgtacacgccctcagaaattgccatccattcaca

SEQ ID NO: 392414 - DNA, 603 bp, Homo sapiens
tgccatccattcacaacttaaagagcccagtggcttctgaaggaagcccataccattctgaagtagctataatttttaaagacactaaggtctctagaaatgtctggaagatcaggtctccagaagaattggcagtttaattctagccagggatctgatcaggtgatatcaataaacatctgttgaawaaatgcatatgtttctctcagtgaacgagttaatagctaatacacttataatggcaactctgtgtgaagtacttttctgagtactttatgtatattaatgtgcttaatcctctcagccacttttgaggtagggacccttattatttgcattttcagatgagaaaactgaggcacaaacacatttggtaactttctcagagtcagtggtggagtcagtcttcaagcccttgatgtccagcttcagagtccatgcagatagtctcagttgacttagtcctaaaggcagctgtgggttgaggttccaacagcctctggtctgcttcattcctcaaagtaatctccaagcccgaatcctagcatggtggtagaggtgaggctccataaaccttagaaatagctctcccagatatgacaa

SEQ ID NO: 392415 - DNA, 577 bp, Homo sapiens
acaataaaagtacagctgcatggaaaaaaattttraactcaatttttgttgttgtttgttttgttttttttcttttccccagacatagcttctgtgataccttcacaagctgtgctagagatttggctacttgaatccagcgccactccaaggtggcgctttggttagctcttaggaactatgatccccaaccggatgaagcaaatgagatcttggtctaacctcatcctctcttagagaggatggaaagaaagccaggttaacagcaatcttttaaaagatcagtatgaaaggtttgaaaggagagaggtgaagggagaaaggagtaagaatagccccaaagctcagaaatgtatattttcagccaatcatgttaaaatatggagaatccaaaaaggagtggattagaagagaaaagaaagaagaaactataaaaaatatgcacttctcccatttcccttcttcaaatccctctttgtctcgtccatgtgcttttcacttcacctttccagtgggcatttaggaagcatacatgatgagtcagatgaaatcgacctttacatttattaaatagatt

SEQ ID NO: 392416 - DNA, 521 bp, Homo sapiens
ttgctaaataatgctgcagcctggtttgtgtaaaaagctgattagactctccaaaacaacagggaggaaatttgactcccttaggcctttggtaaattttgtaggggtctcacgtcatcctattacaggtacccttatctggccttagagccaggtgtgttttaaaattcagagtttgtttgtttgttttccagaaaggtaatatggtacgtatagtaatactcccagagaggtttggggtcagcactccataatcacactcattattttcacagtgacaagtaagaatattcacactaagagggataaatagatgacaaatgattttgtgtagttcaggtcacaktttgccaccaaatgagtttgctgccaagtaaggtttttttaatgttagtgttcagagttttttggattttggaatgtagatgaggaattgtggacccatatttaccttcagtggaggaccgaaggctccctgagattttatgagtcatcttttccattccaacagccaccctctt

SEQ ID NO: 392417 - DNA, 562 bp, Homo sapiens
caaagcatttacttaaataattaactttacaaataaaaaagttcaaagagaaaaaaattcatattttatatccctgttgggtaaacaaaaccaaatgtgaacgtgggcaattgggcatctttgcctgacccagcccagtgggcacatggtggcctggccagcggtccaggacgttgccagaaccatagctaaggaggtgccacttgtacacagctgtcrtggatctatatattgattacaacagctgcccaacatatgacaataaagtgtcctgaggaaagggtgtcttactcttattcactcaagaggcactctacaggccagcagggagggtccctgagtgtgtccctgagacttctctgccttttaggtgttggacccttggcagatgaggacctctggcctcactgggccccttgctatgagccagctccttcaaattctctcattaaagctcagtgaagcagcctttgcagagagcttcctaatccatgcacacttcacccttttggctaaagttctgcagaaatagtcaggggctccattttcaatcaagagtttg

SEQ ID NO: 392418 - DNA, 574 bp, Homo sapiens
attcatattttacttatcaagttgacaaaaattgaaggggttattaataacaccttctggccaagctgtggggaaataggcattttcttacattgctggggagtagaaattggtacaatccttatagaaggcaatttggcattatttatcaaaattrcaaatgcatatacccttggactcagcaattttacctctggaaatttattttacagaatacttgcacattttatttattgccatatggtttgtaataagaaaggattggaaacaagctaaatgtttggtaaattatggttcatctcttcaaagaaatgctatgcaaaaaagaatgaagagagtccctctgtactaatatatgaaaatctccaagatatattaagtggtttttaaaaagcaaagtgtagaacaatgggtatagtatgttactttttgtgtagggagggggtaataacactcgcacacacacatacacacacacacacacacatagaaactctggtaggcacatacaatattaatagcagtactaatagcagtacttatttctagtgggagggggtctgggcagatggga

SEQ ID NO: 392419 - DNA, 487 bp, Homo sapiens
cagttgaagctgggtagatttaaacaggcacttaaccaaataacttgtatgaataacaaaaaatatatgaaaaggtattttgttatttagttcatcaagaaaatacaaatgaaaatcacaatgagatascactaatctcctactagaatggcaaaagtaaaaagaatagacaatttttaagttgtctgaattttgaaatattttctagaatatggatccgccaaaacactcataatttgctgatgtgtatatttcattatgtagctatttggataactgtttggcagtttctaataaaaataaacatgaatatagccaataatttatcagtacttacaccaggaataaaaaaagtgattaaaacaacttgggaaatagtagatataacagacttatttttaatagcattagactaaaaacaactttaatttccatcatcaggatgatgaacacatcctattttagtcataagtgaaatattactcaa

SEQ ID NO: 392420 - DNA, 487 bp, Homo sapiens
cagttgaagctgggtagatttaaacaggcacttaaccaaataacttgtatgaataacaaaaaatatatgaaaaggtattttgttatttagttcatcaagaaaatacaaatgaaaatcacaatgagatagcactaatctcctactagaatggcaaaartaaaaagaatagacaatttttaagttgtctgaattttgaaatattttctagaatatggatccgccaaaacactcataatttgctgatgtgtatatttcattatgtagctatttggataactgtttggcagtttctaataaaaataaacatgaatatagccaataatttatcagtacttacaccaggaataaaaaaagtgattaaaacaacttgggaaatagtagatataacagacttatttttaatagcattagactaaaaacaactttaatttccatcatcaggatgatgaacacatcctattttagtcataagtgaaatattactcaa

SEQ ID NO: 392421 - DNA, 487 bp, Homo sapiens
cagttgaagctgggtagatttaaacaggcacttaaccaaataacttgtatgaataacaaaaaatatatgaaaaggtattttgttatttagttcatcaagaaaatacaaatgaaaatcacaatgagatagcactaatctcctactagaatggcaaaagtaaaaagaatagacaatttttaagttgtctgaattttgaaatattttctagaatatggatccgccaaaacactcataatttgctgatgkgtatatttcattatgtagctatttggataactgtttggcagtttctaataaaaataaacatgaatatagccaataatttatcagtacttacaccaggaataaaaaaagtgattaaaacaacttgggaaatagtagatataacagacttatttttaatagcattagactaaaaacaactttaatttccatcatcaggatgatgaacacatcctattttagtcataagtgaaatattactcaa

SEQ ID NO: 392422 - DNA, 596 bp, Homo sapiens
cccctcccttgccttttatctttgttctacttgggtttggagaaagctgtcttcttcagagctccatatcactggcttcctgataaatttggccaatggaagacactgagggggaaatggcaaayagggaaaagggagaagactgaatgtctctccttctgtctttgcctcctaaagtcacttcatcatctctgaggtgctggcttccatgagcaaggcttatcaaatttctagcttctgttggataatgttggcacctgggcactagtaacactgcctaacctactagtttctccagtctaaaatagtaggctgtgttgctgccaatcttactgtagctgttaatctcaagatcgcttcacagtcccatttggtttaatataatagttcttttatcaagtatagtcatttcaaacaattaaatgtcctatttttctcattagattgtgacttatgtctattttattctatcagaatcttcaccattcttcaaagtccaccttaaatgcttttcttgctttttttaattaaaaaaatcaactctctttttttaatactttgttcttctgtttatactcaacacaatttcatattga

SEQ ID NO: 392423 - DNA, 596 bp, Homo sapiens
cccctcccttgccttttatctttgttctacttgggtttggagaaagctgtcttcttcagagctccatatcactggcttcctgataaatttggccaatggaagacactgagggggaaatggcaaacagggaaaagggagaagactgaatgtctctccttctgtctttgcctcctaaagtcacttcatcatctctgaggtgctggcttccatgagcaaggcttatcaaatttctagcttctgttggataatgttggcacctgggcactagtaacactgcctaacctactagtttctccagtctaaaatagtaggctgtgttgctgccaatcttactgtagctgttaatctcaagatcgcttcacagtcccatttggtttaatataatagttcttttatcaagtatagtcatttcaaacaattaaatgtcctatttttctcattagattgtgacttatgtctattttattctatcagaatcttcaccattcttcaaagtccaccttaaatgcttttcttgctttttttaattaaaaaaatcaactctctttttttaatactttgttcttctrtttatactcaacacaatttcatattga

SEQ ID NO: 392424 - DNA, 365 bp, Homo sapiens
tttggtttttgtttttcttctttccaggatggcaggacagaacagtgtgaggagagtcacactgtgaacttttgagktttctaaactcttagatttctcttctaagccaagcacatcaatcatgcttaggtttggccattttacataatcccataattcttgtagacttattcattttttaaaatgtttttgtttgtttgtttctgtctgattcggttacttcaaaaccttgtcttctggctgtgaaattctttattctatttgttctactctattgttgaaacattccactgtactttgtattttcctaagcatgtttttcatttccagaagttctgatagatttttctttatgatctctattt

SEQ ID NO: 392425 - DNA, 572 bp, Homo sapiens
cttttaatacagtaattttcaaactttttaacctagaagctcttcaccatcttaaaaaccttcaagaacacaaaagagtttgtgtttaagtggatgatatagttataggcatatacctatagatgtagatataggtatgttccttgtattagaaattaaaattaagaaatttaaaaaatatttattagataattaaaataatgatagcaaagttattacatgttaccacaaataatgggttcatgaaaaataattatacttcccaaaagaacttaatgatatgagggccattgtttcacatttttgcaaatattttttatccrgcttattagatgagagttggatccttgtaacatcagctactacatcagtctgttgttatataatgtcttgattaaactatatgagaaatatctagtctcaaaatatgtagttcaaaaaggaagaatattttagtggtctcttcatataattttggatattctgctttgatcctataccaaaattcaagctgcagtttttcaaagctgagttgcaatttggagcatggcacaatgttaatgacattccat

SEQ ID NO: 392426 - DNA, 563 bp, Homo sapiens
cattgtttttcctctctagtagaacatcaagcttgcacacatataagctcttttatgtcctacttgaaaaaaaaaaacctgctattataaaaattctttcattcttgcttcattctccaataaacctcaatttctctttctctttacaaaaagcagtgtctgcattttaaattttaattcctcactgcctatttcctcttgaaatttctccaataatgtatttaccctatgagttcactgaaagtgctcatgttaaggtcaatagacatgcctttttttacttaactgaatatgcagttctcaattctcacctgacttgattcatcagaagcatttgacaaaattgattactgtttatctaaaaacactatttatttggctgctcgtatgtagaattactgctccttacttttggtgatttcttcccaatcatcttttcttggttcttctcatctatttaaactgttagatttggaatgccccaagcctcagttcatggatttctttacttatgtatttgctttcawtcttaaatctcatctattttcctgactttgaatacc

SEQ ID NO: 392427 - DNA, 492 bp, Homo sapiens
gtgaggctatggggttgaaaatggaactgaaatatgtgtgacagttgcacacggtcttggaggaagaagagagctggggcacttcgtagctcagggtattttgaggtggagaaataktctcaatatcacaaaatacctctggcatccatctgagataacagcaagtctggtcttagggataataaccacaccctagaatagaacttaaacaatgctggccccaacataagctaaaaccaagccttgacaacatacataaacaaaaggttagagattagtcctgccaaattggaaggatttaagaacacattgctttccttagatcttcactaaggagcactaggcttaaaactaagactacaaacttccaaggtaatcatccaacaatttaactatttactgaaaattaagaaccttcagaagacaataacataatctaatctctatggtgtattaactataatttccagtgttcgatcaaaaatcactata

SEQ ID NO: 392428 - DNA, 320 bp, Homo sapiens
  misc_feature (1)...(320): n = A,T,C or G
nnttatttgcctactggttatctaractttttaagtgcatgcattttattttaattggtataataaaattagaaagaaagactagattaatttacattttaaaaaacacaggactcttctagagcacacaaaatggataatgaatcaggaagagactaagttatatagagaaaaatatagcataagttagagtttaacccagagagaaacgattagtatcaacacgtatgctttgtgggaattcggaacaagatagaaaatattatatttggaaagctttgctgtgtgttgtgtggaatttctgcttcatccttgccttt

SEQ ID NO: 392429 - DNA, 533 bp, Homo sapiens
atataccaaagttgctgtggtagcaaatataaacaggaaagtcaacgtttaagaagatactatattagttaagtgacaattcattaaagtatgttttgctttcaaaaatagcattattgcagtaccaagatacttataagtagaaacatagaagtatgagcatgtgcgatttgaaatgaataaaataaatgagaatcacacaattttttwaaaaaaatgtgtgaccagcagcctctggcatacttttctcaatttgccttgaaaataattattaaaatatgcacaaaagtgtatggtgtgtgtgagtgtctgcgtgtgtgtatgtgtgtgcacatgtgtgtgctgagaggaaaatgccttagacatatagataaaaggttacagatacaaatattactcattttggcaggccttgcatgtcttcttgataaaatagtctatggaatctattacacagatttatttatttcacatttcttcttggcggacaaatagagggctttgaaattagatatgactggattcacatatca

SEQ ID NO: 392430 - DNA, 580 bp, Homo sapiens
gaatctattacacagatttatttatttcacatttcttcttggcggacaaatagagggctttgaaattagatatgactggattcacatatcatttcagccacataactgattatgaaatcctgagtaaaatagtaaatcattctgaggctcacttattttacaaaaaataattagtaagccacaggcaatatttctcttaatacaaattcccatcaattgaaaagtaaccagaattgtatatsccattaagaaagaaaaaaaaagctgttgtcagttgtaattttaatttgcatcctgagctgagcatcaataaaatgttataatataaatataacacttgttaaaatacagccactcaatagattttgtctctgatgatgtttgcaatttatattacagggaaaaaaagaaagcaagaacctaacaaataagtgtataattttaccttcctgtcctattcttatcctaggtttatgcatatttccatagctgttatgataataatagtgtcagtttaaaaattatatttaatatatcataagaattttcctcattctgcagtcttcagaactgtttttta

SEQ ID NO: 392431 - DNA, 430 bp, Homo sapiens
gtaaatgttaatacagtgaaattagtggatcaaggcgtagagacacttgagagctcttaaaatatattgctccaagttgttatgaaaaacttattgtaagcctattattagtgcaaaattaaaaaaattatatatgcaaatgtaaaatggctttattgtattgatttagtactttcactaataaaatttgtatcttttcaccacaatactataaaagtatgcaatattttaaatttaatgtcctagtattgatacagttttaatttttaatttttgataactagtcactttaatcttttcttccatgctcactaaaaatgcataaatccttatttttggaattgtttaaataacagcatttttaycttgctatttgaaaatctaatcttattatgccaaatattgaaactcttgtttatattgagacata

SEQ ID NO: 392432 - DNA, 430 bp, Homo sapiens
gtaaatgttaatacagtgaaattagtggatcaaggcgtagagacacttgagagctcttaaaatatattgctccaagttgttatgaaaaacttattgtaagcctattattagtgcaaaattaaaaaaattatatatgcaaatgtaaaatggctttattgtattgatttagtactttcactaataaaatttgtatcttttcaccacaatactataaaagtatgcaatattttaaatttaatgtcctagtattgatacagttttaatttttaatttttgataactagtcactttaatcttttcttccatgctcactaaaaatgcataaatccttatttttggaattgtttaaataacagcatttttatcttgctatttgaaartctaatcttattatgccaaatattgaaactcttgtttatattgagacata

SEQ ID NO: 392433 - DNA, 437 bp, Homo sapiens
atgttaaggtacaaattaaatatggagagtcaataggtaaaactcattccaaggaggacaaatttgggtttgaaaatttcaatttcttagtccagcctatgttttcaatcacaatcacattgatcgtggagtgtgcatatgtatttgcacttgtgtgtttgtgtgtgtatgtacatgtgtgtgcacacrtgcacttgtgtctttccattatgaaaggaaatgctggtgctctgggatacatagtactaaacaccagtttgttttctgccctctctactcacatcagagtagaacatgagtttgtaaaaccaaatcctcctcgtaaggagtaggaagaagtatccttttcctatgccaggtatgtttaagaccacagataatattcattagtacatatgtgcatcaataaacataattagtacaatttgtcagagaat

SEQ ID NO: 392434 - DNA, 437 bp, Homo sapiens
atgttaaggtacaaattaaatatggagagtcaataggtaaaactcattccaaggaggacaaatttgggtttgaaaatttcaatttcttagtccagcctatgttttcaatcacaatcacattgatcgtggagtgtgcatatgtatttgcacttgtgtgtttgtgtgtgtatgtacatgtgtgtgcacacatgcacttgtgtctttccattatgaaaggaaatgctggtgctctgggatacatagtactaaacaccagtttgttttctgccctctctactcacatcagagtagaacatgagtttgtaaaaccaaatcctcctcgtaaggagtagsaagaagtatccttttcctatgccaggtatgtttaagaccacagataatattcattagtacatatgtgcatcaataaacataattagtacaatttgtcagagaat

SEQ ID NO: 392435 - DNA, 569 bp, Homo sapiens
ccttttcctatgccaggtatgtttaagaccacagataatattcattagtayatatgtgcatcaataaacataattagtacaatttgtcagagaattctcaaaagcagactaaaagagcaaagccctgtgacatgaacttataggactcatgtcattttttacatcctttacatggagtctgtatattactagaggagtttttcccactgtaaattttaaatcaattcaaattagggtaaagattctggaaacttctgcagtatatgtttctataattcaaaagatattatttgccagctcagttttctcggttttcaaaaattgtgacggaaatgactaccatttaggatgcttatgtttttttctaggtatgattttatgatggtgatttgttttctgagatgcagatgaaaatatacaaaatatgcatggcttaaatgactaaattgttgtggagataaacgtaatatttgttatatttaataatgtttcctccatgattattattaaaacagatatattaaaaactgctaaaatttcaagcagacaagagagtaaaaaacacattc

SEQ ID NO: 392436 - DNA, 569 bp, Homo sapiens
ccttttcctatgccaggtatgtttaagaccacagataatattcattagtacatatgtgcatcaataaacataattagtacaatttgtcagagaattctcaaaagcagactaaaagagcaaagccctgtgacatgaacttataggactcatgtcattttttacatcctttacatggagtctgtatattactagaggagtttttcccactgtaaattttaaatcaattcaaattagggtaaagattctggaaacttctgcagtatatgtttctataattcaaaagatattatttgccagctcagttttctcggttttcaaaaattgtgayggaaatgactaccatttaggatgcttatgtttttttctaggtatgattttatgatggtgatttgttttctgagatgcagatgaaaatatacaaaatatgcatggcttaaatgactaaattgttgtggagataaacgtaatatttgttatatttaataatgtttcctccatgattattattaaaacagatatattaaaaactgctaaaatttcaagcagacaagagagtaaaaaacacattc

SEQ ID NO: 392437 - DNA, 482 bp, Homo sapiens
  misc_feature (1)...(482): n = A,T,C or G
aaagtatgatgaaatttaatgttcatgatctcaaatattctgaaatataaacatattctactgtacttttttcaagtattttatttaaaatacwttaatatgttttatttttgaaatttctatgtattggctttgatctgacttgtagtaatgcccctaaagtcaggattatcacagtgttataaataatgcatatttccaatctctcttttgtcagaaaattaaaccaaacagggactaaacagactaagatgaaagacactttatatgttgactccttctatctgagttatcctgagtcactgccgtaagttgaatgtgtgcccncaagtgcatgtgttggaaaacgtatccccaaagcaacactattgagaagtgaggcctatgagagatggttgtatcataagggatctgctttcatgaatggattcatgtatctcaggagggagttcattactgtgagagtgggtttgcttaaaagc

SEQ ID NO: 392438 - DNA, 555 bp, Homo sapiens
aaaattggtaaaattctgaagagaggtacggctcgttcctggttactcgtttaacctagtatcctcagcagcattagacagcttctcatctataggatttttcttactgagagtcactcatagtagcttccaaagcctagggtgmatgaataacagtcttaaaacactctcagctagtaaattattatggtgtacaggtttctacagctcaacatttgtgcagagacaagaacccaatcccatttgctagacaaatccaatctttttgaattaaacaaactcttaaactcatctttttgagttaaacaaactcttgaagtgaaccatcactatatttctaccatggagagaagatattttatgctaaaattctgtgaaaaaagaattgacctgctggtgaatctttaaaatcttcccatacttaaaaaaaagtgttttcaattgacacatgataattgtatatatttatggggtacagtgtgatgttttgatacgtgtatatattgtataaaaataagatcaaagtatttagcatatccattacatcatgtattt

SEQ ID NO: 392439 - DNA, 555 bp, Homo sapiens
aaaattggtaaaattctgaagagaggtacggctcgttcctggttactcgtttaacctagtatcctcagcagcattagacagcttctcatctataggatttttcttactgagagtcactcatagtagcttccaaagcctagggtgaatgaataacagtcttaaaacactctcagctagtaaattattatgrtgtacaggtttctacagctcaacatttgtgcagagacaagaacccaatcccatttgctagacaaatccaatctttttgaattaaacaaactcttaaactcatctttttgagttaaacaaactcttgaagtgaaccatcactatatttctaccatggagagaagatattttatgctaaaattctgtgaaaaaagaattgacctgctggtgaatctttaaaatcttcccatacttaaaaaaaagtgttttcaattgacacatgataattgtatatatttatggggtacagtgtgatgttttgatacgtgtatatattgtataaaaataagatcaaagtatttagcatatccattacatcatgtattt

SEQ ID NO: 392440 - DNA, 555 bp, Homo sapiens
aaaattggtaaaattctgaagagaggtacggctcgttcctggttactcgtttaacctagtatcctcagcagcattagacagcttctcatctataggatttttcttactgagagtcactcatagtagcttccaaagcctagggtgaatgaataacagtcttaaaacactctcagctagtaaattattatggtgtacaggtttctacagctcaacatttgtgcagagacaagaacccaatcccatttgctagacaaatccaatctttttgaattaaacaaactcttaaactcatctttttgagttaaacaaactcttgaagtgaaccatcactatatttctaccatggagagaagatattttatgctaaaattctgtgaaaaaagaattgacctgctggtgaatctttaaaatcttcccatacttaaaaaaaagtgttttcaattgacacatgataattgtatatatttatggggtacagtgtgatgttttgatacrtgtatatattgtataaaaataagatcaaagtatttagcatatccattacatcatgtattt

SEQ ID NO: 392441 - DNA, 442 bp, Homo sapiens
gttaaagtttaagaagctctgctaagtggtttgatagcttcagttagcaacatggagagcatatgaaaggagaggcaataagaaaatacgaacatagatatgtagtacctataggtgcttttatgagttttctattgatgacataagaaatcactacacatttaatggcataaaarttattattttacagatacagaagtcctatacaggcttcactgtatagtgacacatcaaggtgtcagccaggccacagttcttctgaaggctgtaggaggaaatcagtttccttcccttttcaatttctataagcacccacgtctttaatatattagactgttcttgcattactataaggaaatacctgaggccgggtaatttataaagaaaaaaaggtttatttgggctcacagttctgcaggctgtgcatgaagcatagtgccag

SEQ ID NO: 392442 - DNA, 648 bp, Homo sapiens
gagcatgttactgctgttaattatgtgtatcagtctggcattatgggaagttcatgaacattcttgctaatcagagcttagttccacttctggctctgcctcttttaaaatgacttccctcctctcttgttccaattttcttcctcattactgagtttccccaatgtaacatggacatactaccatcctcaaatgtttttgtaaagatkaaattaggtaatatattttaaatgtcagatccaaaatagactttaagcaaataacaatgtcttcttttgctgtttctttaaaatatatgtgtatatttaataattaaattcaagtcattagtttgtttctagatgctgttagaggttaaattttcaaattagcttgttaacgaacagtgtaatttatatttaataggaatatttaaaagttcccattgcccctggaagcagttgttgatattcaatagctgctgagaaaatgatgccgacaagtatggaggaacaggacactgccagtcaggaggtgagctactgtgtgtgtaggactagtgtctccattgtaatgaaggcatcgacttatccagctaatgttaataaatccaagagaatcggtatattcagaattttatgaatgagctttacatttacatgctacttc

SEQ ID NO: 392443 - DNA, 648 bp, Homo sapiens
gagcatgttactgctgttaattatgtgtatcagtctggcattatgggaagttcatgaacattcttgctaatcagagcttagttccacttctggctctgcctcttttaaaatgacttccctcctctcttgttccaattttcttcctcattactgagtttccccaatgtaacatggacatactaccatcctcaaatgtttttgtaaagatgaaattaggtaatatattttaaatgtcagatccaaaatagactttaagcaaataacaatgtcttcttttgctgtttctttaaaatatatgtgtatatttaataattaaattcaagtcattagtttgtttctagatgctgttagaggttaaattttcaaattagcttgttaacgaacagtgtaatttatatttaataggaatatttaaaagttcccattgcccctggaagcagttgttgatattcaatagctgctgagaaaatgatgccgacaagtatggaggaacaggacactgccagtcrggaggtgagctactgtgtgtgtaggactagtgtctccattgtaatgaaggcatcgacttatccagctaatgttaataaatccaagagaatcggtatattcagaattttatgaatgagctttacatttacatgctacttc

SEQ ID NO: 392444 - DNA, 547 bp, Homo sapiens
tccaaattgaagaaaattgataagaaacatcactttattaaaagctgctagaacaacacatgccaaattttctaaatgatggttgcactaccccgcatcacccacttccaactcacaaaagaccaggacttcaaaaagagaattagggtcatcaaaatacagagctttccactaagtgggatatgctttcatgaagtagggactggggatgagaagcacccatagagaatgaggacaaaaaaagggtcattgtcatctcacctctaggtttgatgctttctactctgcagagttctatcagcccactgtagtatattcaaagggttcacaggaggacctgacatttgcctcctagagcagtgctacccaaaaggtggtccctgaactgcttaaatagtagagacgttgaatataaacattggcaatttgagaatgtctgttgtgtstaattatattaaagactaaggattatattgatacttttttatgtttcctttcatttttctagtaatttattttcatcgcattttacataaatatggtttgt

SEQ ID NO: 392445 - DNA, 536 bp, Homo sapiens
tggcagtcaaataactgcttggaatgtagttagagcataccctggtttatagtactgcaagttgaaaatacctgaggatatrtatatatttttaataccaattctgacatcccatctctagaaactctgatttaatttacttgtattgtcttgattgctggcatttttaaagctctgcagaattgttaacttcaaggagtaaagagagatgagaactatggtttagcagtcagaagttagtatcaagtttatttgtttgtttgttgattctttctatctatacacagtaatagctccactcacataactagtcctacctcaataaccacttcatttccatgtgtgaaaaagtaataaattgtatattgtttaatatggggacttattttcatgattaagtgcccatattatttctcattgtttgggaagtgtttaaagagcaattccttctttgactccaaggaagataaatttctgttttggtttattcttattcttgtgcttgctaatactttgggctatacattttgtagttt

SEQ ID NO: 392446 - DNA, 536 bp, Homo sapiens
tggcagtcaaataactgcttggaatgtagttagagcataccctggtttatagtactgcaagttgaaaatacctgaggatatatatatatttttaataccaattctgacatcccatctctagaaactctgatttaatttacttgtattgtcttgattgctggcatttttaaagctctgcagaattgttaacttcaaggagtaaagagagatgagaactatggtttagcagtcagaagttagtatcaagtttatttgtttgtttgttgattctttctatctatacacagtaatagctccactcacataactagtcctacctyaataaccacttcatttccatgtgtgaaaaagtaataaattgtatattgtttaatatggggacttattttcatgattaagtgcccatattatttctcattgtttgggaagtgtttaaagagcaattccttctttgactccaaggaagataaatttctgttttggtttattcttattcttgtgcttgctaatactttgggctatacattttgtagttt

SEQ ID NO: 392447 - DNA, 539 bp, Homo sapiens
gtttgtgttccttacttattttttatattaacccyttatcaaatatatggcttgcaaatattttctcctgatctgtcatttgtttctccactctgttgttcgcttgctgtgcaaagctttttagtttcatgtaatcccatttgtctatttttgcttttattgcctgcactttcagtgtaaaatctagataaattattgcccaaaccagtgtcgtgtcatttttctatgttttcttataatagttttacaatttcaggtcttacatttcaatgtttaatctattttgagtttgtttcttttatgatgttagagaagggtccttcactcttctgaatatagatatccagtttcttcaacatcattcataagagtgtccttttcccattgtatatcctgggtatcttcatcaaagctcaattgaccatacaaatatatgttcatttctatgatatctgtttttttgtttggtcaatgaatctatgtttatggcagcaccacactgttttattttctacagctttatattacagtttgaaatc

SEQ ID NO: 392448 - DNA, 579 bp, Homo sapiens
agcttggctgaaaggggacaatgtagagctcaggctgtggcttcagaaagtgcaagccccatgccttggaagcttccatgtggtgttgagcctgcgggtgcacagaagtaaagaactggcattttggaatctccacctagatttcagatgtatagaaatacctggatgcccaggcagaagtttggcagtgcagaagggaaatatggggttgcagcccccacatagagtctctactggggcacygcctagtagaactgtgagaagagggccaccattttctccctgcaggtggaatggtagatccacctacagcttgcaccatgtgcaagaggctattcttacttttgtactacataaaaattacatacaaattaacttttagaacataaactattgcagaataaggaaaatcattaaataacctagaagatgaaataaactagatttctatgatatatgatacagaaagacaaaaatgaaacatcacctgtgaaaccttgatgaacccaaaccagttaacaaaagcaaatctatgtcttcattattaaacaagatattattaatttaaattgcaccaaa

SEQ ID NO: 392449 - DNA, 579 bp, Homo sapiens
agcttggctgaaaggggacaatgtagagctcaggctgtggcttcagaaagtgcaagccccatgccttggaagcttccatgtggtgttgagcctgcgggtgcacagaagtaaagaactggcattttggaatctccacctagatttcagatgtatagaaatacctggatgcccaggcagaagtttggcagtgcagaagggaaatatggggttgcagcccccacatagagtctctactggggcactgcctagtagaactgtgagaagagggccaccattttctccctgcaggtggaatggtagatccacctacagcttgcaccatgtgcaagaggctattcttacttttgtactacataaaaattacatacaaattaacttttagaacataaactattgcagaataaggaaaatcattaaataacctagaagatgaaataaactagatttctatgatatatgatasagaaagacaaaaatgaaacatcacctgtgaaaccttgatgaacccaaaccagttaacaaaagcaaatctatgtcttcattattaaacaagatattattaatttaaattgcaccaaa

SEQ ID NO: 392450 - DNA, 571 bp, Homo sapiens
tttaattttataaatagggagataaaaataacattataatayagaaatgcattctaatacattttagtgaagtaggtattttctgaaaacttttgacataagaagtaagaaacctaaacagaaatataaccacaaaaagactgctttaaaagaaacttaaaaaagaatgtcaacgagtgctactgaaacaacttccaggtgtcttagtcagtttgggctactatgacaaaaatatcatgggctgatttgcttaaaacacacctacttctcatgtttttaaaggctgggaagtccaccatcaatgccccagtttattcaattttttatgagggctcttttccttgtttgcagaatgaagcctgcttgtcatagatagagagagacagcactagtctcttttactttttacgaggacaatcatcatggagtttccagcctcatgactttatctaaacctacttaccttccaaagaccccacttcctaatatactctcccagcaccttgggagttaggctttcgacatgagaattctgggggaacagaaacattcagtccacaacagaaagtaa

SEQ ID NO: 392451 - DNA, 571 bp, Homo sapiens
tttaattttataaatagggagataaaaataacattataatatagaaatgcattctaatacattttagtgaagtaggtattttctgaaaacttttgacataagaagtaagaaacctaaacagaaatataaccacaaaaagactgctttaaaagaaacttaaaaaagaatgtcaacgagtgctactgaaacaacttccaggtgtcttagtcagtttgggctactatgacaaaaatatcatgggctgatttkcttaaaacacacctacttctcatgtttttaaaggctgggaagtccaccatcaatgccccagtttattcaattttttatgagggctcttttccttgtttgcagaatgaagcctgcttgtcatagatagagagagacagcactagtctcttttactttttacgaggacaatcatcatggagtttccagcctcatgactttatctaaacctacttaccttccaaagaccccacttcctaatatactctcccagcaccttgggagttaggctttcgacatgagaattctgggggaacagaaacattcagtccacaacagaaagtaa

SEQ ID NO: 392452 - DNA, 542 bp, Homo sapiens
tcatgggctgatttgcttaaaacacacctacttctcatgtttttaaaggctgggaagtccaccatcaatgccccagtttattcaattttttatgagggctcttttccttgtttgcagaatgaagcctgcttgtcatagatagagagagacagcactagtctcttttactttttacgaggacaatcatcatggagtttccagcctcatgactttatctaaacctacttaccttccaaagaccccacttcytaatatactctcccagcaccttgggagttaggctttcgacatgagaattctgggggaacagaaacattcagtccacaacagaaagtaaattatttatcacaaaaagtctttctcttaagaacggtttagtcctatgttataaagcagattttgacctgagaaattcataattgataattatgaattaattttatgacaccagcataacaataatgtcagaaaacacgtatataaattaggaaagcatagagtaaatatttttctttattaataaatgaaaacagattcaaggt

SEQ ID NO: 392453 - DNA, 587 bp, Homo sapiens
gactatttaaaagtagaattgacaaaacatgctcgtaattccccttgtatacaaaagactgcatggataaacagtttcagtacttatatatgcagtgcttgacaagctgaggtaggcaagcctttctagaaaataactcaatagttttggcaggatgaatcacttcctacattcctaaccatgaaaattatgtgcaggctttgtggggtgaagtaagtctgagaaaattctgccttctaggtttcatggagttaggataaaaatctttcttacatcaacattgcgttcttaggaggttgctgtttgcttcagcaaaacctttgtatgaatcccatcctgggggccttagatacgtaaatcatttcacaaagtactgatgaatattaaatacagaacaaagaatagcacttttcaaaaaagaagtatttttcaaataaaaatcaaaagtgccctctcgtaattgatttattttagtacctacccacaaaaaaagatgtcttggaagatatatgcttcacttamaaataccagcacattaaaaaaaagtttttaaaataaagccatattaaatagattgttagtaaatt

SEQ ID NO: 392454 - DNA, 547 bp, Homo sapiens
gtatttaaaaggtcctagtamaaacagtcacaatatggtgaattaggagttctaaaataagattttccactaagtaggtatgtggctttaatacagctattgccttgaacctgatctatttaagaaaatgaaggtgtttcaatgaattacctcacacattctaaacttctttatttataattgagaagcgaaatcaggttgatgtaaataagtggccatgagaaagaaataatgttgtcttaaatgttaatttaaggaatgaaaggtattgatttaagcttgaaaaaagtaacagagtttttagtgtaggtgtcctttctacaaatgtgaactaattcttccataaatggctcacatggttctttctgttaagatccagggtgacttcctctgtctccttacccattttaagagggaaaataggcatctttagtaggaagctgcatctgtctaaaacagtagctttatgtctgactttgtaaatcatttttatttggtctcttcttgaatttgtttcttttatttgttggagttggttgtataccac

SEQ ID NO: 392455 - DNA, 547 bp, Homo sapiens
gtatttaaaaggtcctagtacaaacagtcacaatatggtgaattaggagttctaaaataagattttccactaagtaggtatgtggctttaatacagctattgccttgaacctgatctatttaagaaaatgaaggtgtttcaatgaattacctcacacattctaaacttctttatttataattgagaagcgaaatcaggttgatgtaaataagtggccatgagaaagaaataatgttgtcttaaatgttaatttaaggaatgaaaggtattgatttaagcttgaaaaaagtaacagagtttttagtgtaggtgtcctttctacaaatgtgaactaattcttccataaatggctcacatggttctttctgttaagatccagggtgacttcctctgtctccttacccattttaagagggaaaataggcatctttagtaggaagctgcatctgtctaaaacagtagctttatgtytgactttgtaaatcatttttatttggtctcttcttgaatttgtttcttttatttgttggagttggttgtataccac

SEQ ID NO: 392456 - DNA, 351 bp, Homo sapiens
ggaagagcaacaatagcgagaaacctaagggcactgctgtggatttcattgtgtcctctcaaattcctattttggagccctaacccgcaatgtgattttatttggggaaaaggctgttacgagatacttggaattagacctggtcatgaaggtgggattatcatgatggaatcagtgtcttttcaagaagaaacagctgggcgcggtggatcacgcctgtaatcccagccctttgggaggccgaggtgggtggatcacctaagatcaggagttcaagascagccggaccaacatggagaagccccatctctactgaaaatacaaacaaatcagccgggcatggtggcacat

SEQ ID NO: 392457 - DNA, 589 bp, Homo sapiens
ttcatatatgaaaaatactcacgaaacatatgttgggaatatttctatattcccagatataaacaggaatggtgatgtctcagatcagcaccatcagcatgacctgagaaactgttgtaaatacaaattctaggccctaacctaactctactaaattagaaataagaaatagagtacagcaagctgatgcactctaaaatataacaactattaacacagaagaataaatatatattactacagttagacaactaaggtaattcagaggacaaaaccaactggacctaaacaagttgatattactgggaaccttagtcctaaaataacaaacattgtctagaactgaaccaggatttacgtaggtaatacaaagatttggctatagcaatcaaatcaatgtcagtgttccataawggtctgtttagactcctttactatctccagctctcagagtgcttctactttcaacaaccagcccctatgtctgtgtctgaagctagcactcaggctgcaagaacttgcctgcctcaccctagttgaagatttttgcgaatttagagcacctgatcttacccagggatggctaaac

SEQ ID NO: 392458 - DNA, 590 bp, Homo sapiens
tcctaaaataacaaacattgtctagaactgaaccaggatttacgtaggtaatacaaagatttggctatagcaatcaaatcaatgtcagtgttccataaaggtctgtttagactcctttactatctccagctctcagagtgcttctactttcaacaaccagcccctatgtctgtgtctgaagctagcactcaggctgcaagaacttgcctgcctcacyctagttgaagatttttgcgaatttagagcacctgatcttacccagggatggctaaaccagtaactgagtgctgtggcatgtaaatacttcagctgctgcctttcctatgaatcttctaaaagatggcccacattatttccacattttccctacaggatcgcgtcaaacttaccttccaggagactttgcttggtgcaccatccctctatgtcctttccttcccagtcctgcttctctattccactactagttatcctagaaataattcctactctctccctatcacgtgaaccttcatctctgtatccactcctgaggagcccaaccataaacagcttatattcttacctgcataagccaataacacgagatt

SEQ ID NO: 392459 - DNA, 611 bp, Homo sapiens
tgtggtggtgtactcctagatatttgagaggctgaggtgaaaggagcatttgagcccaggagcttgaggttgcactgagctgtgatcttaccatcacactccagcctaggactctgtctcaaaaaagaaaaagttttattccatggagacattttgttgttagtagttttgcaatgtgaagttagaattataaatatatcataattgtaaagtacattcagcaggattatgaatacatgcattcaaaatatattttatttattttgggataattgtaacttacaaatgaataggtgcatgggctaggtgcggtgactctgcctgtaatactagcactttgggaagcagaggcaggaggatcacttgaagccaggagttggagaccagcctaggcaacaaagcgagacctctgtctccacaaaataaaaatraaaattagccaagcacgatgacctgtgcctgtagtcccagctactcaggaggctgaggtgtgaggattgcttgagctcaggaggtcagtgagctgtgattatgccactgcactacagcctgggtgtcagagccagaccctaccacagaaaaaaaagaaaaaagaaagcagattattttct

SEQ ID NO: 392460 - DNA, 612 bp, Homo sapiens
cttaggcagatagtaagggtataggagtcctcagtaaggcttttctttttaataaacagcmagccaaaatcattttctaacaaagagcggcctgtaaagtcaagctacagacatagacaagcaagctgggagcttgcataggtgaatactggcaggaagtagagattaaacatgttgaagatggtggctccatcttccgttctctgccagtcatgtgttcggtaacaagcagacaagatggcacagatcaactggaaagctaatttgcataataagattagggtggagtgaccagcctttcctgcgtgctgtgtaaacgtcatacctgatgtaaccaacctgtgagccctacgtaaatcagacactgcctcttcaaaccagactataaaatccagtgcatccactctcagcttgtcctttctgtttggagaagcagctctctctctaattttattataatttaaaaataaattttattataattaaaattttttccctgtgatatactctgatatgataaaattaaacttatcaatctttcttttatgaatggagattttggtgttagtctaggaactgtttccctactcttttttttttttatactttaag

SEQ ID NO: 392461 - DNA, 604 bp, Homo sapiens
catcttaactaagtgtttaccatgcactgtggctataactttttcagtttaaggtagcagaaactagcatgaatttatttttccttcttcacaatttcatgggtagaagatttgttcctaccacagatcttagcaacctcagaatatgattttttttctttcctcatgaagtcaaaaaccttcaccttttcatttaaagaaagcactttctggcttctcttttgcatacccaaatttccagcatcactattactgcactttggggccattactaaataaaataagrgttattgaacacaagcagtgtgatactgaaaaagccgatttgataatgaagtcagctaccaagtgactaatgagtgagtggcatatacagtataggtactcaggaccaaaggatgattcacctcctgagcaagacgcagccggtcactgtgagatttcatcgtgctactcagaatggcctgcaatttaaaacatattgttaatttctggaatttttcctataatattttggaccacagttgatcacaggtcattgaaatcagggaaagcaaaaacgacagataaggggaaactactatatatacacaatttcaataac

SEQ ID NO: 392462 - DNA, 559 bp, Homo sapiens
ttgccctgtgtccacctcatgtattgtctcaaaaaagttcactataagtggaaagaatggagagaatcttatattccatagtaaatactttgttaaattgacaatgtggagtcatcacatttttagcaagtgtgacactatcagtctgggttttataaaataacctgggcaataatacacacaatgcagtataacaatggagtctaggataaagaaaatgaaacagaaaataatagcaataatgtcagaaagaattcagttattaaatactgagtcagtcacyatgctagatgctatatagtatcatttaatattcataagaatccttaaaggtgggcacttttactgtgctcacttttcaaagagggaagggtaatcatttgtcccaggaccatctcaattttagcattaaaaatcctgtttggggaaacccctcagtcctgtataaactgagatagtttgtcactctaggtcttaaattgattaagtaattcttccaggatcaaacagctagcatatggtgaatcagcctgaatttaaattcagacaatttgacttt

SEQ ID NO: 392463 - DNA, 559 bp, Homo sapiens
ttgccctgtgtccacctcatgtattgtctcaaaaaagttcactataagtggaaagaatggagagaatcttatattccatagtaaatactttgttaaattgacaatgtggagtcatcacatttttagcaagtgtgacactatcagtctgggttttataaaataacctgggcaataatacacacaatgcagtataacaatggagtctaggataaagaaaatgaaacagaaaataatagcaataatgtcagaaagaattcagttattaaatactgagtcagtcaccatgctaratgctatatagtatcatttaatattcataagaatccttaaaggtgggcacttttactgtgctcacttttcaaagagggaagggtaatcatttgtcccaggaccatctcaattttagcattaaaaatcctgtttggggaaacccctcagtcctgtataaactgagatagtttgtcactctaggtcttaaattgattaagtaattcttccaggatcaaacagctagcatatggtgaatcagcctgaatttaaattcagacaatttgacttt

SEQ ID NO: 392464 - DNA, 504 bp, Homo sapiens
tctactttcagtgcctgcagatcattcaggcaggaatatgtactaagtagtgatgttagggttttaggattttagggttttcagaaaattgactcctggtaattgacttttgaattatgtattagagttcaacaagtttcccaaaattaaattgtttgaaccagatgagcagtttttcacaggctgataactcctgtctttcattatcatattgcattatcattatgcatattctggttattaagctattcactaaacttcraatgtatccatctattttgattttagggactaacaaaacaaaacaaatttagactctgttttgggtgcccaggctgggactctgcaaactcaatttattctttgtcaggtgactttccactgggttccacaagtaaggggtggtagaaagcagacagaaagaaaaaggaggagagaaaaccctggcattttcctgtgttcctgtattcttgctttgtttttactggcagtgaagctccagtg

SEQ ID NO: 392465 - DNA, 552 bp, Homo sapiens
attatacagttttaagtgtatgtgtaacataaacaagtatcatatttaacaacttgaaaattctatctatattcctaatgtgkgtatatatataaacatgtatgtgtaggtgtgtatgtgtgtgtacatatataacacacacacacatatatatatatacactttggctcacaggttttcttagtcagttctggctgctacaacaaaataccatggaatgtgtgtcttaaacagcaaaggtttactctcacagttctgaaggcaaggcagtccaagatcaaggtatcaagatgccagaaaattcagtgtctggtgagggccactttcttgctgtatccttacatggtggagagagagatcacctcttctttttgtaagggcaattatattaccacaaggttcctacccttgtaacctaatctaaccctaactgtctcccaaaggccgcgcttcctggtaccatcacattgaggaatagaacttcaacatacgaattttacggggacacaaacattcagtccatagcacaaatataaatatacatatatttga

SEQ ID NO: 392466 - DNA, 552 bp, Homo sapiens
attatacagttttaagtgtatgtgtaacataaacaagtatcatatttaacaacttgaaaattctatctatattcctaatgtgtgtatatatataaacatgtatgtgtaggtgtgtatgtgtgtgtacatatataacacacacacacatatatatatatacactttggctcacaggttttcttagtcagttctggctgctacaacaaaataccatggaatgtgtgtcttaaacagcaaaggtttactctcacagttctgaaggcaaggcagtccaagatcaaggtatcaagatgccagaaaattcagtgtctggtgagggccactttcttgctgtatccttacatggtggagagagagatcacctcttctttttgtaagggcaattatattaccacaaggttcctacccttgtaacctaatctaaccctaactgtctcccaaaggccgcgcttcctggtaccatcacattgaggaatagaacttcaacatacgaattttasggggacacaaacattcagtccatagcacaaatataaatatacatatatttga

SEQ ID NO: 392467 - DNA, 571 bp, Homo sapiens
ataaatacatgctatatttacaaaggcatccagaatttacctatctggtatatgaatatcaatctgaattttgggaaatttcatttgtgtagagtaggtttgaattatcctagagtggtatccaatgcatgacatagatttttatgtggatacrctaacacagcatctctaaggaggttaaactatccaacaattaccatgtggtcatcactcaatttgactaattttttaaagtatgcctctcctgagaccaaaagaatcctgatcctcatttttcacaatgaacttttccgttctctgaatcacaaaacaaacaagtgcaatataataaaatcaaagagtaatgacaaaacaaacaacaacaaacaaaaaactatatgctgggcgtggtggctcacacctgtaatctcagcactttgggaggctgaggcgggtggatcacctgaggtcaggagttcaagaccagcctgaccaacaaggcgaaaccccttctctactacaaatacaaaaagtagccaggtgtggtggcaggcgcctgtagtcccagctactctcaaggctgagacaggag

SEQ ID NO: 392468 - DNA, 534 bp, Homo sapiens
ttaaaataacataaatactgagatcaaaaatgtttttagggtaagaaagctgtcacatcttaataacagtatgacaatacacatgtcacattgacgtgacttccctgagccttaattttttcatctgtaaaatgggaataactgatttcctcacagagtttctattactcctttaaaaaaggtgtgagattataaattatcttataaccttaacactccataccattttcatagtacttctagcagtttgaagagtggcccctcatgagctatttctaagtcctaacacctggaacgcatgaatatcaccttgttctaaaaaagtgctaagtttgtgaggtgatagccatgtaaattagtctgattctatcattcctcatgtatcaaaatatcacattgtttcttataaatayatacagttatttgtcaattaaaaattaatttttttaaaagagtctttgcagatgtaactatgttaaggatgttgagattcgatcatcctgaatttagggtggaccctaaatccatggcaag

SEQ ID NO: 392469 - DNA, 534 bp, Homo sapiens
ttaaaataacataaatactgagatcaaaaatgtttttagggtaagaaagctgtcacatcttaataacagtatgacaatacacatgtcacattgacgtgacttccctgagccttaattttttcatctgtaaaatgggaataactgatttcctcacagagtttctattactcctttaaaaaaggtgtgagattataaattatcttataaccttaacactccataccattttcatagtacttctagcagtttgaagagtggcccctcatgagctatttctaagtcctaacacctggaacgcatgaatatcaccttgttctaaaaaagtgctaagtttgtgaggtgatagccatgtaaattagtctgattctatcattcctcatgtatcaaaatatcacattgtttcttataaatacatacagttatttgtcaattaaaaattaatttttttaaaagagtctttgcagatgtaactrtgttaaggatgttgagattcgatcatcctgaatttagggtggaccctaaatccatggcaag

SEQ ID NO: 392470 - DNA, 504 bp, Homo sapiens
ttacctctcactacagcgcgtttatgctctcgcgcgcgcagacacacacayacacacacacacacacacacgaactgggagaatcacaggcccacacacaatgccacgtaccccgagagatcagaagccttcctacgcctgcagattgaactcactcgccactcaaacctatggacactcgcagtgtgcccacttcccagagcggaactccttccagattctaacgccttcctctgctgagcgggcagctccaacgcgagccaagggacaaagctggccagggtaatgctgtggtgcacgggaccaaacccattatttgtgcacagtgcagggagctgcaaactcaagttgggcagtcctctagactaagccttgttgatagacgctcacgcccatgatagcctgaggcagttaaatggagccacacgcaacagcaatatcctgtttcagaactagcgctgtggcactccccactgctgagaggggaccagattcccgaaaagg

SEQ ID NO: 392471 - DNA, 504 bp, Homo sapiens
ttacctctcactacagcgcgtttatgctctcgcgcgcgcagacacacacacacacacacacacacacacacgaactgggagaatcacaggcccacacacaatgccacgtaccccgagagatcagaagccttcctacgcctgcagattgaactcactcgccactcaaacctatggacactcgcagtgtgcccacttcccagagcggaactccttccagattctaacgccttcctctgctgagcgggcagctccaacgcgagccaagggacaaagctggccagggtaaygctgtggtgcacgggaccaaacccattatttgtgcacagtgcagggagctgcaaactcaagttgggcagtcctctagactaagccttgttgatagacgctcacgcccatgatagcctgaggcagttaaatggagccacacgcaacagcaatatcctgtttcagaactagcgctgtggcactccccactgctgagaggggaccagattcccgaaaagg

SEQ ID NO: 392472 - DNA, 529 bp, Homo sapiens
taggcaactcgtagtctaggctgggctttgagctggtgacctagggtggcatgtgacctaggaagacaccagctggcatggctaaggagtgattgtgccatccctcctctaaycccaggcagtacatctcacagcaacaaaagcaacatctttcttctgcttaaggagaggagagagaagagtaaagaggactttgtcttgcatcttggataccagctcagccacagagcactgggcagagtgggcagagtcgtgtagcccccatttcagatcctaatacccagacaacatttatgtatgggcacatcctgggtcagaagggaacccagtgccttgaagtgaagaacccagtcctggcaggattcatcacctgctggctaaagatcacctgcaccttcactaacaaccagtgatatacaatgagtatgccgtgggcatttgcacactccgagacatgctggctccatgggagaccctgcacattcccagatgtcatggctatggtgaaagactcctgtctgagaaaagc

SEQ ID NO: 392473 - DNA, 563 bp, Homo sapiens
gaaaacaataccaaattaagccggaagcaaggaaaggcctagcacccatagttgaggtattatttactcatggaatcttaaaaccctgcaattcttcctgcagtaccctcattttaccaattttaaagcctttggggtactactgggtagtacaggacctcagagtatttaatgaggctgttatccccatccacctgttggtggaaaatccatataccttcctgggtcaggtgccaggggatgcaaaatggttcttagtcctagacctaaaagatgctttcccctccattcctctggccccggagtacaaatatctttttgctttcaaatgggaaaatcctaayaccagagaaaaataacaaaacacttggaaggtgcttcctcagggcttttgggatagcccccatttctttgcctgagtcttagagagggatctgagggatctgcaattgaagaaccagagtatgttccagtatgttgatgaccctcttgtgtgtgacccaacccaagatacttctgaccaaaatactagaaaaccttttaatttcccggcaaaccgggga

SEQ ID NO: 392474 - DNA, 534 bp, Homo sapiens
ggaaaattaaattaaatttctcacacacctgaatttctacactgagatctatatgttttagaaataattcatattattgacatctttatttttagaattttttaaaaaatgcaaatgtgttttaaaatgactaaaaaatgcaaggctacctgatttttaaaacacagtgaggaaggaagtggttttattggaaatcagattgaaaggcacctgattttcagtattttaaaaacaaatgtcaaagtaaaataaaatgttgactgaacttatttcttgtctgattaaaaaaaatgctagtttcttccaatggggattttcttaaacctctcatagactggagtaattacatttactttaattgagagataatgtattaattatatctttmagcattttatctttgttcaaacacataaaagtaataacattacaaccctccagatattttctattaggcctccaagtatttgctttccaagtctttttctcaagactaaaacaaattataaatatgaactccacattataaatcta

SEQ ID NO: 392475 - DNA, 544 bp, Homo sapiens
aaatatgattaaataccactttgagaggaagtttgtaaatggaaacagactcyataaaagtagacttattttatcccaaataactaaaaaagcaagggcttttgccatagttttctgttatacaagtttatctgattgactccagaatgatcagagttatttactatgtagagaggatacgagacattcttatgttttgggaaatggtaccgggataaaattctttgttgtgtcttttcatgtgtgatgctttatgataagcccttaactaaagtgtcctttacatctcaaacagttcttttctcccttttcttcctgtattgaattctaataagtatctttgagatagctattaactcctatatagagattgttatctccattttcgagtaatacacatttttctgagtccagagttcaatgatttgccaggatcatacagttagctagtggttaagtgaaatctgaaaggataatagattcataagccatagacttaccaaaatctaaaagaaaaatgtaaatgactaagttaccaattaaa

SEQ ID NO: 392476 - DNA, 544 bp, Homo sapiens
aaatatgattaaataccactttgagaggaagtttgtaaatggaaacagactctataaaagtagacttattttatcccaaataactaaaaaagcaagggcttttgccatagttttctgttatacaagtttatctgattgactccagaatgatcagagttatttactatgtagagaggatacgagacattcttatgttttgggaaatggtaccgggataaaattctttgttgtgtcttttcatgtgtgatgctttatgataagcccttaactaaagtgtcctttacatctcaaacagttcttttctcccttttcttcctgtattgaattctaataagtatctttgagatagctattaactcctatatagagattgttatctccattttcragtaatacacatttttctgagtccagagttcaatgatttgccaggatcatacagttagctagtggttaagtgaaatctgaaaggataatagattcataagccatagacttaccaaaatctaaaagaaaaatgtaaatgactaagttaccaattaaa

SEQ ID NO: 392477 - DNA, 544 bp, Homo sapiens
aaatatgattaaataccactttgagaggaagtttgtaaatggaaacagactctataaaagtagacttattttatcccaaataactaaaaaagcaagggcttttgccatagttttctgttatacaagtttatctgattgactccagaatgatcagagttatttactatgtagagaggatacgagacattcttatgttttgggaaatggtaccgggataaaattctttgttgtgtcttttcatgtgtgatgctttatgataagcccttaactaaagtgtcctttacatctcaaacagttcttttctcccttttcttcctgtattgaattctaataagtatctttgagatagctattaactcctatatagagattgttatctccattttcgartaatacacatttttctgagtccagagttcaatgatttgccaggatcatacagttagctagtggttaagtgaaatctgaaaggataatagattcataagccatagacttaccaaaatctaaaagaaaaatgtaaatgactaagttaccaattaaa

SEQ ID NO: 392478 - DNA, 628 bp, Homo sapiens
gttatgattttaatctgtgaggttaagagtcataaatgaagacataatggggaaaatactgtcatttcatcaatgctaattttgctacataggagtttggtagaatgatctatccttacaaagtttggaragtcatcaaatatcatcacgtatttcacatttttctcattcctgccaagtatattattttgatgattcatgttattctgatatttgtaccaacagattacttcagaactacaaaagtacctccttattccctttcacattctgtaagtcacatttcttggtgagctaataattacttattgtgtaagaaaccagatttaatgtctattaacacaacaaatagtaaaggtttttttcctattactaaatctcaaaatcttgactgttaatgtaagatcagaactatgcacttccatatctatgtgaatttctattttttctgctttgataatttcaatgaaattagtacattttgaagctggagaaaaaatggctttgagtaacatgcattgatttacttaactttatacaactaaaggaaagcacttccaagtgtttcagggtgaattttcaacaatctccataacacataacataaagacgacctatttaaatctta

SEQ ID NO: 392479 - DNA, 582 bp, Homo sapiens
aatgaaaatccagaaatgccgctatctgtttaatcattccttgattaaaataaatctatttacatttgtgttatttgctggagctgtgctaggcatgaatatacagtgccggtcaaggcataccattgtggagtttacaatgcgtctctccttgcagtcaagcttcatggagaataaaggcatgcctaaagtgaaaagagataggaactaaagaaaccttgacaatgtagtaaaatgtcttattggccgggcgcggtggctcaggcctgtaatcccagcactttgggaggccgaggggggtgcttcacgaggtcaggagttcgagaccaccctgaccaacatggtgaaaccctgtctctactaaaaaaatacaaaaatyagccaggcatgctggtatgcacctgtaatcccagctactcaggaagctgaggcaagagaattgcttgaacccggaggcggaggttgcagtgagctgagatcccaccactgcactccaggctgagagacagagtgagactccatctcaaaaaaaaaaaaaaaaaaaaaagaagaagaagaagaagaaaaagtcttattgtggga

SEQ ID NO: 392480 - DNA, 624 bp, Homo sapiens
gaaataattctgttatttataacttattacwtttcacatttaataatatttatcaatactatatgcaggcaacagaatagaactttaaggaagtaaaatcaggagtgattatctgacatggtcaagtttccaggcaacaaaaaactattatccttagaggatggaagatgggtggagtaaataatgatgcagcacacacacctatattctgaaagcataatgctgttgggtcaaggtaccactgctagaaaccactagggcaggaatggcttaagcccccatcagatctcttttatgaaagttaatgtattgattggtgaagagagacactttgatattgtaactgagacacattagccgaaatgaataatctgtatatccaaaactcctacactccctgagcttctcctgccagcataggctgtacactccctgagcttctcctgccagcataggctggctctttgtaagttcaatgagtagtttatgccctgagaaatcttcaatgacatcatcttccttatttacattgtcattctcctcattgccccttttttctaatcccttccctaattacctttagatttataactagatcagaccttaactttcatgggagatcac

SEQ ID NO: 392481 - DNA, 624 bp, Homo sapiens
gaaataattctgttatttataacttattacatttcacatttaataatatttatcaatactatatgcaggcaacagaatagaactttaaggaagtaaaatcaggagtgattatctgacatggtcaagtttccaggcaacaaaaaactattatccttagaggatggaagatgggtggagtaaataatgatgcagcacacacacctatattctgaaagcataatgctgttgggtcaaggtaccactgctagaaaccactagggcaggaatggcttaagcccccatcagatctcttttatgaaagttaatgtattgattggtgaagagagacactttgatattgtaactgagacacattagccgaaatgaataatctgtatatccaaaactcctacactccctgagcttctcctgccagcataggctgtacactccctgagcttctcctgccagcataggctggctctttgtaarttcaatgagtagtttatgccctgagaaatcttcaatgacatcatcttccttatttacattgtcattctcctcattgccccttttttctaatcccttccctaattacctttagatttataactagatcagaccttaactttcatgggagatcac

SEQ ID NO: 392482 - DNA, 619 bp, Homo sapiens
atgttatataatacaaaaaaattgaaggtatgcatcttaacaacacattaataaagggattttctgggtcttaattttaatctgtttatttgccacaggagaatagcatttgaagtcaaggtttaaaatctaaatgcgtattaatggaattcattatttcaaagcatagaaggtataaataaagctaaattacaggtaaaacaaatacataatataaggagagacctggaatattactgatattctggtataattttatttacttttttcataagtggtacagactttgtaaaatgtttccaataaagcccagaaagttcacatattgtatttcagaacctcaggtaattaatgtaaatatgtcttcaaaatctttatttcttgctcagaactttactctgggggwtgcaattttttttagttgatattggaaatatccaaatggttgtcccataagtatttcaagctcagcaagcctaaaactgagttgagtgtcagaattctctgcaaatattcttgttttgtttcttgaagtatcttaattactgggaccttcatcaactaaggacaccaattataaatcaccttcctccctcttctagataacgcacccttctgt

SEQ ID NO: 392483 - DNA, 560 bp, Homo sapiens
accatctggctttgtagaagtataccctaagatgttcatacagtaacaaaattgcccagtgaaatatttcccagaatgtatccttgtcattatgtgacacatgactatagtagttacctctaggtaagtaatcaaaaattttaatttccaaaattgtcatttttatcaagctgtctaaaattatatactataataagtactatatgataaaagttatggacccatgcatacatattctcatttcacaatttagaaaatgaatagcagtatgttgattctccttcatrcaggatcatcatatgcattattattttgacaacatttatacatgaaagtaaaggcacaatacaaggtcatatctctttgatttaaactaaagttgcaatgatgtttttgaaactgagcctgtagttatcaaataagataagagataagagactccacaaaaagtggtacttcaaatcccacaatagtcattgtcatgactcaaagcagagtctagtaaagcaaaacatgaaacttgtatttttccatatgcatgtcaaacatattgacctgag

SEQ ID NO: 392484 - DNA, 560 bp, Homo sapiens
accatctggctttgtagaagtataccctaagatgttcatacagtaacaaaattgcccagtgaaatatttcccagaatgtatccttgtcattatgtgacacatgactatagtagttacctctaggtaagtaatcaaaaattttaatttccaaaattgtcatttttatcaagctgtctaaaattatatactataataagtactatatgataaaagttatggacccatgcatacatattctcatttcacaatttagaaaatgaatagcagtatgttgattctccttcatacaggatcatcatatgcattattattttgacaacatttatacatgaaagtaaaggcacaatacaaggtcatatctctttgatttaaactaaagttgcaatgatgtttttgaaactgagcctgtagttatsaaataagataagagataagagactccacaaaaagtggtacttcaaatcccacaatagtcattgtcatgactcaaagcagagtctagtaaagcaaaacatgaaacttgtatttttccatatgcatgtcaaacatattgacctgag

SEQ ID NO: 392485 - DNA, 621 bp, Homo sapiens
cccagattaaatcctggttttatcttgcaaatatccccaattatagattgctcactcttcatcaatctactgcccttttctgagtaattttcagctctcctctcattgtctcctttcctccgtgccacctttcacacacccagtctgctttccacataggagttcataaaatattttaaaagagtaacttactttttatttttaatctaccttcaacactctagtagcttcccatcacatttttaataaagtcaaaagtcattacagtgtacagattctacattatggggaggttcctcccaaaactcttctttgttaccttaataatctagccttctgctactcacttttttcttttctactgtatcaaccacactgccctcctttgctgtttctttctttctttttttcttattattatactttaagttctactgtacatgtgcacaacgtgcaggtttgttacatatgtatacatttgacatgttggtgtgctgcacccattaactcatcatttacattaggtatatctcctattgctatccctccccactcccctctacccyatgacaggccctagtgtgtgatgttccccttcctgtgtccaagtgttctcattgt

SEQ ID NO: 392486 - DNA, 434 bp, Homo sapiens
gtagtgtgaaggatagattttaaggtgacaaagataaagtcaaaaaagctaatcaagtcctgtaggatttcagactagagagaataataaactttacttcaaatagcaaagttaaggtacaaattccaggaataagaaaacaagtcaaatctgaaaaatgtgaaagtggttcaaagcagcaatggtggaaagcagttacatgaatttgaaaaatagggttaaaggagtaaaggtattaaagaactagaaacaaaggggtagacacatagatgacaattatgaacatgyctatgccaatatatttgaaaaaaacatggtgaagtggacacattcttgggaaaatagtaaaataaaaatagtgcaatatatcttaataatcgcatagctattttagaacttgaattcctaatttaattttttccacaaataaacct

SEQ ID NO: 392487 - DNA, 536 bp, Homo sapiens
atttaccttgctcttccttaattatctgtcattgttcaactgtaattataaagcatttagtaacatatatatgatggaaaggagaggaaggctcaaaacaaatgttatagaggtgccagcaaaagctatgagacagactcttgttgtagagtgggcactttatgaagaacgcaaataaaaatcttgggaggaagtctcacttcttcagatgtttcacttaaactagagaaaatgatatgcatagcagcakcgtggtaaacacaaaaaaagccaaagatttagagtgaaatattttcagacataaccatcatgaatgatgcacatgccacaaatttaatgtttctctccgcaaaagttattttgatgccaccctacccaaatccttccaccctatttttgtcagtttctttagaatttctcatctgttcttttccatttctgagtcatttgcaattttctgccacaacagctttatccacagtgttaaaaagtaaaatacatatgctgaaaattttatatataagtgtatactagaa

SEQ ID NO: 392488 - DNA, 549 bp, Homo sapiens
atttttgtgcgaggatcatactgttttggttaatatagctatgtagtataatatgaggtcagataatgtgatgatcacctttgttcttyttgcttgggattactttggctttggggctctttttggtaccatatacgtttttggattttttttctaattcagtgaaaaatgacattggttgtttgatatgaattgcattgaatctgtagattgctttgggcactgttgtcattttaatgatattgattcttccaatttatgagcatgggaagttattccatttgtgtcatctatgatttctttcatcagtattttgtagttcaccttgtagagatctgtcagctccttggttatatgtattcctaggtattttatctttgtggctattataactgagattgatttattgatttggttctaagcttgaacattattggtacatagaaatgctactgatttttgcatattggttttgtatcctgaaactttactgaagtcatttatcaagtctagtggtcttttgggagaatcttttgagttttctaggta

SEQ ID NO: 392489 - DNA, 544 bp, Homo sapiens
ggcagtatataagcattcccttttctccacaacctaaccagtatctgtttttgtttttttttttttgactttttaataatagccattctaactggtgtgagatggcatctcattgtgttttgattttcatttttttcaaataccacttggccacatgtatgtcttcttttgattgtctgttcctgtatttttcctttttttaatgggaaataattttttttttttgcttattgatttatttacgttctttatagattgtggatatttgactttcrtcagatgcatgggttgggaatattttctctaatcctataggctctctgtttgctctgctgataggttgttttgctgtgcagagctttttagtttaattagttctaatttgtccgtttttgtttttgttgcaattccttttggcatcttcatcatgaaatctttgccaggtcctgtgtccagatgagtatttcctaggatgtcctgcagagtttgtatagttttagatttcacatttaggtctttaattcatattgagttgatttttata

SEQ ID NO: 392490 - DNA, 525 bp, Homo sapiens
cagatgagcaaatgaagatttagtattgataaaaatactaaatgtttttggtgaaatgaccacagctttttacccagtcacacaacaagatataagtggaagcagaagcagttatgggctctcctgatttccagccctgggcactccctcctgtagtgcactgaacagaaggtcaagtgtagattttgaaacgggcagtctcttgacactgtgtcacgtcttccctcaactcacaactctatatcctacgtaaagaacaatgtgagagaaagaagaggttataagcttgaaagtgataaagttaatatgtattctargaccctctaccaaaatattttgaataggaggaaagcaataatatagcttgttagaattttgagaaattctaacaataatatagcttgttagaattaatgagaaatcattaattttagatacataatatcacaggccagattttaacaccaataataacaataatatagcttgttagaattttgagaaatcattaattttagatacata

SEQ ID NO: 392491 - DNA, 631 bp, Homo sapiens
cttttcacttcttatatggaaggcatcttttcacagcagtaaattattatttttattagcctcatagtattccattgttcagctagaccataaattattagactaatccctattacagataatttagatcccttcctttcttccttcctccctccccctgcttgcttgcttgcttctttctttctttttctttctttctctttctttctttctctctttccttccttccttccttccttccttctttctttttcttgctttctttttctctctcttcctttctctctttcttttttctttacttttttgtcttttcttttgtctttttcactgtattaaacagtgctgcaaccaggtatccttgtacatatatttttgtatacctgtcaaataattttgtatatttaatgccttcattgggtctatggttatatgcatttttaaaaattaagtattgcaagattgttttcctgaargtttgtacccattgtacttccacttcacactttttccatactttgccattagtaggtcttttcagttgttttaaatgtgtaaatttgataggtaaaaacagtggtctctcacttatttacttagtatttcttctttaatgtttgtgtgtgtgtgt

SEQ ID NO: 392492 - DNA, 586 bp, Homo sapiens
cccttttaaatatatctgtagcccttgtgtgctctgatccctcctcccacattcccctaaacaatatcttggattttatgttgattcccccttgcatttctttatagtttagtcacgtgtatgcatcccttaaaaaccttgtttagtctcacatatttttaaatataaatgaaatctaaatatatatagtcttctgaaactagctcttccactctctgttgtgtttgtgagattaatctatgttatgttaatacatgtgacagtagttttctcttatccggttcccattttccaggtgcattgctgtagactctatacctgataaataatgtcctgaattgcaaatgaaagaactttacttctcagtcttasagcctggaaatagtttggtttgactttgtcagccttgtcagaagcagttcttctgtcttaaacagaagcccagtcctctctccttaatttgtacccatctctaactaatgctctcttttcctttaagactcaaatcttagcaagagtagttcatactcactgtctttatgtcttagcctcccatctgggccttgtttgatctcttgatggctga

SEQ ID NO: 392493 - DNA, 586 bp, Homo sapiens
cccttttaaatatatctgtagcccttgtgtgctctgatccctcctcccacattcccctaaacaatatcttggattttatgttgattcccccttgcatttctttatagtttagtcacgtgtatgcatcccttaaaaaccttgtttagtctcacatatttttaaatataaatgaaatctaaatatatatagtcttctgaaactagctcttccactctctgttgtgtttgtgagattaatctatgttatgttaatacatgtgacagtagttttctcttatccggttcccattttccaggtgcattgctgtagactctatacctgataaataatgtcctgaattgcaaatgaaagaactttacttctcagtcttacagcctggaaatagtttggtttgactttgtcagccttgtcagaagcagttcttctgtcttaaacagaagcccagtcctctctccttaatttgtacccatctctaactaatgctctcttttcctttaagactcaaatcttagcragagtagttcatactcactgtctttatgtcttagcctcccatctgggccttgtttgatctcttgatggctga

SEQ ID NO: 392494 - DNA, 587 bp, Homo sapiens
actaattgatcagccatactcttcttcaaacataccatcttgttctattaaacattcataaatggtgtacagtctactggttctcctttttctattttttctcctgcttgttgcttatataactcctgttcatccttaggaataacttaggtgtcacttctttcaaggatctttttatgaatgccccaggtacagattggatgttcttccttggttctctgaggcacaggcttggtttataatgtggtaacaagcaatcctctaatgttagatgttttgaaatcaccattgtaaaattataactgagacaatgacagagatctgasctaaccgactccttcttgcttctaacctccaagctgtctctgttcattcctgggtgtagggtgaattaactttgggaggaacttagcttatagtttatagtttgaaacaaagatggtaacagccctttcccaaaacaaatctccttcttgcttggggactagattgcctttgtaggactaacaaagtagccacaagattagaaattatagtttaggggccatgcagctggaagctacaagattccaaaactccccaaattg

SEQ ID NO: 392495 - DNA, 587 bp, Homo sapiens
actaattgatcagccatactcttcttcaaacataccatcttgttctattaaacattcataaatggtgtacagtctactggttctcctttttctattttttctcctgcttgttgcttatataactcctgttcatccttaggaataacttaggtgtcacttctttcaaggatctttttatgaatgccccaggtacagattggatgttcttccttggttctctgaggcacaggcttggtttataatgtggtaacaagcaatcctctaatgttagatgttttgaaatcaccattgtaaaattataactgagacaatgacagagatctgagctaacygactccttcttgcttctaacctccaagctgtctctgttcattcctgggtgtagggtgaattaactttgggaggaacttagcttatagtttatagtttgaaacaaagatggtaacagccctttcccaaaacaaatctccttcttgcttggggactagattgcctttgtaggactaacaaagtagccacaagattagaaattatagtttaggggccatgcagctggaagctacaagattccaaaactccccaaattg

SEQ ID NO: 392496 - DNA, 587 bp, Homo sapiens
actaattgatcagccatactcttcttcaaacataccatcttgttctattaaacattcataaatggtgtacagtctactggttctcctttttctattttttctcctgcttgttgcttatataactcctgttcatccttaggaataacttaggtgtcacttctttcaaggatctttttatgaatgccccaggtacagattggatgttcttccttggttctctgaggcacaggcttggtttataatgtggtaacaagcaatcctctaatgttagatgttttgaaatcaccattgtaaaattataactgagacaatgacagagatctgagctaaccgactccttcttgcttctaacctccaagctgtctctgttcattcctgggtgtagggtgaattaactttgggaggaacttagcttatagtttatagtttgaaacaaagatggtaacagccctttcccaaaacaaatctccttcttgcttggggactagattgcctttgtaggactaacaaagtagccacaagattagaaattatrgtttaggggccatgcagctggaagctacaagattccaaaactccccaaattg

SEQ ID NO: 392497 - DNA, 518 bp, Homo sapiens
atcttgtggaccccacccaggaactgatacagcacaagtagacagcttcgactccctatgatttcatctctgacctgaccaatcagcactcccaactcactggccccaccacctaccaaattatccttaaaaactctgatccttgaatacttggggagtctgatttgagtaataataaaactccagcctcctgcatagccagctctgtgtgaattacygtttctctattgcaattcccctgtcttgataaaacagctctgtctaggcagtgggcaaggtgaacccattgggcagttacaaattaacacaataaaagagtatttcttattcatacaatttccattgcagagttgttttctattcttcagagttgttttcctacaaattatggcttagccatctagttggcttcagtcttttagtcctgtcaaaattgaattgagatggctcaattcaaggcctccctacaactggcacagtggaggaagggtgaaactggaaaataaggcttttcattg

SEQ ID NO: 392498 - DNA, 518 bp, Homo sapiens
atcttgtggaccccacccaggaactgatacagcacaagtagacagcttcgactccctatgatttcatctctgacctgaccaatcagcactcccaactcactggccccaccacctaccaaattatccttaaaaactctgatccttgaatacttggggagtctgatttgagtaataataaaactccagcctcctgcatagccagctctgtgtgaattaccgtttctctattgcaattcccctgtcttgataaawcagctctgtctaggcagtgggcaaggtgaacccattgggcagttacaaattaacacaataaaagagtatttcttattcatacaatttccattgcagagttgttttctattcttcagagttgttttcctacaaattatggcttagccatctagttggcttcagtcttttagtcctgtcaaaattgaattgagatggctcaattcaaggcctccctacaactggcacagtggaggaagggtgaaactggaaaataaggcttttcattg

SEQ ID NO: 392499 - DNA, 518 bp, Homo sapiens
atcttgtggaccccacccaggaactgatacagcacaagtagacagcttcgactccctatgatttcatctctgacctgaccaatcagcactcccaactcactggccccaccacctaccaaattatccttaaaaactctgatccttgaatacttggggagtctgatttgagtaataataaaactccagcctcctgcatagccagctctgtgtgaattaccgtttctctattgcaattcccctgtcttgataaaacagctctgtctaggcagtgggcaaggtgaacccattgggcagttacaaattaacacaataaaagagtatttcttattcatacaatttccattgcagagttgttttctattcttcagagttgttttcctacaaattatggctyagccatctagttggcttcagtcttttagtcctgtcaaaattgaattgagatggctcaattcaaggcctccctacaactggcacagtggaggaagggtgaaactggaaaataaggcttttcattg

SEQ ID NO: 392500 - DNA, 518 bp, Homo sapiens
atcttgtggaccccacccaggaactgatacagcacaagtagacagcttcgactccctatgatttcatctctgacctgaccaatcagcactcccaactcactggccccaccacctaccaaattatccttaaaaactctgatccttgaatacttggggagtctgatttgagtaataataaaactccagcctcctgcatagccagctctgtgtgaattaccgtttctctattgcaattcccctgtcttgataaaacagctctgtctaggcagtgggcaaggtgaacccattgggcagttacaaattaacacaataaaagagtatttcttattcatacaatttccattgcagagttgttttctattcttcagagttgttttcctacaaattatggcttagccatctagttggcttcagtcttttagtsctgtcaaaattgaattgagatggctcaattcaaggcctccctacaactggcacagtggaggaagggtgaaactggaaaataaggcttttcattg

SEQ ID NO: 392501 - DNA, 617 bp, Homo sapiens
agtataaagttattatttcctctttatttacatttcagggccatcagatgtgcaccactggggatgttaaattagggttagaggtgcaccattgccaagatggggaagacagagcccacattttccaaaagaacttgaaagcttgtgaatgaatgyaatgtcctcttatctccctgcatctgttcttcatttttccactctctctatagaggaaatctaatcatgtcactcttctgcttgaaatccttcaagagctttcaatggcctttaggataaaatataagcttcttacaatggaattaaaatgtatttcagctgggtatggtggctcacacctataatcccagcactttgggaggccaaggcaggaggatcgcctgaggtcaggagtttgagaccagcctgggcaacatggagaaaccatgtctctactaaaaataaaaaaattggccagtgccacttgtctgtagttccaggtacttaggaggctgaggcgggagaatcacttgaagtcaggaggtggaggttgcagtgagccgagatcgtgtcactgcactccttgactccttaacatttccccatgttaagcttatgcgccagtggaatagacctactca

SEQ ID NO: 392502 - DNA, 617 bp, Homo sapiens
agtataaagttattatttcctctttatttacatttcagggccatcagatgtgcaccactggggatgttaaattagggttagaggtgcaccattgccaagatggggaagacagagcccacattttccaaaagaacttgaaagcttgtgaatgaatgcaatgtcctcttatctccctgcatctgttcttcatttttccactctctctatagaggaaatctaatcatgtcactcttctgcttgaaatccttcaagagctttcaatggcctttaggataaaatataagcttcttacaatggaattaaaatgtatttcagctgggyatggtggctcacacctataatcccagcactttgggaggccaaggcaggaggatcgcctgaggtcaggagtttgagaccagcctgggcaacatggagaaaccatgtctctactaaaaataaaaaaattggccagtgccacttgtctgtagttccaggtacttaggaggctgaggcgggagaatcacttgaagtcaggaggtggaggttgcagtgagccgagatcgtgtcactgcactccttgactccttaacatttccccatgttaagcttatgcgccagtggaatagacctactca

SEQ ID NO: 392503 - DNA, 588 bp, Homo sapiens
taagatggataattccatctgatcattccataatactgaatgacaaaagagttgcaaaacgttatatatagtagacaccaagtggagatatgaattggatatataaacatggagcttgaagagatgtgggctgaaagatacatttggcagttatctgaatacattttttgaaagcatgagtattcacagtcatcaaggagagttagtagtgaagaaaacccaatttagaaccctgggatttccaacaattacagatcaaattgagagaaagagaatcaagcaaataaaatccagaaaagcagcctcactagtaaagagagagagagggaagtaaggagagctctcatgttgcttgtcttcactgattcctactttaaatgtgttcatgagaggtcatgatgcccaaagctatgtcagccagttggaagcatgagggtgcacggttgaggataaaaagccaatatgctaagggtggaggatgaggagagaaaaaacatgacattatagagccaactaatccagaaactcactatatctataattctgttatatgcgataagcatktattttgtaatgtcattgctagtt

SEQ ID NO: 392504 - DNA, 603 bp, Homo sapiens
cgtgcctagagccgtgcatggtatgaggcaggggcctctccatgttgggtggatggagccattcgacagacgttaccgagtgcccgtgatgtgtcgcgcagtcactgtttccagcgctgaagacccaacagtgaaggagacgaggcaggatatgcgattgggccccgctctcrgatcctgtgtccaccaagcacgccgctggggagcgagtgagcctccacgtcactacggggttttgtccgggttgcctgccgtgctgttgacgctggacaggagcggagccgttttaggtctcttgaggctgtgacagtgaggctgagacaggctgatgggaaggaaatcatgaagaggggagacgagctcccaggcaggtcacagctctgcggaggccctgaggtgtggcgagtctagcgccttccagaactgagagaagctggcatcctgaaggaggcctcagacagggccaaagaggcagctaatatgctaggtggggcggggaggctgtcggcaccgagtgagatgtgccttgcacctcagaggcgccctcgggcttctgtggggaggaaggactcgggttaggaggagctgggagggcagggaggt

SEQ ID NO: 392505 - DNA, 603 bp, Homo sapiens
cgtgcctagagccgtgcatggtatgaggcaggggcctctccatgttgggtggatggagccattcgacagacgttaccgagtgcccgtgatgtgtcgcgcagtcactgtttccagcgctgaagacccaacagtgaaggagacgaggcaggatatgcgattgggccccgctctcggatcctgtgtccaccaagcacgccgctggggagygagtgagcctccacgtcactacggggttttgtccgggttgcctgccgtgctgttgacgctggacaggagcggagccgttttaggtctcttgaggctgtgacagtgaggctgagacaggctgatgggaaggaaatcatgaagaggggagacgagctcccaggcaggtcacagctctgcggaggccctgaggtgtggcgagtctagcgccttccagaactgagagaagctggcatcctgaaggaggcctcagacagggccaaagaggcagctaatatgctaggtggggcggggaggctgtcggcaccgagtgagatgtgccttgcacctcagaggcgccctcgggcttctgtggggaggaaggactcgggttaggaggagctgggagggcagggaggt

SEQ ID NO: 392506 - DNA, 603 bp, Homo sapiens
cgtgcctagagccgtgcatggtatgaggcaggggcctctccatgttgggtggatggagccattcgacagacgttaccgagtgcccgtgatgtgtcgcgcagtcactgtttccagcgctgaagacccaacagtgaaggagacgaggcaggatatgcgattgggccccgctctcggatcctgtgtccaccaagcacgccgctggggagcgagtgagcctccacgtcactacggggttttgtccgggttgcctgccgtgctgttgacgctggacaggagcggagccgttttaggtctcttgaggctgtgacagtgaggctgagacaggctgatgggaaggaaatcatgaagaggggagacgagctcccwggcaggtcacagctctgcggaggccctgaggtgtggcgagtctagcgccttccagaactgagagaagctggcatcctgaaggaggcctcagacagggccaaagaggcagctaatatgctaggtggggcggggaggctgtcggcaccgagtgagatgtgccttgcacctcagaggcgccctcgggcttctgtggggaggaaggactcgggttaggaggagctgggagggcagggaggt

SEQ ID NO: 392507 - DNA, 603 bp, Homo sapiens
cgtgcctagagccgtgcatggtatgaggcaggggcctctccatgttgggtggatggagccattcgacagacgttaccgagtgcccgtgatgtgtcgcgcagtcactgtttccagcgctgaagacccaacagtgaaggagacgaggcaggatatgcgattgggccccgctctcggatcctgtgtccaccaagcacgccgctggggagcgagtgagcctccacgtcactacggggttttgtccgggttgcctgccgtgctgttgacgctggacaggagcggagccgttttaggtctcttgaggctgtgacagtgaggctgagacaggctgatgggaaggaaatcatgaagaggggagacgagctcccaggcaggtcacagctctgcggaggccctgaggtgtggcragtctagcgccttccagaactgagagaagctggcatcctgaaggaggcctcagacagggccaaagaggcagctaatatgctaggtggggcggggaggctgtcggcaccgagtgagatgtgccttgcacctcagaggcgccctcgggcttctgtggggaggaaggactcgggttaggaggagctgggagggcagggaggt

SEQ ID NO: 392508 - DNA, 576 bp, Homo sapiens
tccccctcctgcaaacactcccagccacatgcctaggaagcacaggattgtacaagccagcccctgaaacaggcagcccttggagggagcacgggaaggagtgaggaagaggcctgggtggggtggctctcctgaacccatcggcttccttctcccaggcggggtctcatctctgtctgggcctgggagtggcatcttccatctcagtaggcagcttgacatccttgctacctgacaattgggaggtcccctacggttggtccttcagaatggggtggctgtacctgtgagttctgaagcacaaggataaactgtccactctgcccactcaggattgtaagcttccaaggcagagctacaatggagaggaactgcagrtgacgcgtgtgaagtctcatctaaaatacatgcacctgctttcacacccacgtatccacacacatgcacatacacacatatacacacatacacacatgcacacacatacacatgcaatacacacatgcatacacacacatatacacatgtatatgcactgatatggtttggctgtgtccccatccaaatctcatcttg

SEQ ID NO: 392509 - DNA, 617 bp, Homo sapiens
ctgtaagcttcgtgaaggcaggacatggatcactcaagtgcctgctcacagcaggtgttcaatgactgtggagggtggcttttatggcaaaaggggcactmtgctagcttagatcccaggggagagagatcagttccagaaagagcttctgactaggagtagagacctgggttccagtcctgctctggttccagtcctgctcctttgtgtgtcctgtccctgactctgttttagtgacaggccatattgccttcaaggcatattttttttgtttgttttgactcctccgatcccctggcagctgcctttgggtacctctgctccttgctgcatccttcctgcccactggttttattctccaggtccttaaagaacagtcctatgactgacacattgttggcgccggaccaaggtttatcgggagatgcaggaagtcagtgtgtgtcaaagcagataccatgagaccatggcagagacttctccttggcgcctttgggtcatgtgcattgtcaaagttgtgggaagagactagagatgacgtcatattgggacccataagctcttggtgaatgtggagcctggacagagtcatttccctcttatcttatcattgagag

SEQ ID NO: 392510 - DNA, 486 bp, Homo sapiens
cctttgggtggatgtgggcgggcttgggcatgggacagggcatgggacagtggttccccacatgttccctctgaactggggccgctgttctcagcacctgagattttttttttttttttttttttttttttttgagatggagtgacactctgtcacccagtctggagtgcagtggtgcaatctcagctcactgcaacctctgcctcccaggttcaggcaattctcctgcctcagcctccccagcagctgggactacaggcatgcgccaccacgcccagytaatattgtatttagtagagatgcggtttcaccatattggctgttctggtctcgaactcctgactttgtaatccactcaccttggcctcccaaagtgctgggattacaggcgtgagccactgtgcctggccagcacctgagatcttgaaagggatccaggcccctgtgtcagccaggagccggtgaccggtgttgtcagggaagacc

SEQ ID NO: 392511 - DNA, 486 bp, Homo sapiens
cctttgggtggatgtgggcgggcttgggcatgggacagggcatgggacagtggttccccacatgttccctctgaactggggccgctgttctcagcacctgagattttttttttttttttttttttttttttttgagatggagtgacactctgtcacccagtctggagtgcagtggtgcaatctcagctcactgcaacctctgcctcccaggttcaggcaattctcctgcctcagcctccccagcagctgggactacaggcatgcgccaccacgcccagctaatattgtatttagtagagatgcggtttcaccatattggctgttytggtctcgaactcctgactttgtaatccactcaccttggcctcccaaagtgctgggattacaggcgtgagccactgtgcctggccagcacctgagatcttgaaagggatccaggcccctgtgtcagccaggagccggtgaccggtgttgtcagggaagacc

SEQ ID NO: 392512 - DNA, 616 bp, Homo sapiens
gtttaacaaatgtgtaccttggctcctcccctttctaagccctgtgacagtcatcctactattactcgctttcgggccttgcatttttaacctccttgtcaaatttgtctcctccaggatcaaggccatcaagctgcaaatggacttacaaatggaacctcaaatgarctcaactcacggcttctactgagaacccctggatccacctgctggtccctcactagcctaaaaagttcccctctggaggacaccacaactgcagggccccttcttcacccctaaccatcaggaagtagccagaacgactgctgccagttcccaacagcaattggtgtgtcctgtctagaggggggactgaggaggttccagctgggcttcctgggtcgagtaggggctcagaaagctgtgaaactcactcatttcctgtatcaggacttactctcatactggatgaataatattgaagatatatgcttaaaatattcctaacatcagaatttgtgcatgtgttttcttcccccaagaaagctataaacagcaaaacttttgctgtaagcttccctgtgtcctcactcccactctcccttccccctcccctgaaacaaaaaggaatggt

SEQ ID NO: 392513 - DNA, 627 bp, Homo sapiens
agaagtagtcactgaggccgaagaggaagaaggctgaggacgctcaatggggtgcctgaatactacagctggttctctgccctgaacagtttctagggaagtgtgagtgaaaggactagtagatagctccctctcactgtagacatctggaatcctggctagatggggctccataccttcaaggacatgtggactggcagaggggtctcccagagattgcccagagatggagctgcagacaaaaagccagggacatttgtgcataggtcatttctggtggagcccaaccataagtgcccacataccacgcaaatctacctctaawaggctctggccttagctaaccaatggggagagaggagaacctactttcaaatggaactgtgacacatattctgcaggaatactggcccaccagacccctcaacccaagggcccctatctggctgctccataggagtttgtacacagtacagcctctgttttccagtttgagtgctttgctccatctgaatgcattctggcaccctggaagcccttcacattttaccccacccaaaatccaaccccaagggaccagacgatggagccacaaacaggatcttagttccccagggctgcaacctg

SEQ ID NO: 392514 - DNA, 496 bp, Homo sapiens
gtcttggctatagaagaacatattaatcactgttgtcaaagctttgtagcaccttgtctaagtgttaataatctgttgaccaaattcagcaaaatacaattttgaggttattcaaaagctttatttttattcatgataccaacatgttccttatttctatgccaaaaaaatccaaaattagcaatactggttggtaatactctgaatttgtgtcaaaaattgtcacttgaaatttttcttggaagtagtgcttgataatttgtaattccaatgaagttatacataaaacccttgcagcatttatttatttcttgtagtagcttattttatagacttgctattttgtcaatcaaaggacaacaggctgtaatataataacytacagacaagtagatatattgaaactactcatattactcaaaaagaaacgaatacattacaattaaatttggagatgaaaactaacataaaatacataaaacaaaataaacatata

SEQ ID NO: 392515 - DNA, 496 bp, Homo sapiens
gtcttggctatagaagaacatattaatcactgttgtcaaagctttgtagcaccttgtctaagtgttaataatctgttgaccaaattcagcaaaatacaattttgaggttattcaaaagctttatttttattcatgataccaacatgttccttatttctatgccaaaaaaatccaaaattagcaatactggttggtaatactctgaatttgtgtcaaaaattgtcacttgaaatttttcttggaagtagtgcttgataatttgtaattccaatgaagttatacataaaacccttgcagcatttatttatttcttgtagtagcttattttatagacttgctattttgtcaatcaaaggacaacaggctgtaatataataacttacagacaagtagatatattgraactactcatattactcaaaaagaaacgaatacattacaattaaatttggagatgaaaactaacataaaatacataaaacaaaataaacatata

SEQ ID NO: 392516 - DNA, 528 bp, Homo sapiens
tatgacatgggttaagtcattcatattccaaatttaatgtaagaggttcgttctagcataaatatatatcttargctttacaataaagtaaaatattgttacttttatacatatgatataggtttaattttgagagcacgcacaatatttatttaaaaatgctccttaaataaatttaaaaatatatttctacatgaatataatgtaacattaccaattttattgagtctctgtttttttcttataaaaagaacttacaatgataatacataagtaaaactgtaataattatacctactagacacataaaagctttgaattgaagaaaaattttacaataatctgtgtcaggttatgatttaaatttagaattactgtattctaaattctcaaacagagatcatcaatattttttagttatggtactgaattcaatagaactttaaatgtacatcatgtatgtgagctgacatagaggaatcatgattaagtaaatcaaaatagtattaatgttcaatgacatgtggt

SEQ ID NO: 392517 - DNA, 577 bp, Homo sapiens
gaataaatgcaataaaatcacatccaatataaaaggcacggagatactacaaagagtaagaaacatcagaaagggtttaggtgaaaatataataaatattccttttctaaaatgttgtggtagtaatagtttattacttaatctacaaaaaatattgtcagtatttccatacttaccgaaatgagtatgatacytcagcctcactccttcagtatctttttaaatctattaccgtactacagtatcatttcaacaatgttaaatatttaatcacaatttaaatattaaatattaatgataaggataataatcctttactatgacctatactattcataccgttctggaaatataacatataataccagcagatcgcaagttagatagaccaaaaccctctcaaaaccaagaacaaacaaacaaaaaatacaaagcaaaacatttagcctctgcatttaaggcatgtttttcatcaatcctgatgtgctgccgggaatatacaaagaagaggtaagacatctgggattcccatgggaaaccagaaacgaatatataaatgaaatgttgagaagcccag

SEQ ID NO: 392518 - DNA, 643 bp, Homo sapiens
tctacaaaccaatcataatggctttagaagaaaccaactctgttaatcacactttgattacacacttctagcctcctgaatgtgagaaagcatgttccttggagagaagcacaacacactgatcattagagaaatgcaaatcaaaaccacaatgagataccatctcacgccagtcagaatggtgattattaaaatgtcaagaaacaataaatgctggtgaggctgtagagaaataggaatgcttttacactgttggtgggaatgtaaattagagctaggtctttgagattatgttgattaattgatatccaayacaaaccaagttcaaagtagatgagtagttagagagagggtaaaaaatggagagttaaaaattaataaataataaagcagtctagatggtatacacactacttttaagggagcttttttttgaagtttagtgaaacttatgtaacttttaaaaatttcaattttatttgtaacttctgagtgattggttgtgttaaaaaagttaccatacaatttcccatcttaacaatttttaagtttgcaattcagcaatgttaaagtatatttacatttttgtgccacaggtttctagaaaatgttcatcttcgaaaacacattgaacaacatacca

SEQ ID NO: 392519 - DNA, 613 bp, Homo sapiens
aattaatataaatgtaatgttacttttatgcttttctcttttaaattgcatatcagaattaaaagaaacttgtgaagcaacattaaaaacttatgggattttatatttaattacatatttatctctaccagagaaatttatacttttacattcattcattttgctacctagtctccctcatttcaacttgaaagactcctttttgcttttytgtaggacaggtgtggtaataattaccttcttcaaccttttttaaacccgagaaaatattcaattttccattatttctgaatgacaggtttgccaaatgaatgtcttgtgtggtaggttttttttttcttttctgatttttctttcaacactttgaatatgttacatcacttacttttggtttaaaaagatgtctgctggtatcttgttgataataccatgtgagttcccttttatgtcatgattcatttttcttctgcttccgagattctttctttgtgacttttgaaagtttgattatgatatttattgatgcaaaatttttgaattgatctcagtgtacggtagttgtattttaaaacaattctatgtccatattcttcctcaaatttgggaattgtct

SEQ ID NO: 392520 - DNA, 301 bp, Homo sapiens
atagccaaataaatcataaactaaaagaagaaagccagaggcatcaaattacctaatttcaaaggatattaaaagcctgtagtaactaaaacagcatggtagtagtacaaaaacagaracatagagcaatggaacagaatagagaaccaaataataaagccacacacctactgccacctgatttttaatgaagtcaggaataacaagcaatgaagaaagaaccctctattcaataaatgatgctgtgataattgtatagtcatatgcagaagactgaaatttgacctcttcctttcaccac

SEQ ID NO: 392521 - DNA, 676 bp, Homo sapiens
cctggtgcccatactccttgatcatgatataactcaggaggattgccagtccagagtaccggtcatactactgggaggttaagaacatatgcccaatatgtttttgcctctgcacagggaaaacatactgcacaggatattacagctgacatggccataaacttggagtwaggggtttttgcctcaccctgatgctctagcagtttctcagctttttgtgtggttttcttgatctgtccccatgtctttgcattcagattcaactggctcatggctcatattggaggagctgggcccatggttgggatccatgggtccctccagtctcccattccatggtcacatacatggtgggggaacccacacagtttgtccatgtcctgtaaaaacataagcataccctcatccccacgttagtaaatctactgggcctttccattgcccttcttctggggacttctataatacctttaggtaaacttttttccctttaacatttgccactgtcattctgccggagtcttattatctgtaacaggagctaaaaaatttaaagtaaataaggctaaatgtaattttatttgaggtggtagctggtctcctactccccctttttgtttttttcaacatacactgtatgttagttacatcaattacattaataaatgtaatgcat

SEQ ID NO: 392522 - DNA, 676 bp, Homo sapiens
cctggtgcccatactccttgatcatgatataactcaggaggattgccagtccagagtaccggtcatactactgggaggttaagaacatatgcccaatatgtttttgcctctgcacagggaaaacatactgcacaggatattacagctgacatggccataaacttggagttaggggtttttgcctcaccctgatgctctagcagtttctcagctttttgtgtggttttcttgatctgtccccatgtctttgcattcagattcaactggctcatggctcatattggaggagctgggcccatggttgggatccatgggtccctccagtctcccattccatggtcacatacatggtgggggaacccacacagtttgtccatgtcctgtaaaaacataagcataccctcatccccacgttagtaaatctactgggcctttccattgcccttcttctggggacttctataatacctttaggtaaacttttttccctttaacatttgccactgtcattcygccggagtcttattatctgtaacaggagctaaaaaatttaaagtaaataaggctaaatgtaattttatttgaggtggtagctggtctcctactccccctttttgtttttttcaacatacactgtatgttagttacatcaattacattaataaatgtaatgcat

SEQ ID NO: 392523 - DNA, 639 bp, Homo sapiens
tgctcatctggtcagtttcactttctctgctccagcagaccttctttgctcatgtccctgtcctgggcaccacttgtcactgccagttgctacaggattgaatgaagggggatgaatrgagaaatgaagacagagacagaaagatctgttttaaaagaaggtgacagggggctccttgtttctagtgaacaagggatctaagcttctacagcccttcgtatttataaggtagaaataggagggagggagaggtaatggttggtcagctgcttgatttatcacaggtacacttaattgctttctttgtacaacaggcttcagatacttctataggtaatcacaaggaacactgtgcttggggtgtgactgccctcagcactctttctgggggcagacacagtcatcagttttccaaatcctgctttcatgagaacagttttctgtttgctccagtggtatactgagttggtcaggaccctcattctttcagcctgtaacagagggtattagagtctggattgaaccgtagcaaacagcagtagccctatagaaggagggcttgactgttaaaagaaaaacaaacaaatagaaagctacagcaacaacatgaacaaaaaaaaaaaaaacgcccataaaaaa

SEQ ID NO: 392524 - DNA, 611 bp, Homo sapiens
ttgcttctaattttgtcaacagcattttgtaatgtttgggtagagatttctcacttccctggttagctgtatttctaggtatcttatctgtggctgttgtaaatggtagtgcattcttgatttggctgtcagattggakgttgttggtataaaaaaatgttactgatatttgtacacacattttgtctcccaaaactttgctgaagttgtttttcagaagtgggagcttttggacaggggctttagggttttcactgtataaaatgataactctgtgaagagagatagtttgtctttctctctttctatttggatgccttttatttttctcttttactctggctaggacttccaatactatactgaatagcagtagttagagtggccatcactgcctttttccagttctcaagaggaatcctttgagcttttgctcattcagtatgatgttgactgtgggttttcacagatggctcacactatttttgagtatttttatttaactcataatttgttcagggatttttaaaatgaaattgagatcaaacaatcattaaaaaacatcaacaaaactgaaagtttgttatctgaaagagtaaataagatggata

SEQ ID NO: 392525 - DNA, 611 bp, Homo sapiens
ttgcttctaattttgtcaacagcattttgtaatgtttgggtagagatttctcacttccctggttagctgtatttctaggtatcttatctgtggctgttgtaaatggtagtgcattcttgatttggctgtcagattggaggttgttggtataaaaaaatgttactgatatttgtayacacattttgtctcccaaaactttgctgaagttgtttttcagaagtgggagcttttggacaggggctttagggttttcactgtataaaatgataactctgtgaagagagatagtttgtctttctctctttctatttggatgccttttatttttctcttttactctggctaggacttccaatactatactgaatagcagtagttagagtggccatcactgcctttttccagttctcaagaggaatcctttgagcttttgctcattcagtatgatgttgactgtgggttttcacagatggctcacactatttttgagtatttttatttaactcataatttgttcagggatttttaaaatgaaattgagatcaaacaatcattaaaaaacatcaacaaaactgaaagtttgttatctgaaagagtaaataagatggata

SEQ ID NO: 392526 - DNA, 611 bp, Homo sapiens
ttgcttctaattttgtcaacagcattttgtaatgtttgggtagagatttctcacttccctggttagctgtatttctaggtatcttatctgtggctgttgtaaatggtagtgcattcttgatttggctgtcagattggaggttgttggtataaaaaaatgttactgatatttgtacacacattttgtctcccaaaactttgctgaagttgtttttcagaagtgggagcttttggacaggggctttagggttttcactgtataaaatgataactctgtgaagagagatagtttgtctttmtctctttctatttggatgccttttatttttctcttttactctggctaggacttccaatactatactgaatagcagtagttagagtggccatcactgcctttttccagttctcaagaggaatcctttgagcttttgctcattcagtatgatgttgactgtgggttttcacagatggctcacactatttttgagtatttttatttaactcataatttgttcagggatttttaaaatgaaattgagatcaaacaatcattaaaaaacatcaacaaaactgaaagtttgttatctgaaagagtaaataagatggata

SEQ ID NO: 392527 - DNA, 416 bp, Homo sapiens
tggtataaaaaaatgttactgatatttgtacacacattttgtctcccaaaactttgctgaagttgtttttcagaagtgggagcttttggacaggggctttagggttttcactgtataaaatgataactctgtgaagagagatagtttgtctttctctctttctatttggatgccttttatttttctcttttactctggctaggacttccaatactatactgaatagcagtagttagagtggccatcactgcctttttccagttctcaagaggaatcctttgagcttttgctcattcagtatgatgttgactgtgggttttcacagatggctcacactatttttgagtatttttatttaactcataatttgttcagggatttttaraatgaaattgagatcaaacaatcattaaaaa

SEQ ID NO: 392528 - DNA, 503 bp, Homo sapiens
gaagctatttcaaaaaattggagaggagggcctcctacttaactmattctatgaggccaagattgctctgataccaaaacctggcagagacacaggaagataagaaaatatcatgccaatatccatcatgaacatggacacaaaaatcctcaacaaagtactaactaatagaattcagcagcacatcaaaacctaaccaccacaatcaagtaggcattaatcctaggatgcaagattggttaaacatatgcaaataaataaatgtgattctccacatacataagactaaaaagaaatacaccacaatcatttcaatagatgcagcaaaggctttcaaaaaattcaacatcactttccttttttattttgaagcactctcaaaggaaacaatttaatacttctgctcaaacttcaggagatagtggtaacagactactactaagatatctccataatcttgggaaagactgtggctactacaaaatgaagcttgtgtgctggaa

SEQ ID NO: 392529 - DNA, 501 bp, Homo sapiens
aatatccatcatgaacatggacacaaaaatcctcaacaaagtactaactaatagaattcagcagcacatcaaaacctaaccaccacaatcaagtaggcattaatcctaggatgcaagattggttaaacatatgcaaataaataaatgtgattctccacatacataagactaaaaagaaatacaccacratcatttcaatagatgcagcaaaggctttcaaaaaattcaacatcactttccttttttattttgaagcactctcaaaggaaacaatttaatacttctgctcaaacttcaggagatagtggtaacagactactactaagatatctccataatcttgggaaagactgtggctactacaaaatgaagcttgtgtgctggaactcccttgacagtgaatgaaagagggaatcagaaggcttatgacagtggatacattaacatagacatcctataccatgttggaaatctatagaatgtttgctgaagttataatga

SEQ ID NO: 392530 - DNA, 501 bp, Homo sapiens
aatatccatcatgaacatggacacaaaaatcctcaacaaagtactaactaatagaattcagcagcacatcaaaacctaaccaccacaatcaagtaggcattaatcctaggatgcaagattggttaaacatatgcaaataaataaatgtgattctccacatacataagactaaaaagaaatacaccacaatcatttcaatagatgcagcaaaggctttcaaaaaattcaacatcactttccttttttattttgaagcactctcaaaggaaacaatttaatacttctgctcaaacttcaggagatagtggtaacagactactactaagatatctccataatcttgggaaagactgtggctactacaaaatgaagcttgtgtgctggaactcccttgacagtgaatgaaagagggaatcagaaggcttatgacagtggatacattaacatagacatcctataccrtgttggaaatctatagaatgtttgctgaagttataatga

SEQ ID NO: 392531 - DNA, 535 bp, Homo sapiens
gacctcagaagtacaggtaacaaggtcaaatatatgaaagtagaattgtatcaaactaaaaagtttytgcagggcaaagaagtcaacagagtgaaaagataaaatgggaatgggaaacagtttcaaatcatatatctcatgagaggttaacacctaaaatatattaggaactgcaacaactcaatagcaaaaagagaaaaaaagccatgattaataaataggcaaatacttgaaaaagacatttctctgaggaagttgtacatatggacaacagctgtatgaaaactaattaatgtaaattcatcatcaggaaaatcaaaactgcaatgagatatcacctcatacctcttaccatgtctttatcaacatacagacacaaacacacacatacatatatacacacacaataaaagttgttggctaggaaatggagaaattgaaactttcatacactgtcagtgtgaatataaatttttacagccaaaatgaaaacagtgtagaggttgctcaaaaaattaaaaatagaacttccata

SEQ ID NO: 392532 - DNA, 622 bp, Homo sapiens
ggttaccagtggctggagaatggaggaaattgagagttgcttttcaatgagtataaagttccagtaaaaataagatgagcaggtttcagagcactgctgcacaacattgtggccatagttaacaataatgtatcatacacttaaaatacttttaaaagagtagatctcattttatkttcacttatacaagacatacttccaagatattgcagatttggtcccagaacactgaagtaaagtaagtcaaacaaaattttctggttttccatggcatatagatgttatgtgtacactatactgtagtctcttaagtctgcaatataaatatgttacaaataatgtacacactgtaatgaaaatacttcattgctttaaaaatcctaacaatcatctgagcctgcagtgagttgtaatcattttgtaggtggagggtcttgcattgatgatgacagctgctaactaatcagggtggtggctgctgaaagtttggggagctgtggcaatgtcttttaaaaagacaaaaataatgtttgctgcacccattgaccttccttctttaaaaatttccaacttttatttaaagttcaaggtacatgtgcaggatgtccaggtttgttacaag

SEQ ID NO: 392533 - DNA, 621 bp, Homo sapiens
cctcacccactcccaacttaatttgacataaattctactacaggaagacacagacaagaaaatatattaaactgattcaaaaagaaacagaacatctgaatagacctataacaaaaagagaggctgaattggtccaaaatacaacccacaaagaattgcctaggtcaagatgcctttattttgaaatctataagtcatttaaagcagaaaaattaacaattcctcaaaaataatccttcaaatcacagaaaagaaaaatgcattatcaacatatttaactaattccttctagtaaaaccacacaaagatatcacaaaaaataaaaactacagatcgataaatcttatgattatgaactcagaaatccacaaaatttgctagcaaaatgaatgtaagaatatacagaagcaattatataccctgaataagtaaaagttttattaaaaatgcaaagttgctttaacgttaaaatctctattaacataatacaaaatgtaattagaacagaraaataaaactgcatgatcatctcaataaatgcagaaaaattaatttaataaaattcaatatccttcattataacagtaccccgtaaagtagggatagagggaaactttctca

SEQ ID NO: 392534 - DNA, 571 bp, Homo sapiens
taaaatttgcacatggcgtggtggcaaaattgatgttttaaaggtggcagagcaggaatgccctgtccctgttccccatgcagaaagagacttaacaacatcatatagaccaatttgccatggtgataatctcagaaaccagtgaaaaggttgcagcacctcagaaaagagcaaagccaaaaagaattttattttaatatctaggaaatgttgtaccatatactctcratagatccttctctagaccgtacagcattacacaatcaggaaaaaaatctttagtcataacttttcccataggagtgaaagaagcgagaaatgtggtctaatgttctggctccttaggggacttcccaaggatctgattcctgtcaccgaacttaaatcacttatagaaaccccagcatttgaatgcctgggaataaaggcagtgtggctgtttagggcagtacaagaacagctgcattattactacagaatgacaacaggtgaagtaaaatattacaaaatcctgaaaacaaacaaacaaacaaaaaacccgatttaacttggcaattacatccaaaagctc

SEQ ID NO: 392535 - DNA, 419 bp, Homo sapiens
tagtgacatttgcacaacattgtgaatgaaatgaacgccacagaactgtagacttaaaagtgaccacagtggcaaattcagcaacattgagtgagtttgcagcacccagagctctgaatgtcagcaccttggataggggatgagctccatatgccatctgaagttaatagataycagacttcagcaagggagggtcaaagacataggagcattaataggctattactaaatgcatgagaggaccctgtggatgctcagaaatatctggaaaagaaagagttgctgctgcaattctgtttatgattattattatgaattaatttattccccatatgagaaggaggcctagggaaatgtgagttatggaaacatggcagaatatataaactgtagattatctttctgcctaattctgaaac

SEQ ID NO: 392536 - DNA, 578 bp, Homo sapiens
cccctttaatctcatctgtgcatgcttctgccaaatttgttttcctaacatgcaagcttgtcacttgagttcaagatagacttgtcattcctgatcacctgccaaagtgcctcactctggaattcaagttcctccacaacggaggcatcagtttgcagagtatttattagacgtcaacacctgataatgaraaaggattgagcagaggaatcagtcagaaggtaatacaagcctaacaaaaccttggccatctcatcagggagctttccagagaatattgcccattaagcctctctttaggcttaaatgatctcacctttataatactttcaaccacccaccttagaaatagtcatgacctggggcaaagtgattctccacaactaaggcagtctttgaagcagctgagaggtggaggctgtcttttaaccaactttcctgcacctgggcatggatgcagtaggatgcaggtggagaaccttctttctaccatgacaaacttcccagccttctgtctctcacatctccttaatgcatatgcttggctcacatcagttagtctcttaacactccctaag

SEQ ID NO: 392537 - DNA, 578 bp, Homo sapiens
cccctttaatctcatctgtgcatgcttctgccaaatttgttttcctaacatgcaagcttgtcacttgagttcaagatagacttgtcattcctgatcacctgccaaagtgcctcactctggaattcaagttcctccacaacggaggcatcagtttgcagagtatttattagacgtcaacacctgataatgaaaaaggattgagcagaggaatcagtcagaaggtaatacaagcctaacaaaaccttggccatctcatcagggagctttccagagaatattgcccattaagcctctctttaggcttaaatgatctcacctttataatactttcaaccacccaccttagaaatagtcatgacctggggcaaagtgattctccmcaactaaggcagtctttgaagcagctgagaggtggaggctgtcttttaaccaactttcctgcacctgggcatggatgcagtaggatgcaggtggagaaccttctttctaccatgacaaacttcccagccttctgtctctcacatctccttaatgcatatgcttggctcacatcagttagtctcttaacactccctaag

SEQ ID NO: 392538 - DNA, 602 bp, Homo sapiens
gttctggaaaaagtgagaacacgaaaaataaataaaaggacaaaaaatagtaagaagggcttaataatttaagcccagaaatatatcttcaaaacaatcaaccactacctggcctacaattctccagaaatcttgcacacagattttatattgcatggctcattaatttccaaaccatccacagctttattttatgagagggcataagcttcaggcctggggagagagggtggctgaatttcaacactttgtcctatcatttgtttagtacacctcttacatttatatgacataaagaaaataaaataatgattgtatgatgaaaagcttttcatggattcagaataaatggatttttcaatattacccttgtggaattactaatttgagtttgccttatttttaaaacacatgaaacttaagccaaagccacgatacatccatcaaatggcaattcaaaattgaagacatttttttactctactattgaaacatacattttcctcatttttagttgtagattacatcacataacatctgccatcyctaagttagatggcacaaattaaggacaccaatgaataattttgtagttttttttt

SEQ ID NO: 392539 - DNA, 597 bp, Homo sapiens
aggttccacatccttggaaccaaccaaggattgaaaatatagttttaaaaattgtctgtactaaatatgtacagacttttatgtgtcatcatttcctaaacwatatagaattacaactgtttacacagaatttgccctgtattagagattatgagtactccagagatgaattcaagtatacagagtgatataatggattttggagactttggggtgttgtttgggaggtgggtgaggaataaaaggcttcatagtgagtacagtgtacacttctctggtgaagagcacactgaagtctcagaattcaccactatagagcttatccatgtaaccaaaaatcacctgtaccccaacctattgaaataaaaataattataattaaaacaataaagtacatgggataatgtacatatgttatatgcaaaaatactataccattttatatcagggacttgagcatccatggattttggtatccaatggagatcctataaccaatcccctatggataccaagggacaactgtatttactgaactgttaccagcaggctgcagatatagtcagatactaatggacacttaaaattgaaaacctg

SEQ ID NO: 392540 - DNA, 601 bp, Homo sapiens
gattgggtttctacttctacaatgcaaatccttttacacttagaccaaaaattataggtgtcaataatcacatatccagaaaattagtagatacaaatagtctctgagataaattaatgtttcttgttgaagaaagaaaaataaactcctttaactgaatagtaatataaccacaaatggtttttgtacataaggaggacaatttctattaatgaatatatttcttttttttttttttttttgagacggaatctcgctctgtcgcccaggctggagtgcagtggtgtgatctcggctcaccgcaagctctgcctccccggttcacrccattcttctgcctcagcctcccaagtagctgggactacaggtgcccaccaccacacctggctaatttttttgtatttttagtagagacagggtttcactgtgttagccaaaatggtctctatctgctgacctcatgatctgtccgtctcggcctcccaaagtgctgggattacaggtgtgagccaccgcgcctggacaatatatttctatataattcagccacatggtctttggattaggcttctggattaacaacaaacaaaaagctttttct

SEQ ID NO: 392541 - DNA, 631 bp, Homo sapiens
ttgacaaatgaatatctaataccagtgcctaaaacaaaatatccactcaataaaagtctgagtaaaagaatgaatgagtcttctgttttctgggttatttctgctrcacctcgaggcaccatgcatagacaaggacacagtgaacatacaatactttgtaagctttacagagaacgttattgagactgatgggcatactgattgtagagggataatggtgggtggggagggtgttgtggagagctgacctcctggaactattcagggaatgtaaagaagcattaacagagatgcccagtccccagtaactcagctgtggcatgcttagttcaacttgcaagtacaggtgcctctccccagcacagcaatatgtgtccaggtttgtttttatcgtactgttgtcttggaggcattgcagactgtcctctctaaagagccattgatggtattctctctcctaaagttactgtctgctttgctggcaaagatagatgcagataattaaggttcccatttacaggaagcccagaggaatgaataacaaggacctgggtgaagttcaggtgagaacaatgatgcaatccagtcttgaactcatgagcagtgtccctaacacctgacctcctggctc

SEQ ID NO: 392542 - DNA, 581 bp, Homo sapiens
tttcactctcaatagtttctcccttttgtttattgtcatcttattcatttrtcaagaaagcccttcaaggactctctagtgccttcaggatgaagtccaccctcctgtgaaggatatgcctggcctcccataatctatcccctaccctttcctttggagtcacactctaacatgttatcaacattgaatgctgtcagttaagttatactgctagactcctttattattaagcatttttgaatttccacaatgtagagagaaatgttttatgagaaacctcacaataaagtgatatgggctaaagaatattactagatatcctttaaaacttacatccctacacccagatgatgtacgactcccagacttgaatggggagatgttcacacatatggatgatggagctccactccagaactgctgaaattgtagggctggaagctactgatttcaagccttttctccagaggggtagatgataagctcgggatcactgatatttcaagaaaaaatacaatttaattattaggtagctgccattgtatttggacaataatctgtgtcagttaaagaattaaaac

SEQ ID NO: 392543 - DNA, 390 bp, Homo sapiens
cttacctctacaatttcttctccaggtataacacgtttccctggtttcacctctatctcccacccttattctttacagttctgactctagactctattccttatccagttcatgacttcagttaccattatctttctgcaactaattcccaaactggcrccccagtttaatttgatagccagcttcttgggagcaagactgtgcctcattcatctctctattcctaatactcatcacaatgctggacgtgtaataaatgtgtgcttctctgaaatggattaaatttggactctgcatttccatctgcctttgggacagtttgacctggatgttttcccagtatctcaaaatcaatatttctaaaaatgaacacattatcttccctccaaa

SEQ ID NO: 392544 - DNA, 503 bp, Homo sapiens
atataccttaatgaccacatccccagcataattctttctgtacttctggaatatgctctaactcttgtgtaaatacagtctgactctccttgaatcccttaagtgtgatgtcatctgggaatgttcttcatagaaataacagatttgaagagcctaaagaccaattttatattttattagtaatttggtattcatccagatggggaaagggaccagaaaatatcccctttcatgagaatgttataaatcacaaattcccttaaaaatstacaggcagcttcataccagatactaccacaaggatgaggaagacacagtccctgaactttgtatccatctaatgataccacttactcagcaccacatacttgtattaagcacatcatgtctattatattatttaatctaatggaaatgttattattccaattttatacttgaggaaacaggcctagagaactgtctttcctcttgggaaaagcatgcatttatgtcagccagac

SEQ ID NO: 392545 - DNA, 574 bp, Homo sapiens
atctatttatattgtctaagccttattttgattattaatcacatttcttgttctacatatgcctgtatgattttatttaggctccagatgctacctataaaaaattgccaggataatttgaggccttggacgatggtatcttcttccatatttgggctgagtaattcttcactgccttggtagctttccaattgcttaatgcatttttttggcacaattgttctttttaaattataccggttgaggccaatttttgtttgtttgtttgtttgttttgccaatgccttgcacacgatatgacgcccaagtgtgcattgctgggatgcagctcatggcatgtgtgactcattatgcaagttcaagattacccaactgggtcttttccatgttaaacaagattaaacctctgagcatgcatttggatattgtaaaaatatctaattgctataaaagttttgaaatactcttaatttctctattattttttttttctgcatatctctagtagtctagygaccacattttagtggcactgctatagaacacactacactattccaagaaaaagtaagaa

SEQ ID NO: 392546 - DNA, 554 bp, Homo sapiens
gaaagtgtgtgtccttcaaaatttctatgttgaaatcctagcctccaatatgatggtattaggaagtggggcctttggaggatgcttaagtcatgaagggagagcccttatgtataagattagtgcccttataaaagaaatccagaaccatctcacctattccaccatgtgagggcacaatgagaaaatggccatctatgaaccaggaaagaggccctcaccaggcagtgaatctgccagtgccttgatcttgaactttccatcctccagaattgtgagaaataaatttctcttgtttataagctactccacctatggctgtcttatatttattctgtttatttgatgtctcctccaaatgtaagcttctgtgctttgcctttgtgtgacacagtattggccaagaccctggagaatggaaaacaatttatctttttggttcactttgtgttgccyatgctaagatgtgttccaacaaagcaggtgtattgatgggaaaggggagtttcaaactggctaattgtgacaaatttaataaagggacaatttacaaa

SEQ ID NO: 392547 - DNA, 608 bp, Homo sapiens
aaagccttgcatattttgtgttttcttgattgtttgtttttttgtttttgtttttgttttgagatggagtctcactctgtcgcccaggctgcagtgcggtggcatgatcttggctcactgcaacctccgcctcttgggttcaagcaattctctgtctcaacctcctgaatagctgggattgcaggcacccaccaccacgcccggctaattttcttttgcagccaaatcaaaatttaaaacactacaataccaaggtgaagaaaaggtagttatttattcccttttattgattttcctcatgaatctcacttcaatagtagtaggaaataaaactttaattttaattaagtcagagcataatggaataatttaaagtcactttaagctcttcagtgtctttaaaaaaaatgactcaatttttttttcagactaacccctcttctagctatttgcagctgcttcaaggtgacatttgcacataacttagtgtttttaaaaatcmcattttaatttttccagttaaaaacacaaaaatgagaggctcctggtgccttgttggtctctagttgtgctgccaaggtgtggacattctgatcctccctgtaggt

SEQ ID NO: 392548 - DNA, 608 bp, Homo sapiens
aaagccttgcatattttgtgttttcttgattgtttgtttttttgtttttgtttttgttttgagatggagtctcactctgtcgcccaggctgcagtgcggtggcatgatcttggctcactgcaacctccgcctcttgggttcaagcaattctctgtctcaacctcctgaatagctgggattgcaggcacccaccaccacgcccggctaattttcttttgcagccaaatcaaaatttaaaacactacaataccaaggtgaagaaaaggtagttatttattcccttttattgattttcctcatgaatctcacttcaatagtagtaggaaataaaactttaattttaattaagtcagagcataatggaataatttaaagtcactttaagctcttcagtgtctttaaaaaaaatgactcaatttttttttcagactaacccctcttctagctatttgcagctgcttcaaggtgacatttgcacataacttagtgtttttaaaaatcacattttaatttttccagttaaaaacacaaaaatgagaggcycctggtgccttgttggtctctagttgtgctgccaaggtgtggacattctgatcctccctgtaggt

SEQ ID NO: 392549 - DNA, 550 bp, Homo sapiens
tctgaatttacaaatgccttttattttatgtgcagaacagctgtttctcttctgttgtgccctgctcttgctaaatatgcattttgaggaagaggcaatgttgaaagaagctaagaggggttgaaaattcatgtttcaaaccaaatggctcaagatggtgcacatctgtgttttcttctgaccaacttacatccctctttttccaataatggcaccccaattttgctttgagaagctatccaygccccttgaataatatgttggtggggttgttaaagagtttttctttcccaagccaagaaatgagcaaggctttgaaactatattctcttaataccttttcactaaaattttagtcttgaacagactgaaacaagcacataaaatgcccagaattcatcaccttaatggcatcttgaagacactatgtattaatttgttatagccagacctgcataaaggctctggtttacttgaaagtcaatgtctcagaattttcttcagtgctgtgagctatcctgtctcatcaataaatttctttattgcttat

SEQ ID NO: 392550 - DNA, 511 bp, Homo sapiens
tcaaattctggctccgtcgctcacccagctgtgtgacctccagcaagttatttaggtgttctgagtgtcagatgactaattcataaaatggacacattaacacctttctcatggaaatttatgaagacaaaaagcactcaacaagcagaatccatcatcattctcattagcatttttgttatttaaaaaatctaaacattgctctaaaatatccataaaggcctaattctttcaacagatgttcttgatcatgatttttgttatttaaaaaatctaaacgttgctctaaaatatccctaagggcctaattctctcaagagaggttcytgatcatcaccgcaggtaaacattatgggttagatttcagatggcacccacctcgggagcacgattattgaactcaatccttaaattatttctggagaatatgagtataatccagaacatgcaatcaggttgtggctgggaaaatatgttcactctggtagcaagtatcacagggtgctaagaa

SEQ ID NO: 392551 - DNA, 227 bp, Homo sapiens
aatacaaatttcaggtaaccaaaaagttaaaaattgttgctgtaaaatgttttgaggactcatttttacctaaataaataattggggtgggacaggtagagggagagaagtttctaaaaggtcaataacatatccaaagggtatttaaactgacaayctatttccaatgagagagccactcaaccacactggctgtgttcgtttaggaagaaaaatcagccttaaca

SEQ ID NO: 392552 - DNA, 607 bp, Homo sapiens
agtttggacataagactgcttgtttctgaagtccatcttcttttgaatatatctgccctctaaaatgcaaattcttttcccgtattactaaccagttccacctcttgcattttttatcttggttaatgccatcaacatatttttcatttctcagtgtacaaatatttgtcttgtcttcctacctctctctcactatgacaatccaattagttgccaagtcatatcaatttaatttgtttcagacatgcttcttcaatttggctctttctcttcactctttgctgttaatatgttagtcccaatttcatcattcctgacttgaatagtgccacgttgctttaactaatctctctggattatccacccacacccattattttctgcttcatcatcatattgacctacaaaagaagcagaggtgttcatatcactattcttaaaaattcttgctggggctgggtgtagtggctcaagcctgtagtcccagcattttcagaggcrgaggctggtgaatcacttgaggccaggagtctgagaacagcctggccaacatgatgaaatccagtctcaacttcctattttttaaaaatagaaaagtaaaaaaaaa

SEQ ID NO: 392553 - DNA, 569 bp, Homo sapiens
aggctgtgggggagaacacttccttgcctcttccagagtctggtggctgccaacatgtcttgacattccttggcttgtggctacatcacgccaatctctgcttctatcttcacgttcgcttttcctcctctgagtgtgtctaatctccctctacctgtcttaracaaggacacttttgctgtaatttggggcttacccagatacaccagaatgatctcacctcaggatccttaacttatttattacacctgcaaagactcttcccaaataaggtaacactcacaagttagaacatagcaatgactttgggagtcattatcacattaccacaactaggtagtaaatattttaggatttgtgggtcatatagtttctgccacttaacattgccactgtagcctgaaacactcatagatgaatgaaacaaatgaatgtagctgtgtttcaataacactttatttggaaaagagatgagggcctggatttgactgggagtgagtggctgctgaagtttgcagtcctgtggtctatgcaaacaagtgttacgtgtggcaagtcagtgggatcta

SEQ ID NO: 392554 - DNA, 610 bp, Homo sapiens
tgtcaccaatgcttatgcataatattgaagagataacataatcagaaatgcaatccttaattttatacctgggtaaaaattaatcactaacatctattgaaaatcactgtgttctaagtactatgttaagtgattttcaagttactttacttattctaatccagtagttctcaatgaaggcttagtttgttccccagaataaattgggcaatgtctggagatgtttatggttgttgtgacttgggatggagctacttaggccatctattggatggaggcttgtcatgctgctaaatatcatagaattgtcaagacaaccccctacmacaaaaaatgatttcatccaaaatgtctataattctgaggctgagaaattctgctctcacccagcgaaataggctgtgttactgttcatctcactggcaaggaaatagacttagaaagtttatgtcttctatccaagataattcaggatgactccactgttttgaccctaaacttctacagtagatttctagaatttgaaaagatgtttggtgagacactggttcaatcagccagattttgaaaatgtatgccaactgacttttaaggaaagcaaaatgaatat

SEQ ID NO: 392555 - DNA, 610 bp, Homo sapiens
tgtcaccaatgcttatgcataatattgaagagataacataatcagaaatgcaatccttaattttatacctgggtaaaaattaatcactaacatctattgaaaatcactgtgttctaagtactatgttaagtgattttcaagttactttacttattctaatccagtagttctcaatgaaggcttagtttgttccccagaataaattgggcaatgtctggagatgtttatggttgttgtgacttgggatggagctacttaggccatctattggatggaggcttgtcatgctgctaaatatcatagaattgtcaagacaaccccctaccacaaaaaatgatttcrtccaaaatgtctataattctgaggctgagaaattctgctctcacccagcgaaataggctgtgttactgttcatctcactggcaaggaaatagacttagaaagtttatgtcttctatccaagataattcaggatgactccactgttttgaccctaaacttctacagtagatttctagaatttgaaaagatgtttggtgagacactggttcaatcagccagattttgaaaatgtatgccaactgacttttaaggaaagcaaaatgaatat

SEQ ID NO: 392556 - DNA, 544 bp, Homo sapiens
ctaactcaccctcactgatctcctggcttcctaaaaattaggtggtaacatttctttatctcttttacatcaggcaattgccttgtgctataaccataactgcaacatyatttctgtgataactcaccgagagcatccctggcttttcaaaactctcattttttaaactgtaatgaacacttatcaaatccctattatgtgctgaatattgttatgggtattggggatacaaagatgattatgatattgtccctgtgttcaaggggtttgatgactatggtattgtccctgtgttcaaggggtttattatatagtcaggaaaatggagaatctgactgatgtttttagcagtgtgtgaaaagtttcatcatttatttactcagcaactatttgagcacctcatatgcattagtctccatattaagtgtcaggtatacaatggtgaagaaatcagttctggtttttgtccacatgttcatggagtttacaatctagtgtaggaaacaaacaataagcactgaagtaagcacaattttaaaagtca

SEQ ID NO: 392557 - DNA, 509 bp, Homo sapiens
acctaaaaaaaatatttagcaaataaaatccacaaagaatacattcagtatgactcaactgtacataattcaactataagcaaaactaaaaatatatggcttatgggtaccaacacaggtggtaaaagtataagaaaaaacagggcaaaattaagccaaaattcaggaacctctttsggtggactggttgtgagactggcaaggggcacaccacccctaaattacctgcaatgttttattttttcagctgggaagtgggtgcattgttttcacttaggttcttaagtttaagtggtagatcattgggtcttacatattccataacaaaatttttttaaattacaaagagaaataaacaagaaggactcagctgcacttcttgatgacatgccctttctttagacaccctgggaaaactcaattattgtacatcaacagcttttgcctgaaagtagaaagcctagaaaggagataattgcctctccactatctgtgattgggaaactata

SEQ ID NO: 392558 - DNA, 476 bp, Homo sapiens
aggttcttaagtttaagtggtagatcattgggtcttacatattccataacaaaatttttttaaattacaaagagaaataaacaagaaggactcagctgcacttcttgatgacatgccctttctttagacaccctgggaaaactcaattattgtacatcaacagcttttgcctgaaagtagaaagcctagaaaggagataattgcctctccactatctgtgattgggaaactatagcccgctgggaaaacccaggtgcgcagtgatgccaagagatgtcctatttttttccaagttttaacacaagagaatggtgtttgcactcccttcgatttattctacttcartgtacattttccagaaaaaaaaattgaaaaaaatcacaaaacatggctgttggaaaatttgcagttaactagttctctaatatgttgatgttttaacatgatgccttacttcacactgtaaaaaatgctgg

SEQ ID NO: 392559 - DNA, 476 bp, Homo sapiens
aggttcttaagtttaagtggtagatcattgggtcttacatattccataacaaaatttttttaaattacaaagagaaataaacaagaaggactcagctgcacttcttgatgacatgccctttctttagacaccctgggaaaactcaattattgtacatcaacagcttttgcctgaaagtagaaagcctagaaaggagataattgcctctccactatctgtgattgggaaactatagcccgctgggaaaacccaggtgcgcagtgatgccaagagatgtcctatttttttccaagttttaacacaagagaatggtgtttgcactcccttcgatttattctacttcaatgyacattttccagaaaaaaaaattgaaaaaaatcacaaaacatggctgttggaaaatttgcagttaactagttctctaatatgttgatgttttaacatgatgccttacttcacactgtaaaaaatgctgg

SEQ ID NO: 392560 - DNA, 595 bp, Homo sapiens
caagaatactgagtagagttgagtgctctgttggattagagactacattcaaccccagtgtgccttccagagttccaacactctgcagggctctggaactccctctctatggtgactcaagcctttccctagggcattgcttcaacatgaaagaaatctgtatttacatgctgtgtccctgcattaactctagatttttaagtaatactgctatggattaatagaaatgagtagcctgagaagggaagaaggaattaaatcagggacagctctaaactttgtgtctttcttgcctgggctcatctccttacattttttagagctaatacatttgtgttcaatcaatttttaaagtatttctatctctgactctttctctagaacatttaataaaatatttaattcttcttcatttgaagagaaatttaccacttagtgaaacagcttaaattttacatattccacatttttagaygatattgcatttagatactcatttttcaacaaataatttttgaatgtctttatatgcccagtgctcttattactaaaggagagtatctgctctcagaaactttgaacaaattcagttatt

SEQ ID NO: 392561 - DNA, 592 bp, Homo sapiens
gaaaaataagttatcactgttgagaagtaagtctactaaatagagaaatagtctagtaaaggagacaggtataaagcatatgtatttgatatagtacgtaatcaattctattttaaagatataaacaaagcattagttgagcttaaaggatagggagataacttcttgaggaagatgaaaacagttattcagagtcagtgatgcttgagttttcttacatgactatgctgaatggatggaagcagtaagggagacagggaaagaaagaatctgggatgaaaaaatgtctattttctcaggtctccagttttygtacagctatgaagaaatacccaagactgggtaatttataaaggaaaggaagtttaatgactcacagttccacatggctggggaggcctcacaatcatggcagaagacaaaggaggagcaaaggcacatcttacatggtggcaggcaagacagtgtatgcaggggaactgccctttataaaactatcagatctcatgagacttattcactatcacgagaacagcacaggaaaatcccatccccatgattcaattacctcccactggatccctctcacaac

SEQ ID NO: 392562 - DNA, 547 bp, Homo sapiens
gattattctgggtcacacctgaagtttgcacagctctaagtctcacccaaggccctcagcaagtactgcctgggtatgattgctgattattcaggrcccaggtgcttattagtcagcaggtgatgaatcctgccaggactggctctttccattcaaggcagtgggttcccttctggcctaggctgtgtctagaaatgttattggggagctaaggcttgaaatgggagcctcaggactctgtctggtgccctgtcctgctgtggctgaactggcatacaggttgcaagacaaagccctctttactctcccctcacctctcaagcaaaaggaaggagtctctgctggcactgcgagctgtgctgcctggggttggggaagcatgatgatgcaatcattcccttggctgctctagctggcatcttgctaggtcatgtgcatcccaagaccactgactccaagcccagcacagcaccaggacttgcccaggaattgcagcttggcaactggggcctataccgcctttcaagttgattgaggaccccagggc

SEQ ID NO: 392563 - DNA, 538 bp, Homo sapiens
tggccacaagagaaagatcatccactatcctcaggagctgatgtgatcgaagactatgcttcttgggagactytatcactactggtacactgcacatttaattgcatttcctgctaaaataagaaattaaaatcacagtctcaagaatgctttcatatacgtggagggatctcaatccaggaacaatgtgaattccactttatttttgcctttctctaaaggatcctgattctttgcaacatgcttaagtgtgtaagatatctggcttataaccagtggtatgctggtaaatgcttaacacctgactctccaggaaatatatatatatatacacacacacacatatatatatatttgtagcatttgacaatttccatttccatagtggaaatgtttccatcatggggtgatatcaagctaccaatgtgctgttacatagagagctggaaagagatgaagatgcgcacactcagttccagcacaacactgcttacaacacagacttaatacataccgtgttttggtccctcctagattt

SEQ ID NO: 392564 - DNA, 538 bp, Homo sapiens
tggccacaagagaaagatcatccactatcctcaggagctgatgtgatcgaagactatgcttcttgggagactttatcactactggtacactgcacwtttaattgcatttcctgctaaaataagaaattaaaatcacagtctcaagaatgctttcatatacgtggagggatctcaatccaggaacaatgtgaattccactttatttttgcctttctctaaaggatcctgattctttgcaacatgcttaagtgtgtaagatatctggcttataaccagtggtatgctggtaaatgcttaacacctgactctccaggaaatatatatatatatacacacacacacatatatatatatttgtagcatttgacaatttccatttccatagtggaaatgtttccatcatggggtgatatcaagctaccaatgtgctgttacatagagagctggaaagagatgaagatgcgcacactcagttccagcacaacactgcttacaacacagacttaatacataccgtgttttggtccctcctagattt

SEQ ID NO: 392565 - DNA, 538 bp, Homo sapiens
tggccacaagagaaagatcatccactatcctcaggagctgatgtgatcgaagactatgcttcttgggagactttatcactactggtacactgcacatttaattgcatttcctgctaaaataagaaattaaaatcacagtctcaagaatgctttcatatacgtggagggatctcaatccaggaacaatgtgaattccactttatttttgcctttctctaaaggatcctgattctttgcaacatgcttaagtgtgtaagatatctggcttataaccagtggtatgctggtaaatgcttaacacctgactctccaggaaatatatatatatatacacacacacayatatatatatatttgtagcatttgacaatttccatttccatagtggaaatgtttccatcatggggtgatatcaagctaccaatgtgctgttacatagagagctggaaagagatgaagatgcgcacactcagttccagcacaacactgcttacaacacagacttaatacataccgtgttttggtccctcctagattt

SEQ ID NO: 392566 - DNA, 538 bp, Homo sapiens
tggccacaagagaaagatcatccactatcctcaggagctgatgtgatcgaagactatgcttcttgggagactttatcactactggtacactgcacatttaattgcatttcctgctaaaataagaaattaaaatcacagtctcaagaatgctttcatatacgtggagggatctcaatccaggaacaatgtgaattccactttatttttgcctttctctaaaggatcctgattctttgcaacatgcttaagtgtgtaagatatctggcttataaccagtggtatgctggtaaatgcttaacacctgactctccaggaaatatatatatatatacacacacacacatatatatatatttgtagcatttgacaatttccatttccatagtggaaatgtttccatcatggggtgatatcaagctaccaatgtgctgttacatagagagctggaaagagatgaagatgcrcacactcagttccagcacaacactgcttacaacacagacttaatacataccgtgttttggtccctcctagattt

SEQ ID NO: 392567 - DNA, 523 bp, Homo sapiens
tgctgattttttccttcctatttaaaaaattttggtaaaatatccataacataaaatttaaccattttaactgtttttaagtgtacaattcggtggcattaagcacattcacaatgttatgcagtcattactatgatcagtttcttatttttttaacatcaccatgactgcttttatagacctgatatatggtataaagaataaaatttaaattcctccatggcatagaaagtcttcccttcctaaggtcagcttccatcacagctacagtttaggcctactgaatttactctccatttttagaatgtgttgtagaaaccktacttggggcctttgcttatgcatccccttggctggaatgctcccatcctcccattatctgttgtctactggagaatttctttgcagccttcgtatttgcctagagggaattaattttttcctgtcttgtctttccactacactccactatttatcacagtattgatcctgctttgctctgcattctgggcaaaaataccat

SEQ ID NO: 392568 - DNA, 658 bp, Homo sapiens
gtggctcctatgaaaaagtacttgtctgatgagggccacatgtataaacaggcccaatatggtatgcacgtataccaacccccmaccataggattggtgaatggccatggcaccatgtgggcacattccctctgttttccctctgcctccactcccacattatagccagatgctcactactgccccctgtgcactaggatctttttaaccaaacatttcaagtatatgggctatttctcaaactggttccacagggctctgaggtcccatgaggtgtctgatgggaagtgagggtcgttcaaggggaaatctgagcatgtgagtctccagatgcttcatcatcagttcagacagaattctgtttacctgtcttacttgtgagattccttacaaaattctgatgcaaaaaaagttctcctgctaagtctaaaaacttctgctacccatagaatgatgacccatcagtcttctgcactccaaaactgtccatatttttatcaagtactctgtaattaataatgcatcagatatttaaattgtgtaacttcacttcattttccttcttcctcttctgtcaatgtcctagtaaaatcaatggtctctcctcctcctcccagaattttggtggcaccctggcaggtcctaagccttttctttc

SEQ ID NO: 392569 - DNA, 391 bp, Homo sapiens
ttaggttgtaattaatttggagttgatttttgtgtgtggcgtaagggtccagtatcattcttctacaagtgaatatccaattttccagcaccatttattgaagaaactatcctttctccttgtgtctccttggtgttgttattgaaaactagttttttgtatackcttgtgtttattactgggctctctattctgttccattagttcaggtgtctgtttctatgccagtaccaagatgttttaaaatgttttgactactataggtttgtaatacaatttgaaatcagatactgtgattactccaactttgtttttatttctcgagattgctttagctatttggggtctttcgtggttccacagacattttagaattttatttctatttctg

SEQ ID NO: 392570 - DNA, 540 bp, Homo sapiens
cggcaactccagccaggggtatacagacagaactcttatctccctgggatggagcccctgtgggragaggcagctgtggtctccacggttcagccaacttagtctctcctgcctgctggctcgggagagtccgaacagtctggatgaggggggttcctcccaatgcagtgcacccactctgccaaggggtagcccagactgcttccttaagtgggtccttgatcctattcctcctgatgggtgagaccttccaacaggggttgccacttacctcatacaggggtgttctggctggcaataggtcagtgtgcctctgggacagagctcccagaagaagaagaaggctgccatctttgctgttctctagcctccactggtgatacctccatgttaagaagggactcaggcaaataaggtctggagttgactcccagcaaacttcagcggtgctacagaagagaggcctgactgctaaaagaaaaacaaagaaatagaaagcaacaacaacaacatcaataaaatgacccacaaaaaaaaacc

SEQ ID NO: 392571 - DNA, 505 bp, Homo sapiens
ctgatccattcctttcagcttaaaactgaaaaactccccctaaatctaaggatttaaaacatatatacaaggatataaaggcctgttcctttataggctttccctaggctcgtcttccaccacttctccataaatctcatctgtggcccattgaggcttcatcacttgcagtttctgaaggtaacatgctctcctctcatgcctcttcgtctttttttttttttyccatccaaggttgttttatttccatacacaaatgaaacttgtacacacatatatacacacatatatcttacattatggatacaccatataaatatacatagcatatacatattggtctatatattgtatgcatatgttcacatgtacatatgtttgtaatttccacatgcatgcaaactaccttaagtgcctccctcaaggggtaggtgaagagaggatcaaaaaggggactattggtctctggcacaatgtgtttaataggtttgattctcatttttac

SEQ ID NO: 392572 - DNA, 568 bp, Homo sapiens
tgctgtttccttatctaaatcctatttgtcttttaagatccagctcaaaccccaggtgctatgtgaaatatatttgacactccccatccaaaattctccttgctcttagggatgtctaatttatacaatytgtctagcaggtaatctcatatatttattcaccaggtagtatggtaggagaaggaagagtctaaattttcaaatcaaacaataattttcaaattctgattttgcaacttacagctgagtggcattctgaaaactacttaaattgtttgattcttgattttcttatctgttcagttggtaaaatgtcatattaataatttacacagaatattattaaaagaaaatacatcaaaaatgtttatgtgttaggtgttagtttttaaaatttccttacctagaacatctaaaattattgacataaaacatatacctcctttacagtgcaaagatttaatttatctaatccacagggctacgtgcatgaaataaaatgatatgtttgaaatgttgtaaaaccttagtaaatattatatttatctcttcacaaattatttctata

SEQ ID NO: 392573 - DNA, 568 bp, Homo sapiens
tgctgtttccttatctaaatcctatttgtcttttaagatccagctcaaaccccaggtgctatgtgaaatatatttgacactccccatccaaaattctccttgctcttagggatgtctaatttatacaatttgtctagcaggtaatctcatatatttattcaccaggtagtatggtaggagaaggaagagtctaaattttcaaatcaaacaataattttcaaattctgattttgcaacttacagctgagtggcattctgaaaactacttaaattgtttgattcttgrttttcttatctgttcagttggtaaaatgtcatattaataatttacacagaatattattaaaagaaaatacatcaaaaatgtttatgtgttaggtgttagtttttaaaatttccttacctagaacatctaaaattattgacataaaacatatacctcctttacagtgcaaagatttaatttatctaatccacagggctacgtgcatgaaataaaatgatatgtttgaaatgttgtaaaaccttagtaaatattatatttatctcttcacaaattatttctata

SEQ ID NO: 392574 - DNA, 515 bp, Homo sapiens
gttagtttcctgtggctgctctaacaaattagcagaaactaggtggcttacagaatagatatttattgtctcatagttctggaggccagaagtccaaaatcatagcttggcaaatccacactctctctggaggctctacgagagaatccttccttgtctcttccagcttcttgtggctttggaaatccttggtttgtggccacatcactccaatcttcacctctgttttcatgtgaccttctcttctgtgtctgtcttctcctccatgtgtctcatacaaggacctttctcactgaatttaagcttcactcagataatcaggatgatctcatttttcaagatccttaattacatctggaagacccttattccaaataaggtcacattcatagtttccgggattagaagggagacatatcttttrgaggatcatcattcagcccaccacgctcaccaaattctttttgccccctattggttttttgttttgttttgttttgttttgttttgagatg

SEQ ID NO: 392575 - DNA, 572 bp, Homo sapiens
tcgtttttcaccgtgactactgttttcactcagaatcctctcctttcccatccaaaaccaacatattcttcaaggcctaaataaagtgctatctccaacccaggcttccacacccgccaccacctctccctgtccactgcccaggttgctattcagtgaagcaactcttcaagctgagmtatcagatacttaacactacactctaggccattactcccaatcaaaataggcacagaaatgagcttagaaaataaatggaaactttaatatttcctcagtattctacctccttatgaccttggttattcaacgtatttctgaatccactctctcttcattgttattcaccaaattagaaactcacttagaagactaattgacttaaaatatttgtgtacccctccaaaatatcacataattctgagtataaggcctgaagttacctgtttgtattctaattgaaaagaaggtatggtaatagatgtgcagtgatgcttgtacttgatctggctgtcttcactccatagagagccaggttcatctgactttctcattcaccacatcgaagaata

SEQ ID NO: 392576 - DNA, 557 bp, Homo sapiens
ttatttttctgagttttccacatcttgccaattttccctagtacatatgtattaccttgatcatcagaaatatttttaggtaaaggaaaaatctgcagagaagcaaaacacaagtgaactaaatacaaaaaaaacaaacaaacaaaaatcctcarttgttttacttactgtacgccaggccactgaccagttggaatcctcatatttttatgtggtcagcactgttatcatctgttatcatcttcattttacagatgagaataacataacacaggatgagagcatcgcttgccatagaccacaggtctgggtgtcagcagggagatttgagggtaggagatcaggctccagagtccatgctacccacactttgatggataagcaggaaatgaacatgaataaacaggtcagagcctcaagaagccctcccatttgctcacctattcctagctgcatgactgtgaatagagaattttatctctctcaacctcatttttcttatttataatacaagaatacgggcattaataactgtccttttcagaggatccaatgaa

SEQ ID NO: 392577 - DNA, 582 bp, Homo sapiens
taaaaattgagaagtcttgatgatcrtaagttatttgttgccatggttcccaagggccacgctgtattttctagacagctaatggaccatagtgatacatcctcaattcttgatcttcatgtctcaaaaatgttagaaaccatgttatgttaagagaaatgccaagaggaaaaattgttgcttcgttttttatgcagactctaaatgagggtgatgtttggtgacttttatgccctgaagtcagttctctctgggggtcaatgtgagaagcagaaaagggcccctccctgatcttcatttgcctatgagggttgctcctctgcaggcagggaatgacatctttccacatgttgccacctcactggcttatagcatgtcagaaaggagcctgcagggtacctgagccactttcttgtagaatgttttggacacaaatgttgtggatgtacaacttgagttccaatgccaacttgtttttcaaaggggctctgccaaagtctactccctccatcgatgtctgagagtccctttgttctatgaagtgcaaacaagggcagctgacctagcagtgaatacatcaaa

SEQ ID NO: 392578 - DNA, 573 bp, Homo sapiens
taatctgctggtaaaatcttccattgcgcagcaaattcatatctgaaactatatgccttagaaatacacaagtgcatgtaggttttgtgtaagtaatgtttcttgcagccttatttgaaataggaaaaagaaaactcacacttctcagtaggaaaatggttcaataaattacacacatctgttctattaaattaatactatatagctacaaagctatctcaaccaaggatgttgctttagctattccaacttggaccaatgccagccatctatacatagtggaagaaggtaggcttctgcatgtgtgtgtatgtgtgtgtgcatgaagaattgtctaaaagcaactattccaaattgatattgtgctgtaagtataaaatccacccagaatttcaaacttatgagaaaaaatgtaaattgtcycattaataattttatattgattacatgttgaaataataatatgttagatatattgggttaaataaaatacattattaaaataaatttcacttatttttactttttcatactgctagtagacatttttaaattacatactataaaagtgtt

SEQ ID NO: 392579 - DNA, 549 bp, Homo sapiens
cgaactgtatatactcccaaaatacccatctccctccttcacctccactcaaggtatgagctgttccagcagcttgggccttttatgcaagacagcctaaagggaatcaacactttttttttttttttttaaraaaatgggtctggctctgtcacccaggctggagtgcagtgagctcacaattcttcaaactcctaagctcaagcctctgcctcctgtgtagctgggactacaggcatgcaccaccaagctttcaacacatttttaattgcttactattgtcattagtatttgtatttccatcgtatcttctcaccaaccacttcacatgtttattagtagatccactttacagttaaagaaactgaagttcagaaagcttatgaaaactgaacaaatcccacacccaaaagatgtgtggcttttaacccaggctttcaactccaaatccactgagtttttcacatattgtactacagtggccccactggcagccaggccatgatgttcccaattaaatataagtaatgtttagatcaggtcacatca

SEQ ID NO: 392580 - DNA, 445 bp, Homo sapiens
atgttttgtaaactggtcccctattcatggtsgggccccacttaagctcaggactagatacttaccaaatcctggagaagggcctgtttgcttctaagtttccttgctttgtggaatttaaagtgattgtcatacccaagtaagagatgcttaggggatgaggagaggattaatacagaggctaagttcttattcaaatgcagctcagttttagatctcattttatggccatcatcccatacagatttgccaagaagcattccaaaatgattcttgacgattagctatcaaatagaaaaagaaataagatacttggccgggcgcggtggctcatgcctgtaatcccaacactttgggaggctgaggtgggaggatcatgaggtcaggaggtcgagactggcaccacagaagtcatttctctagtttatcccttcagaagtggctt

SEQ ID NO: 392581 - DNA, 445 bp, Homo sapiens
atgttttgtaaactggtcccctattcatggtcgggccccacttaagctcaggactagatacttaccaaatcctggagaagggcctgtttgcttctaagtttccttgctttgtggaatttaaagtgattgtcatacccaagtaagagatgcttagsggatgaggagaggattaatacagaggctaagttcttattcaaatgcagctcagttttagatctcattttatggccatcatcccatacagatttgccaagaagcattccaaaatgattcttgacgattagctatcaaatagaaaaagaaataagatacttggccgggcgcggtggctcatgcctgtaatcccaacactttgggaggctgaggtgggaggatcatgaggtcaggaggtcgagactggcaccacagaagtcatttctctagtttatcccttcagaagtggctt

SEQ ID NO: 392582 - DNA, 445 bp, Homo sapiens
atgttttgtaaactggtcccctattcatggtcgggccccacttaagctcaggactagatacttaccaaatcctggagaagggcctgtttgcttctaagtttccttgctttgtggaatttaaagtgattgtcatacccaagtaagagatgcttaggggrtgaggagaggattaatacagaggctaagttcttattcaaatgcagctcagttttagatctcattttatggccatcatcccatacagatttgccaagaagcattccaaaatgattcttgacgattagctatcaaatagaaaaagaaataagatacttggccgggcgcggtggctcatgcctgtaatcccaacactttgggaggctgaggtgggaggatcatgaggtcaggaggtcgagactggcaccacagaagtcatttctctagtttatcccttcagaagtggctt

SEQ ID NO: 392583 - DNA, 591 bp, Homo sapiens
tgtttatgaaaaagaaggaaacaaaagacagatttatctcttccatcctgttagcataaaaaggaaatacagagatagtcaatgaagtagtgtaatgaaccataagsgcggcatttgaaagtaacacgatgtcttttctctatattcaaactgacatttgagagagatatgttaaagagagtgataatttgaagggatttttttctctttattgctgatttcaagatataaaaatatatttgcatctcaggcccttaactcttttgcattggtttaaggttatagaaatctttgtataaatctttgtattggttttttatgcattaaaatgggtgatcatgctgagtttttcacttactgttgatttcaagatattcaaaacttagttctataagtgattagtgttgctcgagtacaacctcgttttgaaaggagatctgcatttctatggccacttaaataggattccaaggaaacattaaactccaagtgagtttatttaaactctccattgattttggatgcttagaagtaacttccctcaaaatattgccatagtcaacagtaatgtggctctttaaacatctacat

SEQ ID NO: 392584 - DNA, 500 bp, Homo sapiens
ctcctgatcatccaggtgtgtctatgtgtctcagttgccacccctctcaagtttccactctctaggaactctatccccaagaaagaatgggcagaataatttcccctacatgtgctaagtgagaatgttcaccccagcccctaacatcttctgcagaacactattggtcctctgcctggagcaacccaaaccctggagctactgcctacttcatattcaaagtgcagcaaagtcttaccttctgctstgttccccattttgtttttctattctgttcctcaactgtggaaatgatcatcttttattgattccagccatgtctctttttatgtatatttttccctcttgctacatgattggagcagaaatgccatcttgacctgaaacctctgtgttctccttctaattctatgattatggcctaaccactgccctgtctctctcaagccagcccttttgattctcaaaagactgttttggaagtcagaaacctgaacatt

SEQ ID NO: 392585 - DNA, 609 bp, Homo sapiens
aacctctcctgaaatagttgccttgaaagacactgttgatctccctcaggactcacccccaccattcttctttgtatctagacctgtaactagactcaaatcccagcaggtcccagaagatgagatacaaagtgtgactcaagataaagtacactatacattgagaaaacagcataattttcccaaattacacacacagaaatttgggttatatgtttgtgaatggatgttaaaggtgtttaataayagtggaaggaatgtaaagttaagtcaggctggatttattgatattgatccactaagcagagattctgctagttgatcatcacatccctaggaaaaaaaacagatgaaaatccactaaattctttcttgctttgtataagtggaagagttataggtttactaaacagaagtctaatttgaaacatgaaaacagaatcacattaattgattccaagatttgagccaatttataaacccacagcaccttgaatgaaggagaggcccctatcctcttcaggaaagactctactccactgccaaaaatctgtgcatttctactaaaatagacacttatgctagataggaattggctttccctaaaca

SEQ ID NO: 392586 - DNA, 546 bp, Homo sapiens
gatgaatcttgaaagcattatgctaagtgaaagaagccagatacaaaatgccacatattatgtgatcctatttatacaaaacatccagaatakgcaaaccctcaaagaaagaaagtagattagtgatggctgaggagatggggatggggatgggcaggtgatagctaaagtgtactggatttctttttagtgttaacaaaaacgttctggaattaggtagtggtaatggttgcacaagcttgtgaatatattaaaaatcactgaactgtgctttaaatggggaacgtttctggtattgaaattttatcttaattttgaaaactctgatgtacatttgacacttacagctcatctcaatgcggtgctcactatcccctgcagcgcttacattctgtgttaggtaatgcagctctagactcttgctattcagatcagagtgtgttttacaaaccagtagcatcagcgtcacctggaagctggttagaaatgtggaatctcaggccccagctgagacctactgaatcagaatctgcattttaacaagat

SEQ ID NO: 392587 - DNA, 546 bp, Homo sapiens
gatgaatcttgaaagcattatgctaagtgaaagaagccagatacaaaatgccacatattatgtgatcctatttatacaaaacatccagaatatgcaaaccctcaaagaaagaaagtagattagtgatggctgaggagatggggatggggatgggcaggtgayagctaaagtgtactggatttctttttagtgttaacaaaaacgttctggaattaggtagtggtaatggttgcacaagcttgtgaatatattaaaaatcactgaactgtgctttaaatggggaacgtttctggtattgaaattttatcttaattttgaaaactctgatgtacatttgacacttacagctcatctcaatgcggtgctcactatcccctgcagcgcttacattctgtgttaggtaatgcagctctagactcttgctattcagatcagagtgtgttttacaaaccagtagcatcagcgtcacctggaagctggttagaaatgtggaatctcaggccccagctgagacctactgaatcagaatctgcattttaacaagat

SEQ ID NO: 392588 - DNA, 559 bp, Homo sapiens
aataattaagtgatgataatgatatgtatgtgtttctctgtagaaataaatgcaaaaaggataacaaaagatarcacagcagcattttattttgaacatggactttgatttcatattcaaatatatgaatacttcaatgagtgagtttaaatctatagaaaattacttgattctttcacagtttcagttttgaagtctattctagatttgttttactctacttcaccaatttggtctatgtattcctgaaaccagtaccacatcctttaaaaggtttttttgctttattttgactacttggctaagcacattaattattcagcttttccaaaatatttttggaattaatatcttttcattatcacaaataaattttagaatttttatatcacattttaatctgttttggtatttttttgtaattgcactatcttttagaagtattttgggaggaattataaactttatgatattgtcttttcttgtaaaacctggttcgtgtcttcatttattcagttctcctttgctgtatgtcttaagttgtgtatttttcattttt

SEQ ID NO: 392589 - DNA, 564 bp, Homo sapiens
tgctagatgaatgcacacatcacaagcattttctcagatatcttccttcaaattttatcctgggatattcacttttttgccattggtctccatgagctcccaaaagtccattcacagaatggacaaagacagtgttacctagctgttgaatgcaaagaaaagttgaactctgtgaaatgaatgcacatatcaaaaagcagtctgtcagaaaggttctttctagtttttatctgaagatatttcctttttcaccataggcccatttgcgctacaaaatatttcttcgcagattcaacgtaaacactgtttccaaacggcagaatgaaaagaaagttttaacactttgagatgattgcacacatcacaaatyggtttctcagataaatttcttctagtttttatcctgggatattcactttctcaccattggcctcaatgcgttcccaaaggtccattcagagaatttgaaaaaatagtatttccaaactgctgaatccaaagaaaggtttaactctgtgagaagaatgaacacatcagaaagcagtctctcagaaaccttcttta

SEQ ID NO: 392590 - DNA, 591 bp, Homo sapiens
agcagtttctcacaaagcttgtttcttatttgcaattgaaggtatttaatgttcactgtaggwttcaatgcactcccaaatatcccttcatggattctatgaaaacagtttttccaaactactggatgaaaagaaagttttaacgttgctagatgaatgcacacatcacaaaactgtttctcagatagcttccttctagttgttatcctgagatattgacttttttgccattggcctcaatgagctcccaaatgtacattcgcagaaaggaaaaaaacagttttggaatattcacttttttgccttgtcctcaatgagatcccaaatgtcaattttgcaacacggacaaaaactctttccaaaatcctgactccaaagctttcaccctggatgaaggcacacatcacaaagcagtttttcagaaagaatctttctaatttttttatgaagatatttcctttttcacttaggcctgaatgtgctcccaaatttcccttcagagattctacaaaaacagtgtttccaaactgcagaatgaaaagaaatatttaactcagctggatgaatgcacacatcaaaaagcagtttctc

SEQ ID NO: 392591 - DNA, 591 bp, Homo sapiens
agcagtttctcacaaagcttgtttcttatttgcaattgaaggtatttaatgttcactgtaggtttcaatgcactcccaaatatcccttcatggattctatgaaaacagtttttccaaactactggatgaaaagaaagttttaacgttgctagatgaatgcacacatcacaaaactgtttctcagatagcttccttctagttgttatcctgagatattgacttttttgccattggcctcaatgagctcccaaatgtacattcgcagaaaggaaaaaaacagttttggaatattcacttttttgccttgtcctcaatgagatcccaaatgtcaattttgcaacayggacaaaaactctttccaaaatcctgactccaaagctttcaccctggatgaaggcacacatcacaaagcagtttttcagaaagaatctttctaatttttttatgaagatatttcctttttcacttaggcctgaatgtgctcccaaatttcccttcagagattctacaaaaacagtgtttccaaactgcagaatgaaaagaaatatttaactcagctggatgaatgcacacatcaaaaagcagtttctc

SEQ ID NO: 392592 - DNA, 461 bp, Homo sapiens
ctgaattaaaagaaaggtttaacttggtgagatgaatacactcatcacaaatcggcttctcagataacttccttctagtttttatcctgggctattcactttttcaccattgtcctcaatgagttcccaaatgtccatttgcagaatggacaaaaacagtgtttccaaactgctgaatccaacgaaaggtttaattatgtgagtcaaaggcacacatcacaaaccagtatctcagaaaaattctttctagtatttatctgaagatatttccattttcaccrtaggcctcaatgtgctacaaagtatttctttgcagatgttaagaaaacagtgtttccaaaatgctgaattaaaagacagttttaactctgtgagatgaatgcacacttcaccaactggtttctcataaaaattccttctagtttttatcctgggccattccctttttcaccattgtccac

SEQ ID NO: 392593 - DNA, 560 bp, Homo sapiens
tgatgtgttcattcttctcagagagttaaaactttctttggattcaacagtttgttaacactgtttttgtccattctgtgaatggacatttgggagctcattgaggccaatggtgaaaaagcaaatatcccaagattaaaactagaaggaagctctctgggaaaccactttgtgatgtttgcattcatcgcccagagttaaccatttcttttcattcagcagtttggaaacaatatwtttgcagaatttgcaaagggatatttggcagcacattgaggcctattgtgaaaaaggaaatatcttctgataaaaactagaaggaagctttctgagaaagtgcttcatgatgttttcattcatctcacagagctaaactattctttggattcagcagtttggtaacactgttttcttagtatctgtgaagagatatttagtagcagaatgatgcctatggtgaaaaaggaaatatcttcagattaaactagaaagaaactttctgagaaactgctttgtgatgtgtgcattcatcttatagagttaaaactttctttggattc

SEQ ID NO: 392594 - DNA, 535 bp, Homo sapiens
caacagtttgtaaacactgtttttgtccatgctgcaaaaggacatttgggaactcattgaggccaatggctaaaaagagaatatctcattataaaaactacaagcaaactacctgtgatgtggacactttgagatgtggacactcatctcacagagttaatcctttcttttcattcagcaggttggaaacactgtttttgtagaatctgtgaaaggaaatttgggagttcwttggggcgtatggtgaaaaagaatatatattcagataaaaactagaaggaagtttactgagaaagtgctttgtgatgttttcattcatctgacagaggtaaacatttccttgttttcagcagtttggaaacactgtttttgtagaatgtgcgatcagatatttgggagtgccttggggcctatgctgaaaaaggaaatatcttcagataaaaactagaaagaagttttctgagaaactgctttgtgacgtttccattaatctcacacagttaaacatttctttggattcatcagtttggaaaca

SEQ ID NO: 392595 - DNA, 634 bp, Homo sapiens
ttttgaaaacactgtttttgtggaatctgtgaaaggacaattgggagcacattgaggcctatggtgaaaaaggaaatatcttcaaacaaaatctagaaagaagctttatgagaaactgctgtgtgatgtgggtgtttgtctcacagactttaaccattctttggattcagcagtttggaacactgtttttgtctattctgccattggatatttgggagctaactgaggccattgaagaagaagcaaatatccgaggataaaaactagaaggaagctatctcagaaactgcttggttgtgtgtgcattcacctcacagaattaaaccyttcttctcattcagccttttggaaacattgttttcatagaatatccgaagggacatttggcagaatgttgagtcctaaggtgaaaaaggaaataaaatcagataaaaataagaaagaaaatttaagagaaactgttttgtgatgtgtatattcacctcacagatgtaaacctttctttcaattcagcagccaggaaatgctgtttttgtagaatctgagaaaggacattttggaacaaaagcaaatatcccaggatgaaaactagaaggaagctatctaagaaaccattttgtgatgtgtgcattca

SEQ ID NO: 392596 - DNA, 563 bp, Homo sapiens
ctgctgaatccaaagaaaggtttaactctgagatgaatgcaaacaacacaaagcagtttctcagcaagcttcattttagttgttttatgaagatattcccttttttgcaataggcctcaatgggttcccaaatatcggtttgcagattcttcaaaaacagtgtttcaaaactgctgaatgaaaaggaaagtttaaatctccaagatgaatgcacacatcatgaagcggttmctcagataacttctttctagtttttatcctgggatattcgctttttcaccactggcctcaatgagctccaagaagtccattcacagaatggacaaagcagtgtttccaaactgctgaatccaaagaaatgtttaactctctgagatgaagtaacacatcaaactgcagtttcccaggatgcttctttctagtttttatctgaagatatttcctttttcacaataggcctcaatgcgctgccaaatatcccttcacagattatacaaagacagtgtttccaaactgctgaatgaaaagaaagttttaacaatgctagatgaatgcacacatca

SEQ ID NO: 392597 - DNA, 539 bp, Homo sapiens
aatatatcaggatgaaaactataaggaaccaatcagagacactgctttttgatgtgtgcattcttctcacagagttaaagctttcctttcattcagcagtttggaaacactgtttttttagaatctgcaaagggatatttaggagggcattgaggccgatggtgaaaaagaaaatatcttcagataaaaagtagaaaaaagttttcagagaaactgcttgytgaggtgtgcattcatttcacagaataaaaactttctttggattcagcagtttggaaacactgtttctgtccactttgcaagtgaacatttgggagctctttgaggctgatggtgaaaaccagaataatccaggataaaaactagaaggaagctatctcagaaaattctttgtgatgtgtgcattcatgtcttagagttaaaaattttttcattcagcagcttggaaacactgtttttctagaatctgcgaagggatattttggagtgcagtcaggcctatgataaaaagggaaatatctttagataaaaactagaaa

SEQ ID NO: 392598 - DNA, 461 bp, Homo sapiens
taaagctttcttttgattcagcagattggaaacactctttttgtagaatctgcaaaaaaacattttggagcatgctgaggcctataaataaaaaatgaacatcccgtgataaaaactagaaataatctatctgtgaaactgcattgtgatgtgtggatttggctcacagttaaacttttcttttgattcagcatgttggaaacactcttttggtataatctaagattggacatttctgaatccactgaggtttatgatgataamcaaatatcttgtgataagaactagatggaagctctctgtgaaactgctttgtgatgtatggattcagctcacaaagttaaacttgccttttgattcagaaggttggacacactctttttacaggatctgtgaagggacattaggtggtgtactgtgaattaaagtgaaaaacagaatattccatgataaaaactaga

SEQ ID NO: 392599 - DNA, 424 bp, Homo sapiens
agaatctatgaatggacatttctgaacccactaagtcccaaagtgaaaaccgaatatccagctataaaaagtagaatgacgctaactgtgaaactgctttgtgatgcctgtattcagctcacagagttacacctttcttttgattcagcaagttggraacacactctttgtggaatctaagaataaacacttctaaacccactgaaatgtttgttgaaaactgaatatcccatgaaaaaaatccacaaaaagctatgtgtgagactcctttgtgatgggtgaattcgactcacagagttaaaccttccatttgattcagtaggttggaaacactctttttgtagaatctataaatggacatttctgagccttctgaaacctatagtgagaactgaatatcccatgataaaaactagaaataatt

SEQ ID NO: 392600 - DNA, 542 bp, Homo sapiens
tagagtgcaaaatgatatatcccaatataaaaaatagaaacaatttatctgtgaaacagctttgctctgtgtgagtttatctaacacaggtaaacatgacttttgattcagcagtttggaaaatctcttttttttagagtcaacgaagaaacatttgggaggcctttgaagcctgtagtgaaaaactgaatatcccctgataaaaactaaaaagaagttatttgtaaaaccactttgtgatatttgcattcattgcaaaaaattgaagttttctattgatgcagcaggttagatacactctttctgtagaatacacaaaggcatattttggagcccatttagaccagtagtcaaaaacagaatatcgccagataaacaatagaaagaagctacctgtggtatcactttgtgacatatgcattcatctgacaaagttaaaacatgctttttattcagcaggttggaaacactctttttctgcaaaagaacatttgggagcccacwgagggatatagagaaatacagaatatccccagataaaa

SEQ ID NO: 392601 - DNA, 527 bp, Homo sapiens
tggtatcacacgcctgtagtcccagctactcaagggagctgaggcycaagaatcgcttgaacctgggaggcggaggttgcagtgagccaagatcgcaccactgcactttatgtcagtatgaacttctgcagtatttcatacacacacccagtacaccatacatacagctctgtgtggtgaaaataactagaaacagtgaccagcacgtagcagtgagcatccctattgacagattatcgtcctcacatacgatttcctactgcagggaaaacaggctacttggagaaattgctgactcaagatctagataggaagtgtacaagatgagccctgtatgtcttgtcatgccaaatagcaaataagctttcaaagacttttagggtcatgtttgaaggatacaggagtcaaattggaaaggttactagtggcgtaagatgggaaaatttcaaatttaatagggataataatagaaagaaatagaaactcatcagatgtgcctgtattaatgagttttaatgagtgcataa

SEQ ID NO: 392602 - DNA, 605 bp, Homo sapiens
tagcatggtactgacataaaaacagacacatagattaatgaaacagaataaagaacccagaaggaaatccacatacatacagggaactaattttcaacaacggtgccaagaatgttagrgaaaagacagtctcttcaataaatggtgctgggaaaactggataaccatatgcagaagaaggaaatttgatccctatctctcaccttacataaaaaacaaatcaaaatggattaaagatttaagtctaatacctcaaagtataaaactactaaaagaaaacattggtgaaaatctccaggacactggtctgcacaaaaatttcttaaaacacagccaaccaaagcaaaaatggacaaataagatgacacgaaattaaaaagcttctgcacagccaaggaaacaatcaacccacagtgaagagacagaatcaaaccacagtgaagagacaacccacagaatgggaggaaatatttgcaaactactcatctgacaagggattaataaccagaatatacaaggaattcaaacaactctataggaaacaatctgataatccaatttttaaaatgggctaaagatgtgaatagacctttctataaaaaaga

SEQ ID NO: 392603 - DNA, 605 bp, Homo sapiens
tagcatggtactgacataaaaacagacacatagattaatgaaacagaataaagaacccagaaggaaatccacatacatacagggaactaattttcaacaacggtgccaagaatgttagggaaaagacagtctcttcaataaatggtgctgggaaaactggataaccatatgcagaagaaggaaatttgatccctatctctcaccttacataaaaaacaaatcaaaatggattaaagatttaagtctaatacctcaaagtataaaactactaaaagaaaacattggtgaaaatctccaggacactggtctgcacaaaaatttcttaaaacacagccaaccaaagcaaaaatggacaaataagatgacacgaaattaaaaagcttctgcacagcmaaggaaacaatcaacccacagtgaagagacagaatcaaaccacagtgaagagacaacccacagaatgggaggaaatatttgcaaactactcatctgacaagggattaataaccagaatatacaaggaattcaaacaactctataggaaacaatctgataatccaatttttaaaatgggctaaagatgtgaatagacctttctataaaaaaga

SEQ ID NO: 392604 - DNA, 605 bp, Homo sapiens
tagcatggtactgacataaaaacagacacatagattaatgaaacagaataaagaacccagaaggaaatccacatacatacagggaactaattttcaacaacggtgccaagaatgttagggaaaagacagtctcttcaataaatggtgctgggaaaactggataaccatatgcagaagaaggaaatttgatccctatctctcaccttacataaaaaacaaatcaaaatggattaaagatttaagtctaatacctcaaagtataaaactactaaaagaaaacattggtgaaaatctccaggacactggtctgcacaaaaatttcttaaaacacagccaaccaaagcaaaaatggacaaataagatgacacgaaattaaaaagcttctgcacagccaaggaaacaatcaacccacagtgaagagacagaatcaaaccacagtgaagagacaacccacagaatgggaggaaatatttgcaaactactcatctgacaagggattaataaccagaatatacaaggaattcaaacaactctataggaaacaatctgataatccaatttttaaaatgggctaaagatktgaatagacctttctataaaaaaga

SEQ ID NO: 392605 - DNA, 570 bp, Homo sapiens
tggtgggaacttgtctgtgtgttgagctctcttgttgagttgggcatattgaacttgtggtgcttggaagacatctttgtggagatgtcaggtcagtttgaaggccacaaaagcttcaagtgtagattcagagatcatcagctgaatacataaataaaaccagctggtgtcattgatgagctaactcaggcagcatgtgtagagagggaagagacagcacctaagacagaatactgaggagcattgatatttacaggaaggatggaagagtcacaaagacagctgaaaagaagccaggaatgtagactaaaactaggagagcatgggatccctgaagtcaaagccagacagcatgtcaagagggcaagagtggacaacactgtcaaaagtggccagcaggttggatgtaatcacaggcagtgttgagttttgagagagctgttttcttgagatggtggaggcagaagccagattttggtgtggtggagagcaactaagcgatgaaaaagtrgttacagaatctgtttcaggatgcttaccagtgagtgggaagacaaggatttaggaaat

SEQ ID NO: 392606 - DNA, 570 bp, Homo sapiens
tggtgggaacttgtctgtgtgttgagctctcttgttgagttgggcatattgaacttgtggtgcttggaagacatctttgtggagatgtcaggtcagtttgaaggccacaaaagcttcaagtgtagattcagagatcatcagctgaatacataaataaaaccagctggtgtcattgatgagctaactcaggcagcatgtgtagagagggaagagacagcacctaagacagaatactgaggagcattgatatttacaggaaggatggaagagtcacaaagacagctgaaaagaagccaggaatgtagactaaaactaggagagcatgggatccctgaagtcaaagccagacagcatgtcaagagggcaagagtggacaacactgtcaaaagtggccagcaggttggatgtaatcacaggcagtgttgagttttgagagagctgttttcttgagatggtggaggcagaagccagattttggtgtggtggagagcaactaagcgatgaaaaagtggytacagaatctgtttcaggatgcttaccagtgagtgggaagacaaggatttaggaaat

SEQ ID NO: 392607 - DNA, 550 bp, Homo sapiens
tacctacttgccaaacacatctctgtgtcatttagaaatttgagataatataacacctacctagtaaataagttaatgcatttaacatgtatagaccagaacctggcatgtagtaaagggttaaaacatattttggcccttttaaagattgtaggaatcttcacttcattgagaatacttttgacagacttaaagagagaaatagccctacaaaaagagttaaggacttcaatatctcacttctaataatggatagaacatatgcacacaagatcaataaggatattgaggttgtgaacaccactataaccaactagacctaacagatacagagtcagcccttcatatccatgagttctgcattcgtggattcaaccaaccatggatcaaaaatatttggaggaagaaaattagatgggtgcatttgtaccgaacrtgtacagatgatttttcttgtcattgttccaaatgtaaaacctacttatatagcatttacatcacattaggtattgtaagtagagatcgtgacgttttgatcagccacagactg

SEQ ID NO: 392608 - DNA, 550 bp, Homo sapiens
tacctacttgccaaacacatctctgtgtcatttagaaatttgagataatataacacctacctagtaaataagttaatgcatttaacatgtatagaccagaacctggcatgtagtaaagggttaaaacatattttggcccttttaaagattgtaggaatcttcacttcattgagaatacttttgacagacttaaagagagaaatagccctacaaaaagagttaaggacttcaatatctcacttctaataatggatagaacatatgcacacaagatcaataaggatattgaggttgtgaacaccactataaccaactagacctaacagatacagagtcagcccttcatatccatgagttctgcattcgtggattcaaccaaccatggatcaaaaatatttggaggaagaaaattagatgggtgcatttgtaccgaacgtgtacagatgatttttcttgtcattgttccaaatgtaaaacctacttatatagcatttayatcacattaggtattgtaagtagagatcgtgacgttttgatcagccacagactg

SEQ ID NO: 392609 - DNA, 592 bp, Homo sapiens
ccacaccaatatctctaacagcatttcatagtaaaatttttttaaattttacatggcatatactttttgggtagcatgactagttttgaagcactagtttctctcctgttttgaaatttctcttggccaaacacatgcagatagataaatggtaaaataatgaaatgtattgacagtttgacacttcatctttgtaagaattcacactaccgataaactcacaaaagtttatccagyatatataaagatttttacaacatggttcaaaatagtaaaaataaggaaacaatctaaattcccataaacttaaaaaaaaaatcaacctaataaaaaatatagccattcaggccgggcacagtggctcgcgcctgtaatcccagcactgtggggggctgaggcagatggatcacctgaggttaggagttcaagaccagcctggccaacatggcaaaactctgtctctactaaaaatacaaaaattagccgggtgtggtggtgggaggtacttgggaggtactcagccagctacttgggagggtgaggcaggagaatcacttgaaccctgaaggaggaggctgcagtgagccaagat

SEQ ID NO: 392610 - DNA, 577 bp, Homo sapiens
cctccatcttctttgaggatgtattcccaatcaggttctccccgcttctgttcactctttagtgcctttaggataatggtctttgtgctatgctcagatttttagttgcttctgtgagggccgtagcccagaaggacctcattcwgtcactagccctcctcatacatttggaccattattaatttgaattttctaaaagatgtagccaatcctatttctaattaaggcaccctgaacttttaagttttatgaatacagaaaaccatatttttcaaacatggcctcaataatatctctcactccacattttcatctagaaccttgccactcacccatcaagaagattgtcccttcagcttgaacctggatggactcttgtgactgtctcaatcaatacagtatgatagaacttaggctggctatgacgtccaaggctaggtcattaaaatgtcatgcaattctgctttgttctctagagacacttgctctagagaacatacttatcatgttgttaagaaagtcaagcagcccacatgggaagaacaaaaaccccatgcccacagctctggctgaactc

SEQ ID NO: 392611 - DNA, 553 bp, Homo sapiens
tatgtaaactacaatattttagcttttctgtgtgagaaagtgatttttgtttgtttgtttgtttgagacakagtcttgctctgtcatccaggctggagtgcagtggcacgatcttggctttctgcagcctcagctcccgggttccagtgattctcttgcctcagcctcccaagtagctgggattacaggcgtgtgccaccatgcctggctaatttttgtatttttagtagagacgagatttcaccatgttagccaggctggtcttgaactcctgacctcaagtgatctgcccacctctacctcacagggtgctaggattacaggcatgagccactgcacccagccaaaagtgatttcataaaaattgttaaaaatctgtagctgctttgttaccttcattaactctttgtgattaaagttgcaagtttattgcagtaatgggaatgtgttagattaatgtttaggtgagttatattttaaaatctgtgtagtatatttatagttcacccagtaattagaacaccgtatcttaattccttattgttcctctagt

SEQ ID NO: 392612 - DNA, 553 bp, Homo sapiens
tatgtaaactacaatattttagcttttctgtgtgagaaagtgatttttgtttgtttgtttgtttgagacatagtcttgctctgtcayccaggctggagtgcagtggcacgatcttggctttctgcagcctcagctcccgggttccagtgattctcttgcctcagcctcccaagtagctgggattacaggcgtgtgccaccatgcctggctaatttttgtatttttagtagagacgagatttcaccatgttagccaggctggtcttgaactcctgacctcaagtgatctgcccacctctacctcacagggtgctaggattacaggcatgagccactgcacccagccaaaagtgatttcataaaaattgttaaaaatctgtagctgctttgttaccttcattaactctttgtgattaaagttgcaagtttattgcagtaatgggaatgtgttagattaatgtttaggtgagttatattttaaaatctgtgtagtatatttatagttcacccagtaattagaacaccgtatcttaattccttattgttcctctagt

SEQ ID NO: 392613 - DNA, 553 bp, Homo sapiens
tatgtaaactacaatattttagcttttctgtgtgagaaagtgatttttgtttgtttgtttgtttgagacatagtcttgctctgtcatccaggctggagtgcagtggcacgatcttggctttctgcagcctcagctcccgggttccagtgattctcttgcctcagcctcccaagtagctgggattacaggcgtgtgccaccatgcctggctaatttttgtatttttagtagagacgagatttcaccatgttagccaggctggtcttgaactmctgacctcaagtgatctgcccacctctacctcacagggtgctaggattacaggcatgagccactgcacccagccaaaagtgatttcataaaaattgttaaaaatctgtagctgctttgttaccttcattaactctttgtgattaaagttgcaagtttattgcagtaatgggaatgtgttagattaatgtttaggtgagttatattttaaaatctgtgtagtatatttatagttcacccagtaattagaacaccgtatcttaattccttattgttcctctagt

SEQ ID NO: 392614 - DNA, 553 bp, Homo sapiens
tatgtaaactacaatattttagcttttctgtgtgagaaagtgatttttgtttgtttgtttgtttgagacatagtcttgctctgtcatccaggctggagtgcagtggcacgatcttggctttctgcagcctcagctcccgggttccagtgattctcttgcctcagcctcccaagtagctgggattacaggcgtgtgccaccatgcctggctaatttttgtatttttagtagagacgagatttcaccatgttagccaggctggtcttgaactcctgacctcaagtgatctgcccacctctacctcacagggtgctaggattacaggcatgagccactgcacccagccaaaartgatttcataaaaattgttaaaaatctgtagctgctttgttaccttcattaactctttgtgattaaagttgcaagtttattgcagtaatgggaatgtgttagattaatgtttaggtgagttatattttaaaatctgtgtagtatatttatagttcacccagtaattagaacaccgtatcttaattccttattgttcctctagt

SEQ ID NO: 392615 - DNA, 562 bp, Homo sapiens
attcctaactggcattctagttcatctactttgcctcctataaataagactactgaatatacttgtatctctgattctgatcaataaggctgaaattamgagcttagtaaattcacccaaaaaaagtcttcattattcatttaactcttcatgtatttaactctttactgagcacctattcaataccagatattgtactagaaatgggaaacattctgggtagttacctactcaatcttcccatggcaacaatctcattacatgccttctttcgagcatcctcagttatcacaccactaataatgtataaatcaacaactggttcaccataaattttacataatagcttcctagaagataaattacaaagaaagaaaaaataaatataggtactaagtaaatgtatttctatccagctggtaagaacactattataaattaatgtttaactctttcatatgtttaaaatatgacaaaagtgaaaagcaaagtttggccactttgtttatctttttaaaagttcttccaaattagattttggaaaaagaaagagaatgtaaag

SEQ ID NO: 392616 - DNA, 562 bp, Homo sapiens
attcctaactggcattctagttcatctactttgcctcctataaataagactactgaatatacttgtatctctgattctgatcaataaggctgaaattaagagcttagtaaattcacccaamaaaagtcttcattattcatttaactcttcatgtatttaactctttactgagcacctattcaataccagatattgtactagaaatgggaaacattctgggtagttacctactcaatcttcccatggcaacaatctcattacatgccttctttcgagcatcctcagttatcacaccactaataatgtataaatcaacaactggttcaccataaattttacataatagcttcctagaagataaattacaaagaaagaaaaaataaatataggtactaagtaaatgtatttctatccagctggtaagaacactattataaattaatgtttaactctttcatatgtttaaaatatgacaaaagtgaaaagcaaagtttggccactttgtttatctttttaaaagttcttccaaattagattttggaaaaagaaagagaatgtaaag

SEQ ID NO: 392617 - DNA, 562 bp, Homo sapiens
attcctaactggcattctagttcatctactttgcctcctataaataagactactgaatatacttgtatctctgattctgatcaataaggctgaaattaagagcttagtaaattcacccaaaaaaagtcttcattattcatttaactcttcatgtatttaactctttactgagcacctattcaataccagatattgtactagaaatgggaaacattctgggtagttacctactcaatcttcccatrgcaacaatctcattacatgccttctttcgagcatcctcagttatcacaccactaataatgtataaatcaacaactggttcaccataaattttacataatagcttcctagaagataaattacaaagaaagaaaaaataaatataggtactaagtaaatgtatttctatccagctggtaagaacactattataaattaatgtttaactctttcatatgtttaaaatatgacaaaagtgaaaagcaaagtttggccactttgtttatctttttaaaagttcttccaaattagattttggaaaaagaaagagaatgtaaag

SEQ ID NO: 392618 - DNA, 562 bp, Homo sapiens
attcctaactggcattctagttcatctactttgcctcctataaataagactactgaatatacttgtatctctgattctgatcaataaggctgaaattaagagcttagtaaattcacccaaaaaaagtcttcattattcatttaactcttcatgtatttaactctttactgagcacctattcaataccagatattgtactagaaatgggaaacattctgggtagttacctactcaatcttcccatggcaacaatctcattacatgccttctttcgagcatcctcagttatcacaccactaataatgtataaatcaacaactggttcaccataaattttacataatagcttcctagaagataaattacaaagaaagaaaaaataaatataggtactaagtaaatgtatttctatccagctggtaagaacactattataaattaatgtttaactctttcatatgyttaaaatatgacaaaagtgaaaagcaaagtttggccactttgtttatctttttaaaagttcttccaaattagattttggaaaaagaaagagaatgtaaag

SEQ ID NO: 392619 - DNA, 584 bp, Homo sapiens
tgatcagcagtcattacaaaacttctaaatttcatacagcagtaaaacaaaatttttaaagactgrggcagagaacaacacagggttaccattgttgtattttgcaaagagctaatatcatcattattatcatcttcacctacaacaatggaacacagctttccaagattttagaagaatgaacatttgaatccaccccctcccccaaaaaaacaatgaaagaaaaaacttggaatacaggatagtccctacattgaaagaaattcatattatcattatgttttccttatttcaccttggatcagtaagaactttattagaaccagcatcagcctatagatcagcatttagaaaccactactacgtagaatatagtaattatcaccatatgtgtctcttcccatttctaatactgtaaaaatatcagaatgggcttttctcaggtgtatataataaacagaagccaactaattttagatatggatccttatgggtatgtatgtggtgtaaagaaacgatgagaagagtacatcaaactgttcactgagattctgtaggttgttagattacagctgatgttataa

SEQ ID NO: 392620 - DNA, 584 bp, Homo sapiens
tgatcagcagtcattacaaaacttctaaatttcatacagcagtaaaacaaaatttttaaagactggggcagagaacaacacagggttaccattgttgtattttgcaaagagctaatatcatcattattatcatcttcacctacaacaatggaacacagctttccaagatttyagaagaatgaacatttgaatccaccccctcccccaaaaaaacaatgaaagaaaaaacttggaatacaggatagtccctacattgaaagaaattcatattatcattatgttttccttatttcaccttggatcagtaagaactttattagaaccagcatcagcctatagatcagcatttagaaaccactactacgtagaatatagtaattatcaccatatgtgtctcttcccatttctaatactgtaaaaatatcagaatgggcttttctcaggtgtatataataaacagaagccaactaattttagatatggatccttatgggtatgtatgtggtgtaaagaaacgatgagaagagtacatcaaactgttcactgagattctgtaggttgttagattacagctgatgttataa

SEQ ID NO: 392621 - DNA, 553 bp, Homo sapiens
agataaagatttctaaaggcgaatttgtcgttattttcttactaatcttactaacttccagggctattactcagcctgctcgtcagtatcaccttttaccagttaaaatactgacagaattctacaccagttaagttctgcttccctgaagccccagaatgcctatcccattcaacccttcaccatgatacagcacagcagcggaccccccagaagtccacyccaaatctatgtgtgacatcagttctgaccaggccataccagctgctggatatttttaacatcactccagtcaatccttccctcaaatctacataaaaatgcaggcagttcttccattactagattttactacaactcctgtaatataaaacaaaatacaaagtgactgcataatcagcattaaacagaatttctagagggcatgttcaaaactcctgctgacttttgcttgtagcagaatacagataaatacagaataatataaacaagttacgtcacgttagaaatcaaccattacaaaacgtctttctatagaagaaagtagtttgca

SEQ ID NO: 392622 - DNA, 553 bp, Homo sapiens
agataaagatttctaaaggcgaatttgtcgttattttcttactaatcttactaacttccagggctattactcagcctgctcgtcagtatcaccttttaccagttaaaatactgacagaattctacaccagttaagttctgcttccctgaagccccagaatgcctatcccattcaacccttcaccatgatacagcacagcagcggaccccccagaagtccaccccaaatctatgtgtgacakcagttctgaccaggccataccagctgctggatatttttaacatcactccagtcaatccttccctcaaatctacataaaaatgcaggcagttcttccattactagattttactacaactcctgtaatataaaacaaaatacaaagtgactgcataatcagcattaaacagaatttctagagggcatgttcaaaactcctgctgacttttgcttgtagcagaatacagataaatacagaataatataaacaagttacgtcacgttagaaatcaaccattacaaaacgtctttctatagaagaaagtagtttgca

SEQ ID NO: 392623 - DNA, 480 bp, Homo sapiens
tccactaatattaaattagcattatggattgtaacctttatcataattatatcacaattgtgttgaatttgtcttttatgccttaaaaaatgtcaccacagacaaaatgttaccaagtaatatttaatgagctctatggaattttataattcctgaaawatatttctaaaatatttatatattccaatacataagactcttacctcagctcttttcagcatttcccatttattcaatattttcatggcaaacactttatctgcattttttagttttactacagcaacctagaaaagataaaggaaatataaattttaaaataatgacaaataattttttcagccatccattttcctttttcctctgtaaaaaaataaataccaattatcaattatgtcaatgcagttcaaattctaagatcctaaattaaataatgttgcagatgaaaaagttagtgaacatgtgccaaactaataactg

SEQ ID NO: 392624 - DNA, 568 bp, Homo sapiens
cttgggctacacagagtagggagaaagatgtaccttgcaaggtataccaggcattttgtattggaactttgagttctttttcttctagaattattcatttatctgttcattaaacagtaaacaatgaaccccaggcagtgttttaggaactcacatagaaacatactttgttcttttcagtttcagagatcttttttatttaacttagaattatttcacttttgaatctcttaatttcagcatctgtatttatttcaaaccttttgggaatraagaggcaacttgttatattggaaaggcttttggagcctgatagatctgagttttaatcctgtctttgccacttactaggtatttaatattcaggaatttatattatctttctaaacctttttttttttttctgtaaaataggaagttcttagtatggtacttggcttagatggctcccaataaaataatgcctgctaagattattattatcacacagaaagtttgtccttagtaccaaatcaattttttttgtttttgtttttgttttgccaagaagtacttttaaaactagagt

SEQ ID NO: 392625 - DNA, 568 bp, Homo sapiens
cttgggctacacagagtagggagaaagatgtaccttgcaaggtataccaggcattttgtattggaactttgagttctttttcttctagaattattcatttatctgttcattaaacagtaaacaatgaaccccaggcagtgttttaggaactcacatagaaacatactttgttcttttcagtttcagagatcttttttatttaacttagaattatttcacttttgaatctcttaatttcagcatctgtatttatttcaaaccttttgggaataaagaggcaacttgttatrttggaaaggcttttggagcctgatagatctgagttttaatcctgtctttgccacttactaggtatttaatattcaggaatttatattatctttctaaacctttttttttttttctgtaaaataggaagttcttagtatggtacttggcttagatggctcccaataaaataatgcctgctaagattattattatcacacagaaagtttgtccttagtaccaaatcaattttttttgtttttgtttttgttttgccaagaagtacttttaaaactagagt

SEQ ID NO: 392626 - DNA, 568 bp, Homo sapiens
cttgggctacacagagtagggagaaagatgtaccttgcaaggtataccaggcattttgtattggaactttgagttctttttcttctagaattattcatttatctgttcattaaacagtaaacaatgaaccccaggcagtgttttaggaactcacatagaaacatactttgttcttttcagtttcagagatcttttttatttaacttagaattatttcacttttgaatctcttaatttcagcatctgtatttatttcaaaccttttgggaataaagaggcaacttgttatattggaaaggcttttggagcctgatagatctgagttttaatcctgtctttgccacttactaggtatttaatattcaggaatttatattatctttctaaacctttttttttttttctgtaaaatrggaagttcttagtatggtacttggcttagatggctcccaataaaataatgcctgctaagattattattatcacacagaaagtttgtccttagtaccaaatcaattttttttgtttttgtttttgttttgccaagaagtacttttaaaactagagt

SEQ ID NO: 392627 - DNA, 585 bp, Homo sapiens
tgtttaggccttataatattaatgagggttaataatatgtaccttatggattttatgataactaaattaygtattagtttggaagctaaccgtgtctagttgtgagctaaaaaccaagtatttagtgtaagattcaggcttgttcgggaaatacaaggcagggatgcaatcaaatgtcaggaatcgccagaacaccgggaataaggaagctatcggaacacttccttttctcattgtctttgcctttctctatgcatctgctttgtttttctctttcattatgtggaactgattttctcttttgcttttagcgtcatagtaggatgtttgcctcaacacttgctgagtttgtatgttaattcttgtaatcatctgcagagactgactctgagttaggtttgaaattacttgtcccccagcttaggtcagatttccatattggttcagttaacactggccagttaaatggggcctcacaatatgcacttggcccacccctgagaactgagggggagattttcagaaaaagggagggaggcggcgtggcagatacctcagaaagtgtgtgccacaagtgaagtcatt

SEQ ID NO: 392628 - DNA, 585 bp, Homo sapiens
tgtttaggccttataatattaatgagggttaataatatgtaccttatggattttatgataactaaattatgtattagtttggaagctaaccgtgtctagttgtgagctaaaaaccaagtatttagtgtaagattcaggcttgttcgggaaatacaaggcrgggatgcaatcaaatgtcaggaatcgccagaacaccgggaataaggaagctatcggaacacttccttttctcattgtctttgcctttctctatgcatctgctttgtttttctctttcattatgtggaactgattttctcttttgcttttagcgtcatagtaggatgtttgcctcaacacttgctgagtttgtatgttaattcttgtaatcatctgcagagactgactctgagttaggtttgaaattacttgtcccccagcttaggtcagatttccatattggttcagttaacactggccagttaaatggggcctcacaatatgcacttggcccacccctgagaactgagggggagattttcagaaaaagggagggaggcggcgtggcagatacctcagaaagtgtgtgccacaagtgaagtcatt

SEQ ID NO: 392629 - DNA, 585 bp, Homo sapiens
tgtttaggccttataatattaatgagggttaataatatgtaccttatggattttatgataactaaattatgtattagtttggaagctaaccgtgtctagttgtgagctaaaaaccaagtatttagtgtaagattcaggcttgttcgggaaatacaaggcagggatgcaatcaaatgtcaggaatcgccagaacaccgggaataaggaagctatcggaacacttccttttctcattgtctttgcctttctctatgcatctgctttgtttttctctttcattatgtggaactgattttctcttttgcttttagmgtcatagtaggatgtttgcctcaacacttgctgagtttgtatgttaattcttgtaatcatctgcagagactgactctgagttaggtttgaaattacttgtcccccagcttaggtcagatttccatattggttcagttaacactggccagttaaatggggcctcacaatatgcacttggcccacccctgagaactgagggggagattttcagaaaaagggagggaggcggcgtggcagatacctcagaaagtgtgtgccacaagtgaagtcatt

SEQ ID NO: 392630 - DNA, 598 bp, Homo sapiens
tctggaatttgcatttcgaatgcattcaaaagcaatttagagaggcaaacatcagactacagggactctatctccaactttgagtccatcgggcttgtaatatgcaggactggagaatcactagctctctccgtggagttatttttccctgcagctctatcctctctggaatggtggccccaaattccagatgctaaagcctccctgatttcaatctctgtgttctcaactcagcaacaccaccatgctatttccctcttccaatgtcatacctggcactacccacttctcactttatatttcctatatacagttatcctagagcagtataattccatatacatatcttccattgtttatgtgactattgtcatatcctttacttctacatgtcataaacccacattacaaataattacayattacattatttttgcttttaacagttaggtaccttttatgtaaattaaataagaaagacagtatagacattttatttacccacttatttattgcatatgatatttttatgctataaatccaaatgtccaaacagtatcatttcctttgacatggaggacattctttagcattcagg

SEQ ID NO: 392631 - DNA, 419 bp, Homo sapiens
gcatccacaggaaaaacataataaatgtttgcctgaaatgcatccattaagacattaatgtaattaaatataaggggaaaatgattacttttattttccgtaagacattgtaggtatgctctcagctatcatgattttcctcctaacctctgactgctccttcttagttttctttattggctactcytaatctatccagtctctaacacctggagtcctcatggctcatcggtcctgcactctctttattacctactctgtttcgcaaagtgaattcatcttatcccatgatttgcatagcatctacatgttaataacacccaaaagtttgaattacagatcccagccttatagctggtaagaaaaatcacttccttgtaggccaaagagcctaaccaaatttggcaatcttgaggaac

SEQ ID NO: 392632 - DNA, 552 bp, Homo sapiens
cgggcggaattgtggcatgcacctgtaatcctagctcctcaggaggctgaggcaggagtatcgcttgaatccgggaggtggaggttgcagtgacccaagatcacgccactgcactccagcctggtgacgacagagcgagactccgtcttaaaaaaaaaaaaaaaagattcaaaaattattaactgatattacaattagaacytcccatctatttgaacttgggtatattatcctctagaccctagtttctccttctctctgaaactagaaatactaatacataattgtaaaaataaaacatttttaagtgaatgtttttcttctaaggaatgtatttttaaaaactgatggtccaaagaaggtcctcgtttgaactctaacacttataagcattcaggagacaagaaaatgcataataatatcccaacaaaaatggcatctcttaaacagagaaagaaaaaaactcaagaattccggggattaagtccgctttgttcactattttaaaccttgttactttgtaagttacttaaacaaatgaatatcgtatgt

SEQ ID NO: 392633 - DNA, 618 bp, Homo sapiens
ttatttagtaataaatgttcttgtgttttcgatcactgttagttgtattgttatggccaagcaaatgctcttaaaaaatattaagcatgaagtcaaaatataattctatccagtgaaagataatcttacctggaaattttgccaagtttatcactagtctataacttatctctgcatctgtaaattgaaactacacgtttgtggcactttttctcaattaggctatcagaataggactcataatcttcagattaactccatttaacaagcttgacattttatgttttgcataccaacttgtccaagacacacaacaaactatgaagataggtrgcattactagcttcattttaaatgaggaaacaaaataatttaagttatgtgacctaaatagtccatttatttacgtttttaaactaatttctgacaattttgttggcccttaaatactcaaataaatgaaggaactgggatttacaaccagatcatctagcatacagtctttagcatgagatcagaaagagcaggaaaacattggtttaaagttgttggggaaggcataaagaagtaaagctttaaatgtctatagaaggatattacaagattaggaaagaaaag

SEQ ID NO: 392634 - DNA, 583 bp, Homo sapiens
cttttggctactgcaataatacttcaataaacacttgtgtaaagcatctattagagttcctatgttcaaatattttgggtatatacctaggagtggaatggctggatcatgtggtagttctgtttgactttttgaggaaccaccacattgtttcaaaagtggctacattattttatactttctttagcaacatataagggttccaattctctaccttcttgttaagacctactttctttttctttctttttaattttagctatcccagtacatatgaagtggtatctcattttggttttaatttgaattctcctagtgattagtaatgttgagcattttttaatttgcttattgaccatttatatatatcttctctggagaaatgtctattcaagtcttttgcccattttttgattgagttgtctttctgttgttgagctgtagttcttcatayaatctggatattaaattgttatcacatatatgatttgcaaatattttcttgcatcccttaagctgtctttttactttcttaataatgtcctttgataccatacacattaagttttaattttgataaagc

SEQ ID NO: 392635 - DNA, 621 bp, Homo sapiens
taatgaagaagaaggaggacaaggactagaaaaagaggcaggagtaaccaccttagggctgaaaaataagtttaccccataaatgtgttcaactataatttgtcagtttacaaatggaaaaataaaaatttttaaaaaccacccactttacctgcctggaaaaaaaaaaaagaaaaaaaaaaagaagttggaaattaaacactggaaaaacaaaaacatattactgagggtgtaaacaggattcaagttttctaaatttcttaggttttttaaatttttaattattatttttaatggtggtgaaaatggacataaaatttactatcttaatgatttttagaagtgtgcagttcaatggcataagtaccttcacactgttgtgcaaccagtccccaccatccttctctaaaattttttcatcttggaaaattttaactctgtacccatcagtaattcccccattyccccttcccctagaccctggaagccaccattgtactttgtttctttgaacttgattactatagttatctcacataagtggaatcataaaatatttgtacttttctaactggcttatttcattaacataatgtcctaaggtttcatccatgttgtagc

SEQ ID NO: 392636 - DNA, 615 bp, Homo sapiens
cagataaattattcttcaaggtaatttatctaaatttccccctactcaagtactcttttaatttaaatattaataaggagactgcagggcacttactggcaatatctctttcaatccacaacgcataaattcatttctgatgtgaagcctgaaatccaaatcatcaggagatgtaaccagggcattgatgagctgcatacaagctacctacaagagatcaaacagtgagacagactgggtttccaacattaaagaaagagtaacaaacgtaaacttcaaggttttgttccagcattattaaatatctttcctattaaaacaatttgtaagcaaaatatttcagtcagttataaactacagaagaaataaagtttcagtggcgttttttatttctcatttatttgagggttactgaggtgaaaggaagatggaaaaatattagccrttactactgctccataaaaaaatagaaaaaaaaaaaaaaaaacacttgtaaccaaaagctaagttcttgtccaataatatcactctacacacatacaacagaaattgaacatatccaatatacctattggatagataacacttacctaaaataggataataaaatagttt

SEQ ID NO: 392637 - DNA, 548 bp, Homo sapiens
atttaaatagaaatatcttattgtctcttattctatgaatgagctctagggcattggttctcgggttgtgtctctggactcctgagggccctaattgtcaaaactgttttcataatagcacaaaaacattattcgccttttttattgggttggtattttgcactggtggtgcagaacaatggtgagtaaaactcctggcactttgttatgaatcaaggcagtggcactaaactgtgggagtagtcattatcatctttactgtcaataaaacaacaaaaactgccattttttacttaagaatgcctttgataaggtcctaaaaatgttaactttattaaagcctgacccttgtatacacactgttttaatattctgtgttaacaaatgggatttatacatacagtacttctgctgcatatgaccagtgcctgatgttacaaattytccataggcaaagatctattaaaagagttcaataagaaaatatttgtgtaattgagttgcaagcagaattgcctgtcccccccgaagccttttttttttttttt

SEQ ID NO: 392638 - DNA, 524 bp, Homo sapiens
tgttgactaagtatcttatatccagccaaactatctttcaaaattgaaggcaaaacaaaggcattcccagataaacagaaacaaaaaattcattgctagcagacctacctttcaagaaatactaaaggaggtccctcagactgaaaacaggtgagggctaagaataattctaatccacacaaggaaacagagtgcaccagtgaaggtttgtgtagcatcgagtaattatgtagtaattacgtcagtaattctaaaagataagataattgcatgtttcttctctatactgattaagcaattgtataaaacaacatatattattgtattgttgaatttataacttacagaaatgtaatatgtttaccaataacaackcaaaggaagttagggggaatacaaaattatattaaagaaatgacacaagatggtaattcaaatccacaggaagacatgaagagacacaaaagtggtaaataagaaagttgctaaatatatactttttctccattcttttctcagcctct

SEQ ID NO: 392639 - DNA, 405 bp, Homo sapiens
ttgtgaaggtttcaggttcttaggccacatttctaagtctgggtttatgcccaaggctacttgttcttcccctccctgcagcaggttctgtgaagcggctctcaaggccatggcctggagatggaagatcctgctggaaatggaaaatcctgctggaaatggaaaatcctgctggaaatgggcatcagagggtcccttcttctctcccacactgatgccttttgcctgctcagaagtctctgtcacatacagacaagtggtgttctcacgctcagaaaggcaggtatggaggcatctgcctgtctccctccagatgaagaagaggtgaggtgtctccgctgagargggtgtgtcaaggctgaaaacagcagcgaggtgaatgggaaagccagtccattgaggaag

SEQ ID NO: 392640 - DNA, 553 bp, Homo sapiens
cacaatttcaagatatattttccgttcagtgttttttctatgcattgaaatatttttatattagtttatcttaaaaagcacatggatataatcttgtaaaaattttcaaatagcacagaaccatttctagtagaaagaaaaaaaattcccttcatccttgtggcctacccataatcatcgccctatcttttatttgcctagcagaaactggattttgtacagtagactgccaacccacacctgcctctggaggtttatcagattggccactcaaccctggtgagggtggggctgctgcccttgccagtgactggctcagggtgagcatgcrgaccctgttctagccaataaaatgtgagggtgggccactgggaggcttctgggaaagtttccctgctctcaaaagagacaaggaaggaaacagtcctttccttccactagatactgtgatatgtggccataatgcctgcaaactgggcagccatcagccaccagaggggctgggccaggtctcagctgacctgcggaagaatgcaaaggtgaagaagggcag

SEQ ID NO: 392641 - DNA, 510 bp, Homo sapiens
ggagaacatcttaaaaactgctggcctgggggtctcatacttaagcttaaattgatgtattttattagttgctggctcccagcttagtcctgagaatatgttttccatcccttcaagaacatggaatgacaagagaggaggaagggataaagaatgagaaggaagaagaatatttctgtttttctctctctacaggtagattccttgtactttcatgctaatgaacccaagtaaggctgtctggatgctgaaggctctcactgccccggagtcagcccagaaccatgaaggcaggctgtggctggcagaaaggactgccactccctctcaatacaccctgcttatttctcattaactggatctgaaggcagccraaatatcgattaacttaggggttaatttgtgtggttctgattagtcaagattttcttgattgaatacaaaaggctttcattttaaaaaatcaaaaattataaattttaaagaatatttagtgcaaattaagaacag

SEQ ID NO: 392642 - DNA, 510 bp, Homo sapiens
ggagaacatcttaaaaactgctggcctgggggtctcatacttaagcttaaattgatgtattttattagttgctggctcccagcttagtcctgagaatatgttttccatcccttcaagaacatggaatgacaagagaggaggaagggataaagaatgagaaggaagaagaatatttctgtttttctctctctacaggtagattccttgtactttcatgctaatgaacccaagtaaggctgtctggatgctgaaggctctcactgccccggagtcagcccagaaccatgaaggcaggctgtggctggcagaaaggactgccactccctctcaatacaccctgcttatttctcattaactggatctgaaggcagccaaaatatcgattaacttaggggttaatttgtgtggttctgrttagtcaagattttcttgattgaatacaaaaggctttcattttaaaaaatcaaaaattataaattttaaagaatatttagtgcaaattaagaacag

SEQ ID NO: 392643 - DNA, 542 bp, Homo sapiens
agcaagacaagctgggtgacctgaaaggargagacagagggatgctgatgtggcaggacagccagagtgggcctaaaagagacgctgaagacaggtcctcaagaggagacatggccctgcatgccacctggggctgcatggagattcctaggctgctgtaggctcccagctgctctggaatggagtcgggatgttgttggagaacagcctggcaggggtgggggccaagcggtctggacacctaccagaaataaacagactgcaatgaaacagatcaagaatcccttccaattaggacagttgtgtagatttaaaaaaaattcttttttttttcctgaaataggaaagggaacaaaatgcaaaaatctgttcttttcttccaaaagactttaagtagcaaataagcaaggtgtcaggactgggaaagccttctgtctaggctctgagtaaatgaacttgccttttggtatagagcttgagttaaaattaaaaagatacatatgcatatcttgcaacaagaatgattctacatgcaacgcctt

SEQ ID NO: 392644 - DNA, 584 bp, Homo sapiens
tctgcttccacagctgatgaaatttctcagagcagcttmccaagtgtcctcgtggtctgaaaacagagcagaggtcttcactgggctcttctggataaaggcacttacagtaccctagtaacaaagacaccatccatgtaaaggaccgccccgcccacctccacgtctgcccccaactccagtggagtcttcaaagtctgcagaaatatctgcagtccttataccaattatctgtgttaccccgttcttatgtaaatttcaatccagttttaaattcaaatttagattacgtattttgaagacctagaatagtgcctggctcatggttgacactcaatgtgtctaacttctctctctctcctaatttcaactgtaattgactctttgaaaacctgaccccaaatagtttaatgtatttcccatatagtcacagatgcagcccagcagagggctgccagcaaccttaggaagggcttattgaagcattaggatgacaccccaaatctttacctctactagaaaaacagctgtgtcaagtttagtctaggaatgttggcaggtattagaaacagcctgagcaatgc

SEQ ID NO: 392645 - DNA, 584 bp, Homo sapiens
tctgcttccacagctgatgaaatttctcagagcagcttcccaartgtcctcgtggtctgaaaacagagcagaggtcttcactgggctcttctggataaaggcacttacagtaccctagtaacaaagacaccatccatgtaaaggaccgccccgcccacctccacgtctgcccccaactccagtggagtcttcaaagtctgcagaaatatctgcagtccttataccaattatctgtgttaccccgttcttatgtaaatttcaatccagttttaaattcaaatttagattacgtattttgaagacctagaatagtgcctggctcatggttgacactcaatgtgtctaacttctctctctctcctaatttcaactgtaattgactctttgaaaacctgaccccaaatagtttaatgtatttcccatatagtcacagatgcagcccagcagagggctgccagcaaccttaggaagggcttattgaagcattaggatgacaccccaaatctttacctctactagaaaaacagctgtgtcaagtttagtctaggaatgttggcaggtattagaaacagcctgagcaatgc

SEQ ID NO: 392646 - DNA, 584 bp, Homo sapiens
tctgcttccacagctgatgaaatttctcagagcagcttcccaagtgtcctcgtggtctgaaaacagagcagaggtcttcactgggctcttctggataaaggcacttacagtaccctagtaacaaagacaccatccatgtaaaggaccgmcccgcccacctccacgtctgcccccaactccagtggagtcttcaaagtctgcagaaatatctgcagtccttataccaattatctgtgttaccccgttcttatgtaaatttcaatccagttttaaattcaaatttagattacgtattttgaagacctagaatagtgcctggctcatggttgacactcaatgtgtctaacttctctctctctcctaatttcaactgtaattgactctttgaaaacctgaccccaaatagtttaatgtatttcccatatagtcacagatgcagcccagcagagggctgccagcaaccttaggaagggcttattgaagcattaggatgacaccccaaatctttacctctactagaaaaacagctgtgtcaagtttagtctaggaatgttggcaggtattagaaacagcctgagcaatgc

SEQ ID NO: 392647 - DNA, 584 bp, Homo sapiens
tctgcttccacagctgatgaaatttctcagagcagcttcccaagtgtcctcgtggtctgaaaacagagcagaggtcttcactgggctcttctggataaaggcacttacagtaccctagtaacaaagacaccatccatgtaaaggaccgccccgcccacctccacrtctgcccccaactccagtggagtcttcaaagtctgcagaaatatctgcagtccttataccaattatctgtgttaccccgttcttatgtaaatttcaatccagttttaaattcaaatttagattacgtattttgaagacctagaatagtgcctggctcatggttgacactcaatgtgtctaacttctctctctctcctaatttcaactgtaattgactctttgaaaacctgaccccaaatagtttaatgtatttcccatatagtcacagatgcagcccagcagagggctgccagcaaccttaggaagggcttattgaagcattaggatgacaccccaaatctttacctctactagaaaaacagctgtgtcaagtttagtctaggaatgttggcaggtattagaaacagcctgagcaatgc

SEQ ID NO: 392648 - DNA, 628 bp, Homo sapiens
tgttcatgttgttttattgttctcgttcctattttagtaatttttctccatccaatagcattttcctttctatctctctggagatctacacagatctgaggacagaattgatcaactctggttaataaaataccaatcttgaatgcaatattttgagtcaggaaaactttgaactggccctaactgaagatttatgttccagtcatctatgaaggaaattgcaaagcaaatcaatgaagacctaaaatgttgcttcagttgtagttgtcctagatcagcgatcaatcacaccatcaattgtcagtgatttattgagcacttatttatcccatcactatcctgggagatgcaatgaaacaaaggtggtataaggtgcttaaaatctagatgggaaggaagatgaattgtcacaaaatagaaaacatatcagtacttaaagtagaagttaatgtagccwattgccgtatgcaaagattcatggaagaggaaagtcgatactcaaactggtccttaaagagtgtacacaaattggaaaagcccagagaaaaatgaatgggtatcaggagttggatatgagaagccgaagcctgaggtctgcagaaacctggaatatgtggcggccagtggg

SEQ ID NO: 392649 - DNA, 614 bp, Homo sapiens
tggaggtctgatcagcccgagggaagaaaccctgctacagatggaagaattctaggtattcagttaagattgcagaaaagctatgctccaaagtaggggctactgcagcctgagctaccaaagcctaaaaccaacctgttttgccagtaaattaacttcctgccaaaataagactcaacattctttcaaggaaaaaaatttaatttaggccctcaacaatattrcattcacaatgtagagcacacaatagaaattcactacaaaaataaagaagtaggaaatatgatctaatactggagaaaacaattgatagaaacagatactgagatgacacagataatggaattaacagacaagaaatcttaaagggctgttacctatttattcaaggatttataaagaaaatgtggatataagaaacagaactctcaacagataagttaatattttcattgtatgtaattatagtctcagaaggaaaggcaagagattttacagcaaaacgtattgaaaatatactgacagaattttttccagatttgatggaatatgtcaaactaacaagttcagattcaacggattcaacaaatcctgagtattataaacaaaaaaag

SEQ ID NO: 392650 - DNA, 614 bp, Homo sapiens
tggaggtctgatcagcccgagggaagaaaccctgctacagatggaagaattctaggtattcagttaagattgcagaaaagctatgctccaaagtaggggctactgcagcctgagctaccaaagcctaaaaccaacctgttttgccagtaaattaacttcctgccaaaataagactcaacattctttcaaggaaaaaaatttaatttaggccctcaacaatattgcattcacaatgtagagcacacaatagaaattcactacaaaaataaagaagtaggaaatatgatctaatactggagaaaacaattgatagaaacagatactgagatgacacagataatggaattaacagacaagaaatcttaaagggctgttacmtatttattcaaggatttataaagaaaatgtggatataagaaacagaactctcaacagataagttaatattttcattgtatgtaattatagtctcagaaggaaaggcaagagattttacagcaaaacgtattgaaaatatactgacagaattttttccagatttgatggaatatgtcaaactaacaagttcagattcaacggattcaacaaatcctgagtattataaacaaaaaaag

SEQ ID NO: 392651 - DNA, 614 bp, Homo sapiens
tggaggtctgatcagcccgagggaagaaaccctgctacagatggaagaattctaggtattcagttaagattgcagaaaagctatgctccaaagtaggggctactgcagcctgagctaccaaagcctaaaaccaacctgttttgccagtaaattaacttcctgccaaaataagactcaacattctttcaaggaaaaaaatttaatttaggccctcaacaatattgcattcacaatgtagagcacacaatagaaattcactacaaaaataaagaagtaggaaatatgatctaatactggagaaaacaattgatagaaacagatactgagatgacacagataatggaattaacagacaagaaatcttaaagggctgttacctatttattcaaggatttataaagaaaatgtggatataagaaacagaactctcaacagataagttaatattttcattgtatgtaattayagtctcagaaggaaaggcaagagattttacagcaaaacgtattgaaaatatactgacagaattttttccagatttgatggaatatgtcaaactaacaagttcagattcaacggattcaacaaatcctgagtattataaacaaaaaaag

SEQ ID NO: 392652 - DNA, 432 bp, Homo sapiens
gtatagaggagaacaataagagtaactgaaattggaaagacttatttaaagtgctaaagaaaaaaaaagcaatctagaattcttccagcaaatataactttaagaaataaagtgaaagagattttcaaactaaacagaagctgaaaaaatttgttgatatactgtactaccagaaatgttgaagaaaattcatttgacttaagagaaatgaaaaaaaaataaaaatatacaatgyggttggtagaatgtttagaattaaaatgtaggaaaaatagcacaaagatgggaaggataaaaatggaagaatattattattgaatttttacattttacaggaagtataatgctaagtaaagattgactgggataagttaaggatatatactttaatctctagtgaaaccactataaaacccaaagtcaacccaaaga

SEQ ID NO: 392653 - DNA, 432 bp, Homo sapiens
gtatagaggagaacaataagagtaactgaaattggaaagacttatttaaagtgctaaagaaaaaaaaagcaatctagaattcttccagcaaatataactttaagaaataaagtgaaagagattttcaaactaaacagaagctgaaaaaatttgttgatatactgtactaccagaaatgttgaagaaaattcatttgacttaagagaaatgaaaaaaaaataaaaatatacaatgcggttggtagaatgtttagaattaaaatgtaggaaaaatagcacaaagatgggaaggataaaaatggaagaatattattattgaatttttacattttacaggaagtataatgctaagtaaagattgactgggataagttaargatatatactttaatctctagtgaaaccactataaaacccaaagtcaacccaaaga

SEQ ID NO: 392654 - DNA, 595 bp, Homo sapiens
tgatggaggaggtgaggcctttgggaggtgataaagtcatgaggttcttcatcccttcctccatgtgaggacacagggagaaggtgccagctatgcaccaggaagcaggatctcgtcagacacagaatctgccagcactttgattttggacttcccagcctctacaactatgagaaataagtttctgtttgtaagccaaccagtgtgtggcattctgttatataacaatcataacagactaagacaatcactgattgacaatcaccatagattkgttgtgcctgttctagaacttcatataaatgaaatcacatagaatatactcttttgtatctcgcttcttttgttcaccataatgctttgagatttatgcattttgttgagtctatttgtagcttattccttttatcactgagtactattgctttgtatgaatattgtagatatcattcattcatttgatggacatttcaattgtttctagtttttgactataatggataaaactggtatgaacattctgtgcttgtctttttttgtgtgtggacatatgttttttatttctcttgttataatacctagaaatggcatttgc

SEQ ID NO: 392655 - DNA, 524 bp, Homo sapiens
tgttgactaagtatcttatatccagccaaactatctttcaaaattgaaggyaaaacaaaggcattcccagataaacagaaacaaaaaattcattgctagcagacctacctttcaagaaatactaaaggaggtccctcagactgaaaacaggtgagggctaagaataattctaatccacacaaggaaacagagtgcaccagtgaaggtttgtgtagcatcgagtaattatgtagtaattacgtcagtaattctaaaagataagataattgcatgtttcttctctatactgattaagcaattgtataaaacaacatatattattgtattgttgaatttataacttacagaaatgtaatatgtttaccaataacaacgcaaaggaagttagggggaatacaaaattatattaaagaaatgacacaagatggtaattcaaatccacaggaagacatgaagagacacaaaagtggtaaataagaaagttgctaaatatatactttttctccattcttttctcagcctct

SEQ ID NO: 392656 - DNA, 432 bp, Homo sapiens
cttcactgccaggcccagctctgtcactctggagttgggggagcaacagaggtgaatacgggaccaccccagcctctcaaatccactagctctgtgtccaccatgcttctccaaacccgagggagggaccctaacatccacctccctggctgtgtgaccttaaacaagttgtggctcctctccagacctcacacttctcatctgtgaaatgggaatgaggttcccaccagctttatctcatgggaaarcactggaggacttgtccaggtggcaggagtaaggggcacaagttgtttttttgtggttttcttttgagacagagtttcgctgtgtcatccaggccggaatacagcgatgtgatcttggctcactgcaacctccacatcctgggttcaagcgattctcctgtctcagcctccctcgtagctggga

SEQ ID NO: 392657 - DNA, 432 bp, Homo sapiens
cttcactgccaggcccagctctgtcactctggagttgggggagcaacagaggtgaatacgggaccaccccagcctctcaaatccactagctctgtgtccaccatgcttctccaaacccgagggagggaccctaacatccacctccctggctgtgtgaccttaaacaagttgtggctcctctccagacctcacacttctcatctgtgaaatgggaatgaggttcccaccagctttatctcatgggaaaacactggaggacttrtccaggtggcaggagtaaggggcacaagttgtttttttgtggttttcttttgagacagagtttcgctgtgtcatccaggccggaatacagcgatgtgatcttggctcactgcaacctccacatcctgggttcaagcgattctcctgtctcagcctccctcgtagctggga

SEQ ID NO: 392658 - DNA, 432 bp, Homo sapiens
cttcactgccaggcccagctctgtcactctggagttgggggagcaacagaggtgaatacgggaccaccccagcctctcaaatccactagctctgtgtccaccatgcttctccaaacccgagggagggaccctaacatccacctccctggctgtgtgaccttaaacaagttgtggctcctctccagacctcacacttctcatctgtgaaatgggaatgaggttcccaccagctttatctcatgggaaaacactggaggacttgtccaggtggcaggagtaaggggcacaagttgtttttttgtggttttcttttgagacagagtttcgctgtgtcrtccaggccggaatacagcgatgtgatcttggctcactgcaacctccacatcctgggttcaagcgattctcctgtctcagcctccctcgtagctggga

SEQ ID NO: 392659 - DNA, 432 bp, Homo sapiens
cttcactgccaggcccagctctgtcactctggagttgggggagcaacagaggtgaatacgggaccaccccagcctctcaaatccactagctctgtgtccaccatgcttctccaaacccgagggagggaccctaacatccacctccctggctgtgtgaccttaaacaagttgtggctcctctccagacctcacacttctcatctgtgaaatgggaatgaggttcccaccagctttatctcatgggaaaacactggaggacttgtccaggtggcaggagtaaggggcacaagttgtttttttgtggttttcttttgagacagagtttcgctgtgtcatccaggccggaatacagygatgtgatcttggctcactgcaacctccacatcctgggttcaagcgattctcctgtctcagcctccctcgtagctggga

SEQ ID NO: 392660 - DNA, 527 bp, Homo sapiens
tcgctctgggaaaaccaccttcgtgatcatggtatctcccctgccaggtaagtatgaraccttgtgcctctgccccgacacagcctcatacgcctcactctttacacacacggtcacttgccccgcgcactcccgagccctttccagccctgacacacagctgggattctcacttccgatcagcggtcctgaacccgctcccagggcacgggaactcccttcgtggcgacgcagcaagtggcgaagcagcagcctctgcgctgcctcatctacatagaagtcgccctgtccgtgatgtcaccgacagtgccttgcccagtccccgtctgcctttctgccactcaaccgaccaatctgctgccagagtcgccaaggggaagtgacgtctgcctctccctttttccctcccgcccctgcgtctgttctctcccaaagaagctggtccttagcctgtgttaaggagcaacctttcggtggccagatggagccggggcatccttcttcaaataatggcttttaattcgcag
